United States Patent Application Publication US 2020/0163878 A1 - sequence listing, part 48

SEQ ID NO: 181613 - RNA, 1410 nt, Artificial Sequence
  derived and/or modified CDS sequence (opt4) from neuraminidase__InfluenzaA__AEX35310
augaaccccaaccagaagaucaucaccaucggcagcgugagccugaccaucagcaccaucugcuucuucaugcagaucgccauccugaucaccaccgugacccugcacuucaagcaguacgaguucaacagcccccccaacaaccaggugaugcugugcgagcccaccaucaucgagagaaacaucaccgagaucguguaccugaccaacaccaccaucgagaaggagaucugccccaagcuggccgaguacagaaacuggagcaagccccagugcaacaucaccggcuucgcccccuucagcaaggacaacagcaucagacugagcgccggcggcgacaucugggugaccagagagcccuacgugagcugcgaccccgacaagugcuaccaguucgcccugggccagggcaccacccugaacaacgugcacagcaacgacaccgugcacgacagaacccccuacagaacccugcugaugaacgagcugggcgugcccuuccaccugggcaccaagcaggugugcaucgccuggagcagcagcagcugccacgacggcaaggccuggcugcacgugugcgugaccggcgacgacgagaacgccaccgccagcuucaucuacaacggcagacugguggacagcaucgugagcuggagcaagaagauccugagaacccaggagagcgagugcgugugcaucaacggcaccugcaccguggugaugaccgacggcagcgccagcggcaaggccgacaccaagauccuguucaucgaggagggcaagaucgugcacaccagcacccugagcggcagcgcccagcacguggaggagugcagcugcuaccccagauaccccggcgugagaugcgugugcagagacaacuggaagggcagcaacagacccaucguggacaucaacaucaaggacuacagcaucgugagcagcuacgugugcagcggccuggugggcgacacccccagaaagaacgacagcagcagcagcagccacugccuggaccccaacaacgaggagggcggccacggcgugaagggcugggccuucgacgacggcgacgacguguggaugggcagaaccaucagcgagaagcugagaagcggcuacgagaccuucaaggugaucgagggcuggagcaaccccaacagcaagcugcagaucaacagacaggugaucguggacagaggcaacagaagcggcuacagcggcaucuucagcguggagggcaagagcugcaucaacagaugcuucuacguggagcugaucagaggcagaaaccaggagaccgaggugcuguggaccagcaacagcaucgugguguucugcggcaccagcggcaccuacggcaccggcagcuggcccgacggcgccgacaucaaccugaugcccaucuga

SEQ ID NO: 181614 - RNA, 1410 nt, Artificial Sequence; identical to SEQ ID NO: 174774
  derived and/or modified CDS sequence (opt4) from neuraminidase__InfluenzaA__AEX35321

SEQ ID NO: 181615 - RNA, 1410 nt, Artificial Sequence; identical to SEQ ID NO: 175989
  derived and/or modified CDS sequence (opt4) from neuraminidase__InfluenzaA__AEX35332

SEQ ID NO: 181616 - RNA, 1410 nt, Artificial Sequence; identical to SEQ ID NO: 175989
  derived and/or modified CDS sequence (opt4) from neuraminidase__InfluenzaA__AEX35343

SEQ ID NO: 181617 - RNA, 1410 nt, Artificial Sequence
  derived and/or modified CDS sequence (opt4) from neuraminidase__InfluenzaA__AEX35354
augaaccccaaccagaagaucaucaccaucggcagcgugagccugaccaucagcaccaucugcuucuucaugcagaucgccauccugaucaccaccgugacccugcacuucaagcaguacgaguucaacagcccccccaacaaccaggugaugcugugcgagcccaccaucaucgagagaaacaucaccgagaucguguaccugaccaacaccaccaucgagaaggagaucugccccaagcuggccgaguacagaaacuggagcaagccccagugcgacaucaccggcuucgcccccuucagcaaggacaacagcaucagacugagcgccggcggcgacaucugggugaccagagagcccuacgugagcugcgaccccgacaagugcuaccaguucgcccugggccagggcaccacccugaacaacgugcacagcaacgacaccgugcacgacagaacccccuacagaacccugcugaugaacgagcugggcgugcccuuccaccugggcaccaagcaggugugcaucgccuggagcagcagcagcugccacgacggcaaggccuggcugcacgugugcgugaccggcgacgacaagaacgccaccgccagcuucaucuacaacggcagacugguggacagcaucgugagcuggagcaagaagauccugagaacccaggagagcgagugcgugugcaucaacggcaccugcaccguggugaugaccgacggcagcaccagcggcaaggccgacaccaagauccuguucaucgaggagggcaagaucgugcacaccagcacccugagcggcagcgcccagcacguggaggagugcagcugcuaccccagauaccccggcgugagaugcgugugcagagacaacuggaagggcagcaacagacccaucguggacaucaacaucaaggacuacagcaucgugagcagcuacgugugcagcggccuggugggcgacacccccagaaagaacgacagcagcagcagcagccacugccuggaccccaacaacgaggagggcggccacggcgugaagggcugggccuucgacgacggcaacgacguguggaugggcagaaccaucagcgagaagcugagaagcggcuacgagaccuucaaggugaucgagggcuggagcaaccccaacagcaagcugcagaucaacagacaggugaucguggacagaggcaacagaagcggcuacagcggcaucuucagcguggagggcaagagcugcaucaacagaugcuucuacguggagcugaucagaggcagaaaggaggagaccgaggugcuguggaccagcaacagcaucgugguguucugcggcaccagcggcaccuacggcaccggcagcuggcccgacggcgccgacaucaaccugaugcccaucuga

SEQ ID NO: 181618 - RNA, 1410 nt, Artificial Sequence; identical to SEQ ID NO: 174774
  derived and/or modified CDS sequence (opt4) from neuraminidase__InfluenzaA__AEX35365

SEQ ID NO: 181619 - RNA, 1410 nt, Artificial Sequence
  derived and/or modified CDS sequence (opt4) from neuraminidase__InfluenzaA__AEX35376
augaaccccaaccagaagaucaucaccaucggcagcgugagccugaccaucagcaccaucugcuucuucaugcagaucgccauccugaucaccaccgugacccugcacuucaagcaguacgaguucaacagcccccccaacaaccaggugaugcugugcgagcccaccaucaucgagagaaacaucaccgagaucguguaccugaccaacaccaccaucgagaaggagaucugccccaagcuggccgaguacagaaacuggagcaagccccagugcgacaucaccggcuucgcccccuucagcaaggacaacagcaucagacugagcgccggcggcgacaucugggugaccagagagcccuacgugagcugcgaccccgacaagugcuaccaguucgcccugggccagggcaccacccugaacaacgugcacagcaacgacaccgugcacgagagaacccccuacagaacccugcugaugaacgagcugggcgugcccuuccaccugggcaccaagcaggugugcaucgccuggagcagcagcagcugccacgacggcaaggccuggcugcacgugugcgugaccggcgacgacaagaacgccaccgccagcuucaucuacaacggcagacugguggacagcaucgugagcuggagcaagaagauccugagaacccaggagagcgagugcgugugcaucaacggcaccugcaccguggugaugaccgacggcagcgccagcggcaaggccgacaccaagauccuguucaucgaggagggcaagaucgugcacaccagcacccugagcggcagcgcccagcacguggaggagugcagcugcuaccccagauaccccggcgugagaugcgugugcagagacaacuggaagggcagcaacagacccaucguggacaucaacaucaaggacuacagcaucgugagcagcuacgugugcagcggccuggugggcgacacccccagaaagaacgacagcagcagcagcagccacugccuggaccccaacaacgaggagggcggccacggcgugaagggcugggccuucgacgacggcaacgacguguggaugggcagaaccaucagcgagaagcugagaagcggcuacgagaccuucaaggugaucgagggcuggagcaaccccaacagcaagcugcagaucaacagacaggugaucguggacagaggcaacagaagcggcuacagcggcaucuucagcguggagggcaagagcugcaucaacagaugcuucuacguggagcugaucagaggcagaaaggaggagaccgaggugcuguggaccagcaacagcaucgugguguucugcggcaccagcggcaccuacggcaccggcagcuggcccgacggcgccgacaucaaccugaugcccaucuga

SEQ ID NO: 181620 - RNA, 1410 nt, Artificial Sequence; identical to SEQ ID NO: 174774
  derived and/or modified CDS sequence (opt4) from neuraminidase__InfluenzaA__AEX35387

SEQ ID NO: 181621 - RNA, 1410 nt, Artificial Sequence
  derived and/or modified CDS sequence (opt4) from neuraminidase__InfluenzaA__AEX35398
augaaccccaaccagaagaucaucaccaucggcagcgugagccugaccaucagcaccaucugcuucuucaugcagaucgccauccugaucaccaccgugacccugcacuucaagcaguacgaguucaacagcccccccaacaaccaggugaugcugugcgagcccaccaucaucgagagaaacaucaccgagaucguguaccugaccaacaccaccaucgagaaggagaucugccccaagcuggccgaguacagaaacuggagcaagccccagugcgacaucaccggcuucgcccccuucagcaaggacaacagcaucagacugagcgccggcggcgacaucugggugaccagagagcccuacgugagcugcgaccccgacaagugcuaccaguucgcccugggccagggcaccacccugaacaacgugcacagcaacgacaccgugcacgacagaacccccuacagaacccugcugaugaacgagcugggcgugcccuuccaccugggcaccaagcaggugugcaucgccuggagcagcagcagcugccacgacggcaaggccuggcugcacgugugcgugaccggcgacgacaagaacgccaccgccagcuucaucuacaacggcagacugguggacagcaucgugagcuggagcaagaagauccugagaacccaggagagcgagugcgugugcaucaacggcaccugcgccguggugaugaccgacggcagcgccagcggcaaggccgacaccaagauccuguucaucgaggagggcaagaucgugcacaccagcacccugagcggcagcgcccagcacguggaggagugcagcugcuaccccagauaccccggcgugagaugcgugugcagagacaacuggaagggcagcaacagacccaucguggacaucaacaucaaggacuacagcaucgugagcagcuacgugugcagcggccuggugggcgacacccccagaaagaacgacagcagcagcagcagccacugccuggaccccaacaacgaggagggcggccacggcgugaagggcugggccuucgacgacggcaacgacguguggaugggcagaaccaucagcgagaagcugagaagcggcuacgagaccuucaaggugaucgagggcuggagcaaccccaacagcaagcugcagaucaacagacaggugaucguggacagaggcaacagaagcggcuacagcggcaucuucagcguggagggcaagagcugcaucaacagaugcuucuacguggagcugaucagaggcagaaaggaggagaccgaggugcuguggaccagcaacagcaucgugguguucugcggcaccagcggcaccuacggcaccggcagcuggcccgacggcgccgacaucaaccugaugcccaucuga

SEQ ID NO: 181622 - RNA, 1410 nt, Artificial Sequence; identical to SEQ ID NO: 174774
  derived and/or modified CDS sequence (opt4) from neuraminidase__InfluenzaA__AEX35409

SEQ ID NO: 181623 - RNA, 1410 nt, Artificial Sequence; identical to SEQ ID NO: 181611
  derived and/or modified CDS sequence (opt4) from neuraminidase__InfluenzaA__AEX35420

SEQ ID NO: 181624 - RNA, 1410 nt, Artificial Sequence
  derived and/or modified CDS sequence (opt4) from neuraminidase__InfluenzaA__AEX35431
augaaccccaaccagaagaucaucaccaucggcagcgugagccugaccaucagcaccaucugcuucuucaugcagaucgccauccugaucaccaccgugacccugcacuucaagcaguacgaguucaacagcccccccaacaaccaggugaugcugugcgagcccaccaucaucgagagaaacaucaccgagaucguguaccugaccaacaccaccaucgagaaggagaucugccccaagcuggccgaguacagaaacuggagcaagccccagugcaacaucaccggcuucgcccccuucagcaaggacaacagcaucagacugagcgccggcggcgacaucugggugaccagagagcccuacgugagcugcgaccccgacaagugcuaccaguucgcccugggccagggcaccacccugaacaacgugcacagcaacgacaccgugcacgacagaacccccuacagaacccugcugaugaacgagcugggcgugcccuuccaccugggcaccaagcaggugugcaucgccuggagcagcagcagcugccacgacggcaaggccuggcugcacgugugcgugaccggcgacgacgagaacgccaccgccagcuucaucuacaacggcagacugguggacagcaucgugagcuggagcaagaagauccugagaacccaggagagcgagugcgugugcaucaacggcaccugcaccguggugaugaccgacggcagcgccagcggcaaggccgacaccaagauccuguucaucgaggagggcaagaucgugcacaccagcacccugagcggcagcgcccagcacguggaggagugcagcugcuaccccagauaccccggcgugagaugcgugugcagagacaacuggaagggcagcaacagacccaucguggacaucaacaucaaggacuacagcaucgugagcagcuacgugugcagcggccuggugggcgacacccccagaaagaacgacagcagcagcagcagccacugccuggaccccaacaacgaggagggcggccacggcgugaagggcugggccuucgacgacggcaacgacguguggaugggcagaaccaucagcgagaagcugagaagcggcuacgagaccuucaaggugaucgagggcuggagcaaccccaacagcaagcugcagaucaacagacaggugaucguggacagaggcaacagaagcggcuacagcggcaucuucagcguggagggcaagagcugcaucaacagaugcuucuacguggagcugaucagaggcagaaagaaggagaccgaggugcuguggaccagcaacagcaucgugguguucugcggcaccagcggcaccuacggcaccggcagcuggcccgacggcgccgacaucaaccugaugcccaucuga

SEQ ID NO: 181625 - RNA, 1410 nt, Artificial Sequence; identical to SEQ ID NO: 174772
  derived and/or modified CDS sequence (opt4) from neuraminidase__InfluenzaA__AEX35453

SEQ ID NO: 181626 - RNA, 1410 nt, Artificial Sequence; identical to SEQ ID NO: 174772
  derived and/or modified CDS sequence (opt4) from neuraminidase__InfluenzaA__AEX35464

SEQ ID NO: 181627 - RNA, 1410 nt, Artificial Sequence; identical to SEQ ID NO: 174772
  derived and/or modified CDS sequence (opt4) from neuraminidase__InfluenzaA__AEX35475

SEQ ID NO: 181628 - RNA, 1410 nt, Artificial Sequence; identical to SEQ ID NO: 174772
  derived and/or modified CDS sequence (opt4) from neuraminidase__InfluenzaA__AEX35486

SEQ ID NO: 181629 - RNA, 1410 nt, Artificial Sequence
  derived and/or modified CDS sequence (opt4) from neuraminidase__InfluenzaA__AEX35497
augaaccccaaccagaagaucaucaccaucggcagcgugagccugaccaucagcaccaucugcuucuucaugcagaucgccauccugaucaccaccgugacccugcacuucaagcaguacgaguucaacagcccccccaacaaccaggugaugcugugcgagcccaccaucaucgagagaaacaucaccgagaucguguaccugaccaacaccaccaucgagaaggagaagugccccaagcuggccgaguacagaaacuggagcaagccccagugcaacaucaccggcuucgcccccuucagcaaggacaacagcaucagacugagcgccggcggcgacaucugggugaccagagagcccuacgugagcugcgaccccgacaagugcuaccaguucgcccugggccagggcaccacccugaacaacgugcacagcaacgacaccgugcacgacagaacccccuacagaacccugcugaugaacgagcugggcgugcccuuccaccugggcaccaagcaggugugcaucgccuggagcagcagcagcugccacgacggcaaggccuggcugcacgugugcgugaccggcgacgacaagaacgccaccgccagcuucaucuacaacggcagacugguggacagcaucgugagcuggagcaaggagauccugagaacccaggagagcgagugcgugugcaucaacggcaccugcaccguggugaugaccgacggcagcgccagcggcaaggccgacaccaagauccuguucaucgaggagggcaagaucgugcacaccagcacccugagcggcagcgcccagcacguggaggagugcagcugcuaccccagauaccccggcgugagaugcgugugcagagacaacuggaagggcagcaacagacccaucguggacaucaacaucaaggacuacagcaucgugagcagcuacgugugcagcggccuggugggcgacacccccagaaagaacgacagcagcagcagcagccacugccuggaccccaacaacgaggagggcggccacggcgugaagggcugggccuucgacgacggcaacgacguguggaugggcagaaccaucagcgagaagcugagaagcggcuacgagaccuucaaggugaucgagggcuggagcaaccccaacagcaagcugcagaucaacagacaggugaucguggacagaggcaacagaagcggcuacagcggcaucuucagcguggagggcaagagcugcaucaacagaugcuucuacguggagcugaucagaggcagaaaggaggagaccgaggugcuguggaccagcaacagcaucgugguguucugcggcaccagcggcaccuacggcaccggcagcuggcccgacggcgccgacaucaaccugaugcccaucuga

SEQ ID NO: 181630 - RNA, 1410 nt, Artificial Sequence; identical to SEQ ID NO: 174772
  derived and/or modified CDS sequence (opt4) from neuraminidase__InfluenzaA__AEX35508

SEQ ID NO: 181631 - RNA, 1410 nt, Artificial Sequence; identical to SEQ ID NO: 181629
  derived and/or modified CDS sequence (opt4) from neuraminidase__InfluenzaA__AEX35519

SEQ ID NO: 181632 - RNA, 1410 nt, Artificial Sequence
  derived and/or modified CDS sequence (opt4) from neuraminidase__InfluenzaA__AEX35530
augaaccccaaccagaagaucaucaccaucggcagcgugagccugaccaucagcaccaucugcuucuucaugcagaucgccauccugaucaccaccgugacccugcacuucaagcaguacgaguucaacagcccccccaacaaccaggugaugcagugcgagcccaccaucaucgagagaaacaucaccgagaucguguaccugaccaacaccaccaucgagaaggagaucugccccaagcuggccgaguacagaaacuggagcaagccccagugcgacaucaccggcuucgcccccuucagcaaggacaacagcaucagacugagcgccggcggcgacaucugggugaccagagagcccuacgugagcugcgaccccgacaagugcuaccaguucgcccugggccagggcaccacccugaacaacgugcacagcaacgacaccgugcacgacagaacccccuacagaacccugcugaugaacgagcugggcgugcccuuccaccugggcaccaagcaggugugcaucgccuggagcagcagcagcugccacgacggcaaggccuggcugcacgugugcgugaccggcgacgacaagaacgccaccgccagcuucaucuacaacggcagacugguggacagcaucgugagcuggagcaaggagauccugagaacccaggagagcgagugcgugugcaucaacggcaccugcaccguggugaugaccgacggcagcgccagcggcaaggccgacaccaagauccuguucaucgaggagggcaagaucgugcacaccagcacccugagcggcagcgcccagcacguggaggagugcagcugcuaccccagauaccccggcgugagaugcgugugcagagacaacuggaagggcagcaacagacccaucguggacaucaacaccaaggacuacagcaucgugagcagcuacgugugcagcggccuggugggcgacacccccagaaagaacgacagcagcagcagcagccacugccugaaccccaacaacgaggagggcggccacggcgugaagggcugggccuucgacgacggcaacgacguguggaugggcagaaccaucagcgagaagcugagacugggcuacgagaccuucaaggugaucgagggcuggagcaaccccaacagcaagcugcagaucaacagacaggugaucguggacagaggcaacagaagcggcuacagcggcaucuucagcguggagggcaagagcugcaucaacagaugcuucuacguggagcugaucagaggcagaaaggaggagaccgaggugcuguggaccagcaacagcaucgugguguucugcggcaccagcggcaccuacggcaccggcagcuggcccgacggcgccgacaucaaccugaugcccaucuga

SEQ ID NO: 181633 - RNA, 1410 nt, Artificial Sequence; identical to SEQ ID NO: 174772
  derived and/or modified CDS sequence (opt4) from neuraminidase__InfluenzaA__AEX35541

SEQ ID NO: 181634 - RNA, 1410 nt, Artificial Sequence
  derived and/or modified CDS sequence (opt4) from neuraminidase__InfluenzaA__AEX35552
augaaccccaaccagaagaucaucaccaucggcagcgccagccugaccaucagcaccaucugcuucuucaugcagaucgccauccugaucaccaccgugacccugcacuucaagcaguacgaguucaaccccccccccaacaaccaggccaugcugugcgagcccaccaucaucgagagaaacaucaccgagaucguguaccugaccaacaccaccaucgagaaggagaucugccccaagcuggccgaguacagaaacuggagcaagccccagugcgacaucaccggcuucgcccccuucagcaaggacaacagcaucagacugagcgccggcggcgacaucugggugaccagagagcccuacgugagcugcgaccccgacaagugcuaccaguucgcccugggccagggcaccacccugaacaacgugcacagcaacgacaccgugcacgacagaacccccuacagaacccugcugaugaacgagcugggcgugcccuuccaccugggcaccaagcaggugugcaucgccuggagcagcagcagcugccacgacggcaaggccuggcugcacgugugcgugaccggcgacgacaagaacgccaccgccagcuucaucuacaacggcagacugguggacagcaucgugagcuggagcaaggagauccugagaacccaggagagcgagugcgugugcaucaacggcaccugcaccguggugaugaccgacggcagcgccagcggcaaggccgacaccaagauccuguucaucgaggagggcaagaucgugcacaccagcacccugagcggcagcgcccagcacguggaggagugcagcugcuaccccagauaccccggcgugagaugcgugugcagagacaacuggaagggcagcaacagacccaucguggacaucaacaucaaggacuacagcaucgccagcagcuacgugugcagcggccuggugggcgacacccccagaaagaacgacagcagcagcagcagccacugccuggaccccaacaacgaggagggcggccacggcgugaagggcugggccuucgacgacggcaacgacguguggaugggcagaaccaucagcgagaagcugagaagcggcuacgagaccuucaaggugaucgagggcuggagcaaccccaacagcaagcugcagaucaacagacaggugaucguggacagaggcaacagaagcggcuacagcggcaucuucagcguggagggcaagagcugcaucaacagaugcuucuacguggagcugaucagaggcagaaaggaggagaccgaggugcuguggaccagcaacagcaucgugguguucugcggcaccagcggcaccuacggcaccggcagcuggcccgacggcgccgacaucaaccugaugcccaucuga

SEQ ID NO: 181635 - RNA, 1410 nt, Artificial Sequence
  derived and/or modified CDS sequence (opt4) from neuraminidase__InfluenzaA__AEX35563
augaaccccaaccagaagaucaucaccaucggcagcgugagccugaccaucagcaccaucugcuucuucaugcagaucgccauccugaucaccaccgugacccugcacuucaagcaguacgaguucaacagcccccccaacaaccaggugaugcugugcgagcccaccaucaucgagagaaacaucaccgagaucguguaccugaccaacaccaccaucgagaaggagaucugccccaagcuggccgaguacagaaacuggagcaagccccagugcgacaucaccggcuucgcccccuucagcaaggacaacagcaucagacugagcgccggcggcgacaucugggugaccagagagcccuacgugagcugcgaccccgacaagugcuaccaguucgcccugggccagggcaccacccugaacaacgugcacagcaacgacaccgugcacgacagaacccccuacagaacccugcugaugaacgagcugggcgugcccuuccaccugggcaccaagcaggugugcaucgccuggagcagcagcagcugccacgacggcaaggccuggcugcacgugugcgugaccggcgacgacaagaacgccaccgccagcuucaucuacaacggcagacugguggacagcaucgugagcuggagcaaggagauccugagaacccaggagagcgagugcgugugcaucaacggcaccugcaccguggugaugaccgacggcagcgccagcggcaaggccgacaccaagauccuguucaucgaggagggcaagaucgugcacaccagcacccugagcggcagcgcccagcacguggaggagugcagcugcuaccccagauaccccggcgugagaugcgugugcagagacaacuggaagggcagcaacagacccaucguggacaucaacaucaaggacuacagcaucgugagcagcuacgugugcagcggccuggugggcgacacccccagaaagaacgacagcagcagcagcagccacugccugaaccccaacaacgaggagggcggccacggcgugaagggcugggccuucgacgacggcaacgacguguggaugggcagaaccaucagcgagaagcugagacugggcuacgagaccuucaaggugaucgagggcuggagcaaccccaacagcaagcugcagaucaacagacaggugaucguggacagaggcaacagaagcggcuacagcggcaucuucagcguggagggcaagagcugcaucaacagaugcuucuacguggagcugaucagaggcagaaaggaggagaccgaggugcuguggaccagcaacagcaucgugguguucugcggcaccagcggcaccuacggcaccggcagcuggcccgacggcgccgacaucaaccugaugcccaucuga

SEQ ID NO: 181636 - RNA, 1410 nt, Artificial Sequence; identical to SEQ ID NO: 181516
  derived and/or modified CDS sequence (opt4) from neuraminidase__InfluenzaA__AEX35585

SEQ ID NO: 181637 - RNA, 1410 nt, Artificial Sequence
  derived and/or modified CDS sequence (opt4) from neuraminidase__InfluenzaA__AEX35596
augaaccccaaccagaagaucaucaccaucggcagcgugagccugaccaucagcaccaucugcuucuucaugcagaucgccauccugaucaccaccgugacccugcacuucaagcaguacgaguucaacagcccccccaacaaccaggugaugcugugcgagcccaccaucaucgagagaaacaucaccgagaucguguaccugaccaacaccaccaucgagaaggagaucugccccaagcuggccgaguacagaaacuggagcaagccccagugcaacaucaccggcuucgcccccuucagcaaggacaacagcaucagacugagcgccggcggcgacaucugggugaccagagagcccuacgugagcugcgaccccgacaagugcuaccaguucgcccugggccagggcaccacccugaacaacgugcacagcaacgacaccgugcacgacagaacccccuacagaacccugcugaugaacgagcugggcgugcccuuccaccugggcaccaagcaggugugcaucgccuggagcagcagcagcugccacgacggcaaggccuggcugcacgugugcgugaccggcgacgacaagaacgccaccgccagcuucaucuacaacggcagacugguggacagcaucgugagcuggagcaaggagauccugagaacccaggagagcgagugcgugugcaucaacggcaccugcaccguggugaugaccgacggcagcgccagcggcaaggccgacaccaagauccuguucaucgaggagggcaagaucgugcacaccagcacccugagcggcagcgcccagcacguggaggagugcagcugcuaccccagauaccccggcgugagaugcgugugcagagacaacuggaagggcagcaacagacccaucguggacaucaacaucaaggacuacagcaucgugagcagcuacgugugcagcggccuggugggcgacacccccagaaagaacgacagcagcagcagcagccacugccuggaccccaacaacgaggagggcggccacggcgugaagggcugggccuucgacgacggcaacgacguguggaugggcagaaccaucagcgagaagcugagaagcggcuacgagaccuucaaggugaucgagggcuggagcaaccccgacagcaagcugcagaucaacagacaggugaucguggacagaggcaacagaagcggcuacagcggcaucuucagcguggagggcaagagcugcaucaacagaugcuucuacguggagcugaucagaggcagaaaggaggagaccgaggugcuguggaccagcaacagcaucgugguguucugcggcaccagcggcaccuacggcaccggcagcuggcccgacggcgccgacaucaaccugaugcccaucuga

SEQ ID NO: 181638 - RNA, 1410 nt, Artificial Sequence; identical to SEQ ID NO: 174772
  derived and/or modified CDS sequence (opt4) from neuraminidase__InfluenzaA__AEX35607

SEQ ID NO: 181639 - RNA, 1410 nt, Artificial Sequence
  derived and/or modified CDS sequence (opt4) from neuraminidase__InfluenzaA__AEX35618
augaaccccaaccagaagaucaucaccaucggcagcgugagccugaccaucagcaccaucugcuucuucaugcagaucgccauccugaucaccaccgugacccugcacuucaagcaguacgagcugaacagcccccccaacaaccaggugaugcugugcgagcccaccaucaucgagagaaacaucaccgagaucguguaccugaccaacaccaccaucgagaaggagaccugccccaagcuggccgaguacagaaacuggagcaagccccagugcuacaucaccggcuucgcccccuucagcaaggacaacagcaucagacugagcgccggcggcgacaucugggugaccagagagcccuacgugagcugcgaccccgacaagugcuaccaguucgcccugggccagggcaccacccugaacaacgugcacagcaacgacaccgugagagacagaacccccuacagaacccugcugaugaacgagcugggcgugcccuuccaccugggcaccaagcaggugugcaucgccuggagcagcagcagcugccacgacggcaaggccuggcugcacgugugcaucaccggcgacgacaagaacgccaccgccagcuucaucuacaacggcagacugguggacagcaucgugagcuggagcaaggagauccugagaacccaggagagcgagugcgugugcaucaacggcaccugcaccguggugaugaccgacggcagcgccagcggcaaggccgacaccaagauccuguucaucgaggagggcaagaucgugcacaccagcacccugagcggcagcgcccagcacguggaggagugcagcugcuaccccagauaccccggcgugagaugcgugugcagagacaacuggaagggcagcaacagacccaucguggacaucaacaucaaggaccacagcaucgugagcagcuacgugugcagcggccuggugggcgacacccccagaaagaacgacagcagcagcagcagccacugccuggaccccaacaacgaggagggcggccacggcgugaagggcugggccuucgacgacggcaacgacguguggaugggcagaaccaucagcgagaagagcagacugggcuacgagaccuucaaggugaucgagggcuggagcaaccccaagagcaagcugcagaucaacagacaggugaucguggacagagacaacagaagcggcuacagcggcaucuucagcguggagggcaagagcugcaucaacagaugcuucuacguggagcugaucagaggcagaaaggaggagaccgaggugcuguggaccagcaacagcaucgugguguucugcggcaccagcggcaccuacggcaccggcagcuggcccgacggcgccgacaucaaccugaugcccaucuga

SEQ ID NO: 181640 - RNA, 1410 nt, Artificial Sequence
  derived and/or modified CDS sequence (opt4) from neuraminidase__InfluenzaA__AEX35640
augaaccccaaccagaagaucaucaccaucggcagcgugagccugaccaucagcaccaucugcuucuucaugcagaucgccauccugaucaccaccgugacccugcacuucaagcaguacgaguucaacagcccccccaacaaccaggugaugcugugcgagcccaccaucaucgagagaaacaucaccgagaucguguaccugaccaacaccaccaucgagaaggagaucugccccaagcuggccgaguacagaaaguggagcaagccccagugcaacaucaccggcuucgcccccuucagcaaggacaacagcaucagacugagcgccggcggcgacaucugggugaccagagagcccuacgugagcugcgaccccgacaagugcuaccaguucgcccugggccagggcaccacccugaacaacgugcacagcaacgacaccgugagagacagaacccccuacagaacccugcugaugaacgagcugggcgugcccuuccaccugggcaccaagcaggugugcaucgccuggagcagcagcagcugccacgacggcaaggccuggcugcacgugugcgugaccggcgacaacaagaacgccaccgccagcuucaucuacaacggcagacugguggacagcaucgugagcuggagcaaggagauccugagaacccaggagagcgagugcgugugcaucaacggcaccugcaccguggugaugaccgacggcagcgccagcggcaaggccgacaccaagauccuguucaucgaggagggcaagaucgugcacaccagcacccugagcggcagcgcccagcacguggaggagugcagcugcuaccccagauaccccggcgugagaugcgugugcagagacaacuggagaggcagcaacagacccaucguggacaucaacaugaaggacuacagcaucgugagcagcuacgugugcagcggccuggugggcgacacccccagaaagaacgacagcagcagcagcggccacugccuggaccccaacgacgaggagggcggccacggcgugaagggcugggccuucgacgacggcaacgacguguggaugggcagaaccaucagcgagaagagcagaagcggcuacgagaccuucaaggugaucgagggcuggagcaaccccaacagcaagcugcagaucaacagacaggugaucguggacagaggcaacagaagcggcuacagcggcaucuucagcguggagggcaagagcugcaucaacagaugcuucuacguggagcugaucagaggcagaaaggaggagaccgaggugcuguggaccagcaacagcaucgugguguucugcggcaccagcggcaccuacggcaccggcagcuggcccgacggcgccgacaucaaccugaugcccaucuga

SEQ ID NO: 181641 - RNA, 1410 nt, Artificial Sequence
  derived and/or modified CDS sequence (opt4) from neuraminidase__InfluenzaA__AEX35651
augaaccccaaccagaagaucaucaccaucggcagcgugagccugaccaucagcaccaucugcuucuucaugcagaucgccauccugaucaccaccgugacccugcacuucaagcaguacgaguucaacagcccccccaacaaccaggugaugcugugcgagcccaccaucaucgagagaaacaucaccgagaucguguaccugaccaacaccaccaucgagaaggagaucugccccaagcuggccgaguacagaaacuggagcaagccccagugcgacaucaccggcuucgcccccuucagcaaggacaacagcaucagacugagcgccggcggcgacaucugggugaccagagagcccuacgugagcugcgaccccgacaagugcuaccaguucgcccugggccagggcaccacccugaacaacgugcacagcaacgacaccgugagagacagaacccccuacagaacccugcugaugaacgagcugggcgugcccuuccaccugggcaccaagcaggugugcaucgccuggagcagcagcagcugccacgacggcaaggccuggcugcacgugugcaucaccggcgacgacaagaacgccaccgccagcuucaucuacaacggcagacugguggacagcguggugagcuggagcaaggagauccugagaacccaggagagcgagugcgugugcaucaacggcaccugcaccguggugaugaccgacggcagcgccagcggcaaggccgacaccaagauccuguucaucgaggagggcaagaucgugcacaccagcacccugagcggcagcgcccagcacguggaggagugcagcugcuaccccagauaccccggcgugagaugcgugugcagagacaacuggaagggcagcaacagacccaucguggacaucaacaucaaggaccacagcaucgugagcagcuacgugugcagcggccuggugggcgacacccccagaaagaacgacagcagcagcagcagccacugccuggaccccaacaacgaggagggcggccacggcgugaagggcugggccuucgacgacggcaacgacguguggaugggcagaaccaucagcgagaagagcagacugggcuacgagaccuucaaggugaucgagggcuggagcaaccccaagagcaagcugcagaucaacagacaggugaucguggacagaggcaacagaagcggcuacagcggcaucuucagcguggaggacaagagcugcaucaacagaugcuucuacguggagcugaucagaggcagaaaggaggagaccgaggugcuguggaccagcaacagcaucgugguguucugcggcaccagcggcaccuacggcaccggcagcuggcccgacggcgccgacaucaaccugaugcccaucuga

SEQ ID NO: 181642 - RNA, 1410 nt, Artificial Sequence; identical to SEQ ID NO: 175944
  derived and/or modified CDS sequence (opt4) from neuraminidase__InfluenzaA__AEX36105

SEQ ID NO: 181643 - RNA, 1410 nt, Artificial Sequence
  derived and/or modified CDS sequence (opt4) from neuraminidase__InfluenzaA__AEX36116
augaaccccaaccagaagaucaucaccaucggcagcgugagccugaccaucagcaccaucugcuucuucaugcagaucgccauccugaucaccaccgugacccugcacuucaagcaguacgaguucaacagcccccccaacaaccaggugaugcugugcgagcccaccaucaucgagagaaacaucaccgagaucguguaccugaccaacaccaccaucgagaaggagaucugccccaagcuggccgaguacagaaacuggagcaagccccagugcgacaucaccggcuucgcccccuucagcaaggacaacagcaucagacugagcgccggcggcgacaucugggugaccagagagcccuacgugagcugcgaccccgacaagugcuaccaguucgcccugggccagggcaccacccugaacaacgugcacagcaacgacaccgugagaaacagaacccccuacagaacccugcugaugaacgagcugggcgugcccuuccaccugggcaccaagcaggugugcaucgccuggagcagcagcagcugccacgacggcaaggccuggcugcacgugugcaucaccggcgacgacaagaacgccaccgccagcuucaucuacaacggcagacugguggacagcaucgugagcuggagcaaggagauccugagaacccaggagagcgagugcgugugcaucaacggcaccugcaccguggugaugaccgacggcagcgccagcggcgaggccgacaccaagauccuguucaucgaggagggcaagaucgugcacaccagcacccugagcggcagcgcccagcacguggaggagugcagcugcuaccccagauaccccggcgugagaugcgugugcagagacaacuggaagggcagcaacagacccaucguggacaucaacaucaaggaccacagcaucgugagcagcuacgugugcagcggccuggugggcgacacccccagaaagaacgacagcagcagcagcagccacugccuggaccccaacaacgaggagggcggccacggcgugaagggcugggccuucgacgacggcaacgacguguggaugggcagaaccaucagcgagaagagcagacugggcuacgagaccuucaaggugaucgagggcuggagcaaccccaagagcaagcugcagaucaacagacaggugaucguggacagaggcaacagaagcggcuacagcggcaucuucagcguggagggcaagagcugcaucaacagaugcuucuacguggagcugaucagaggcagaaaggaggagaccgaggugcuguggaccagcaacagcaucgugguguucugcggcaccagcggcaccuacggcaccggcagcuggcccgacggcgccgacaucaaccugaugcccaucuga

SEQ ID NO: 181644 - RNA, 1410 nt, Artificial Sequence
  derived and/or modified CDS sequence (opt4) from neuraminidase__InfluenzaA__AEX36127
augaaccccaaccagaagaucaucaccaucggcagcgugagccugaccaucagcaccaucugcuucuucaugcagaucgccauccugaucaccaccgugacccugcacuucaagcaguacgaguucaacagcccccccaacaaccaggugaugcugugcgagcccaccaucaucgagagaaacaucaccgagaucguguaccugaccaacaccaccaucgagaaggagaucugccccaagcuggccgaguacagaaacuggcugaagccccagugcgacaucaccggcuucgcccccuucagcaaggacaacagcaucagacugagcgccggcggcgacaucugggugaccagagagcccuacgugagcugcgaccccgacaagugcuaccaguucgcccugggccagggcaccacccugaacaacgugcacagcaacgacaccgugagagacagaacccccuacagaacccugcugaugaacgagcugggcgugcccuuccaccugggcaccaagcaggugugcaucgccuggagcagcagcagcugccacgacggcaaggccuggcugcacgugugcaucaccggcgacgacaagaacgccaccgccagcuucaucuacaacggcagacugguggacagcguggugagcuggagcaaggagauccugagaacccaggagagcgagugcgugugcaucaacggcaccugcaccguggugaugaccgacggcagcgccagcggcaaggccgacaccaagauccuguucaucgaggagggcaagaucgugcacaccagcacccugagcggcagcgcccagcacguggaggagugcagcugcuaccccagauaccccggcgugagaugcgugugcagagacaacuggaagggcagcaacagacccaucguggacaucaacaucaaggaccacagcaucgugagcagcuacgugugcagcggccuggugggcgacacccccagaaagaacgacagcagcagcagcagccacugccuggaccccaacaacgaggagggcggccacggcgugaagggcugggccuucgacgacggcgacgacguguggaugggcagaaccaucagcgagaagagcagacugggcuacgagaccuucaaggugaucgagggcuggagcaaccccaagagcaagcugcagaucaacagacaggugaucguggacagaggcaacagaagcggcuacagcggcaucuucagcguggagggcaagagcugcaucaacagaugcuucuacguggagcugaucagaggcagaaaggaggagaccgaggugcuguggaccagcaacagcaucgugguguucugcggcaccagcggcaccuacggcaccggcagcuggcccgacggcgccgacaucaaccugaugcccaucuga

SEQ ID NO: 181645 - RNA, 1410 nt, Artificial Sequence
  derived and/or modified CDS sequence (opt4) from neuraminidase__InfluenzaA__AEX36149
augaaccccaaccagaagaucaucaccaucggcagcgugagccugaccaucagcaccaucugcuucuucaugcagaucgccauccugaucaccaccgugacccugcacuucaagcaguacgaguucaacagcccccccaacaaccaggugaugcugugcgagcccaccaucaucgagagaaacaucaccgagaucguguaccugaccaacaccaccaucgagaaggagaucugccccaagcuggccgaguacagaaacuggagcaagccccagugcgacaucaccggcuucgcccccuucagcaaggacaacagcaucagacugagcgccggcggcgacaucugggugaccagagagcccuacgugagcugcgaccccgacaagugcuaccaguucgcccugggccagggcaccacccugaacaacgugcacagcaacgacaccgugagagacagaacccccuacagaacccugcugaugaacgagcugggcgugcccuuccaccugggcaccaagcaggugugcaucgccuggagcagcagcagcugccacgacggcaaggccuggcugcacgugugcaucaccggcgacgacaagaacgccaccgccagcuucaucuacaacggcagacugguggacagcguggugagcuggagcaaggagauccugagaacccaggagagcgagugcgugugcaucaacggcaccugcaccguggugaugaccgacggcagcgccagcggcaaggccgacaccaagauccuguucaucgaggagggcaagaucgugcacaccagcacccugagcggcagcgcccagcacguggaggagugcagcugcuaccccagauaccccggcgugagaugcgugugcagagacaacuggaagggcagcaacagacccaucguggacaucaacaucaaggaccacagcaucgugagcagcuacgugugcagcggccuggugggcgacacccccagaaagaacgacagcagcagcagcagccacugccuggaccccaacaacgaggagggcggccacggcgugaagggcugggccuucgacgacggcaacgacguguggaugggcagaaccaucagcgagaagagcagacugggcuacgagaccuucaaggugaucgagggcuggagcaaccccaagagcaagcugcagaucaacagacaggugaucguggacagaggcaacagaagcggcuacagcggcaucuucagcguggaggacaagagcugcaucaacagaugcuucuacguggagcugaucagaggcagaaaggaggagaccgaggugcuguggaccaccaacagcaucgugguguucugcggcaccagcggcaccuacggcaccggcagcuggcccgacggcgccgacaucaaccugaugcccaucuga

SEQ ID NO: 181646 - RNA, 1410 nt, Artificial Sequence; identical to SEQ ID NO: 176572
  derived and/or modified CDS sequence (opt4) from neuraminidase__InfluenzaA__AEX36160

SEQ ID NO: 181647 - RNA, 1410 nt, Artificial Sequence
  derived and/or modified CDS sequence (opt4) from neuraminidase__InfluenzaA__AEX36171
augaaccccaaccagaagaucaucaccaucggcagcgugagccugaccaucagcaccaucugcuucuucaugcagaucgccauccugaucaccaccgugacccugcacuucaagcaguacgaguucagcagcccccccaacaaccaggugaugcugugcgagcccaccaucaucgagagaaacaucaccgagaucguguaccugaccaacaccaccaucgagaaggagaucugccccaagcuggccgaguacagaaacuggagcaagccccagugcgacaucaccggcuucgcccccuucagcaaggacaacagcaucagacugagcgccggcggcgacaucugggugaccagagagcccuacgugagcugcgaccccgacaagugcuaccaguucgcccugggccagggcaccacccugaacaacgugcacagcaacgacaccgugcacaacagaacccccuacagaacccugcugaugaacgagcugggcgugcccuuccaccugggcaccaagcaggugugcaucgccuggagcagcagcagcugccacgacggcaaggccuggcugcacgugugcgugaccggcgacgacaagaacgccaccgccagcuucaucuacaacggcagacugguggacagcaucgugagcuggagcaaggagauccugagaacccaggagagcgagugcgugugcaucaacggcaccugcgccguggugaugaccgacggcagcgccagcggcaaggccgacaccaagauccuguucaucgaggagggcaagaucgugcacaccagcacccugagcggcagcgcccagcacguggaggagugcagcugcuaccccagauaccccggcgugagaugcgugugcagagacaacuggaagggcagcaacagacccaucguggacaucaacaucaaggacuacagcaucgugagcagauacgugugcagcggccuggugggcgacacccccagaaagaacgacagcagcagcagcagccacugccuggaccccaacaacgaggagggcggccacggcgugaagggcugggccuucgacgacggcgacgacguguggaugggcagaaccaucagcgagaagagcagaagcggcuacgagaccuucaaggugaucgagggcuggagcaaccccaacagcaagcugcagaucaacagacaggugaucguggacagaggcaacagaagcggcuacagcggcaucuucagcguggagggcaagagcugcaucaacagaugcuucuacguggagcugaucagaggcagaaaggaggagaccgaggugcuguggaccagcaacagcaucgugguguucugcggcaccagcggcaccuacggcaccggcagcuggcccgacggcgccgacaucaaccugaugcccaucuga

SEQ ID NO: 181648 - RNA, 1410 nt, Artificial Sequence
  derived and/or modified CDS sequence (opt4) from neuraminidase__InfluenzaA__AEX36193
augaaccccaaccagaagaucaucaccaucggcagcgugagccugaccaucagcaccaucugcuucuucaugcagaucgccauccugaucaccaccgugacccugcacuucaagcaguacgaguucaacagcagccccaacaaccaggugaugcugugcgagcccaccaucaucgagagaaacaucaccgagaucguguaccugaccaacaccaccaucgagaaggagaucugccccaagcuggccgaguacagaaacuggagcaagccccagugcgacaucaccggcuucgcccccuucagcaaggacaacagcaucagacugagcgccggcggcgacaucugggugaccagagagcccuacgugagcugcgaccccgacaagugcuaccaguucgcccugggccagggcaccacccugaacaacgugcacagcaacaacaccgugagagacagaacccccuacagaacccugcugaugaacgagcugggcgugcccuuccaccugggcaccaagcaggugugcaucgccuggagcagcagcagcugccacgacggcaaggccuggcugcacgugugcaucaccggcgacgacaagaacgccaccgccagcuucaucuacaacggcaugcugguggacagcaucgugagcuggagcaaggagauccugagaacccaggagagcgagugcgugugcaucaacggcaccugcaccguggugaugaccgacggcagcgccagcggcaaggccgacaccaagauccuguucaucgaggagggcaagaucgugcacaccagcacccugagcggcagcgcccagcacguggaggagugcagcugcuaccccagauaccccggcgugagaugcgugugcagagacaacuggaagggcagcaacagacccaucguggacaucaacaucaaggaccacagcaucgugagcagcuacgugugcagcggccuggugggcgacacccccagaaagaacgacagcagcagcagcagccacugccuggaccccaacaacgaggagggcggccacggcgugaagggcugggccuucgacgacggcaacgacguguggaugggcagaaccaucagcgagaagagcagacugggcuacgagaccuucaaggugaucgagggcuggagcaaccccaagagcaagcugcagaucaacagacaggugaucguggacagaggcaacagaagcggcuacagcggcaucuucagcguggagggcaagagcugcaucaacagaugcuucuacguggagcugaucagaggcagaaaggaggagaccgaggugcuguggaccagcaacagcaucgugguguucugcggcaccagcggcaccuacggcaccggcagcuggcccgacggcgccgacaucaaccugaugcccaucuga

SEQ ID NO: 181649 - RNA, 1410 nt, Artificial Sequence
  derived and/or modified CDS sequence (opt4) from neuraminidase__InfluenzaA__AEX36204
augaaccccaaccagaagaucaucaccaucggcagcgugagccugaccaucagcaccaucugcuucuucaugcagaucgccauccugaucaccaccgugacccugcacuucaagcaguacgaguucaacagcccccccaacaaccaggugaugcugugcgagcccgccaucaucgagagaaacaucaccgagaucguguaccugaccaacaccaccaucgagaaggagaucugccccaagcuggccgaguacagaaacuggagcaagccccagugcgacaucaccggcuucgcccccuucagcaaggacaacagcaucagacugagcgccggcggcgacaucugggugaccagagagcccuacgugagcugcgaccccgacaagugcuaccaguucgcccugggccagggcaccacccugaacaacgugcacagcaacgacaccgugcacgagagaacccccuacagaacccugcugaugaacgagcugggcgugcccuuccaccugggcaccaagcaggugugcaucgccuggagcagcagcagcugccacgacggcaaggccuggcugcacgugugcgugaccggcgacgacaagaacgccaccgccagcuucaucuacaacggcagacugguggacagcaucgugagcuggagcaaggagauccugagaacccaggagagcgagugcgugugcaucaacggcaccugcaccguggugaugaccgacggcagcgccagcggcaaggccgacaccaagauccuguucaucgaggagggcaagaucgugcacaccagcacccugagcggcagcgcccagcacguggaggagugcagcugcuaccccagauaccccggcgugagaugcgugugcagagacaacuggaagggcagcaacagacccaucguggacaucaacaucaaggacuacagcaucgugagcagauacgugugcagcggccuggugggcgacacccccagaaagaacgacagcagcagcagcagccacugccuggaccccaacaacgaggagggcggccacggcgugaagggcugggccuucgacgacggcaacgacguguggaugggcagaaccaucagcgagaagagcagaagcggcuacgagaccuucaaggugaucgagggcuggagcaaccccaacagcaagcugcagaucaacagacaggugaucguggacagaggcaacagaagcggcuacagcggcaucuucagcguggagggcaagagcugcaucaacagaugcuucuacguggagcugaucagaggcagaaaggaggagaccgaggugcuguggaccagcaacagcaucgugguguucugcggcaccagcggcaccuacggcaccggcagcuggcccgacggcgccgacaucaaccugaugcccaucuga

SEQ ID NO: 181650 - RNA, 1410 nt, Artificial Sequence
  derived and/or modified CDS sequence (opt4) from neuraminidase__InfluenzaA__AEX36215
augaaccccaaccagaagaucaucaccaucggcagcgugagccugaccaucagcaccaucugcuucuucaugcagaucgccauccugaucaccaccgugacccugcacuucaagcaguacgaguucagcagcccccccaacaaccaggugaugcugugcgagcccgccaucaucgagaagaacaucaccgagaucguguaccugaccaacaccaccaucgagaaggagaucugccccaagcuggccgaguacagaaacuggagcaagccccagugcgacaucaccggcuucgcccccuucagcaaggacaacagcaucagacugagcgccggcggcgacaucugggugaccagagagcccuacgugagcugcgaccccgacaagugcuaccaguucgcccugggccagggcaccacccugaacaacgugcacagcaacgacaccgugcacgagagaacccccuacagaacccugcugaugaacgagcugggcgugcccuuccaccugggcaccaagcaggugugcaucgccuggagcagcagcagcugccacgacggcaaggccuggcugcacgugugcgugaccggcgacgacaagaacgccaccgccagcuucaucuacaacggcagacugguggacagcaucgugagcuggagcaaggagauccugagaacccaggagagcgagugcgugugcaucaacggcaccugcaccguggugaugaccgacggcagcgccagcggcaaggccgacaccaagauccuguucaucgaggagggcaagaucgugcacaccagcacccugagcggcagcgcccagcacguggaggagugcagcugcuaccccagauaccccggcgugagaugcgugugcagagacaacuggaagggcagcaacagacccaucguggacaucaacaucaaggacuacagcaucgugagcagauacgugugcagcggccuggugggcgacacccccagaaagaacgacagcagcagcagcagccacugccuggaccccaacaacgaggagggcggccacggcgugaagggcugggccuucgacgacggcaacgacguguggaugggcagaaccaucagcgagaagagcagaagcggcuacgagaccuucaaggugaucgagggcuggagcaaccccaacagcaagcugcagaucaacagacaggugaucguggacagaggcaacagaagcggcuacagcggcaucuucagcguggagggcaagagcugcaucaacagaugcuucuacguggagcugaucagaggcagaaaggaggagaccgaggugcuguggaccagcaacagcaucgugguguucugcggcaccagcggcaccuacggcaccggcagcuggcccgacggcgccgacaucaaccugaugcccaucuga

SEQ ID NO: 181651 - RNA, 1410 nt, Artificial Sequence
  derived and/or modified CDS sequence (opt4) from neuraminidase__InfluenzaA__AEX36226
augaaccccaaccagaagaucaucaccaucggcagcgugagccugaccaucagcaccaucugcuucuucaugcagaucgccauccugaucaccaccgugacccugcacuucaagcaguacgaguucagcagcccccccaacaaccaggugaugcugugcgagcccgccaucaucgagagaaacaucaccgagaucguguaccugaccaacaccaccaucgagaaggagaucugccccaagcuggccgaguacagaaacuggagcaagccccagugcgacaucaccggcuucgcccccuucagcaaggacaacagcaucagacugagcgccggcggcgacaucugggugaccagagagcccuacgugagcugcgaccccgacaagugcuaccaguucgcccugggccagggcaccacccugaacaacgugcacagcaacgacaccgugcacaacagaacccccuacagaacccugcugaugaacgagcugggcgugcccuuccaccugggcaccaagcaggugugcaucgccuggagcagcagcagcugccacgacggcaaggccuggcugcacgugugcgugaccggcgacgacaagaacgccaccgccagcuucaucuacaacggcagacugguggacagcaucgugagcuggagcaaggagauccugagaacccaggagagcgagugcgugugcaucaacggcaccugcaccguggugaugaccgacggcagcgccagcggcaaggccgacaccaagauccuguucaucgaggagggcaagaucgugcacaccagcacccugagcggcagcgcccagcacguggaggagugcagcugcuaccccagauaccccggcgugagaugcgugugcagagacaacuggaagggcagcaacagacccaucguggacaucaacaucaaggacuacagcaucgugagcagauacgugugcagcggcaucgugggcgacacccccagaaagaacgacagcagcagcagcagccacugccuggaccccaacaacgaggagggcggccacggcgugaagggcugggccuucgacgacggcaacgacguguggaugggcagaaccaucagcgagaagagcagaagcggcuacgagaccuucaaggugaucgagggcuggagcaaccccaacagcaagcugcagaucaacagacaggugaucguggacagaggcaacagaagcggcuacagcggcaucuucagcguggagggcaagagcugcaucaacagaugcuucuacguggagcugaucagaggcagaaaggaggagaccgaggugcuguggaccagcaacagcaucgugguguucugcggcaccagcggcaccuacggcaccggcagcuggcccgacggcgccgacaucaaccugaugcccaucuga

SEQ ID NO: 181652 - RNA, 1410 nt, Artificial Sequence
  derived and/or modified CDS sequence (opt4) from neuraminidase__InfluenzaA__AEX36237
augaaccccaaccagaagaucaucaccaucggcagcgugagccugaccaucagcaccaucugcuucuucaugcagaucgccauccugaucaccaccgugacccugcacuucaagcaguacgaguucaacagcccccccaacaaccaggugaugcugugcgagcccaccaucaucgagagaaacaucaccgagaucguguaccugaccaacaccaccaucgagaaggagaucugccccaagcuggccgaguacagaaaguggagcaagccccagugcaacaucaccggcuucgcccccuucagcaaggacaacagcaucagacugagcgccggcggcgacaucugggugaccagagagcccuacgugagcugcgaccccgacaagugcuaccaguucgcccugggccagggcaccacccugaacaacgugcacagcaacgacaccgugagagagagaacccccuacagaacccugcugaugaacgagcugggcgugcccuuccaccugggcaccaagcaggugugcaucgccuggagcagcagcagcugccacgacggcaaggccuggcugcacgugugcgugaccggcgacgacaagaacgccaccgccagcuucaucuacaacggcagacugguggacagcaucgugagcuggagcaaggagauccugagaacccaggagagcgagugcgugugcaucaacggcaccugcaccguggugaugaccgacggcagcgccagcggcaaggccgacaccaagauccuguucaucgaggagggcaagaucgugcacaccagcacccugagcggcagcgcccagcacguggaggagugcagcugcuaccccagauaccccggcgugagaugcgugugcagagacaacuggagaggcagcaacagacccaucguggacaucaacaugaaggacuacagcaucgugagcagcuacgugugcagcggccuggugggcgacacccccagaaagaacgacagcagcagcagcggccacugccuggaccccaacgacgaggagggcggccacggcgugaagggcugggccuucgacgacggcaacgacguguggaugggcagaaccaucagcgagaagagcagaagcggcuacgagaccuucaaggugaucgagggcuggagcaaccccaacagcaagcugcagaucaacagacaggugaucguggacagaggcaacagaagcggcuacagcggcaucuucagcguggagggcaagagcugcaucaacagaugcuucuacguggagcugaucagaggcagaaaggaggagaccgaggugcuguggaccagcaacagcaucgugguguucugcggcaccagcggcaccuacggcaccggcagcuggcccgacggcgccgacaucaaccugaugcccaucuga

SEQ ID NO: 181653 - RNA, 1410 nt, Artificial Sequence
  derived and/or modified CDS sequence (opt4) from neuraminidase__InfluenzaA__AEX36248
augaaccccaaccagaagaucaucaccaucggcagcgugagccugaccaucagcaccaucugcuucuucaugcagaucgccauccugaucaccaccgugacccugcacuucaagcaguacgaguucagcagcccccccaacaaccaggugaugcugugcgagcccgccaucaucgagagaaacaucaccgagaucguguaccugaccaacaccaccaucgagaaggagaucugccccaagcuggccgaguacagaaacuggagcaagccccagugcgacaucaccggcuucgcccccuucagcaaggacaacagcaucagacugagcgccggcggcgacaucugggugaccagagagcccuacgugagcugcgaccccgacaagugcuaccaguucgcccugggccagggcaccacccugaacaacgugcacagcaacgacaccgugcacaacagaacccccuacagaacccugcugaugaacgagcugggcgugcccuuccaccugggcaccaagcaggugugcaucgccuggagcagcagcagcugccacgacggcaaggccuggcugcacgugugcgugaccggcgacgacaagaacgccaccgccagcuucaucuacaacggcagacugguggacagcaucgugagcuggagcaaggagauccugagaacccaggagagcgagugcgugugcaucaacggcaccugcaccguggugaugaccgacggcagcgccagcggcagagccgacaccaagauccuguucaucgaggagggcaagaucgugcacaccagcacccugagcggcagcgcccagcacguggaggagugcagcugcuaccccagauaccccggcgugagaugcgugugcagagacaacuggaagggcagcaacagacccaucguggacaucaacaucaaggacuacagcaucgugagcagauacgugugcagcggccuggugggcgacacccccagaaagaacgacagcagcagcagcagccacugccuggaccccaacaacgaggagggcggccacggcgugaagggcugggccuucgacgacggcaacgacguguggaugggcagaaccaucagcgagaagagcagaagcggcuacgagaccuucaaggugaucgagggcuggagcaaccccaacagcaagcugcagaucaacagacaggugaucguggacagaggcaacagaagcggcuacagcggcaucuucagcguggagggcaagagcugcaucaacagaugcuucuacguggagcugaucagaggcagaaaggaggagaccgaggugcuguggaccagcaacagcaucgugguguucugcggcaccagcggcaccuacggcaccggcagcuggcccgacggcgccgacaucaaccugaugcccaucuga

SEQ ID NO: 181654 - RNA, 1410 nt, Artificial Sequence; identical to SEQ ID NO: 176572
  derived and/or modified CDS sequence (opt4) from neuraminidase__InfluenzaA__AEX36259

SEQ ID NO: 181655 - RNA, 1410 nt, Artificial Sequence
  derived and/or modified CDS sequence (opt4) from neuraminidase__InfluenzaA__AEX36270
augaaccccaaccagaagaucaucaccaucggcagcgugagccugaccaucagcaccaucugcuucuucaugcagaucgccauccugaucaccaccgugacccugcacuucaagcaguacgaguucagcagcccccccaacaaccaggugaugcugugcgagcccgccaucaucgagagaaacaucaccgagaucguguaccugaccaacaccaccaucgagaaggagaucugccccaagcuggccgaguacagaaacuggagcaagccccagugcgacaucaccggcuucgcccccuucagcaaggacaacagcaucagacugagcgccggcggcgacaucugggugaccagagagcccuacgugagcugcgaccccgacaagugcuaccaguucgcccugggccagggcaccacccugaacaacgugcacagcaacgacaccgugcacggcagaacccccuacagaacccugcugaugaacgagcugggcgugcccuuccaccugggcaccaagcaggugugcaucgccuggagcagcagcagcugccacgacggcaaggccuggcugcacgugugcgugaccggcgacgacaagaacgccaccgccagcuucaucuacaacggcagacugguggacagcaucgugagcuggagcaaggagauccugagaacccaggagagcgagugcgugugcaucaacggcaccugcaccguggugaugaccgacggcagcgccagcggcaaggccgacaccaagauccuguucaucgaggagggcaagaucgugcacaccagcacccugagcggcagcgcccagcacguggaggagugcagcugcuaccccagauaccccggcgugagaugcgugugcagagacaacuggaagggcagcaacagacccaucguggacaucaacaucaaggacuacagcaucgugagcagauacgugugcagcggccuggugggcgacacccccagaaagaacgacagcagcagcagcagccacugccuggaccccaacaacgaggagggcggccacggcgugaagggcugggccuucgacgacggcaacgacguguggaugggcagaaccaucagcgagaagagcagaagcggcuacgagaccuucaaggugaucgagggcuggagcaaccccaacagcaagcugcagaucaacagacaggugaucguggacagaggcaacagaagcggcuacagcggcaucuucagcguggagggcaagagcugcaucaacagaugcuucuacguggagcugaucagaggcagagaggaggagaccaaggugcuguggaccagcaacagcaucgugguguucugcggcaccagcggcaccuacggcaccggcagcuggcccgacggcgccgacaucaaccugaugcccaucuga

SEQ ID NO: 181656 - RNA, 1410 nt, Artificial Sequence
  derived and/or modified CDS sequence (opt4) from neuraminidase__InfluenzaA__AEX36281
augaaccccaaccagaagaucaucaccaucggcagcgugagccugaccaucagcaccaucugcuucuucaugcagaucgccauccugaucaccaccgugacccugcacuucaagcaguacgaguucagcagcccccccaacaaccaggugaugcugugcgagcccgccaucaucgagagaaacaucaccgagaucguguaccugaccaacaccaccaucgagaaggagaucugccccaagcuggccgaguacagaaacuggagcaagccccagugcgacaucaccggcuucgcccccuucagcaaggacaacagcaucagacugagcgccggcggcgacaucugggugaccagagagcccuacgugagcugcgaccccgacaagugcuaccaguucgcccugggccagggcaccacccugaacaacgugcacagcaacgacaccgugcacggcagaacccccuacagaacccugcugaugaacgagcugggcgugcccuuccaccugggcaccaagcaggugugcaucgccuggagcagcagcagcugccacgacggcaaggccuggcugcacgugugcgugaccggcgacgacaagaacgccaccgccagcuucaucuacaacggcagacugguggacagcaucgugagcuggagcaaggagauccugagaacccaggagagcgagugcgugugcaucaacggcaccugcaccguggugaugaccgacggcagcgccagcggcaaggccgacaccaagauccuguucaucgaggagggcaagaucgugcacaccagcacccugagcggcagcgcccagcacguggaggagugcagcugcuaccccagauaccccggcgugagaugcgugugcagagacaacuggaagggcagcaacagacccaucguggacaucaacaucaaggacuacagcaucgugagcagauacgugugcagcggccuggugggcgacacccccagaaagaacgacagcagcagcagcagccacugccuggaccccaacaacgaggagggcggccacggcgugaagggcugggccuucgacgacggcaacgacguguggaugggcagaaccaucagcgagaagagcagaagcggcuacgagaccuucaaggugaucgagggcuggagcaaccccaacagcaagcugcagaucaacagacaggugaucguggacagaggcaacagaagcggcuacagcggcaucuucagcguggagggcaagagcugcaucaacagaugcuucuacguggagcugaucagaggcagaaaggaggagaccgaggugcuguggaccagcaacagcaucgugguguucugcggcaccagcggcaccuacggcaccggcagcuggcccgacggcgccgacaucaaccugaugcccaucuga

SEQ ID NO: 181657 - RNA, 1410 nt, Artificial Sequence; identical to SEQ ID NO: 181656
  derived and/or modified CDS sequence (opt4) from neuraminidase__InfluenzaA__AEX36292

SEQ ID NO: 181658 - RNA, 1410 nt, Artificial Sequence
  derived and/or modified CDS sequence (opt4) from neuraminidase__InfluenzaA__AEX36303
augaaccccaaccagaagaucaucaccaucggcagcgugagccugaccaucagcaccaucugcuucuucaugcagaucgccauccugaucaccaccgugacccugcacuucaagcaguacgaguucagcagcccccccaacaaccaggugaugcugugcgagcccgccaucaucgagagaaacaucaccgagaucguguaccugaccaacaccaccaucgagaaggagaucugccccaagcuggccgaguacagaaacuggagcaagccccagugcgacaucaccggcuucgcccccuucagcaaggacaacagcaucagacugagcgccggcggcgacaucugggugaccagagagcccuacgugagcugcgaccccgacaagugcuaccaguucgcccugggccagggcaccacccugaacaacgugcacagcaacgacaccgugcacgagagaacccccuacagaacccugcugaugaacgagcugggcgugcccuuccaccugggcaccaagcaggugugcaucgccuggagcagcagcagcugccacgacggcaaggccuggcugcacgugugcgugaccggcgacgacaagaacgccaccgccagcuucaucuacaacggcagacugguggacagcaucgugagcuggagcaaggagauccugagaacccaggagagcgagugcgugugcaucaacggcaccugcaccguggugaugaccgacggcagcgccagcggcaaggccgacaccaagauccuguucaucgaggagggcaagaucgugcacaccagcacccugagcggcagcgcccagcacguggaggagugcagcugcuaccccagauaccccggcgugagaugcgugugcagagacaacuggaagggcagcaacagacccaucguggacaucaacaucaaggacuacagcaucgugagcagauacgugugcagcggccuggugggcgacacccccagaaagaacgacagcagcagcagcagccacugccuggaccccaacaacgaggagggcggccacggcgugaagggcugggccuucgacgacggcaacgacguguggaugggcagaaccaucagcgagaagagcagaagcggcuacgagaccuucaaggugaucgagggcuggagcaaccccaacagcaagcugcagaucaacagacaggugaucguggacagaggcaacagaagcggcuacagcggcaucuucagcguggagggcaagagcugcaucaacagaugcuucuacguggagcugaucagaggcagaaaggaggagaccgaggugcuguggaccagcaacagcaucgugguguucugcggcaccagcggcaccuacggcaccggcagcuggcccgacggcgccgacaucaaccugaugcccaucuga

SEQ ID NO: 181659 - RNA, 1410 nt, Artificial Sequence
  derived and/or modified CDS sequence (opt4) from neuraminidase__InfluenzaA__AEX36314
augaaccccaaccagaagaucaucaccaucggcagcgugagccugaccaucagcaccaucugcuucuucaugcagaucgccauccugaucaccaccgugacccugcacuucaagcaguacgaguucagcagcccccccaacaaccaggugaugcugugcgagcccaccaucaucgagagaaacaucaccgagaucguguaccugaccaacaccaccaucgagaaggagaucugccccaagcuggccgaguacagaaacuggagcaagccccagugcgacaucaccggcuucgcccccuucagcaaggacaacagcaucagacugagcgccggcggcgacaucugggugaccagagagcccuacgugagcugcgaccccgacaagugcuaccaguucgcccugggccagggcaccacccugaacaacgugcacagcaacgacaccgugcacaacagaacccccuacagaacccugcugaugaacgagcugggcgugcccuuccaccugggcaccaagcaggugugcaucgccuggagcagcagcagcugccacgacggcaaggccuggcugcacgugugcgugaccggcgacgacaagaacgccaccgccagcuucaucuacaacggcagacugguggacagcaucgugagcuggagcaaggagauccugagaacccaggagagcgagugcgugugcaucaacggcaccugcgccguggugaugaccgacggcagcgccagcggcaaggccgacaccaagauccuguucaucgaggagggcaagaucgugcacaccagcacccugagcggcagcgcccagcacguggaggagugcagcugcuaccccagauaccccggcgugagaugcgugugcagagacaacuggaagggcagcaacagacccaucguggacaucaacaucaaggacuacagcaucgugagcagauacgugugcagcggccuggugggcgacacccccagaaagaacgacagcagcagcagcagccacugccuggaccccaacaacgaggagggcgaccacggcgugaagggcugggccuucgacgacggcaacgacguguggaugggcagaaccaucagcgagaagagcagaagcggcuacgagaccuucaaggugaucgagggcuggagcaaccccaacagcaagcugcagaucaacagacaggugaucguggacagaggcaacagaagcggcuacagcggcaucuucagcguggagggcaagagcugcaucaacagaugcuucuacguggagcugaucagaggcagaaaggaggagaccgaggugcuguggaccagcaacagcaucgugguguucugcggcaccagcggcaccuacggcaccggcagcuggcccgacggcgccgagaucaaccugaugcccaucuga

SEQ ID NO: 181660 - RNA, 1410 nt, Artificial Sequence; identical to SEQ ID NO: 181656
  derived and/or modified CDS sequence (opt4) from neuraminidase__InfluenzaA__AEX36336

SEQ ID NO: 181661 - RNA, 1410 nt, Artificial Sequence
  derived and/or modified CDS sequence (opt4) from neuraminidase__InfluenzaA__AEX36347
augaaccccaaccagaagaucaucaccaucggcagcgugagccugaccaucagcaccaucugcuucuucaugcagaucgccauccugaucaccaccgugacccugcacuucaagcaguacgaguucagcagcccccccaacaaccaggugaugcugugcgagcccaucaucaucgagagaaacaucaccgagaucguguaccugaccaacaccaccaucgagaaggagaucugccccaagcuggccgaguacagaaacuggagcaagccccagugcgacaucaccggcuucgcccccuucagcaaggacaacagcaucagacugagcgccggcggcgacaucugggugaccagagagcccuacgugagcugcgaccccgacaagugcuaccaguucgcccugggccagggcaccacccugaacaacgugcacagcaacgacaccgugcacaacagaacccccuacagaacccugcugaugaacgagcugggcgugcccuuccaccugggcaccaagcaggugugcaucgccuggagcagcagcagcugccacgacggcaaggccuggcugcacgugugcgugaccggcgacgacaagaacgccaccgccagcuucaucuacaacggcagacugguggacagcaucgugagcuggagcaaggagauccugagaacccaggagagcgagugcgugugcaucaacggcaccugcgccguggugaugaccgacggcagcgccagcggcaaggccgacaccaagauccuguucaucgaggagggcaagaucgugcacgccagcacccugagcggcagcgcccagcacguggaggagugcagcugcuaccccagauaccccggcgugagaugcgugugcagagacaacuggaagggcagcaacagacccaucguggacaucaacaucaaggacuacagcaucgugagcagauacgugugcagcggccuggugggcgacacccccagaaagaacgacagcagcagcagcagccacugccuggaccccaacaacgaggagggcggccacggcgugaagggcugggccuucgacgacggcaacgacguguggaugggcagaaccaucagcgagaagagcagaagcggcuacgagaccuucaaggugaucgagggcuggagcaaccccaacagcaagcugcagaucaacagacaggugaucguggacagaggcaacagaagcggcuacagcggcaucuucagcguggagggcaagagcugcaucaacagaugcuucuacguggagcugaucagaggcagaaaggaggagaccgaggugcuguggaccagcaacagcaucgugguguucugcggcaccagcggcaccuacggcaccggcagcuggcccgacggcgccgacaucaaccugaugcccaucuga

SEQ ID NO: 181662 - RNA, 1410 nt, Artificial Sequence; identical to SEQ ID NO: 175944
  derived and/or modified CDS sequence (opt4) from neuraminidase__InfluenzaA__AEX36358

SEQ ID NO: 181663 - RNA, 1410 nt, Artificial Sequence
  derived and/or modified CDS sequence (opt4) from neuraminidase__InfluenzaA__AEX36369
augaaccccaaccagaagaucaucaccaucggcagcgugagccugaccaucagcaccaucugcuucuucaugcagaucgccauccugaucaccaccgugacccugcacuucaagcaguacgaguucaacagcccccccaacaaccaggugaugcugugcgagcccaccaucaucgagagaaacaucaccgagaucguguaccugaccaacaccaccaucgagaaggagaucugccccaagcuggccgaguacagaaacuggagcaagccccagugcgacaucaccggcuucgcccccuucagcaaggacaacagcaucagacugagcgccggcggcgacaucugggugaccagagagcccuacgugagcugcgaccccgacaagugcuaccaguucgcccugggccagggcaccacccugaacaacgugcacagcaacgacaccgugagaaacagaacccccuacagaacccugcugaugaacgagcugggcgugcccuuccaccugggcaccaagcaggugugcaucgccuggagcagcagcagcugccacgacggcaaggccuggcugcacgugugcaucaccggcgacgacaagaacgccaccgccagcuucaucuacaacggcagacugguggacagcaucgugagcuggagcaaggagauccugagaacccaggagagcgagugcgugugcaucaacggcaccugcaccguggugaugaccgacggcagcgccagcggcaaggccgacaccaagauccuguucaucgaggagggcaagaucgugcacaccagcacccugagcggcagcgcccagcacguggaggagugcagcugcuaccccagauaccccggcgugagaugcgugugcagagacaacuggaagggcagcaacagacccaucguggacaucaacaucaaggaccacagcaucgugagcagcuacgugugcagcggccuggugggcgacacccccagaaagaacgacagcagcagcagcagccacugccuggaccccaacaacgaggagggcggccacggcgugaagggcugggccuucgacgacggcaacgacguguggaugggcagaaccaucagcgagaagagcagacugggcuacgagaccuucaaggugaucgagggcuggagcaaccccaagagcaagcugcagaucaacagacaggugaucguggacagaggcaacagaaccggcuacagcggcaucuucagcguggagggcaagagcugcaucaacagaugcuucuacguggagcugaucagaggcagaaaggaggagaccgaggugcuguggaccagcaacagcaucgugguguucugcggcaccagcggcaccuacggcaccggcagcuggcccgacggcgccgacaucaaccugaugcccaucuga

SEQ ID NO: 181664 - RNA, 1410 nt, Artificial Sequence
  derived and/or modified CDS sequence (opt4) from neuraminidase__InfluenzaA__AEX36391
augaaccccaaccagaagaucaucaccaucggcagcgugagccugaccaucagcaccaucugcuucuucaugcagaucgccauccugaucaccaccgugacccugcacuucaagcaguacgaguucaacagcccccccaacaaccaggugaugcugugcgagcccaccaucaucgagagaaacaucaccgagaucguguaccugaccaacaccaccaucgagaaggagaucugccccaagcuggccgaguacagaaacuggagcaagccccagugcgacaucgccggcuucgcccccuucagcaaggacaacagcaucagacugagcgccggcggcgacaucugggugaccagagagcccuacgugagcugcgaccccgacaagugcuaccaguucgcccugggccagggcaccacccugaacaacgugcacagcaacgacaccgugagaaacagaacccccuacagaacccugcugaugaacgagcugggcgugcccuuccaccugggcaccaagcaggugugcaucgccuggagcagcagcagcugccacgacggcaaggccuggcugcacgugugcaucaccggcgacgacaagaacgccaccgccagcuucaucuacaacggcagacugguggacagcaucgugagcuggagcaaggagauccugagaacccaggagagcgagugcgugugcaucaacggcaccugcaccguggugaugaccgacggcagcgccagcggcaaggccgacaccaagauccuguucaucgaggagggcaagaucgugcacaccagcacccugagcggcagcgcccagcacguggaggagugcagcugcuaccccagauaccccggcgugagaugcgugugcagagacaacuggaagggcagcaacagacccaucguggacaucaacaucaaggaccacagcaucgugagcagcuacgugugcagcggccuggugggcgacacccccagaaagaacgacagcagcagcagcagccacugccuggaccccaacaacgaggagggcggccacggcgugaagggcugggccuucgacgacggcaacgacguguggaugggcagaaccaucagcgagaagagcagacugggcuacgagaccuucaaggugaucgagggcuggagcaaccccaagagcaagcugcagaucaacagacaggugaucguggacagaggcgacagaagcggcuacagcggcaucuucagcguggagggcaagagcugcaucaacagaugcuucuacguggagcugaucagaggcagaaaggaggagaccgaggugcuguggaccagcaacagcaucgugguguucugcggcaccagcggcaccuacggcaccggcagcuggcccgacggcgccgacaucaaccugaugcccaucuga

SEQ ID NO: 181665 - RNA, 1410 nt, Artificial Sequence
  derived and/or modified CDS sequence (opt4) from neuraminidase__InfluenzaA__AEX36402
augaaccccaaccagaagaucaucaccaucggcagcgugagccugaccaucagcaccaucugcuucuucaugcagaucgccauccugaucaccaccgugacccugcacuucaagcaguacgaguucaacagcccccccaacaaccaggugaugcugugcgagcccaccaucaucgagagaaacaucaccgagaucguguaccugaccaacaccaccaucgagaaggagaucugccccaagcuggccgaguacagaaacuggagcaagccccagugcgacaucaccggcuucgcccccuucagcaaggacaacagcaucagacugagcgccggcggcgacaucugggugaccagagagcccuacgugagcugcgaccccgacaagugcuaccaguucgcccugggccagggcaccacccugaacaacgugcacagcaacgacaccgugagaggcagaacccccuacagaacccugcugaugaacgagcugggcgugcccuuccaccugggcaccaagcaggugugcaucgccuggagcagcagcagcugccacgacggcaaggccuggcugcacgugugcaucaccggcgacgacaagaacgccaccgccagcuucaucuacaacggcagacugguggacagcaucgugagcuggagcaaggagauccugagaacccaggagagcgagugcgugugcaucaacggcaccugcaccguggugaugaccgacggcagcgccagcggcaaggccgacaccaagauccuguucaucgaggagggcaagaucgugcacaccagcacccugagcggcagcgcccagcacguggaggagugcagcugcuaccccagauuccccggcgugagaugcgugugcagagacaacuggaagggcagcaacagacccaucguggacaucaacaucaaggaccacagcaucgugagcagcuacgugugcagcggccuggugggcgacacccccagaaagaacgacagcagcagcagcagccacugccuggaccccaacaacgaggagggcggccacggcgugaagggcugggccuucgacgacggcaacgacguguggaugggcagaaccaucagcgagaagagcagacugggcuacgagaccuucaaggugaucgagggcuggagcaaccccaagagcaagcugcagaucaacagacaggugaucguggacagaggcaacagaaccggcuacagcggcaucuucagcguggagggcaagagcugcaucaacagaugcuucuacguggagcugaucagaggcagaaaggaggagaccgaggugcuguggaccagcaacagcaucgugguguucugcggcaccagcggcaccuacggcaccggcagcuggcccgacggcgccgacaucaaccugaugcccaucuga

SEQ ID NO: 181666 - RNA, 1410 nt, Artificial Sequence; identical to SEQ ID NO: 175944
  derived and/or modified CDS sequence (opt4) from neuraminidase__InfluenzaA__AEX36413

SEQ ID NO: 181667 - RNA, 1410 nt, Artificial Sequence
  derived and/or modified CDS sequence (opt4) from neuraminidase__InfluenzaA__AEX36424
augaaccccaaccagaagaucaucaccaucggcagcgugagccugaccaucagcaccaucugcuucuucaugcagaucgccauccugaucaccaccgugacccugcacuucaagcaguacgaguucaacagcccccccaacaaccaggugaugcugugcgagcccaccaucaucgagagaaacaucaccgagaucguguaccugaccaacaccaccaucgagaaggagaucugcagcaagcuggccgaguacagaaacuggagcaagccccagugcgacaucaccggcuucgcccccuucagcaaggacaacagcaucagacugagcgccggcggcgacaucugggugaccagagagcccuacgugagcugcgaccccgacaagugcuaccaguucgcccugggccagggcaccacccugaacaacgugcacagcaacgacaccaucagagacagaacccccuacagaacccugcugaugaacgagcugggcgugcccuuccaccugggcaccaagcaggugugcaucgccuggagcagcagcagcugccacgacggcaaggccuggcugcacgugugcaucaccggcgacgacaagaacgccaccgccagcuucaucuacaacggcagacugguggacagcguggugagcuggagcaaggagauccugagaacccaggagagcgagugcgugugcaucaacggcaccugcaccguggugaugaccgacggcagcgccagcggcaaggccgacaccaagauccuguucaucgaggagggcaagaucgugcacaccagcacccugagcggcagcgcccagcacguggaggagugcagcugcuaccccagauaccccggcgugagaugcgugugcagagacaacuggaagggcagcaacagacccaucguggacaucaacaucaaggaccacagcaucgugagcagcuacgugugcagcggccuggugggcgacacccccagaaagaacgacagcagcagcagcagccacugccuggaccccaacaacgaggagggcggccacggcgugaagggcugggccuucgacgacggcaacgacguguggaugggcagaaccaucagcgagaagagcagacugggcuacgagaccuucaaggugaucgagggcuggagcaaccccaagagcaagcugcagaucaacagacaggugaucguggacagaggcaacagaagcggcuacagcggcaucuucagcguggagggcaagagcugcaucaacagaugcuucuacguggagcugaucagaggcagaaaggaggagaccgaggugcuguggaccagcaacagcaucgugguguucugcggcaccagcggcaccuacggcaccggcagcuggcccgacggcgccgacaucaaccugaugcccaucuga

SEQ ID NO: 181668 - RNA, 1410 nt, Artificial Sequence
  derived and/or modified CDS sequence (opt4) from neuraminidase__InfluenzaA__AEX36435
augaaccccaaccagaagaucaucaccaucggcagcgugagccugaccaucagcaccaucugcuucuucaugcagaucgccauccugaucaccaccgugacccugcacuucaagcaguacgaguucaacagcccccccaacaaccaggugaugcugugcgagcccaccaucaucgagagaaacaucaccgagaucguguaccugaccaacaccaccaucgagaaggagaucugccccaagcuggccgaguacagaaacuggagcaagccccagugcgacaucaccggcuucgcccccuucagcaaggacaacagcaucagacugagcgccggcggcgacaucugggugaccagagagcccuacgugagcugcgaccccgacaagugcuaccaguucgcccugggccagggcaccacccugaacaacgugcacagcaacgacaccgugagagacagaacccccuacagaacccugcugaugaacgagcugggcgugcccuuccaccugggcaccaagcaggugugcaucgccuggagcagcagcagcugccacgacggcaaggccuggcugcacgugugcaucaccggcgacgacaagaacgccaccgccagcuucaucuacaacggcagacugguggacagcguggugagcuggagcaaggagauccugagaacccaggagagcgagugcgugugcaucaacggcaccugcaccguggugaugaccgacggcagcgccagcggcaaggccgacaccaagauccuguucaucaaggagggcaagaucgugcacaccagcacccugagcggcagcgcccagcacguggaggagugcagcugcuaccccagauaccccggcgugagaugcgugugcagagacaacuggaagggcagcaacagacccaucguggacaucaacaucaaggaccacagcaucgugagcagcuacgugugcagcggccuggugggcgacacccccagaaagaacgacagcagcagcagcagccacugccuggaccccaacaacgaggagggcggccacggcgugaagggcugggccuucgacgacggcaacgacguguggaugggcagaaccaucagcgagaagagcagacugggcuacgagaccuucaaggugaucgagggcuggagcaacagcaagagcaagcugcagaucaacagacaggugaucguggacagaggcaacagaagcggcuacagcggcaucuucagcguggagggcaagagcugcaucaacagaugcuucuacguggagcugaucagaggcagaaaggaggagaccgaggugcuguggaccagcaacagcaucgugguguucugcggcaccagcggcaccuacggcaccggcagcuggcccgacggcgccgacaucaaccugaugcccaucuga

SEQ ID NO: 181669 - RNA, 1410 nt, Artificial Sequence; identical to SEQ ID NO: 176126
  derived and/or modified CDS sequence (opt4) from neuraminidase__InfluenzaA__AEX36446

SEQ ID NO: 181670 - RNA, 1410 nt, Artificial Sequence; identical to SEQ ID NO: 176126
  derived and/or modified CDS sequence (opt4) from neuraminidase__InfluenzaA__AEX36457

SEQ ID NO: 181671 - RNA, 1410 nt, Artificial Sequence
  derived and/or modified CDS sequence (opt4) from neuraminidase__InfluenzaA__AEX36468
augaaccccaaccagaagaucaucaccaucggcagcgugagccugaccaucagcaccaucugcuucuucaugcagaucgccauccugaucaccaccgugacccugcacuucaagcaguacgaguucagcagcccccccaacaaccaggugaugcugugcgagcccaccaucaucgagagaaacaucaccgagaucguguaccugaccaacaccaccaucgagaaggagaucugccccaagcuggccgaguacagaaacuggagcaagccccagugcgacaucaccggcuucgcccccuucagcaaggacaacagcaucagacugagcgccggcggcgacaucugggugaccagagagcccuacgugagcugcgaccccgacaagugcuaccaguucgcccugggccagggcaccacccugaacaacgugcacagcaacgacaccgugcacaacagaacccccuacagaacccugcugaugaacgagcugggcgugcccuuccaccugggcaccaagcaggugugcaucgccuggagcagcagcagcugccacgacggcaaggccuggcugcacgugugcgugaccggcgacgacaagaacgccaccgccagcuucaucuacaacggcagacugguggacagcaucgugagcuggagcaaggagauccugagaacccaggagagcgagugcgugugcaucaacggcaccugcaccguggugaugaccgacggcagcgccagcggcaaggccgacaccaagauccuguucaucgaggagggcaagaucgugcacaccagcacccugagcggcaacgcccagcacguggaggagugcagcugcuaccccagauaccccggcgugagaugcgugugcagagacaacuggaagggcagcaacagacccaucguggacaucaacaucaaggacuacagcaucgugagcagauacgugugcagcggccuggugggcgacacccccagaaagaacgacagcagcagcagcagccacugccuggaccccaacaacgaggagggcggccacggcgugaagggcugggccuucgacgacggcaacgacguguggaugggcagaaccaucagcgagaagagcagaagcggcuacgagaccuucaaggugaucgagggcuggagcaaccccaacagcaagcugcagaucaacagacaggugaucguggacagaggcaacagaagcggcuacagcggcaucuucagcguggagggcaagagcugcaucaacagaugcuucuacguggagcugaucagaggcagaaaggaggagaccaaggugcuguggaccagcaacagcaucgugguguucugcggcaccagcggcaccuacggcaccggcagcuggcccgacggcgccgacaucaaccugaugcccaucuga

SEQ ID NO: 181672 - RNA, 1410 nt, Artificial Sequence
  derived and/or modified CDS sequence (opt4) from neuraminidase__InfluenzaA__AEX36479
augaaccccaaccagaagaucaucaccaucggcagcgugagccugaccaucagcaccaucugcuucuucaugcagaucgccauccugaucaccaccgugacccugcacuucaagcaguacgaguucagcagcccccccaacaaccaggugaugcugugcgagcccaccaucaucgagagaaacaucaccgagaucguguaccccaccaacaccaccaccgagaaggagaucugccccaagcuggccgaguacagaaacuggagcaagccccagugcgacaucaccggcuucgcccccuucagcaaggacaacagcaucagacugagcgccggcggcgacaucugggugaccagagagcccuacgugagcugcgaccccgacaagugcuaccaguucgcccugggccagggcaccacccugaacaacgugcacagcaacgacaccgugcacgacagaacccccuacagaacccugcugaugaacgagcugggcgugcccuuccaccugggcaccaagcaggugugcaucgccuggagcagcagcagcugccacgacggcaaggccuggcugcacgugugcgugaccggcgacgacaagaacgccaccgccagcuucaucuacaacggcagacugguggacagcaucgugagcuggagcaaggagauccugagaacccaggagagcgagugcgugugcaucaacggcaccugcaccguggugaugaccgacggcagcgccagcggcaaggccgacaccaagauccuguucaucgaggagggcaagaucgugcacaccagcacccugagcggcagcgcccagcacguggaggagugcagcugcuaccccagauaccccggcgugagaugcgugugcagagacaacuggaagggcagcaacagacccaucguggacaucaacaucaaggacuacagcaucgugagcagauacgugugcagcggccuggugggcgacacccccagaaagaacgacagcagcagcagcagccacugccuggaccccaacaacgaggagggcggccacggcgugaagggcugggccuucgacgacggcaacgacguguggaugggcagaaccaucagcgagaagcugagaagcggcuacgagaccuucaaggugaucgagggcuggagcaaccccaacagcaagcugcagaucaacagacaggugaucguggacagaggcaacagaagcggcuacagcggcaucuucagcguggagggcaagagcugcaucaacagaugcuucuacguggagcugaucagaggcagaaaggaggagaccgaggugcuguggaccagcaacagcaucgugguguucugcggcaccagcggcaccuacggcaccggcagcuggcccgacggcgccgacaucaaccugaugcccaucuga

SEQ ID NO: 181673 - RNA, 1410 nt, Artificial Sequence
  derived and/or modified CDS sequence (opt4) from neuraminidase__InfluenzaA__AEX36490
augaaccccaaccagaagaucaucaccaucggcagcgugagccugaccaucagcaccaucugcuucuucaugcagaucgccauccugaucaccaccgugacccugcacuucaagcaguacgaguucagcuacccccccaacaaccaggugaugcugugcgagcccaccaucaucgagagaaacaucaccgagaucguguaccugaccaacaccaccaucgagaaggagaucugccccaagcuggccgaguacagaaacuggagcaagccccagugcgacaucaccggcuucgcccccuucagcaaggacaacagcaucagacugagcgccggcggcgacaucugggugaccagagagcccuacgugagcugcgaccccgacaagugcuaccaguucgcccugggccagggcaccacccugaacaacgugcacagcaacgacaccgugcacgacagaacccccuacagaacccugcugaugaacgagcugggcgugcccuuccaccugggcaccaagcaggugugcaucgccuggagcagcagcagcugccacgacggcaaggccuggcugcacgugugcgugaccggcgacgacaagaacgccaccgccagcuucaucuacaacggcagacugguggacagcaucgugagcuggagcaaggagauccugagaacccaggagagcgagugcgugugcaucaacggcaccugcaccguggugaugaccgacggcagcgccagcggcaaggccgacaccaagauccuguucaucgaggagggcaagaucgugcacaccagcacccugagcggcaacgcccagcacguggaggagugcagcugcuaccccagauaccccggcgugagaugcgugugcagagacaacuggaagggcagcaacagacccaucguggacaucaacaucaaggacuacagcaucgugagcagauacgugugcagcggccuggugggcgacacccccagaaagaacgacagcagcagcagcagccacugccuggaccccaacaacgaggagggcggccacggcgugaagggcugggccuucgacgacggcaacgacguguggaugggcagaaccaucagcgagaagagcagaagcggcuacgagaccuucaaggugaucgagggcuggagcaaccccaacagcaagcugcagaucaacagacaggugaucguggacagaggcaacagaagcggcuacagcggcaucuucagcguggagggcaagagcugcaucaacagaugcuucuacguggagcugaucagaggcagaaaggaggagaccaaggugcuguggaccagcaacagcaucgugguguucugcggcaccagcggcaccuacggcaccggcagcuggcccgacggcgccgacaucaaccugaugcccaucuga

SEQ ID NO: 181674 - RNA, 1410 nt, Artificial Sequence
  derived and/or modified CDS sequence (opt4) from neuraminidase__InfluenzaA__AEX36501
augaaccccaaccagaagaucaucaccaucggcagcgugagccugaccaucagcaccaucugcuucuucaugcagaucgccauccugaucaccaccgugacccugcacuucaagcaguacgaguucagcagcccccccaacaaccaggugaugcugugcgagcccgccaucaucgagagaaacaucaccgagaucguguaccugaccaacaccaccaucgagaaggagaagugccccaagcuggccgaguacagaaacuggagcaagccccagugcgacaucaccggcuucgcccccuucagcaaggacaacagcaucagacugagcgccggcggcgacaucugggugaccagagagcccuacgugagcugcgaccccgacaagugcuaccaguucgcccugggccagggcaccacccugaacaacgugcacagcaacgacaccgugcacggcagaacccccuacagaacccugcugaugaacgagcugggcgugcccuuccaccugggcaccaagcaggugugcaucgccuggagcagcagcagcugccacgacggcaaggccuggcugcacgugugcgugaccggcgacgacaagaacgccaccgccagcuucaucuacaacggcagacugguggacagcaucgugagcuggagcaaggagauccugagaacccaggagagcgagugcgugugcaucaacggcaccugcaccguggugaugaccgacggcagcgccagcggcaaggccgacaccaagauccuguucaucgaggagggcaagaucgugcacaccagcacccugagcggcagcgcccagcacguggaggagugcagcugcuaccccagauaccccggcgugagaugcgugugcagagacaacuggaagggcagcaacagacccaucguggacaucaacaucaaggacuacagcaucgugagcagauacgugugcagcggccuggugggcgacacccccagaaagagcgacagcagcagcagcagccacugccuggaccccaacaacgaggagggcggccacggcgugaagggcugggccuucgacgacggcaacgacguguggaugggcagaaccaucagcgagaagagcagaagcggcuacgagaccuucaaggugaucgagggcuggagcaaccccaacagcaagcugcagaucaacagacaggugaucguggacagaggcaacagaagcggcuacagcggcaucuucagcguggagggcaagagcugcaucaacagaugcuucuacguggagcugaucagaggcagaaaggaggagaccgaggugcuguggaccagcaacagcaucgugguguucugcggcaccagcggcaccuacggcaccggcagcuggcccgacggcgccgacaucaaccugaugcccaucuga

SEQ ID NO: 181675 - RNA, 1410 nt, Artificial Sequence
  derived and/or modified CDS sequence (opt4) from neuraminidase__InfluenzaA__AEX36512
augaaccccaaccagaagaucaucaccaucggcagcgugagccugaccaucagcaccaucugcuucuucaugcagaucgccauccugaucaccaccgugacccugcacuucaagcaguacgaguucagcagcccccccaacaaccaggugaugcugugcgagcccgccaucaucgagagaaacaucaccgagaucguguaccugaccaacaccaccaucgagaaggagaucugccccaagcuggccgaguacagaaacuggagcaagccccagugcgacaucaccggcuucgcccccuucagcaaggacaacagcaucagacugagcgccggcggcgacaucugggugaccagagagcccuacgugagcugcgaccccgacaagugcuaccaguucgcccugggccagggcaccacccugaacaacgugcacagcaacgacaccgugcacgacagaacccccuacagaacccugcugaugaacgagcugggcgugcccuuccaccugggcaccaagcaggugugcaucgccuggagcagcagcagcugccacgacggcaaggccuggcugcacgugugcgugaccggcgacgacaagaacgccaccgccagcuucaucuacaacggcagacugguggacagcaucgugagcuggagcaaggagauccugagaacccaggagagcgagugcgugugcaucaacggcaccugcaccguggugaugaccgacggcagcgccagcggcaaggccgacaccaagauccuguucaucgaggagggcaagaucgugcacaccagcacccugagcggcagcgcccagcacguggaggagugcagcugcuaccccagauaccccggcgugagaugcgugugcagagacaacuggaagggcagcaacagacccaucguggacaucaacaucaaggacuacagcaucgugagcagauacgugugcagcggccuggugggcgacacccccagaaagaacgacagcagcagcagcagccacugccuggaccccaacaacgaggagggcggccacggcgugaagggcugggccuucgacgacggcaacgacguguggaugggcagaaccaucagcgagaagagcagaagcggcuacgagaccuucaaggugaucgagggcuggagcaaccccaacagcaagcugcagaucaacagacaggugaucguggacagaggcaacagaagcggcuacagcggcaucuucagcguggagggcaagagcugcaucaacagaugcuucuacguggagcugaucagaggcagaaaggaggagaccgaggugcuguggaccagcaacagcaucgugguguucugcggcaccagcggcaccuacggcaccggcagcuggcccgacggcgccgacaucaaccugaugcccaucuga

SEQ ID NO: 181676 - RNA, 1410 nt, Artificial Sequence
  derived and/or modified CDS sequence (opt4) from neuraminidase__InfluenzaA__AEX36523
augaaccccaaccagaagaucaucaccaucggcagcgugagccugaccaucagcaccaucugcuucuucaugcagaucgccauccugaucaccaccgugacccugcacuucaagcaguacgaguucaacagcccccccaacaaccaggugaugcugugcgagcccaccaucaucgagagaaacaucaccgagaucguguaccugaccaacaccaccaucgagaaggagaucugccccaagcuggccgaguacagaaacuggagcaagccccagugcgacaucaccggcuucgcccccuucagcaaggacaacagcaucagacugagcgccggcggcgacaucugggugaccagagagcccuacgugagcugcgaccccgacaagugcuaccaguucgcccugggccagggcaccacccugaacaacgugcacagcaacgacaccgugagagacagaacccccuacagaacccugcugaugaacgagcugggcgugcccuuccaccugggcaccaagcaggugugcaucgccuggagcagcagcagcugccacgacggcaaggccuggcugcacgugugcaucaccggcgacgacaagaacgccaccgccagcuucaucuacaacggcagacugguggacagcguggugagcuggagcaaggagauccugagaacccaggagagcgagugcgugugcaucaacggcaccugcaccguggugaugaccgacggcagcgccagcggcgaggccgacaccaagauccuguucaucgaggagggcaagaucgugcacaccagcacccugagcggcagcgcccagcacguggaggagugcagcugcuaccccagauaccccggcgugagaugcgugugcagagacaacuggaagggcagcaacagacccaucguggacaucaacaucaaggaccacagcaucgugagcagcuacgugugcagcggccuggugggcgacacccccagaaagaacgacagcagcagcagcagccacugccuggaccccaacaacgaggagggcggccacggcgugaagggcugggccuucgacgacggcaacgacguguggaugggcagaaccaucagcgagaagagcagacugggcuacgagaccuucaaggugaucgagggcuggagcaaccccaagagcaagcugcagaucaacagacaggugaucguggacagaggcaacagaagcggcuacagcggcaucuucagcguggagggcaagagcugcaucaacagaugcuucuacguggagcugaucagaggcagaaaggaggagaccgaggugcuguggaccagcaacagcaucgugguguucugcggcaccagcggcaccuacggcaccggcagcuggcccgacggcgccgacaucaaccugaugcccaucuga

SEQ ID NO: 181677 - RNA, 1410 nt, Artificial Sequence; identical to SEQ ID NO: 176659
  derived and/or modified CDS sequence (opt4) from neuraminidase__InfluenzaA__AEX36534

SEQ ID NO: 181678 - RNA, 1410 nt, Artificial Sequence
  derived and/or modified CDS sequence (opt4) from neuraminidase__InfluenzaA__AEX36545
augaaccccaaccagaagaucaucaccaucggcagcgugagccugaccaucagcaccaucugcuucuucaugcagaucgccauccugaucaccaccgugacccugcacuucaagcaguacgaguucaacagcccccccaacaaccaggugaugcugugcgagcccaccaucaucgagagaaacaucaccgagaucguguaccugaccaacaccaccaucgagaaggagaucugccccaagcuggccgaguacagaaacuggagcaagccccagugcgacaucaccggcuucgcccccuucagcaaggacaacagcaucagacugagcgccggcggcgacaucugggugaccagagagcccuacgugagcugcgaccccgacaagugcuaccaguucgcccugggccagggcaccacccugaacaacgugcacagcaacgacaccgugagagacagaacccccuacagaacccugcugaugaacgagcugggcgugcccuuccaccugggcaccaagcaggugugcaucgccuggagcagcagcagcugccacgacggcaaggccuggcugcacgugugcaucaccggcgacgacaagaacgccaccgccagcuucaucuacaacggcagacugguggacagcguggugagcuggagcaaggagauccugagaacccaggagagcgagugcgugugcaucaacggcaccugcaccguggugaugaccgacggcagcgcccugggcaaggccgacaccaagauccuguucaucgaggagggcaagaucgugcacaccagcacccugagcggcagcgcccagcacguggaggagugcagcugcuaccccagauaccccggcgugagaugcgugugcagagacaacuggaagggcagcaacagacccaucguggacaucaacaucaaggaccacagcaucgugagcagcuacgugugcagcggccuggugggcgacacccccagaaagaacgacagcagcagcagcagccacugccuggaccccaacaacgaggagggcggccacggcgugaagggcugggccuucgacgacggcaacgacguguggaugggcagaaccaucagcgagaagagcagacugggcuacgagaccuucaaggugaucgagggcuggagcaaccccaagagcaagcugcagaucaacagacaggugaucguggacagaggcaacagaagcggcuacagcggcaucuucagcguggagggcaagagcugcaucaacagaugcuucuacguggagcugaucagaggcagaaaggaggagaccgaggugcuguggaccagcaacagcaucgugguguucugcggcaccagcggcaccuacggcaccggcagcuggcccgacggcgccgacaucaaccugaugcccaucuga

SEQ ID NO: 181679 - RNA, 1410 nt, Artificial Sequence; identical to SEQ ID NO: 176572
  derived and/or modified CDS sequence (opt4) from neuraminidase__InfluenzaA__AEX36556

SEQ ID NO: 181680 - RNA, 1410 nt, Artificial Sequence; identical to SEQ ID NO: 176572
  derived and/or modified CDS sequence (opt4) from neuraminidase__InfluenzaA__AEX36567

SEQ ID NO: 181681 - RNA, 1410 nt, Artificial Sequence
  derived and/or modified CDS sequence (opt4) from neuraminidase__InfluenzaA__AEX36578
augaaccccaaccagaagaucaucaccaucggcagcgugagccugaccaucagcaccaucugcuucuucaugcagaucgccauccugaucaccaccgugacccugcacuucaagcaguacgaguucaacagcccccccaacaaccaggugaugcugugcgagcccaccaucaucgagagaaacaucaccgagaucguguaccugaccaacaccaccaucgagaaggagaucugccccaagcuggccgaguacagaaacuggagcaagccccagugcgacaucaccggcuucgcccccuucagcaaggacaacagcaucagacugagcgccggcggcgacaucugggugaccagagagcccuacgugagcugcgaccccgacaagugcuaccaguucgcccugggccagggcaccacccugaacaacgugcacagcaacgacaccgugagagacagaacccccuacagaacccugcugaugaacgagcugggcgugcccuuccaccugggcaccaagcaggugugcaucgccuggagcagcagcagcugccacgacggcaaggccuggcugcacgugugcaucaccggcgacgacaagaacgccaccgccagcuucaucuacaacggcagacugguggacagcguggugagcuggagcaaggagauccugagaacccaggagagcgagugcgugugcaucaacggcaccugcaccguggugaugaccgacggcagcgccagcggcaaggccgacaccaagauccuguucaucaaggagggcaagaucgugcacaccagcacccugagcggcagcgcccagcacguggaggagugcagcugcuaccccagauaccccggcgugagaugcgugugcagagacaacuggaagggcagcaacagacccaucguggacaucaacaucaaggaccacagcaucgugagcagcuacgugugcagcggccuggugggcgacacccccagaaagaacgacagcagcagcagcagccacugccuggaccccaacaacgaggagggcggccacggcgugaagggcugggccuucgacgacggcaacgacguguggaugggcagaaccaucagcgagaagagcagacugggcuacgagaccuucaaggugaucgagggcuggagcaaccccaagagcaagcugcagaucaacagacaggugaucguggacagaggcaacagaagcggcuacagcggcaucuucagcguggagggcaagagcugcaucaacagaugcuucuacguggagcugaucagaggcagaaaggaggagaccgaggugcuguggaccagcaacagcaucgugguguucugcggcaccagcggcaccuacggcaccggcagcuggcccgacggcgccgacaucaaccugaugcccaucuga

SEQ ID NO: 181682 - RNA, 1410 nt, Artificial Sequence; identical to SEQ ID NO: 181681
  derived and/or modified CDS sequence (opt4) from neuraminidase__InfluenzaA__AEX36589

SEQ ID NO: 181683 - RNA, 1410 nt, Artificial Sequence
  derived and/or modified CDS sequence (opt4) from neuraminidase__InfluenzaA__AEX36600
augaaccccaaccagaagaucaucaccaucggcagcgugagccugaccaucagcaccaucugcuucuucaugcagaucgccauccugaucaccaccgugacccugcacuucaagcaguacgaguucaacagcccccccaacaaccaggugaugcugugcgagcccaccaucaucgagagaaacaucaccgagaucguguaccugaccaacaccaccaucgagaaggagaucugccccaagcuggccgaguacagaaacuggagcaagccccagugcgacaucaccggcuucgcccccuucagcaaggacaacagcaucagacugagcgccggcggcgacaucugggugaccagagagcccuacgugagcugcgaccccgacaagugcuaccaguucgcccugggccagggcaccacccugaacaacgugcacagcaacgacaccgugagagacagaacccccuacagaacccugcugaugaacgagcugggcgugcccuuccaccugggcaccaagcaggugugcaucgccuggagcagcagcagcugccacgacggcaaggccuggcugcacgugugcaucaccggcgacgacaagaacgccaccgccagcuucaucuacaacggcagacugguggacagcguggugagcuggagcaaggagauccugagaacccaggagagcgagugcgugugcaucaacggcaccugcaccguggugaugaccgacggcagcgccagcggcaaggccgacaccaagauccuguucaucaaggagggcaagaucgugcacaccagcacccugagcggcagcgcccagcacguggaggagugcagcugcuaccccagauaccccggcgugagaugcgugugcagagacaacuggaagggcagcaacagacccaucguggacaucaacaucaaggaccacagcaucgugagcagcuacgugugcagcggccuggugggcgacacccccagaaagaacgacagcagcagcagcagccacugccuggaccccaacaacgaggagggcggccacggcgugaagggcugggccuucgacgacggcaacaacguguggaugggcagaaccaucagcgagaagagcagacugggcuacgagaccuucaaggugaucgagggcuggagcaaccccaagagcaagcugcagaucaacagacaggugaucguggacagaggcaacagaagcggcuacagcggcaucuucagcguggagggcaagagcugcaucaacagaugcuucuacguggagcugaucagaggcagaaaggaggagaccgaggugcuguggaccagcaacagcaucgugguguucugcggcaccagcggcaccuacggcaccggcagcuggcccgacggcgccgacaucaaccugaugcccaucuga

SEQ ID NO: 181684 - RNA, 1410 nt, Artificial Sequence; identical to SEQ ID NO: 174774
  derived and/or modified CDS sequence (opt4) from neuraminidase__InfluenzaA__AEX36622

SEQ ID NO: 181685 - RNA, 1410 nt, Artificial Sequence
  derived and/or modified CDS sequence (opt4) from neuraminidase__InfluenzaA__AEX63619
augaaccccaaccagaagaucaucaccaucggcagcaucugcaugaccaucggcaucgccagccugauccugcagaucggcaacaucaucagcaucuggaucagccacagcauccagaccgagaaccagaaccagcccgagaucugcaaccagaacgugaucaccuacgagaacaacaccugggugaaccagaccuacgugaacgugagcaacaccaacuucguggccgagcaggccguggccagcgugaagcuggccggcaacagcagccugugccccgugagcggcugggccaucuacagcaaggacaacagcgugagaaucggcagcaagggcgacguguucgugaucagagagcccuucaucagcugcagccacagcgagugcagaaccuucuuccugacccagggcgcccugcugaacgacaagcacagcaacggcaccaucaaggacagaagccccuacagaacccugaugagcugccccaucggcgaggugcccagccccuacaacagcagauucgagagcguggccuggagcgccagcgccugccacgacggcaccagcuggcugaccaucggcaucagcggccccgacaacggcgccguggccgugcugaaguacaacggcaucaucaccgacaccaucaagagcuggagaaagaacauccugagaacccaggagagcgagugcgccugcgugaacggcagcugcuucaccgugaugaccgacggccccagcaacggccaggccagcuacaagguguucaagaucgagagaggcaagguggugaagagcguggagcugaacgcccccaacuaccacuacgaggagugcagcugcuaccccgagagcagcgagaucaccugcgugugcagagacaacuggcacggcagcaacagacccugggugagcuucaaccagaaccuggaguaccagaugggcuacaucugcagcggcaucuucggcgacaaccccagacccaacgacaagaccggcagcugcggccccguguucagcaacggcgccaacggcgugaagggcuucagcuucaaguacggcaacggcguguggaucggcagaaccaagagcaccagcagcagaaugggcuucgagaugaucugggaccccgacggcuggaccaagaccgacgacaaguucagcgugaagcaggacaucaucggcaucaccgacuggagcggcuacagcggcagcuucgugcagcaccccgagcugaccggccuggacugcaugagacccugcuucuggguggagcugaucagaggcagacccaaggagaacaccaucuggaccagcggcagcagcaucagcuucugcggcgugaacagcgacaccgugggcuggagcuggcccgacggcgccgagcugcccuucaccaucgacaaguga

SEQ ID NO: 181686 - RNA, 1365 nt, Artificial Sequence; identical to SEQ ID NO: 175779
  derived and/or modified CDS sequence (opt4) from neuraminidase__InfluenzaA__AEX92876

SEQ ID NO: 181687 - RNA, 1365 nt, Artificial Sequence; identical to SEQ ID NO: 175779
  derived and/or modified CDS sequence (opt4) from neuraminidase__InfluenzaA__AEX92887

SEQ ID NO: 181688 - RNA, 1365 nt, Artificial Sequence; identical to SEQ ID NO: 175779
  derived and/or modified CDS sequence (opt4) from neuraminidase__InfluenzaA__AEX92904

SEQ ID NO: 181689 - RNA, 1365 nt, Artificial Sequence; identical to SEQ ID NO: 175779
  derived and/or modified CDS sequence (opt4) from neuraminidase__InfluenzaA__AEX96924

SEQ ID NO: 181690 - RNA, 1410 nt, Artificial Sequence; identical to SEQ ID NO: 178529
  derived and/or modified CDS sequence (opt4) from neuraminidase__InfluenzaA__AEY69091

SEQ ID NO: 181691 - RNA, 1410 nt, Artificial Sequence; identical to SEQ ID NO: 176659
  derived and/or modified CDS sequence (opt4) from neuraminidase__InfluenzaA__AEY69101

SEQ ID NO: 181692 - RNA, 1410 nt, Artificial Sequence; identical to SEQ ID NO: 176659
  derived and/or modified CDS sequence (opt4) from neuraminidase__InfluenzaA__AEY69112

SEQ ID NO: 181693 - RNA, 1410 nt, Artificial Sequence
  derived and/or modified CDS sequence (opt4) from neuraminidase__InfluenzaA__AEY69145
augaacaccaaccagaagaucaucaccaucggcagcgugagccugaccaucagcaccaucugcuucuucaugcagaucgccauccugaucaccaccgugacccugcacuucaagcaguacgaguucaacagcccccccaacaaccaggugaugcugugcgagcccaccaucaucgagagaaacaucaccgagaucguguaccugaccaacaccaccaucgagaaggagaucugccccaagcuggccgaguacagaaacuggagcaagccccagugcgacaucaccggcuucgcccccuucagcaaggacaacagcaucagacugagcgccggcggcgacaucugggugaccagagagcccuacgugagcugcgaccccgacaagugcuaccaguucgcccugggccagggcaccaccaucaacaacgugcacagcaacaacaccgugagagacagaacccccuacagaacccugcugaugaacgagcugggcgugcccuuccaccugggcaccaagcaggugugcaucgccuggagcagcagcagcugccacgacggcaaggccuggcugcacgugugcaucaccggcgacgacaagaacgccaccgccagcuucaucuacaacggcagacugguggacagcguggugagcuggagcaaggagauccugagaacccaggagagcgagugcgugugcaucaacggcaccugcaccguggugaugaccgacggcagcgccagcggcaaggccgacaccaagauccuguucaucgaggagggcaagaucgugcacaccagcacccugagcggcagcgcccagcacguggaggagugcagcugcuaccccagauaccccggcgugagaugcgugugcagagacaacuggaagggcagcaacagacccaucguggacaucaacaugaaggaccacagcaucgugagcagcuacgugugcagcggccuggugggcgacacccccagaaagaacgacagcagcagcagcagccacugccuggaccccaacaacgaggagggcggccacggcgugaagggcugggccuucgacgacggcaacgacguguggaugggcagaaccaucagcgagaagagcagacugggcuacgagaccuucaaggugaucgagggcuggagcaaccccaagagcaagcugcagaucaacagacaggugaucguggacagaggcaacagaagcggcuacagcggcaucuucagcguggagggcaagagcugcaucaacagaugcuucuacguggagcugaucagaggcagaaaggaggagaccgaggugcuguggaccagcaacagcguggugguguucugcggcaccagcggcaccuacggcaccggcagcuggcccgacggcgccgacaucaaccugaugcccaucuga

SEQ ID NO: 181694 - RNA, 1410 nt, Artificial Sequence; identical to SEQ ID NO: 176659
  derived and/or modified CDS sequence (opt4) from neuraminidase__InfluenzaA__AEY69156

SEQ ID NO: 181695 - RNA, 1410 nt, Artificial Sequence
  derived and/or modified CDS sequence (opt4) from neuraminidase__InfluenzaA__AEY69167
augaaccccaaccagaagaucaucaccaucggcagcgugagccugaccaucagcaccaucugcuucuucaugcagaucgccauccugaucaccaccgugacccugcacuucaagcaguacgaguucaacagcccccccaacaaccaggugaugcugugcgagcccaccaucaucgagagaaacaucaccgagaucguguaccugaccaacaccaccaucgagaaggagaucugccccaagcuggccgaguacagaaacuggagcaagccccagugcgacaucaccggcuucgcccccuucagcaaggacaacagcaucagacugagcgccggcggcgacaucugggugaccagagagcccuacgugagcugcgaccccgacaagugcuaccaguucgcccugggccagggcaccacccugaacaacgugcacagcaacaacaccgugagagacagaacccccuacagaacccugcugaugaacgagcugggcgugcccuuccaccugggcaccaagcaggugugcaucgccuggagcagcagcagcugccacgacggcaaggccuggcugcacgugugcaucaccggcgacgacaagaacgccaccgccagcuucaucuacaacggcagacugguggacagcguggugagcuggagcaaggagauccugagaacccaggagagcgagugcgugugcaucaacggcaccugcaccguggugaugaccgacggcagcgccagcggcaaggccgacaccaagauccuguucaucgaggagggcaagaucgugcacaccagcacccugagcggcagcgcccagcacguggaggagugcagcugcuaccccagauaccccggcgugagaugcgugugcagagacaacuggaagggcagcaacagacccaucguggacaucaacaucaaggaccacagcaucgugagcagcuacgugugcagcggccuggugggcgacacccccagaaagaacgacagcagcagcagcagccacugccuggaccccaacaacgaggagggcggccacggcgugaagggcugggccuucgacgacggcaacgacguguggaugggcagaaccaucagcgagaagagcagacugggcuacgagaccuucaaggugaucgagggcuggagcaaccccaagagcaagcugcagaucaacagacaggugaucguggacagaggcaacagaagcggcuacagcggcaucuucagcguggagggcaagagcugcaucaacagaugcuucuacguggagcugaucagaggcagaaaggaggagaccgaggugcuguggaccagcaacagcaucgugguguucugcggcaccagcggcaccuacggcaccggcagcuggcccgacggcgccgacaucaaccugaugcccguguga

SEQ ID NO: 181696 - RNA, 1410 nt, Artificial Sequence; identical to SEQ ID NO: 181695
  derived and/or modified CDS sequence (opt4) from neuraminidase__InfluenzaA__AEY69178

SEQ ID NO: 181697 - RNA, 1410 nt, Artificial Sequence; identical to SEQ ID NO: 181695
  derived and/or modified CDS sequence (opt4) from neuraminidase__InfluenzaA__AEY69189

SEQ ID NO: 181698 - RNA, 1410 nt, Artificial Sequence
  derived and/or modified CDS sequence (opt4) from neuraminidase__InfluenzaA__AEY69211
augaaccccaaccagaagaucaucaccaucggcagcgugagccugaccaucagcaccaucugcuucuucaugcagaucgccauccugaucaccaccgugacccugcacuucaagcaguacaaguucaacagcccccccaacaaccaggugaugcugugcgagcccaccaucaucgagagaaacaucaccgagaucguguaccugaccaacaccaccaucgagaaggagaucugccccaagcuggccgaguacagaaacuggagcaagccccagugcgacaucaccggcuucgcccccuucagcaaggacaacagcaucagacugagcgccggcggcgacaucugggugaccagagagcccuacgugagcugcgaccccgacaagugcuaccaguucgcccugggccagggcaccacccugaacaacgugcacagcaacaacaccgugagagacagaacccccuacagaacccugcugaugaacgagcugggcgugcccuuccaccugggcaccaagcaggugugcaucgccuggagcagcagcagcugccacgacggcaaggccuggcugcacgugugcaucaccggcgacgacaagaacgccaccgccagcuucaucuacaacggcagacugguggacagcguggugagcuggagcaaggagauccugagaacccaggagagcgagugcgugugcaucaacggcaccugcaccguggugaugaccgacggcagcgccagcggcaaggccgacaccaagauccuguucaucgaggagggcaagaucgugcacaccagcacccugagcggcagcgcccagcacguggaggagugcagcugcuaccccagauaccccggcgugagaugcgugugcagagacaacuggaagggcagcaacagacccaucguggacaucaacaucaaggaccacagcaucgugagcagcuacgugugcagcggccuggugggcgacacccccagaaagaacgacagcagcagcagcagccacugccuggaccccaacaacgaggagggcggccacggcgugaagggcugggccuucgacgacggcaacgacguguggaugggcagaaccaucagcgagaagagcagacugggcuacgagaccuucaaggugaucgagggcuggagcaaccccaagagcaagcugcagaucaacagacaggugaucguggacagaggcaacagaagcggcuacagcggcaucuucagcguggagggcaagagcugcaucaacagaugcuucuacguggagcugaucagaggcagaaaggaggagaccgaggugcuguggaccagcaacagcaucgugguguucugcggcaccagcggcaccuacggcaccggcagcuggcccgacggcgccgacaucaaccugaugcccguguga

SEQ ID NO: 181699 - RNA, 1410 nt, Artificial Sequence; identical to SEQ ID NO: 181695
  derived and/or modified CDS sequence (opt4) from neuraminidase__InfluenzaA__AEY69233

SEQ ID NO: 181700 - RNA, 1410 nt, Artificial Sequence; identical to SEQ ID NO: 181695
  derived and/or modified CDS sequence (opt4) from neuraminidase__InfluenzaA__AEY69272

SEQ ID NO: 181701 - RNA, 1410 nt, Artificial Sequence; identical to SEQ ID NO: 181695
  derived and/or modified CDS sequence (opt4) from neuraminidase__InfluenzaA__AEY69283

SEQ ID NO: 181702 - RNA, 1410 nt, Artificial Sequence
  derived and/or modified CDS sequence (opt4) from neuraminidase__InfluenzaA__AEY69294
augaaccccaaccagaagaucaucaccaucggcagcgugagccugaccaucagcaccaucugcuucuucaugcagaccgccauccugaucaccaccgugacccugcacuucaagcagugcgaguucaacagcccccccaacaaccaggugaugcugugcgagcccaccaucaucgagagaaacaucaccgagaucguguaccugaccaacaccaccaucgagaaggagaucugccccaagcuggccgaguacagaaacuggagcaagccccagugcgacaucaccggcuucgcccccuucagcaaggacaacagcaucagacugagcgccggcggcgacaucugggugaccagagagcccuacgugagcugcgaccccgacaagugcuaccaguucgcccugggccagggcaccacccugaacaacgugcacagcaacaacaccgugagagacagaacccccuacagaacccugcugaugaacgagcugggcgugcccuuccaccugggcaccaagcaggugugcaucgccuggagcagcagcagcugccacgacggcaaggccuggcugcacgugugcaucaccggcgacgacaagaacgccaccgccagcuucaucuacaacggcagacugguggacagcguggugagcuggagcaaggagauccugagaacccaggagagcgagugcgugugcaucaacggcaccugcaccguggugaugaccgacggcagcgccagcggcaaggccgacaccaagauccuguucaucgaggagggcaagaucgugcacaccagcacccugagcggcagcgcccagcacguggaggagugcagcugcuaccccagauaccccggcgugagaugcgugugcagagacaacuggaagggcagcaacagacccaucguggacaucaacaucaaggaccacagcaucgugagcagcuacgugugcagcggccuggugggcgacacccccagaaagaacgacagcagcagcagcagccacugccuggaccccaacaacgaggagggcggcaacggcgugaagggcugggccuucgacgacggcaacgacguguggaugggcagaaccaucagcgagaagagcagacugggcuacgagaccuucaaggugaucgagggcuggagcaaccccaagagcaagcugcagaucaacagacaggugaucguggacagaggcaacagaagcggcuacagcggcaucuucagcguggagggcaagagcugcaucaacagaugcuucuacguggagcugaucagaggcagaaaggaggagaccgaggugcuguggaccagcaacagcaucgugguguucugcggcaccagcggcaccuacggcaccggcagcuggcccgacggcgccgacaucaaccugaugcccaucuga

SEQ ID NO: 181703 - RNA, 1410 nt, Artificial Sequence; identical to SEQ ID NO: 181702
  derived and/or modified CDS sequence (opt4) from neuraminidase__InfluenzaA__AEY69305

SEQ ID NO: 181704 - RNA, 1410 nt, Artificial Sequence; identical to SEQ ID NO: 181702
  derived and/or modified CDS sequence (opt4) from neuraminidase__InfluenzaA__AEY69316

SEQ ID NO: 181705 - RNA, 1410 nt, Artificial Sequence; identical to SEQ ID NO: 181702
  derived and/or modified CDS sequence (opt4) from neuraminidase__InfluenzaA__AEY69788

SEQ ID NO: 181706 - RNA, 1410 nt, Artificial Sequence; identical to SEQ ID NO: 176659
  derived and/or modified CDS sequence (opt4) from neuraminidase__InfluenzaA__AEY69799

SEQ ID NO: 181707 - RNA, 1410 nt, Artificial Sequence; identical to SEQ ID NO: 176659
  derived and/or modified CDS sequence (opt4) from neuraminidase__InfluenzaA__AEY69810

SEQ ID NO: 181708 - RNA, 1410 nt, Artificial Sequence; identical to SEQ ID NO: 181695
  derived and/or modified CDS sequence (opt4) from neuraminidase__InfluenzaA__AEY69832

SEQ ID NO: 181709 - RNA, 1410 nt, Artificial Sequence
  derived and/or modified CDS sequence (opt4) from neuraminidase__InfluenzaA__AEY69843
augaaccccaaccagaagaucaucaccaucggcagcgugagccugaccaucagcaccaucugcuucuucaugcagaucgccauccugaucaccaccgugacccugcacuucaagcaguacgaguucaacagcccccccaacaaccaggugaugcugugcgagcccaccaucaucgagagaaacaucaccgagaucguguaccugaccaacaccaccaucgagaaggagaucugccccaagcuggccgaguacagaaacuggagcaagccccagugcgacaucaccggcuucgcccccuucagcaaggacaacagcaucagacugagcgccggcggcgacaucugggugaccagagagcccuacgugagcugcgaccccgacaagugcuaccaguucgcccugggccagggcaccacccugaacaacgugcacagcaacaacaccgugagagacagaacccccuacagaacccugcugaugaacgagcugggcgugcccuuccaccugggcaccaagcaggugugcaucgccuggagcagcagcagcugccacgacggcaaggccuggcugcacgugugcaucgccggcgacgacaagaacgccaccgccagcuucaucuacaacggcagacugguggacagcguggugagcuggagcaaggagauccugagaacccaggagagcgagugcgugugcaucaacggcaccugcaccguggugaugaccgacggcagcgccagcggcaaggccgacaccaagauccuguucaucgaggagggcaagaucgugcacaccagcacccugagcggcagcgcccagcacguggaggagugcagcugcuaccccagauaccccggcgugagaugcgugugcagagacaacuggaagggcagcaacagacccaucguggacaucaacaucaaggaccacagcaucgugagcagcuacgugugcagcggccuggugggcgacacccccagaaagaacgacagcagcagcagcagccacugccuggaccccaacaacgaggagggcggccacggcgugaagggcugggccuucgacgacggcaacgacguguggaugggcagaaccaucagcgagaagagcagacugggcuacgagaccuucaaggugaucgagggcuggagcaaccccaagagcaagcugcagaucaacagacaggugaucguggacagaggcaacagaagcggcuacagcggcaucuucagcguggagggcaagagcugcaucaacagaugcuucuacguggagcugaucagaggcagaaaggaggagaccgaggugcuguggaccagcaacagcaucgugguguucugcggcaccagcggcaccuacggcaccggcagcuggcccgacggcgccgacaucaaccugaugcccguguga

SEQ ID NO: 181710 - RNA, 1410 nt, Artificial Sequence; identical to SEQ ID NO: 181695
  derived and/or modified CDS sequence (opt4) from neuraminidase__InfluenzaA__AEY69854

SEQ ID NO: 181711 - RNA, 1410 nt, Artificial Sequence; identical to SEQ ID NO: 181695
  derived and/or modified CDS sequence (opt4) from neuraminidase__InfluenzaA__AEY69876

SEQ ID NO: 181712 - RNA, 1410 nt, Artificial Sequence; identical to SEQ ID NO: 181695
  derived and/or modified CDS sequence (opt4) from neuraminidase__InfluenzaA__AEY69887

SEQ ID NO: 181713 - RNA, 1410 nt, Artificial Sequence; identical to SEQ ID NO: 181695
  derived and/or modified CDS sequence (opt4) from neuraminidase__InfluenzaA__AEY69898

SEQ ID NO: 181714 - RNA, 1410 nt, Artificial Sequence; identical to SEQ ID NO: 176659
  derived and/or modified CDS sequence (opt4) from neuraminidase__InfluenzaA__AEY69909

SEQ ID NO: 181715 - RNA, 1410 nt, Artificial Sequence
  derived and/or modified CDS sequence (opt4) from neuraminidase__InfluenzaA__AEY69942
augaaccccaaccagaagaucaucaccaucggcagcgugagccugaccaucagcaccaucugcuucuucaugcagaucgccauccugaucaccaccgugacccugcacuucaagcaguacgaguucaacagcccccccaacaaccaggugaugcugugcgagcccaccaucaucgagagaaacaucaccgagaucguguaccugaccaacaccaccaucgagaaggagaucugccccaagcuggccgaguacagaaacuggagcaagccccagugcgacaucaccggcuucgcccccuucagcaaggacaacagcaucagacugagcgacggcggcgacaucugggugaccagagagcccuacgugagcugcgaccccgacaagugcuaccaguucgcccugggccagggcaccacccugaacaacauccacagcaacaacaccgugagagacagaacccccuacagaacccugcugaugaacgagcugggcgugcccuuccaccugggcaccaagcaggugugcaucgccuggagcagcagcagcugccacgacggcaaggccuggcugcacgugugcaucaccggcgacgacaagaacgccaccgccagcuucaucuacaacggcagacugguggacagcguggugagcuggagcaaggagauccugagaacccaggagagcgagugcgugugcaucaacggcaccugcaccguggugaugaccgacggcagcgccagcggcaaggccgacaccaagauccuguucaucgaggagggcaagaucgugcacaccagcacccugagcggcagcgcccagcacguggaggagugcagcugcuaccccagauaccccggcgugagaugcgugugcagagacaacuggaagggcagcaacagacccaucguggacaucaacaucaaggaccacagcaucgugagcagcuacgugugcagcggccuggugggcgacacccccagaaagaacgacagcagcagcagcagccacugccuggaccccaacaacgaggagggcggccacggcgugaagggcugggccuucgacgacggcaacgacguguggaugggcagaaccaucagcgagaagagcagacugggcuacgagaccuucaaggugaucgagggcuggagcaaccccaagagcaagcugcagaucaacagacaggugaucguggacagaggcaacagaagcggcuacagcggcaucuucagcguggagggcaagagcugcaucaacagaugcuucuacguggagcugaucagaggcagaaaggaggagaccgaggugcuguggaccagcaacagcaucgugguguucugcggcaccagcggcaccuacggcaccggcagcuggcccgacggcgccgacaucaaccugaugcccguguga

SEQ ID NO: 181716 - RNA, 1410 nt, Artificial Sequence; identical to SEQ ID NO: 181715
  derived and/or modified CDS sequence (opt4) from neuraminidase__InfluenzaA__AEY69953

SEQ ID NO: 181717 - RNA, 1410 nt, Artificial Sequence; identical to SEQ ID NO: 181715
  derived and/or modified CDS sequence (opt4) from neuraminidase__InfluenzaA__AEY69964

SEQ ID NO: 181718 - RNA, 1410 nt, Artificial Sequence; identical to SEQ ID NO: 181695
  derived and/or modified CDS sequence (opt4) from neuraminidase__InfluenzaA__AEY69975

SEQ ID NO: 181719 - RNA, 1410 nt, Artificial Sequence; identical to SEQ ID NO: 181695
  derived and/or modified CDS sequence (opt4) from neuraminidase__InfluenzaA__AEY69986

SEQ ID NO: 181720 - RNA, 1410 nt, Artificial Sequence; identical to SEQ ID NO: 181695
  derived and/or modified CDS sequence (opt4) from neuraminidase__InfluenzaA__AEY69997

SEQ ID NO: 181721 - RNA, 1410 nt, Artificial Sequence; identical to SEQ ID NO: 181695
  derived and/or modified CDS sequence (opt4) from neuraminidase__InfluenzaA__AEY70008

SEQ ID NO: 181722 - RNA, 1410 nt, Artificial Sequence; identical to SEQ ID NO: 181695
  derived and/or modified CDS sequence (opt4) from neuraminidase__InfluenzaA__AEY70019

SEQ ID NO: 181723 - RNA, 1410 nt, Artificial Sequence; identical to SEQ ID NO: 181695
  derived and/or modified CDS sequence (opt4) from neuraminidase__InfluenzaA__AEY70259

SEQ ID NO: 181724 - RNA, 1410 nt, Artificial Sequence; identical to SEQ ID NO: 181695
  derived and/or modified CDS sequence (opt4) from neuraminidase__InfluenzaA__AEY70270

SEQ ID NO: 181725 - RNA, 1410 nt, Artificial Sequence; identical to SEQ ID NO: 181695
  derived and/or modified CDS sequence (opt4) from neuraminidase__InfluenzaA__AEY70281

SEQ ID NO: 181726 - RNA, 1410 nt, Artificial Sequence; identical to SEQ ID NO: 176659
  derived and/or modified CDS sequence (opt4) from neuraminidase__InfluenzaA__AEY70303

SEQ ID NO: 181727 - RNA, 1410 nt, Artificial Sequence; identical to SEQ ID NO: 176659
  derived and/or modified CDS sequence (opt4) from neuraminidase__InfluenzaA__AEY70314

SEQ ID NO: 181728 - RNA, 1410 nt, Artificial Sequence
  derived and/or modified CDS sequence (opt4) from neuraminidase__InfluenzaA__AEY70325
augaaccccaaccagaagaucaucaccaucggcagcgugagccugaccaucagcaccaucugcuucuucaugcagaucgccauccugaugaccaccgugacccugcacuucaagcaguacgaguucaaccccccccccaacaaccaggugaugcugugcgagcccaccaucaucgagagaaacaucaccgagaucguguaccugaccaacaccaccaucgagaaggagaucugccccaagcuggccgaguacagaaacuggagcaagccccagugcgacaucaccggcuucgcccccuucagcaaggacaacagcaucagacugagcgccggcggcgacaucugggugaccagagagcccuacgugagcugcgaccccgacaagugcuaccaguucgcccugggccagggcaccacccugaacaacgugcacagcaacaacaccgugagagacagaacccccuacagaacccugcugaugaacgagcugggcgugcccuuccaccugggcaccaagcaggugugcaucgccuggagcagcagcagcugccacgacggcaaggccuggcugcacgugugcaucaccggcgacgacaagaacgccaccgccagcuucaucuacaacggcagacugguggacagcguggugagcuggagcaaggagauccugagaacccaggagagcgagugcgugugcaucaacggcaccugcaccguggugaugaccgacggcagcgccagcggcaaggccgacaccaagauccuguucaucgaggagggcaagaucgugcacaccagcacccugagcggcagcgcccagcacguggaggagugcagcugcuaccccagauaccccggcgugagaugcgugugcagagacaacuggaagggcagcaacagacccaucguggacaucaacaucaaggaccacagcaucgugagcagcuacgugugcagcggccuggugggcgacacccccagaaagaacgacagcagcagcagcagccacugccuggaccccaacaacgaggagggcggccacggcgugaagggcugggccuucgacgacggcaacgacguguggaugggcagaaccaucagcgagaagagcagacugggcuacgagaccuucaaggugaucgagggcuggagcaaccccaagagcaagcugcagaucaacagacaggugaucguggacagaggcaacagaagcggcuacagcggcaucuucagcguggagggcaagagcugcaucaacagaugcuucuacguggagcugaucagaggcagaaaggaggagaccgaggugcuguggaccagcaacagcaucgugguguucugcggcaccagcggcaccuacggcaccggcagcuggcccgacggcgccgacaucaaccugaugcccguguga

SEQ ID NO: 181729 - RNA, 1410 nt, Artificial Sequence
  derived and/or modified CDS sequence (opt4) from neuraminidase__InfluenzaA__AEY70336
augaaccccaaccagaagaucaucaccaucggcagcgugagccugaccaucagcaccaucugcuucuucaugcagaucgccauccugaucaccaccgugacccugcacuucaagcaguacgaguucaacagcccccccaacaaccaggugaugcugugcgagcccaccaucaucgagagaaacaucaccgagaucguguaccugaccaacaccaccaucgagaaggagaucugccccaagcuggccgaguacagaaacuggagcaagccccagugcgacaucaccggcuucgcccccuucagcaaggacaacagcaucagacugagcgccggcggcgacaucugggugaccagagagcccuacgugagcugcgaccccgacaagugcuaccaguucgcccugggccagggcaccacccugaacaacgugcacagcaacaacaccgugagagacagaacccccuacagaacccugcugaugaacgagcugggcgugcccuuccaccugggcaccaagcaggugugcaucgccuggagcagcagcagcugccacgacggcaaggccuggcugcacgugugcaucaccggcgacgacaagaacgccaccgccagcuucaucuacaacggcagacugguggacagcguggugagcuggagcaaggagauccugagaacccaggagagcgagugcgugugcaucaacggcaccugcaccguggugaugaccgacggcagcgccagcggcaaggccgacaccaagauccuguucaucgaggagggcaagaucgugcacaccagcacccugagcggcagcgcccagcacguggaggagugcagcugcuaccccagauaccccggcgugagaugcaucugcagagacaacuggaagggcagcaacagacccaucguggacaucaacaucaaggaccacagcaucgugagcagcuacgugugcagcggccuggugggcgacacccccagaaagaacgacagcagcagcagcagccacugccuggaccccaacaacgaggagggcggccacggcgugaagggcugggccuucgacgacggcaacgacguguggaugggcagaaccaucagcgagaagagcagacugggcuacgagaccuucaaggugaucgagggcuggagcaaccccaagagcaagcugcagaucaacagacaggugaucguggacagaggcaacagaagcggcuacagcggcaucuucagcguggaggacaagagcugcaucaacagaugcuucuacguggagcugaucagaggcagaaaggaggagaccgaggugcuguggaccagcaacagcaucgugguguucugcggcaccagcggcaccuacggcaccggcagcuggcccgacggcgccgacaucaaccugaugcccguguga

SEQ ID NO: 181730 - RNA, 1410 nt, Artificial Sequence; identical to SEQ ID NO: 176798
  derived and/or modified CDS sequence (opt4) from neuraminidase__InfluenzaA__AEY70358

SEQ ID NO: 181731 - RNA, 1410 nt, Artificial Sequence; identical to SEQ ID NO: 176659
  derived and/or modified CDS sequence (opt4) from neuraminidase__InfluenzaA__AEY70379

SEQ ID NO: 181732 - RNA, 1410 nt, Artificial Sequence; identical to SEQ ID NO: 178421
  derived and/or modified CDS sequence (opt4) from neuraminidase__InfluenzaA__AFB70139

SEQ ID NO: 181733 - RNA, 1410 nt, Artificial Sequence; identical to SEQ ID NO: 176798
  derived and/or modified CDS sequence (opt4) from neuraminidase__InfluenzaA__AFB70141

SEQ ID NO: 181734 - RNA, 1410 nt, Artificial Sequence; identical to SEQ ID NO: 178421
  derived and/or modified CDS sequence (opt4) from neuraminidase__InfluenzaA__AFB70147

SEQ ID NO: 181735 - RNA, 1410 nt, Artificial Sequence; identical to SEQ ID NO: 176798
  derived and/or modified CDS sequence (opt4) from neuraminidase__InfluenzaA__AFB70153

SEQ ID NO: 181736 - RNA, 1410 nt, Artificial Sequence; identical to SEQ ID NO: 176798
  derived and/or modified CDS sequence (opt4) from neuraminidase__InfluenzaA__AFB70155

SEQ ID NO: 181737 - RNA, 1410 nt, Artificial Sequence; identical to SEQ ID NO: 177768
  derived and/or modified CDS sequence (opt4) from neuraminidase__InfluenzaA__AFB70157

SEQ ID NO: 181738 - RNA, 1410 nt, Artificial Sequence; identical to SEQ ID NO: 176798
  derived and/or modified CDS sequence (opt4) from neuraminidase__InfluenzaA__AFB70159

SEQ ID NO: 181739 - RNA, 1410 nt, Artificial Sequence
  derived and/or modified CDS sequence (opt4) from neuraminidase__InfluenzaA__AFB70161
augaaccccaaccagaagaucaucaccaucggcagcgugugcaugaccaucggcauggccaaccugauccugcagaucggcaacaucaucagcaucuggaucagccacagcauccagcugggcaaccagaaccagaucgagaccugcaaccagagcgugaucaccuacgagaacaacaccugggugaaccagaccuacgugaacaucagcaacaccaacuucgccgccggccagagcguggugagcgugaagcuggccggcaacagcagccugugccccgugagcggcugggccaucuacagcaaggacaacagcaucagaaucggcagcaagggcgacguguucgugaucagagagcccuucaucagcugcagcccccuggagugcagaaccuucuuccugacccagggcgcccugcugaacgacaagcacagcaacggcaccaucaaggacagaagccccuacagaacccugaugagcugccccaucggcgaggugcccagccccuacaacagcagauucgagagcguggccuggagcgccagcgccugccacgacggcaucaacuggcugaccaucggcaucagcggccccgacaacggcgccguggccgugcugaaguacaacggcaucaucaccgacaccaucaagagcuggagaaacaacauccugagaacccaggagagcgagugcgccugcgugaacggcagcugcuucaccgugaugaccgacggccccagcgacggccaggccagcuacaagaucuucagaaucgagaagggcaagaucgugaagagcguggagaugaacgcccccaacuaccacuacgaggagugcagcugcuaccccgacagcagcgagaucaccugcgugugcagagacaacuggcacggcagcaacagacccugggugagcuucaaccagaaccuggaguaccagaucggcuacaucugcagcggcaucuucggcgacaaccccagacccaacgacaagaccggcagcugcggccccgugagcagcaacggcgccaacggcgugaagggcuucagcuucaaguacggcaacggcguguggaucggcagaaccaagagcaucagcagcagaaacggcuucgagaugaucugggaccccaacggcuggaccggcaccgacaacaacuucagcaccaagcaggacaucgugggcaucaacgaguggagcggcuacagcggcagcuucgugcagcaccccgagcugaccggccuggacugcaucagacccugcuucuggguggagcugaucagaggcagacccaaggagaacaccaucuggaccagcggcagcagcaucagcuucugcggcgugaacagcgacaccgugggcugguacuggcccgacggcgccgagcugcccuucaccaucgacaaguga

SEQ ID NO: 181740 - RNA, 1410 nt, Artificial Sequence
  derived and/or modified CDS sequence (opt4) from neuraminidase__InfluenzaA__AFB70163
augaaccccaaccagaagaucaucaccaucggcagcgugugcaugaccaucggcauggccaaccugauccugcagaucggcaacaucaucagcaucuggaucagccacagcauccagcugggcaaccagaaccagaucgagaccugcaaccagagcgugaucaccuacgagaacaacaccugggugaaccagaccuacgugaacaucagcaacaccaacuucgccgccggccagagcguggugagcgugaagcuggccggcaacagcagccugugccccgugagcggcugggccaucuacagcaaggacaacagcaucagaaucggcagcaagggcgacguguucgugaucagagagcccuucaucagcugcagcccccuggagugcagaaccuucuuccugacccagggcgcccugcugaacgacaagcacagcaacggcaccaucaaggacagaagccccuacagaacccugaugagcugccccaucggcgaggugcccagccccuacaacagcagauucgagagcguggccuggagcgccagcgccugccacgacggcaucaacuggcugaccaucggcaucagcggccccgacaacggcgccguggccgugcugaaguacaacggcaucaucaccgacaccaucaagagcuggagaaacaacauccugagaacccaggagagcgagugcgccugcgugaacggcagcugcuucaccgugaugaccgacggccccagcgacggccaggccagcuacaagaucuucagaaucgagaagggcaagaucgugaagagcguggagaugaacgcccccaacuaccacuacgaggagugcagcugcuaccccgacagcagcgagaucaccugcgugugcagagacaacuggcacggcagcaacagacccugggugagcuucaaccagaaccuggaguaccagaucggcuacaucugcagcggcaucuucggcgacaaccccagacccaacgacaagaccggcagcugcggccccgugagcagcaacggcgccaacggcgugaagggcuucagcuucaaguacggcaacggcguguggaucggcagaaccaagagcaucagcagcagaaacggcuucgagaugaucugggaccccaacggcuggaccggcaccgacaacaacuucagcaucaagcaggacaucgugggcaucaacgaguggagcggcuacagcggcagcuucgugcagcaccccgagcugaccggccuggacugcaucagacccugcuucuggguggagcugaucagaggcagacccaaggagaacgccaucuggaccagcggcagcagcaucagcuucugcggcgugaacagcgacaccgugggcuggagcuggcccgacggcgccgagcugcccuucaccaucgacaaguga

SEQ ID NO: 181741 - RNA, 1410 nt, Artificial Sequence
  derived and/or modified CDS sequence (opt4) from neuraminidase__InfluenzaA__AFB70169
augaaccccaaccagaagaucaucaccaucggcagcgugugcaugaccaucggcauggccaaccugauccugcagaucggcaacaucaucagcaucuggaucaaccacagcauccagcugggcaaccagaaccagaucgagaccugcaaccagagcgugaucaccuacgagaacaacaccugggugaaccagaccuacgugaacaucagcaacaccaacuucgccgccggccagagcguggugagcgugaagcuggccggcaacagcagccugugccccgugagcggcugggccaucuacagcaaggacaacagcaucagaaucggcagcaagggcgacguguucgugaucagagagcccuucaucagcugcagcccccuggagugcagaaccuucuuccugacccagggcgcccugcugaacgacaagcacagcaacggcaccaucaaggacagaagccccuacagaacccugaugagcugccccaucggcgaggugcccagccccuacaacagcagauucgagagcguggccuggagcgccagcgccugccacgacggcaucaacuggcugaccaucggcaucagcggccccgacaacggcgccguggccgugcugaaguacaacggcaucaucaccgacaccaucaagagcuggagaaacaacauccugagaacccaggagagcgagugcgccugcgugaacggcagcugcuucaccgugaugaccgacggccccagcgacggccaggccagcuacaagaucuucagaaucgagaagggcaagaucgugaagagcguggagaugaacgcccccaacuaccacuacgaggagugcagcugcuaccccgacagcagcgagaucaccugcgugugcagagacaacuggcacggcagcaacagacccugggugagcuucaaccagaaccuggaguaccagaucggcuacaucugcagcggcaucuucggcgacaaccccagacccaacgacaagaccggcagcugcggccccgugagcagcaacggcgccaacggcgugaagggcuucagcuucaaguacggcaacggcguguggaucggcagaaccaagagcaucagcagcagaaacggcuucgagaugaucugggaccccaacggcuggaccggcaccgacaacaacuucagcaucaagcaggacaucgugggcaucaacgaguggagcggcuacagcggcagcuucgugcagcaccccgagcugaccggccuggacugcaucagacccugcuucuggguggagcugaucagaggcagacccaaggagaacaccaucuggaccagcggcagcagcaucagcuucugcggcgugaacagcgacaccgugggcuggagcuggcccgacggcgccgagcugcccuucaccaucgacaaguga

SEQ ID NO: 181742 - RNA, 1410 nt, Artificial Sequence; identical to SEQ ID NO: 176798
  derived and/or modified CDS sequence (opt4) from neuraminidase__InfluenzaA__AFB70199

SEQ ID NO: 181743 - RNA, 1410 nt, Artificial Sequence; identical to SEQ ID NO: 176798
  derived and/or modified CDS sequence (opt4) from neuraminidase__InfluenzaA__AFB70209

SEQ ID NO: 181744 - RNA, 1410 nt, Artificial Sequence; identical to SEQ ID NO: 176798
  derived and/or modified CDS sequence (opt4) from neuraminidase__InfluenzaA__AFB70219

SEQ ID NO: 181745 - RNA, 1410 nt, Artificial Sequence; identical to SEQ ID NO: 176798
  derived and/or modified CDS sequence (opt4) from neuraminidase__InfluenzaA__AFB70229

SEQ ID NO: 181746 - RNA, 1410 nt, Artificial Sequence; identical to SEQ ID NO: 176798
  derived and/or modified CDS sequence (opt4) from neuraminidase__InfluenzaA__AFB70239

SEQ ID NO: 181747 - RNA, 1410 nt, Artificial Sequence; identical to SEQ ID NO: 176798
  derived and/or modified CDS sequence (opt4) from neuraminidase__InfluenzaA__AFB70249

SEQ ID NO: 181748 - RNA, 1410 nt, Artificial Sequence; identical to SEQ ID NO: 176798
  derived and/or modified CDS sequence (opt4) from neuraminidase__InfluenzaA__AFB70259

SEQ ID NO: 181749 - RNA, 1410 nt, Artificial Sequence; identical to SEQ ID NO: 177768
  derived and/or modified CDS sequence (opt4) from neuraminidase__InfluenzaA__AFB70269

SEQ ID NO: 181750 - RNA, 1410 nt, Artificial Sequence; identical to SEQ ID NO: 176798
  derived and/or modified CDS sequence (opt4) from neuraminidase__InfluenzaA__AFB70279

SEQ ID NO: 181751 - RNA, 1410 nt, Artificial Sequence; identical to SEQ ID NO: 176798
  derived and/or modified CDS sequence (opt4) from neuraminidase__InfluenzaA__AFB70289

SEQ ID NO: 181752 - RNA, 1410 nt, Artificial Sequence; identical to SEQ ID NO: 176798
  derived and/or modified CDS sequence (opt4) from neuraminidase__InfluenzaA__AFB70299

SEQ ID NO: 181753 - RNA, 1410 nt, Artificial Sequence; identical to SEQ ID NO: 176798
  derived and/or modified CDS sequence (opt4) from neuraminidase__InfluenzaA__AFB70309

SEQ ID NO: 181754 - RNA, 1410 nt, Artificial Sequence; identical to SEQ ID NO: 178421
  derived and/or modified CDS sequence (opt4) from neuraminidase__InfluenzaA__AFB70319

SEQ ID NO: 181755 - RNA, 1410 nt, Artificial Sequence; identical to SEQ ID NO: 176798
  derived and/or modified CDS sequence (opt4) from neuraminidase__InfluenzaA__AFB70329

SEQ ID NO: 181756 - RNA, 1410 nt, Artificial Sequence; identical to SEQ ID NO: 176798
  derived and/or modified CDS sequence (opt4) from neuraminidase__InfluenzaA__AFB70349

SEQ ID NO: 181757 - RNA, 1410 nt, Artificial Sequence; identical to SEQ ID NO: 176798
  derived and/or modified CDS sequence (opt4) from neuraminidase__InfluenzaA__AFB70359

SEQ ID NO: 181758 - RNA, 1410 nt, Artificial Sequence; identical to SEQ ID NO: 176798
  derived and/or modified CDS sequence (opt4) from neuraminidase__InfluenzaA__AFB70369

SEQ ID NO: 181759 - RNA, 1410 nt, Artificial Sequence; identical to SEQ ID NO: 176798
  derived and/or modified CDS sequence (opt4) from neuraminidase__InfluenzaA__AFB70379

SEQ ID NO: 181760 - RNA, 1410 nt, Artificial Sequence; identical to SEQ ID NO: 176798
  derived and/or modified CDS sequence (opt4) from neuraminidase__InfluenzaA__AFB70389

SEQ ID NO: 181761 - RNA, 1410 nt, Artificial Sequence; identical to SEQ ID NO: 176798
  derived and/or modified CDS sequence (opt4) from neuraminidase__InfluenzaA__AFB70399

SEQ ID NO: 181762 - RNA, 1410 nt, Artificial Sequence; identical to SEQ ID NO: 176798
  derived and/or modified CDS sequence (opt4) from neuraminidase__InfluenzaA__AFB70409

SEQ ID NO: 181763 - RNA, 1410 nt, Artificial Sequence
  derived and/or modified CDS sequence (opt4) from neuraminidase__InfluenzaA__AFB77614
augcaccccaaccaggaggugaucagcaucgugagcgugugcaugaccaucggcauggccaaccugauccugcagaucggcaacaucaucagcaucuggaucagccacagcauccagcugggcaaccagaaccagaucgagaccugcaaccagagcgugaucaccuacgagaacaacaccugggugaaccagaccuacgugaacaucagcaacaccaacuucgccgccggccagagcguggugagcgugaagcuggccggcaacagcagccugugccccgugagcggcugggccaucuacagcaaggacaacagcaucagaaucggcagcaagggcgacguguucgugaucagagagcccuucaucagcugcagcccccuggagugcagaaccuucuuccugacccagggcgcccugcugaacgacaagcacagcaacggcaccaucaaggacagaagccccuacagaacccugaugagcugccccaucggcgaggugcccagccccuacaacagcagauucgagagcguggccuggagcgccagcgccugccacgacggcaucaacuggcugaccaucggcaucagcggccccgacaacggcgccguggccgugcugaaguacaacggcaucaucaccgacaccaucaagagcuggagaaacaacauccugagaacccaggagagcgagugcgccugcgugaacggcagcugcuucaccaucaugaccgacggccccagcgacggccaggccagcuacaagaucuucagaaucgagaagggcaagaucgugaagagcguggagaugaacgcccccaacuaccacuacgaggagugcagcugcuaccccgacagcagcgagaucaccugcgugugcagagacaacuggcacggcagcaacagacccugggugagcuucaaccagaaccuggaguaccagaucggcuacaucugcagcggcaucuucggcgacaaccccagacccaacgacaagaccggcagcugcggccccgugagcagcaacggcgccaacggcgugaagggcuucagcuucaaguacggcaacggcguguggaucggcagaaccaagagcaucagcagcagaaagggcuucgagaugaucugggaccccaacggcuggaccggcaccgacaacaacuucagcaucaagcaggacaucgugggcaucaacgaguggagcggcuacagcggcagcuucgugcagcaccccgagcugaccggccuggacugcaucagacccugcuucuggguggagcugaucagaggcagacccaaggagaacaccaucuggaccagcggcagcagcaucagcuucugcggcgugaacagcgacaccgugggcugguucuggcccgacggcgccgagcugcccuucaccaucgacaaguga

SEQ ID NO: 181764 - RNA, 1410 nt, Artificial Sequence
  derived and/or modified CDS sequence (opt4) from neuraminidase__InfluenzaA__AFB77615
augcaccccaaccaggagaucaucaccuucgugagcgugugcaugaccaucggcauggccaaccugauccugcagaucggcaacaucaucagcaucuggaucagccacagcauccagcugggcaaccagaaccagaucgagaccugcaaccagagcgugaucaccuacgagaacaacaccugggugaaccagaccuacgugaacaucagcaacaccaacuucgccgccggccagagcguggugagcgugaagcuggccggcaacagcagccugugccccgugagcggcugggccaucuacagcaaggacaacagcaucagaaucggcagcaagggcgacguguucgugaucagagagcccuucaucagcugcagcccccuggagugcagaaccuucuuccugacccagggcgcccugcugaacgacaagcacagcaacggcaccaucaaggacagaagccccuacagaacccugaugagcugccccaucggcgaggugcccagccccuacaacagcagauucgagagcguggccuggagcgccagcgccugccacgacggcaucaacuggcugaccaucggcaucagcggccccgacaacggcgccguggccgugcugaaguacaacggcaucaucaccgacaccaucaagagcuggagaaacaacauccugagaacccaggagagcgagugcgccugcgugaacggcagcugcuucaccaucaugaccgacggccccagcgacggccaggccagcuacaagaucuucagaaucgagaagggcaagaucgugaagagcguggagaugaacgcccccaacuaccacuacgaggagugcagcugcuaccccgacagcagcgagaucaccugcgugugcagagacaacuggcacggcagcaacagacccugggugagcuucaaccagaaccuggaguaccagaucggcuacaucugcagcggcaucuucggcgacaaccccagacccaacgacaagaccggcagcugcggccccgugagcagcaacggcgccaacggcgugaagggcuucagcuucaaguacggcaacggcguguggaucggcagaaccaagagcaucagcagcagaaagggcuucgagaugaucugggaccccaacggcuggaccggcaccgacaacaacuucagcaucaagcaggacaucgugggcaucaacgaguggagcggcuacagcggcagcuucgugcagcaccccgagcugaccggccuggacugcaucagacccugcuucuggguggagcugaucagaggcagacccaaggagaacaccaucuggaccagcggcagcagcaucagcuucugcggcgugaacagcgacaccgugggcuggagcuggcccgacggcgccgagcugcccuucaccaucgacaaguga

SEQ ID NO: 181765 - RNA, 1410 nt, Artificial Sequence
  derived and/or modified CDS sequence (opt4) from neuraminidase__InfluenzaA__AFB78128
augaaccccaaccagaagaucaucaccaucggcagcgugagccugaccaucgccaccaucugcuuccugaugcagaucgugauccuggugaccaccgugacccugcacuucaagcagcacgagugcaacagcccccccaacaaccaggugaugcugugcgagcccaccaucaucgagagaaacaucaccgagaucguguaccugaccaacaccaccaucgagaaggagaucugccccaagcuggccgaguacagaaacuggagcaagccccagugcaagaucaccggcuucgcccccuucagcaaggacaacagcaucagacugagcgccggcggcgacaucugggugaccagagagcccuacgugagcugcgaccccgacaagugcuaccaguucgcccugggccagggcaccacccugaacaacagacacagcaacgacaccgugcacgacagaacccccuacagaacccugcugaugaacgagcugggcgugcccuuccaccugggcaccaagcaggugugcaucgccuggagcagcagcagcugccacgacggcaaggccuggcugcacgugugcgugaccggccacgacgagaacgccaccgccagcuucaucuacgacggcagacugguggacagcaucggcagcuggagcaagaagauccugagaacccaggagagcgagugcgugugcaucaacggcaccugcaccguggugaugaccgacggcagcgccagcggcagagccgacaccaagauccuguucaucgaggagggcaagaucgugcacaccagcaagcugagcggcagcgcccagcacguggaggagugcagcugcuaccccagauaccccggcgugagaugcgugugcagagacaacuggaagggcagcaacagacccaucguggacaucaacgugaaggacuacagcaucgugagcagcuacgugugcagcggccuggugggcgacacccccagaaagaacgacagcagcagcagcagccacugccuggaccccaacaacgaggagggcggccacggcgugaagggcugggccuucgacgacggcaacgacguguggaugggcagaaccaucagcgagaagagcagaagcggcuacgagaccuucaaggugaucgagggcuggagcaagcccaacagcaagcugcagaucaacagacaggugaucguggagagaggcaacaugagcggcuacagcggcaucuucagcguggagggcaagagcugcaucaacagaugcuucuacguggagcugaucagaggcagaaagcaggagaccgaggugugguggaccagcaacagcaucgugguguucugcggcaccagcggcaccuacggcaccggcagcuggcccgacggcgccgacaucaaccugaugcccaucuga

SEQ ID NO: 181766 - RNA, 1410 nt, Artificial Sequence
  derived and/or modified CDS sequence (opt4) from neuraminidase__InfluenzaA__AFC62078
augaaccccaaccagaagaucaucaccaucggcagcgugugcaugaccaucggcauggccaaccugauccugcagaucggcaacaucaucagcaucuggaucagccacagcauccagcugggcaaccagagccagaucgagaccugcaaccagagcgugaucaccuacgagaacaacaccugggugaaccagaccuacgugaacaucagcaacaccaacuucgccgccggccagagcguggugagcgugaagcuggccggcaacagcagccugugccccgugagcggcugggccaucuacagcaaggacaacagcaucagaaucggcagcaagggcgacguguucgugaucagagagcuguucaucagcugcagcccccuggagugcagaaccuucuuccugacccagggcgcccugcugaacgacaagcacagcaacggcaccaucaaggacagaagccccuacagaacccugaugagcugccccaucggcgaggugcccagccccuacaacagcagauucgagagcguggccuggagcgccagcgccugccacgacggcaucaacuggcugaccaucggcaucagcggccccgacaacggcgccguggccgugcugaaguacaacggcaucaucaccgacaccaucaagagcuggagaaacgacauccugagaacccaggagagcgagugcgccugcgugaacggcagcugcuucaccaucaugaccgacggccccagcgacggccaggccagcuacaagaucuucagaaucgagaagggcaagaucgugaagagcguggagaugaacgcccccaacuaccacuacgaggagugcagcugcuaccccgacagcagcgagaucaccugcgugugcagagacaacuggcacggcagcaacagacccugggugagcuucaaccagaaccuggaguaccagaucggcuacaucugcagcggcaucuucggcgacaaccccagacccaacgacaagaccggcagcugcggccccgugagcagcaacggcgccaacggcgugaagggcuucagcuucaaguacggcaacggcguguggaucggcagaaccaagagcaucagcagcagaaagggcuucgagaugaucugggaccccaacggcuggaccggcaccgacaacaacuucagcaucaagcaggacaucgugggcaucaacgaguggagcggcuacagcggcagcuucgugcagcaccccgagcugaccggcauggacugcaucagacccugcuucuggguggagcugaucagaggcagacccaaggagaacaccaucuggaccagcggcagcagcaucagcuucugcggcgugaacagcgacaccgugggcuggagcuggcccgacggcgccgagcugcccuucaccaucgacaaguga

SEQ ID NO: 181767 - RNA, 1410 nt, Artificial Sequence
  derived and/or modified CDS sequence (opt4) from neuraminidase__InfluenzaA__AFC62079
augaaccccaaccagaagaucaucaccaucggcagcgugugcaugaccaucggcauggccaaccugauccugcagaucggcaacaucaucagcaucuggaucagccacagcauccagcugggcaaccagaaccagaucgagaccugcaaccagagcgugaucaccuacgagaacaacaccugggugaaccagaccuacgugaacaucagcaacaccaacuucgccgccggccagagcguggugagcgugaagcuggccggcaacagcagccugugccccgugagcggcugggccaucuacagcaaggacaacagcaucagaaucggcagcaagggcgacguguucgugaucagagagcccuucaucagcugcagcccccuggagugcagaaccuucuuccugacccagggcgcccugcugaacgacaagcacagcaacggcaccaucaaggacagaagccccuacagaacccugaugagcugccccaucggcgaggugcccagccccuacaacagcagauucgagagcguggccuggagcgccagcgccugccacgacggcaucaacuggcugaccaucggcaucagcggccccgacaacggcgccguggccgugcugaaguacaacggcaucaucaccgacaccaucaagagcuggagaaacaacauccugagaacccaggagagcgagugcgccugcgugaacggcagcugcuucaccgugaugaccgacggccccagcgacggccaggccagcuacaagaucuucagaaucgagaagggcaagaucaucaagagcguggagaugaacgcccccaacuaccacuacgaggagugcagcugcuaccccgacagcagcgagaucaccugcgugugcagagacaacuggcacggcagcaacagacccugggugagcuucaaccagaaccuggaguaccagaucggcuacaucugcagcggcauccugggcgacaaccccagacccaacgacaagaccggcagcugcggccccgugagcagcaacggcgccaacggcgugaagggcuucagcuucaaguacggcaacggcgugugggugggcagaaccaagagcaucagcagcagaaacggcuucgagaugaucugggaccccaacggcuggaccggcaccgacaacaacuucagcaucaagcaggacaucgugggcaucaaggaguggagcggcuacagcggcagcuucgugcagcaccccgagcugaccggccuggacugcaucagacccugcuucuggguggagcugaucagaggcagacccaaggagaacaccaucuggaccagcggcagcaucaucagcuucugcggcgugaacagcgacaccgugggcuggagcuggcccgacggcgccgagcugcccuucaccaucgacaaguga

SEQ ID NO: 181768 - RNA, 1410 nt, Artificial Sequence
  derived and/or modified CDS sequence (opt4) from neuraminidase__InfluenzaA__AFC62080
augaaccccaaccagaagaucaucaccaucggcagcgugugcaugaccaucggcauggccaaccugauccugcagaucggcaacaucaucagcaucuggaucagccacagcauccagcugggcaaccagagccagaucgagaccugcaaccagagcgugaucaccuacgagaacaacaccugggugaaccagaccuacgugaacaucagcaacaccaacuucgccgccggccagagcguggugagcgugaagcuggccggcaacagcagccugugccccgugagcggcugggccaucuacagcaaggacaacagcaucagaaucggcagcaagggcgacguguucgugaucagagagcccuucaucagcugcagcccccuggagugcagaaccuucuuccugacccagggcgcccugcugaacgacaagcacagcaacggcaccaucaaggacagaagccccuacagaacccugaugagcugccccaucggcgaggugcccagccccuacaacagcagauucgagagcguggccuggagcgccagcgccugccacgacggcaucaacuggcugaccaucggcaucagcggccccgacaacggcgccguggccgugcugaaguacaacggcaucaucaccgacaccaucaagagcuggagaaacaacauccugagaacccaggagagcgagugcgccugcgugaacggcagcugcuucaccaucaugaccgacggccccagcgacggccaggccagcuacaagaucuucagaaucgagaagggcaagaucgugaagagcguggagaugaacgcccccaacuacuacuacgaggagugcagcugcuaccccgacagcagcgagaucaccugcgugugcagagacaacuggcacggcagcaacagacccugggugagcuucaaccagaaccuggaguaccagaucggcuacaucugcagcggcaucuucggcgacaaccccagacccaacgacaagaccggcagcugcggccccgugagcagcaacggcgccaacggcgugaagggcuucagcuucaaguacggcaacggcguguggaucggcagaaccaagagcaucagcagcagaaagggcuucgagaugaucugggaccccaacggcuggaccggcaccgacaacaacuucagcaucaagcaggacaucgugggcaucaacgaguggagcggcuacagcggcagcuucgugcagcaccccgagcugaccggcaugggcugcaucagacccugcuucuggguggagcugaucagaggcagacccaaggagaacaccaucuggaccagcggcagcagcaucagcuucugcggcgugaacagcgacaccgugggcuggagcuggcccgacggcgccgagcugcccuucaccaucgacaaguga

SEQ ID NO: 181769 - RNA, 1410 nt, Artificial Sequence
  derived and/or modified CDS sequence (opt4) from neuraminidase__InfluenzaA__AFC62082
augaaccccaaccagaagaucaucaccaucggcagcgugagccugaccaucagcaccaucugcuucuucaugcagaucgccauccugaucaccaccgugacccugcacuucaagcaguacgaguucaacagcccccccaacaaccaggugaugcugugcgagcccaccaucaucgagagaaacaucaccgagaucguguaccugaccaacaccaccaucgagaaggagaucugccccaagcuggccgaguacagaaacuggagcaagccccagugcgacaucaccggcuucgcccccuucagcaaggacaacagcaucagacugagcgccggcggcgacaucugggugaccagagagcccuacgugagcugcgaccccaacaagugcuaccaguucgcccugggccagggcaccacccugaacaacgugcacagcaacaacaccgugagaggcagaacccccuacagaacccugcugaugaacgagcugggcgugcccuuccaccugggcaccaagcaggugugcaucgccuggagcagcagcagcugccacgacggcaaggccuggcugcacgugugcaucaccggcgacgacaagaacgccaccgccagcuucaucuacaacggcagacugguggacagcguggugagcuggagcaaggagauccugagaacccaggagagcgagugcgugugcaucaacggcaccugcaccguggugaugaccgacggcagcgccagcggcaaggccgacaccaagauccuguucaucgaggagggcaagaucgugcacaccagcacccugagcggcagcgcccagcacguggaggagugcagcugcuaccccagauaccccggcgugagaugcgugugcagagacaacuggaagggcagcaacagacccaucguggacaucaacaugaaggaccacagcaucgugagcagcuacgugugcagcggccuggugggcgacacccccagaaagaacgacagcagcagcagcagccacugcuucgaccccaacgacgaggagggcggccacggcgugaagggcugggccuucgacgacggcaacgacguguggaugggcagaaccaucagcgagaagagcagacugggcuacgagaccuucaaggugaucgagggcuggagcaaccccaagagcaagcugcagaucaacagacaggugaucguggacagaggcgacagaagcggcuacagcggcaucuucagcguggagggcaagagcugcaucaacagaugcuucuacguggagcugaucagaggcagcaaggaggagaccgaggugcuguggaccagcaacagcaucgugguguucugcggcaccagcggcaccuacggcaccggcagcuggcccgacggcgccgacaucaaccugaugcccaucuga

SEQ ID NO: 181770 - RNA, 1410 nt, Artificial Sequence; identical to SEQ ID NO: 174285
  derived and/or modified CDS sequence (opt4) from neuraminidase__InfluenzaA__AFD63529

SEQ ID NO: 181771 - RNA, 1410 nt, Artificial Sequence; identical to SEQ ID NO: 174285
  derived and/or modified CDS sequence (opt4) from neuraminidase__InfluenzaA__AFD63540

SEQ ID NO: 181772 - RNA, 1410 nt, Artificial Sequence
  derived and/or modified CDS sequence (opt4) from neuraminidase__InfluenzaA__AFD63551
augaaccccaaccagaagaucaucaccaucggcagcgugagccugaccaucgccgccaucugcuuccugaugcagaucgccauccuggugaccaccgugacccugcacuucaagcagcacgagugcaaccccccccccaacaaccaggugaugcugugcgagcccaccaucaucgagagaaacaucaccgagaucguguaccugaccaacaccaccaucgagaaggagaucugccccaagcuggccgaguacagaaacuggagcaagccccagugcaacaucaccggcuucgcccccuucagcaaggacaacagcaucagacugagcgccggcggcgacaucugggugaccagagagcccuacgugagcugcgaccccgacaagugcuaccaguucgcccugggccagggcaccacccugaacaacggccacagcaacgacaccgugcacggcagaacccccuacagaacccugcugaugaacgagcugggcgugcccuuccaccugggcaccagacaggugugcaucgccuggagcagcagcagcugccacgacggcaaggccuggcugcacgugugcgugaccggcgacgacaagaacgccaccgccagcuucaucuacaacggcagacugguggacagcaucggcagcuggagcaagaagauccugagaacccaggagagcgagugcgugugcaucaacggcaccugcaccguggugaugaccgacggcagcgccagcggcaaggccgacaccaagauccuguucaucgaggagggcaagaucgugcacaucagcacccugagcggcagcgcccagcacguggaggagugcagcugcuaccccagauaccccggcgugagaugcgugugcagagacaacuggaagggcagcaacagacccaucguggacaucaacgugaaggacuacagcaucgugagcagcuacgugugcagcggccuggugggcgacacccccagaaagaacgacagcuucagcagcagccacugccuggaccccaacaacgaggagggcggccacggcgugaagggcugggccuucgacgacggcaacgacguguggaugggcagaaccaucagcgagaagcugagaagcggcuacgagaccuucaaggugaucgagggcuggagcaagcccaacagcaagcugcagaucaacagacaggugaucguggagagaggcaacagaagcggcuacagcggcaucuucagcguggagggcaagagcugcaucaacagaugcuucuacguggagcugaucagaggcagaaaggaggagaccgaggugugguggaccagcaacagcaucgugguguucugcggcaccagcggcaccuacggcaccggcagcuggcccgacggcgccgacaucaaccugaugcccaucuga

SEQ ID NO: 181773 - RNA, 1410 nt, Artificial Sequence; identical to SEQ ID NO: 174285
  derived and/or modified CDS sequence (opt4) from neuraminidase__InfluenzaA__AFD63562

SEQ ID NO: 181774 - RNA, 1410 nt, Artificial Sequence
  derived and/or modified CDS sequence (opt4) from neuraminidase__InfluenzaA__AFD63573
augaaccccaaccagaagaucaucaccaucggcagcgugagccugaccaucgccaccaucugcuuccugaugcagaucgccauccuggugaccaccgugacccugcacuucaagcagcacgagugcaacagcccccccaacaaccaggugaugcugugcgagcccaccaucaucggcagaaacaucaccgagaucguguaccugaccaacaccaccaucgagaaggagaucugccccaagcuggccgaguacagaaacuggagcaagccccagugcaacaucaccggcuucgcccccuucagcaaggacaacagcaucagacugagcgccggcggcgacaucugggugaccagagagcccuacgugagcugcgaccccgacaagugcuaccaguucgcccugggccagggcaccacccugaacaacggccacagcaacgacaccgugcacgacagaacccccuacagaacccugcugaugaacgagcugggcgugcccuuccaccugggcaccagacaggugugcaucgccuggagcagcagcagcugccacgacggcaaggccuggcugcacgugugcgugaccggcgacgacaagaacgccaccgccagcuucaucuacaacggcagacugguggacagcaucggcagcuggagcaagaagauccugagaacccaggagagcgagugcgugugcaucaacggcaccugcaccguggugaugaccgacggcagcgccagcggcaaggccgacaccaagauccuguucaucgaggagggcaagaucgugcacaucagcacccugagcggcagcgcccagcacguggaggagugcagcugcuaccccagauaccccggcgugagaugcgugugcagagacaacuggaagggcagcaacagacccaucguggacaucaacgugaaggacuacagcaucgugagcagcuacgugugcagcggccuggugggcgacacccccagaaagaacgacagcuucagcagcagccacugccuggaccccaacaacgaggagggcggccacggcgugaagggcugggccuucgacgacggcaacgacguguggaugggcagaaccaucagcgagaagcugagaagcggcuacgagaccuucaaggugaucgagggcuggagcaagcccaacagcaagcugcagaucaacagacaggugaucguggagagaggcaacagaagcggcuacagcggcaucuucagcguggagggcaagagcugcaucaacagaugcuucuacguggagcugaucagaggcagaaaggaggagaccgaggugugguggaccagcaacagcaucgugguguucugcggcaccagcggcaccuacggcaccggcagcuggcccgacggcgccgacaucaaccugaugcccaucuga

SEQ ID NO: 181775 - RNA, 1410 nt, Artificial Sequence
  derived and/or modified CDS sequence (opt4) from neuraminidase__InfluenzaA__AFD63584
augaaccccaaccagaagaucaucaccaucggcagcgugagccugaccaucgccaccaucugcuuccugaugcagaucgccauccuggugaccaccgugacccugcacuucaagcaguacgagugcaacagcccccccaacaaccaggugaugcugugcgagcccaccaucaucgagagaaacaucaccgagaucguguaccugaccaacaccaccaucgagaaggagaucugccccaagcuggccgaguacagaaacuggagcaagccccagugcaacaucaccggcuucgcccccuucagcaaggacaacagcaucagacugagcgccggcggcgacaucugggugaccagagagcccuacgugagcugcgaccccgacaagugcuaccaguucgcccugggccagggcaccacccugaacaacggccacagcaacgacaccgugcacgagagaacccccuacagaacccugcugaugaacgagcugggcgugcccuuccaccugggcaccagacaggugugcaucgccuggagcagcagcagcugccacgacggcaaggccuggcugcacgugugcgugaccggcgacgacaagaacgccaccgccagcuucaucuacaacggcagacugguggacagcaucggcagcuggagcaagaagauccugagaacccaggagagcgagugcgugugcaucaacggcaccugcaccguggugaugaccgacggcagcgccagcggcaaggccgacaccaagauccuguucaucgaggagggcaagaucauccacaucagcacccugagcggcagcgcccagcacguggaggagugcagcugcuaccccagauaccccggcgugagaugcgugugcagagacaacuggaagggcagcaacagacccaucguggacaucaacgugaaggacuacagcaucgugagcagcuacgugugcagcggccuggugggcgacacccccagaaagaacgacagcagcagcagcagccacugccuggaccccaacaacgaggagggcggccacggcgugaagggcugggccuucgacgacggcaacgacguguggaugggcagaaccaucagcgagaagcugagaagcggcuacgagaccuucaaggugaucgagggcuggagcaagcccaacagcaagcugcagaucaacagacaggugaucguggagagaggcaacagaagcggcuacagcggcaucuucagcguggagggcaagagcugcaucaacagaugcuucuacguggagcugaucagaggcagaaaggaggagaccgaggugugguggaccagcaacagcaucgugguguucugcggcaccagcggcaccuacggcaccggcagcuggcccgacggcgccgacaucaaccugaugcccaucuga

SEQ ID NO: 181776 - RNA, 1410 nt, Artificial Sequence
  derived and/or modified CDS sequence (opt4) from neuraminidase__InfluenzaA__AFD63595
augaaccccaaccagaagaucaucaccaucggcagcgugagccugaccaucgccgccaucugcuuccugaugcagaucgccauccuggugaccaccgugacccugcacuucaagcagcacgagugcaacagcccccccaacaaccaggugaugcugugcgagcccaccaucaucgagagaaacaucaccgagaucguguaccugaccaacaccaccaucgagaaggagaucugccccaagcuggccgaguacagaaacuggagcaagccccagugcaacaucaccggcuucgcccccuucagcaaggacaacagcaucagacugagcgccggcggcgacaucugggugaccagagagcccuacgugagcugcgaccccgacaagugcuaccaguucgcccugggccagggcaccacccugaacaacggccacagcaacgacaccgugcacgacagaacccccuacagaacccugcugaugaacgagcugggcgugcccuuccaccugggcaccagacaggugugcaucgccuggagcagcagcagcugccacgacggcaaggccuggcugcacgugugcgugaccggcgacgacaagaacgccaccgccagcuucaucuacaacggcagacugguggacagcaucggcagcuggagcaagaagauccugagaacccaggagagcgagugcgugugcaucaacggcaccugcaccguggugaugaccgacggcagcgccagcggcaaggccgacaccaagauccuguucaucgaggagggcaagaucgugcacaucagcacccugagcggcagcgcccagcacguggaggagugcagcugcuaccccagauaccccggcgugagaugcgugugcaaggacaacuggaagggcagcaacagacccaucguggacaucaacgugaaggacuacagcaucgugagcagcuacgugugcagcggccuggugggcgacacccccagaaagaacgacagcuucagcagcagccacugccuggaccccaacaacgaggagggcggccacggcgugaagggcugggccuucgacgacggcaacgacguguggaugggcagaaccaucagcgagaagcugagaagcggcuacgagaccuucaaggugaucgagggcuggagcaagcccaacagcaagcugcagaucaacagacaggugaucguggagagaggcaacagaagcggcuacagcggcaucuucagcguggagggcaagagcugcaucaacagaugcuucuacguggagcugaucagaggcagaaaggaggagaccgaggugugguggaccagcaacagcaucgugguguucugcggcaccagcggcaccuacggcaccggcagcuggcccgacggcgccgacaucaaccugaugcccaucuga

SEQ ID NO: 181777 - RNA, 1410 nt, Artificial Sequence; identical to SEQ ID NO: 174285
  derived and/or modified CDS sequence (opt4) from neuraminidase__InfluenzaA__AFD63606

SEQ ID NO: 181778 - RNA, 1410 nt, Artificial Sequence; identical to SEQ ID NO: 174205
  derived and/or modified CDS sequence (opt4) from neuraminidase__InfluenzaA__AFD63628

SEQ ID NO: 181779 - RNA, 1410 nt, Artificial Sequence; identical to SEQ ID NO: 174285
  derived and/or modified CDS sequence (opt4) from neuraminidase__InfluenzaA__AFD63639

SEQ ID NO: 181780 - RNA, 1410 nt, Artificial Sequence; identical to SEQ ID NO: 174285
  derived and/or modified CDS sequence (opt4) from neuraminidase__InfluenzaA__AFD63650

SEQ ID NO: 181781 - RNA, 1410 nt, Artificial Sequence
  derived and/or modified CDS sequence (opt4) from neuraminidase__InfluenzaA__AFD63661
augaaccccaaccagaagaucaucaccaucggcagcgugagccugaccaucgccgccaucugcuuccugaugcagaucgccauccuggugaccaccgugacccugcacuucaagcagcacgagugcaacagcccccccaacaaccaggugaugcugugcgagcccaccaucaucgagagaaacaucaccgagaucguguaccugaccaacagcaccaucgagaaggagaucugccccaagcuggccgaguacagaaacuggagcaagccccagugcaacaucaccggcuucgcccccuucagcaaggacaacagcaucagacugagcgccggcggcgacaucugggugaccagagagcccuacgugagcugcgaccccgacaagugcuaccaguucgcccugggccagggcaccacccugaacaacggccacagcaacgacaccgugcacgacagaacccccuacagaacccugcugaugaacgagcugggcgugcccuuccaccugggcaccagacaggugugcaucgccuggagcagcagcagcugccacgacggcaaggccuggcugcacgugugcgugaccggcgacgacaagaacgccaccgccagcuucaucuacaacggcagacugguggacagcaucggcagcuggagcaagaagauccugagaacccaggagagcgagugcgugugcaucaacggcaccugcaccguggugaugaccgacggcagcgccagcggcaaggccgacaccaagauccuguucaucgaggagggcaagaucgugcacaucagcacccugagcggcagcgcccagcacguggaggagugcagcugcuaccccagauaccccggcgugagaugcgugugcagagacaacuggaagggcagcaacagacccaucguggacaucaacgugaaggacuacagcaucgugagcagcuacgugugcagcggccuggugggcgacacccccagaaagaacgacagcuucagcagcagccacugccuggaccccaacaacgaggagggcggccacggcgugaagggcugggccuucgacgacggcaacgacguguggaugggcagaaccaucagcgagaagcugagaagcggcuacgagaccuucaaggugaucgagggcuggagcaagcccaacagcaagcugcagaucaacagacaggugaucguggagagaggcaacagaagcggcuacagcggcaucuucagcguggagggcaagagcugcaucaacagaugcuucuacguggagcugaucagaggcagaaaggaggagaccgaggugugguggaccagcaacagcaucgugguguucugcggcaccagcggcaccuacggcaccggcagcuggcccgacggcgccgacaucaaccugaugcccaucuga

SEQ ID NO: 181782 - RNA, 1410 nt, Artificial Sequence; identical to SEQ ID NO: 175991
  derived and/or modified CDS sequence (opt4) from neuraminidase__InfluenzaA__AFD63672

SEQ ID NO: 181783 - RNA, 1410 nt, Artificial Sequence
  derived and/or modified CDS sequence (opt4) from neuraminidase__InfluenzaA__AFD63683
augaaccccaaccagaagaucaucaccaugggcagcgugagccugaccaucgccaccaucugcuuccugaugcagaucgccauccuggugaccaccgugacccugcacuucaagcaguacgagugcaacagcccccccaacaaccaggugaugcugugcgagcccaccaucaucgagagaaacaucaccgagaucguguaccugaccaacaccaccaucgagaaggagaucugccccaagcuggccgaguacagaaacuggagcaagccccagugcaacaucaccggcuucgcccccuucagcaaggacaacagcaucagacugagcgccggcggcgacaucugggugaccagagagcccuacgugagcugcgaccccgacaagugcuaccaguucgcccugggccagggcaccacccugaacaacggccacagcaacgacaccgugcacggcagaacccccuacagaacccugcugaugaacgagcugggcgugcccuuccaccugggcaccagacaggugugcaucgccuggagcagcagcagcugccacgacggcaaggccuggcugcacgugugcgugaccggcgacgacaagaacgccaccgccagcuucaucuacaacggcagacugguggacagcaucggcagcuggagcaagaagauccugagaacccaggagagcgagugcgugugcaucaacggcaccugcaccguggugaugaccgacggcagcgccagcggcaaggccgacaccaagauccuguucaucgaggagggcaagaucauccacaucagcacccugagcggcagcgcccagcacguggaggagugcagcugcuaccccagauaccccggcgugagaugcgugugcagagacaacuggaagggcagcaacagacccaucguggacaucaacgugaaggacuacagcaucgugagcagcuacgugugcagcggccuggugggcgacacccccagaaagaacgacagcagcagcagcagccacugccuggaccccaacaacgaggagggcggccacggcgugaagggcugggccuucgacgacggcaacgacguguggaugggcagaaccaucagcgagaagcugagaagcggcuacgagaccuucaaggugaucgagggcuggagcaagcccaacagcaagcugcagaucaacagacaggugaucguggagagaggcaacagaagcggcuacagcggcaucuucagcguggagggcaagagcugcaucaacagaugcuucuacguggagcugaucagaggcagaaaggaggagaccgaggugugguggaccagcaacagcaucgugguguucugcggcaccagcggcaccuacggcaccggcagcuggcccgacggcgccgacaucaaccugaugcccaucuga

SEQ ID NO: 181784 - RNA, 1410 nt, Artificial Sequence
  derived and/or modified CDS sequence (opt4) from neuraminidase__InfluenzaA__AFD63694
augaaccccaaccagaagaucaucaccaucggcagcgugagccugaccaucgccaccaucugcuuccugaugcagaucgccauccuggugaccaccaucacccugcacuucaagcagcacgagugcaacagcccccccaacaaccaggugaugcugugcgagcccaccaucaucgagagaaacaucaccgagaucguguaccugaccaacaccaccaucgagaaggagaucugccccaagcuggccgaguacagaaacuggagcaagccccagugcaacaucaccggcuucgcccccuucagcaaggacaacagcaucagacugagcgccggcggcgacaucugggugaccagagagcccuacgugagcugcgaccccgacaagugcuaccaguucgcccugggccagggcaccacccugaacaacggccacagcaacgacaccgugcacgacagaacccccuacagaacccugcugaugaacgagcugggcgugcccuuccaccugggcaccagacaggugugcaucgccuggagcagcagcagcugccacgacggcaaggccuggcugcacgugugcgugaccggcgacgacaagaacgccaccgccagcuucaucuacaacggcagacugguggacagcaucggcagcuggagcaagaagauccugagaacccaggagagcgagugcgugugcaucaacggcaccugcaccguggugaugaccgacggcagcgccagcggcaaggccgacaccaagauccuguucaucgaggagggcaagaucgugcacaucagcacccugagcggcagcgcccagcacguggaggagugcagcugcuaccccagauaccccggcgugagaugcgugugcagagacaacuggaagggcagcaacagacccaucguggacaucaacgugaaggacuacagcaucgugagcagcuacgugugcagcggccuggugggcgacacccccagaaagaacgacagcuucagcagcagccacugccuggaccccaacaacgaggagggcggccacggcgugaagggcugggccuucgacgacggcaacgacguguggaugggcagaaccaucagcgagaagcugagaagcggcuacgagaccuucaaggugaucgagggcuggagcaagcccaacagcaagcugcagaucaacagacaggugaucguggagagaggcaacagaagcggcuacagcggcaucuucagcguggagggcaagagcugcaucaacagaugcuucuacguggagcugaucagaggcagaaaggaggagaccgaggugugguggaccagcaacagcaucgugguguucugcggcaccagcggcaccuacggcaccggcagcuggcccgacggcgccgacaucaaccugaugcccaucuga

SEQ ID NO: 181785 - RNA, 1410 nt, Artificial Sequence
  derived and/or modified CDS sequence (opt4) from neuraminidase__InfluenzaA__AFD63705
augaaccccaaccagaagaucaucaccaucggcagcgugagccugaccaucgccgccaucugcuuccugaugcagaucgccauccuggugaccaccgugacccugcacuucaagcagcacgagugcaacagcccccccaacaaccaggugaugcugugcgagcccaccaucaucgagagaaacaucaccgagaucguguaccugaccaacaccaccaucgagaaggagaucugccccaagcuggccgaguacagaaacuggagcaagccccagugcaacaucaccggcuucgcccccuucagcaaggacaacagcaucagacugagcgccggcggcgacaucugggugaccagagagcccuacgugagcugcgaccccgacaagugcuaccaguucgcccugggcaagggcaccacccugaacaacggccacagcaacgacaccgugcacgacagaacccccuacagaacccugcugaugaacgagcugggcgugcccuuccaccugggcaccagacaggugugcaucgccuggagcagcagcagcugccacgacggcaaggccuggcugcacgugugcgugaccggcgacgacaagaacgccaccgccagcuucaucuacaacggcagacugguggacagcaucggcagcuggagcaagaagauccugagaacccaggagagcgagugcgugugcaucaacggcaccugcaccguggugaugaccgacggcagcgccagcggcaaggccgacaccaagauccuguucaucgaggagggcaagaucgugcacaucagcacccugagcggcagcgcccagcacguggaggagugcagcugcuaccccagauaccccggcgugagaugcgugugcagagacaacuggaagggcagcaacagacccaucguggacaucaacgugaaggacuacagcaucgugagcagcuacgugugcagcggccuggugggcgacacccccagaaagaacgacagcuucagcagcagccacugccuggaccccaacaacgaggagggcggccacggcgugaagggcugggccuucgacgacggcaacgacguguggaugggcagaaccaucagcgagaagcugagaagcggcuacgagaccuucaaggugaucgagggcuggagcaagcccaacagcaagcugcagaucaacagacaggugaucguggagagaggcaacagaagcggcuacagcggcaucuucagcguggagggcaagagcugcaucaacagaugcuucuacguggagcugaucagaggcagaaaggaggagaccgaggugugguggaccagcaacagcaucgugguguucugcggcaccagcggcaccuacggcaccggcagcuggcccgacggcgccgacaucaaccugaugcccaucuga

SEQ ID NO: 181786 - RNA, 1410 nt, Artificial Sequence
  derived and/or modified CDS sequence (opt4) from neuraminidase__InfluenzaA__AFD63716
augaaccccaaccagaagaucaucaccaucggcagcgugagccugaccaucgccgccaucugcuuccugaugcagaucgccauccuggugaccaccgugacccugcacuucaagcagcacgagugcaacagcccccccaacaaccaggugaugcugugcgagcccaccaucaucgagagaaacaucaccgagaucguguaccugaccaacaccaccaucgagaaggagaucugccccaagcuggccgaguacagaaacuggagcaagccccagugcaacaucaccggcuucgcccccuucagcaaggacaacagcaucagacugagcgccggcggcgacaucugggugaccagagagcccuacgugagcugcgaccccgacaagugccaccaguucgcccugggccagggcaccacccugaacaacggccacagcaacgacaccgugcacgacagaacccccuacagaacccugcugaugaacgagcugggcgugcccuuccaccugggcaccagacaggugugcaucgccuggagcagcagcagcugccacgacggcaaggccuggcugcacgugugcgugaccggcgacgacaagaacgccaccgccagcuucaucuacaacggcagacugguggacagcaucggcagcuggagcaagaagauccugagaacccaggagagcgagugcgugugcaucaacggcaccugcaccguggugaugaccgacggcagcgccagcggcaaggccgacaccaagauccuguucaucgaggagggcaagaucgugcacaucagcacccugagcggcagcgcccagcacguggaggagugcagcugcuaccccagauaccccggcgugagaugcgugugcagagacaacuggaagggcagcaacagacccaucguggacaucaacgugaaggacuacagcaucgugagcagcuacgugugcagcggccuggugggcgacacccccagaaagaacgacagcuucagcagcagccacugccuggaccccaacaacgaggagggcggccacggcgugaagggcugggccuucgacgacggcaacgacguguggaugggcagaaccaucagcgagaagcugagaagcggcuacgagaccuucaaggugaucgagggcuggagcaagcccaacagcaagcugcagaucaacagacaggugaucguggagagaggcaacagaagcggcuacagcggcaucuucagcguggagggcaagagcugcaucaacagaugcuucuacguggagcugaucagaggcagaaaggaggagaccgaggugugguggaccagcaacagcaucgugguguucugcggcaccagcggcaccuacggcaccggcagcuggcccgacggcgccgacaucaaccugaugcccaucuga

SEQ ID NO: 181787 - RNA, 1410 nt, Artificial Sequence; identical to SEQ ID NO: 174285
  derived and/or modified CDS sequence (opt4) from neuraminidase__InfluenzaA__AFD63727

SEQ ID NO: 181788 - RNA, 1410 nt, Artificial Sequence; identical to SEQ ID NO: 174285
  derived and/or modified CDS sequence (opt4) from neuraminidase__InfluenzaA__AFD63738

SEQ ID NO: 181789 - RNA, 1410 nt, Artificial Sequence
  derived and/or modified CDS sequence (opt4) from neuraminidase__InfluenzaA__AFD63749
augaaccccaaccagaagaucaucaccaucagcagcgugagccugaccaucgccaccaucugcuuccugaugcagaucgccauccuggugaccaccgugacccugcacuucaagcagcacgagugcaacagcccccccaacaaccaggugaugcugugcgagcccaccaucaucgagagaaacaucaccgagaucguguaccugaccaacaccaccaucgagaaggagaucugccccaagcuggccgaguacagaaacuggagcaagccccagugcaacaucaccggcuucgcccccuucagcaaggacaacagcaucagacugagcgccggcggcgacaucugggugaccagagagcccuacgugagcugcgaccccgacaagugcuaccaguucgcccugggccagggcaccacccugaacaacggccacagcaacgacaccgugcacgacagaacccccuacagaacccugcugaugaacgagcugggcgugcccuuccaccugggcaccagacaggugugcaucgccuggagcagcagcagcugccacgacggcaaggccuggcugcacgugugcgugaccggcgacgacaagaacgccaccgccagcuucaucuacaacggcagacugguggacagcaucggcagcuggagcaagaagauccugagaacccaggagagcgagugcgugugcaucaacggcaccugcaccguggugaugaccgacggcagcgccagcggcaaggccgacaccaagauccuguucaucgaggagggcaagaucgugcacaucagcacccugagcggcagcgcccagcacguggaggagugcagcugcuaccccagauaccccggcgugagaugcgugugcagagacaacuggaagggcagcaacagacccaucguggacaucaacgugaaggacuacagcaucgugagcagcuacgugugcagcggccuggugggcgacacccccagaaagaacgacagcuucagcagcagccacugccuggaccccaacaacgaggagggcggccacggcgugaagggcugggccuucgacgacggcaacgacguguggaugggcagaaccaucagcgagaagcugagaagcggcuacgagaccuucaaggugaucgagggcuggagcaagcccaacagcaagcugcagaucaacagacaggugaucguggagagaggcaacagaagcggcuacagcggcaucuucagcguggagggcaagagcugcaucaacagaugcuucuacguggagcugaucagaggcagaaaggaggagaccgaggugugguggaccagcaacagcaucgugguguucugcggcaccagcggcaccuacggcaccggcagcuggcccgacggcgccgacaucaaccugaugcccaucuga

SEQ ID NO: 181790 - RNA, 1410 nt, Artificial Sequence
  derived and/or modified CDS sequence (opt4) from neuraminidase__InfluenzaA__AFD63760
augaaccccaaccagaagaucaucaccaucggcagcgugagccugaccaucgccaccaucugcuuccugaugcagaucgccauccuggugaccaccgugacccugcacuucaagcaguacgagugcaacagcccccccaacaaccaggugaugcugugcgagcccaccaucaucgagagaaacaucaccgagaucguguaccugaccaacaccaccaucgagaaggagaucugccccaagcuggccgaguacagaaacuggagcaagccccagugcaacaucaccggcuucgcccccuucagcaaggacaacagcaucagacugagcgccggcggcgacaucugggugaccagagagcccuacgugagcugcgaccccgacaagugcuaccaguucgcccugggccagggcaccacccugaacaacggccacagcaacgacaccgugcacgacagaacccccuacagaacccugcugaugaacgagcugggcgugcccuuccaccugggcaccagacaggugugcaucgccuggagcagcagcagcugccacgacggcaaggccuggcugcacgugugcgugaccggcgacgacaagaacgccaccgccagcuucaucuacaacggcagacugguggacagcaucggcagcuggagcaagaagauccugagaacccaggagagcgagugcgugugcaucaacggcaccugcaccguggugaugaccgacggcagcgccagcggcaaggccgacaccaagauccuguucaucgaggagggcaagaucauccacaucagcacccugagcggcagcgcccagcacguggaggagugcagcugcuaccccagauaccccggcgugagaugcgugugcagagacaacuggaagggcagcaacagacccaucguggacaucaacgugaaggacuacagcaucgugagcagcuacgugugcagcggccuggugggcgacacccccagaaagaacgacagcagcagcagcagccacugccuggaccccaacaacgaggagggcggccacggcgugaagggcugggccuucgacgacggcaacgacguguggaugggcagaaccaucagcgagaagcugagaagcggcuacgagaccuucaaggugaucgagggcuggagcaagcccaacagcaagcugcagaucaacagacaggugaucguggagagaggcaacagaagcggcuacagcggcaucuucagcguggagggcaagagcugcaucaacagaugcuucuacguggagcugaucagaggcagaaaggaggagaccgaggugugguggaccagcaacagcaucgugguguucugcggcaccagcggcaccuacggcaccggcagcuggcccgacggcgccgacaucaaccugaugcccaucuga

SEQ ID NO: 181791 - RNA, 1410 nt, Artificial Sequence; identical to SEQ ID NO: 174285
  derived and/or modified CDS sequence (opt4) from neuraminidase__InfluenzaA__AFD63771

SEQ ID NO: 181792 - RNA, 1410 nt, Artificial Sequence; identical to SEQ ID NO: 174285
  derived and/or modified CDS sequence (opt4) from neuraminidase__InfluenzaA__AFD63782

SEQ ID NO: 181793 - RNA, 1410 nt, Artificial Sequence; identical to SEQ ID NO: 181790
  derived and/or modified CDS sequence (opt4) from neuraminidase__InfluenzaA__AFD63793

SEQ ID NO: 181794 - RNA, 1410 nt, Artificial Sequence; identical to SEQ ID NO: 174285
  derived and/or modified CDS sequence (opt4) from neuraminidase__InfluenzaA__AFD63804

SEQ ID NO: 181795 - RNA, 1410 nt, Artificial Sequence; identical to SEQ ID NO: 174285
  derived and/or modified CDS sequence (opt4) from neuraminidase__InfluenzaA__AFD63815

SEQ ID NO: 181796 - RNA, 1410 nt, Artificial Sequence; identical to SEQ ID NO: 174285
  derived and/or modified CDS sequence (opt4) from neuraminidase__InfluenzaA__AFD63826

SEQ ID NO: 181797 - RNA, 1410 nt, Artificial Sequence; identical to SEQ ID NO: 181790
  derived and/or modified CDS sequence (opt4) from neuraminidase__InfluenzaA__AFD63837

SEQ ID NO: 181798 - RNA, 1410 nt, Artificial Sequence
  derived and/or modified CDS sequence (opt4) from neuraminidase__InfluenzaA__AFD63848
augaaccccaaccagaagaucaucaccaucggcagcgugagccugaccaucgccgccaucugcuuccugaugcagaucgccauccuggugaccaccgugacccugcacuucaagcagagagagugcaacagcccccccaacaaccaggugaugcugugcgagcccaccaucaucgagagaaacaucaccgagaucguguaccugaccaacaccaccaucgagaaggagaucugccccaagcuggccgaguacagaaacuggagcaagccccagugcaacaucaccggcuucgcccccuucagcaaggacaacagcaucagacugagcgccggcggcgacaucugggugaccagagagcccuacgugagcugcgaccccgacaagugcuaccaguucgcccugggccagggcaccacccugaacaacggccacagcaacgacaccgugcacgacagaacccccuacagaacccugcugaugaacgagcugggcgugcccuuccaccugggcaccagacaggugugcaucgccuggagcagcagcagcugccacgacggcaaggccuggcugcacgugugcgugaccggcgacgacaagaacgccaccgccagcuucaucuacaacggcagacugguggacagcaucggcagcuggagcaagaagauccugagaacccaggagagcgagugcgugugcaucaacggcaccugcaccguggugaugaccgacggcagcgccagcggcaaggccgacaccaagauccuguucaucgaggagggcaagaucgugcacaucagcacccugagcggcagcgcccagcacguggaggagugcagcugcuaccccagauaccccggcgugagaugcgugugcagagacaacuggaagggcagcaacagacccaucguggacaucaacgugaaggacuacagcaucgugagcagcuacgugugcagcggccuggugggcgacacccccagaaagaacgacagcuucagcagcagccacugccuggaccccaacaacgaggagggcggccacggcgugaagggcugggccuucgacgacggcaacgacguguggaugggcagaaccaucagcgagaagcugagaagcggcuacgagaccuucaaggugaucgagggcuggagcaagcccaacagcaagcugcagaucaacagacaggugaucguggagagaggcaacagaagcggcuacagcggcaucuucagcguggagggcaagagcugcaucaacagaugcuucuacguggagcugaucagaggcagaaaggagaagaccgaggugugguggaccagcaacagcaucgugguguucugcggcaccagcggcaccuacggcaccggcagcuggcccgacggcgccgacaucaaccugaugcccaucuga

SEQ ID NO: 181799 - RNA, 1410 nt, Artificial Sequence; identical to SEQ ID NO: 174205
  derived and/or modified CDS sequence (opt4) from neuraminidase__InfluenzaA__AFD63859

SEQ ID NO: 181800 - RNA, 1410 nt, Artificial Sequence; identical to SEQ ID NO: 174205
  derived and/or modified CDS sequence (opt4) from neuraminidase__InfluenzaA__AFD63870

SEQ ID NO: 181801 - RNA, 1410 nt, Artificial Sequence; identical to SEQ ID NO: 174285
  derived and/or modified CDS sequence (opt4) from neuraminidase__InfluenzaA__AFD63881

SEQ ID NO: 181802 - RNA, 1410 nt, Artificial Sequence; identical to SEQ ID NO: 174285
  derived and/or modified CDS sequence (opt4) from neuraminidase__InfluenzaA__AFD63892

SEQ ID NO: 181803 - RNA, 1410 nt, Artificial Sequence
  derived and/or modified CDS sequence (opt4) from neuraminidase__InfluenzaA__AFD63903
augaaccccaaccagaagaucaucaccaucggcagcgugagccugaccaucgccgccaucugcuuccugaugcagaucgccauccuggugaccaccgugacccugcacuucaagcagcacgagugcaacagcccccccaacaaccaggugaugcugugcgagcccaccaucaucgagagaaacaucaccggcaucguguaccugaccaacaccaccaucgagaaggagaucugccccaagcuggccgaguacagaaacuggagcaagccccagugcaacaucaccggcuucgcccccuucagcaaggacaacagcaucagacugagcgccggcggcgacaucugggugaccagagagcccuacgugagcugcgaccccgacaagugcuaccaguucgcccugggccagggcaccacccugaacaacggccacagcaacgacaccgugcacgacagaacccccuacagaacccugcugaugaacgagcugggcgugcccuuccaccugggcaccagacaggugugcaucgccuggagcagcagcagcugccacgacggcaaggccuggcugcacgugugcgugaccggcgacgacaagaacgccaccgccagcuucaucuacaacggcagacugguggacagcaucggcagcuggagcaagaagauccugagaacccaggagagcgagugcgugugcaucaacggcaccugcaccguggugaugaccgacggcagcgccagcggcaaggccgacaccaagauccuguucaucgaggagggcaagaucgugcacaucagcacccugagcggcagcgcccagcacguggaggagugcagcugcuaccccagauaccccggcgugagaugcgugugcagagacaacuggaagggcagcaacagacccaucguggacaucaacgugaaggacuacagcaucgugagcagcuacgugugcagcggccuggugggcgacacccccagaaagaacgacagcuucagcagcagccacugccuggaccccaacaacgaggagggcggccacggcgugaagggcugggccuucgacgacggcaacgacguguggaugggcagaaccaucagcgagaagcugagaagcggcuacgagaccuucaaggugaucgagggcuggagcaagcccaacagcaagcugcagaucaacagacaggugaucguggagagaggcaacagaagcggcuacagcggcaucuucagcguggagggcaagagcugcaucaacagaugcuucuacguggagcugaucagaggcagaaaggaggagaccgaggugugguggaccagcaacagcaucgugguguucugcggcaccagcggcaccuacggcaccggcagcuggcccgacggcgccgacaucaaccugaugcccaucuga

SEQ ID NO: 181804 - RNA, 1410 nt, Artificial Sequence
  derived and/or modified CDS sequence (opt4) from neuraminidase__InfluenzaA__AFD63914
augaaccccaaccagaagaucaucaccaucggcagcgugagccugaccaucgccgccaucugcuuccugaugcagaucgccauccuggugaccaccgugacccugcacuucaagcagcacgagugcaacagcccccccaacaaccaggugaugcugugcgagcccaccaucaucgagagaaacaucaccgagaucguguaccugaccaacaccaccaucgagaaggagaucugccccaagcuggccgaguacagaaacuggagcaagccccagugcaacaucaccggcuucgcccccuucagcaaggacaacagcaucagacugagcgccggcggcgacaucugggugaccagagagcccuacgugagcugcgaccccgacaagugcuaccaguucgcccugggccagggcaccacccugaacaacggccacagcaacgacaccgugcacgacagaacccccuacagaacccugcugaugaacgagcugggcgugcccuuccaccugggcaccagacaggugugcaucgccuggagcagcagcagcugccacgacggcaaggccuggcugcacgugugcgugaccggcgacgacaagaacgccaccgccagcuucaucuacaacggcagacugguggacagcaucggcagcuggagcaagaagauccugagaacccaggagagcgagugcgugugcaucaacggcaccugcaccguggugaugaccgacggcagcgccagcggcaaggccgacaccaagauccuguucaucgaggagggcaagaucgugcacaucagcacccugagcggcagcgcccagcacguggaggagugcagcugcuaccccagauaccccggcgugagaugcgugugcagagacaacuggaagggcagcaacagacccaucguggacaucaacgugaaggacuacagcaucgugagcagcuacgugugcagcggccuggugggcgacacccccagaaagaacgacagcuucagcagcagccacugccuggaccccaacaacgaggagggcggccacggcgugaagggcugggccuucgacgacggcaacgacguguggaugggcagaaccaucagcgagaagcugagaagcggcuacgagaccuucaaggugaucgagggcuggagcaagcccaacagcaagcugcagaucaacagacaggugaucguggagagaggcaacagaagcggcuacagcggcaucuucagcguggagggcaagagcugcaucaacagaugcuucuacguggagcugaucagaggcagaaaggagaagaccgaggugugguggaccagcaacagcaucgugguguucugcggcaccagcggcaccuacggcaccggcagcuggcccgacggcgccgacaucaaccugaugcccaucuga

SEQ ID NO: 181805 - RNA, 1410 nt, Artificial Sequence; identical to SEQ ID NO: 181790
  derived and/or modified CDS sequence (opt4) from neuraminidase__InfluenzaA__AFD63925

SEQ ID NO: 181806 - RNA, 1410 nt, Artificial Sequence
  derived and/or modified CDS sequence (opt4) from neuraminidase__InfluenzaA__AFD63936
augaaccccaaccagaagaucaucaccaucggcagcgugagccugaccaucgccaccaucugcuuccugaugcagaucgccauccuggugaccaccgugacccugcacuucaagcagcacgagugcaaccccccccccaacaaccaggugaugcugugcgagcccaccaucaucgagagaaacaucaccgagaucguguaccugaccaacaccaccaucgagaaggagaucugccccaagcuggccgaguacagaaacuggagcaagccccagugcaacaucaccggcuucgcccccuucagcaaggacaacagcaucagacugagcgccggcggcgacaucugggugaccagagagcccuacgugagcugcgaccccgacaagugcuaccaguucgcccugggccagggcaccacccugaacaacggccacagcaacgacaccgugcacgacagaacccccuacagaacccugcugaugaacgagcugggcgugcccuuccaccugggcaccagacaggugugcaucgccuggagcagcagcagcugccacgacggcaaggccuggcugcacgugugcgugaccggcgacgacaagaacgccaccgccagcuucaucuacaacggcagacugguggacagcaucggcagcuggagcaagaagauccugagaacccaggagagcgagugcgugugcaucaacggcaccugcaccguggugaugaccgacggcagcgccagcggcaaggccgacaccaagauccuguucaucgaggagggcaagaucgugcacaucagcacccugagcggcagcgcccagcacguggaggagugcagcugcuaccccagauaccccggcgugagaugcgugugcagagacaacuggaagggcagcaacagacccaucguggacaucaacgugaaggacuacagcaucgugagcagcuacgugugcagcggccuggugggcgacacccccagaaagaacgacagcuucagcagcagccacugccuggaccccaacaacgaggagggcggccacggcgugaagggcugggccuucgacgacggcaacgacguguggaugggcagaaccaucagcgagaagcugagaagcggcuacgagaccuucaaggugaucgagggcuggagcaagcccaacagcaagcugcagaucaacagacaggugaucguggagagaggcaacagaagcggcuacagcggcaucuucagcguggagggcaagagcugcaucaacagaugcuucuacguggagcugaucagaggcagaaaggaggagaccgaggugugguggaccagcaacagcaucgugguguucugcggcaccagcggcaccuacggcaccggcagcuggcccgacggcgccgacaucaaccugaugcccaucuga

SEQ ID NO: 181807 - RNA, 1410 nt, Artificial Sequence; identical to SEQ ID NO: 174285
  derived and/or modified CDS sequence (opt4) from neuraminidase__InfluenzaA__AFD63947

SEQ ID NO: 181808 - RNA, 1410 nt, Artificial Sequence; identical to SEQ ID NO: 174285
  derived and/or modified CDS sequence (opt4) from neuraminidase__InfluenzaA__AFD63958

SEQ ID NO: 181809 - RNA, 1410 nt, Artificial Sequence; identical to SEQ ID NO: 174285
  derived and/or modified CDS sequence (opt4) from neuraminidase__InfluenzaA__AFD63969

SEQ ID NO: 181810 - RNA, 1410 nt, Artificial Sequence; identical to SEQ ID NO: 174285
  derived and/or modified CDS sequence (opt4) from neuraminidase__InfluenzaA__AFD63980

SEQ ID NO: 181811 - RNA, 1410 nt, Artificial Sequence
  derived and/or modified CDS sequence (opt4) from neuraminidase__InfluenzaA__AFD64002
augaaccccaaccagaagaucaucaccaucggcagcgugagccugaccaucgccgccaucugcuuccugaugcagaucgccauccuggugaccaccgugacccugcacuucaagcagcacgagugcaacagcccccccaacaaccaggugaugcugugcgagcccaccaucaucgagagaaacaucaccgagaucguguaccugaccaacaccaccaucgagaaggagaucugccccaagcuggccgaguacagaaacuggagcaagccccagugcaacaucaccggcuucgcccccuucagcaaggacaacagcaucagacugagcgccggcggcgacaucugggugaccagagagcccuacgugagcugcgaccccgacaagugcuaccaguucgcccugggccagggcaccacccugaacaacggccacagcaacgacaccgugcacgacagaacccccuacagaacccugcugaugaacgagcugggcgugcccuuccaccugggcaccagacaggugugcaucgccuggagcagcagcagcugccacgacggcaaggccuggcugcacgugugcgugaccggcgacgacaagaacgccaccgccagcuucaucuacaacggcagacugguggacagcaucggcagcuggagcaagaagauccugagaacccaggagagcgagugcgugugcaucaacggcaccugcaccguggugaugaccgacggcagcgccagcggcaaggccgacaccaagauccuguucaucgaggagggcaagaucgugcacaucagcacccugagcggcagcgcccagcacguggaggagugcagcugcuaccccagauaccccggcgugagaugcgugugcagagacaacuggaagggcagcaacagacccaucguggacaucaacgugaaggacuacagcaucgugagcagcuacgugugcagcggccuggugggcgacacccccagaaagaccgacagcuucagcagcagccacugccuggaccccaacaacgaggagggcggccacggcgugaagggcugggccuucgacgacggcaacgacguguggaugggcagaaccaucagcgagaagcugagaagcggcuacgagaccuucaaggugaucgagggcuggagcaagcccaacagcaagcugcagaucaacagacaggugaucguggagagaggcaacagaagcggcuacagcggcaucuucagcguggagggcaagagcugcaucaacagaugcuucuacguggagcugaucagaggcagaaaggaggagaccgaggugugguggaccagcaacagcaucgugguguucugcggcaccagcggcaccuacggcaccggcagcuggcccgacggcgccgacaucaaccugaugcccaucuga

SEQ ID NO: 181812 - RNA, 1410 nt, Artificial Sequence; identical to SEQ ID NO: 174195
  derived and/or modified CDS sequence (opt4) from neuraminidase__InfluenzaA__AFD64013

SEQ ID NO: 181813 - RNA, 1410 nt, Artificial Sequence
  derived and/or modified CDS sequence (opt4) from neuraminidase__InfluenzaA__AFD64024
augaaccccaaccagaagaucaucaccaucggcagcgugagccugaccaucgccgccaucugcuuccugaugcagaucgccauccuggugaccaccgugacccugcacuucaagcagcacgagugcaacagcccccccaacaaccaggugaugcugugcgagcccaccaucaucgagaagaacaucaccgagaucguguaccugaccaacaccaccaucgagaaggagaucugccccaagcuggccgaguacagaaacuggagcaagccccagugcaacaucaccggcuucgcccccuucagcaaggacaacagcaucagacugagcgccggcggcgacaucugggugaccagagagcccuacgugagcugcgaccccgacaagugcuaccaguucgcccugggccagggcaccacccugaacaacggccacagcaacgacaccgugcacgacagaacccccuacagaacccugcugaugaacgagcugggcgugcccuuccaccugggcaccagacaggugugcaucgccuggagcagcagcagcugccacgacggcaaggccuggcugcacgugugcgugaccggcgacgacaagaacgccaccgccagcuucaucuacaacggcagacugguggacagcaucggcagcuggagcaagaagauccugagaacccaggagagcgagugcgugugcaucaacggcaccugcaccguggugaugaccgacggcagcgccagcggcaaggccgacaccaagauccuguucaucgaggagggcaagaucgugcacaucagcacccugagcggcagcgcccagcacguggaggagugcagcugcuaccccagauaccccggcgugagaugcgugugcagagacaacuggaagggcagcaacagacccaucguggacaucaacgugaaggacuacagcaucgugagcagcuacgugugcagcggccuggugggcgacacccccagaaagaacgacagcuucagcagcagccacugccuggaccccaacaacgaggagggcggccacggcgugaagggcugggccuucgacgacggcaacgacguguggaugggcagaaccaucagcgagaagcugagaagcggcuacgagaccuucaaggugaucgagggcuggagcaagcccaacagcaagcugcagaucaacagacaggugaucguggagagaggcaacagaagcggcuacagcggcaucuucagcguggagggcaagagcugcaucaacagaugcuucuacguggagcugaucagaggcagaaaggaggagaccgaggugugguggaccagcaacagcaucgugguguucugcggcaccagcggcaccuacggcaccggcagcuggcccgacggcgccgacaucaaccugaugcccaucuga

SEQ ID NO: 181814 - RNA, 1410 nt, Artificial Sequence
  derived and/or modified CDS sequence (opt4) from neuraminidase__InfluenzaA__AFD64035
augaaccccaaccagaagaucaucaccaucggcagcgugagccugaccaucgccgccaucugcuuccugaugcagaucgccauccuggugaccaccgugacccugcacuucaagcagcacgagugcaacagcccccccaacaaccaggugaugcugugcgagcccaccaucaucgagagaaacaucaccgagaucguguaccugaccaacaccaccaucgagaaggagaucugccccaagcuggccgaguacagaaacuggagcaagccccagugcaacaucaccggcuucgcccccuucagcaaggacaacagcaucagacugagcgccggcggcgacaucugggugaccagagagcccuacgugagcugcgaccccgacaagugcuaccaguucgcccugggccagggcaccacccugaacaacggccacagcaacgacaccgugcacgacagaacccccuacagaacccugcugaugaacgagcugggcgugcccuuccaccugggcaccagacaggugugcaucgccuggagcagcagcagcugccacgacggcaaggccuggcugcacgugugcgugaccggcgacgacaagaacgccaccgccagcuucaucuacaacggcagacugguggacagcaucggcagcuggagcaagaagauccugagaacccaggagagcgagugcgugugcaucaacggcaccugcaccguggugaugaccgacggcagcgccagcggcaaggccgacaccaagauccuguucaucgaggagggcaagaucgugcacaucagcacccugagcggcagcgcccagcacguggaggagugcagcugcuaccccagauaccccggcgugagaugcgugugcagagacaacuggaagggcagcaacagacccaucguggacaucaacgugaaggacuacagcaucgugagcagcuacgugugcagcggccuggugggcgacacccccagaaagaacgacagcuucagcagcagccacugccuggaccccaacaacgaggagggcggccacggcgugaagggcugggccuucgacgacggcaacgacguguggaugggcagaaccaucagcgagaagcugagaagcggcuacgagaccuucaaggugaucgagggcuggagcaagcccaacagcaagcugcagaucaacagacaggugaucguggagagaggcaacagaagcggcuacagcggcaucuucagcguggagggcaagagcugcaucaacagaugcuucuacguggagcugaucagaggcagaaaggaggagaccgaggugugguggaccagcaacagcguggugguguucugcggcaccagcggcaccuacggcaccggcagcuggcccgacggcgccgacaucaaccugaugcccaucuga

SEQ ID NO: 181815 - RNA, 1410 nt, Artificial Sequence
  derived and/or modified CDS sequence (opt4) from neuraminidase__InfluenzaA__AFD64046
augaaccccaaccagaagaucaucaccaucggcagcgugagccugaccaucgccaccaucugcuuccugaugcagaucgccauccuggugaccaccgugacccugcacuucaagcagcacgagugcaacagcccccccaacaaccaggugaugcugugcgagcccaccaucaucgagagaaacaucaccgagaucguguaccugaccaacaccaccaucgagaaggagaucugccccaagcuggccgaguacagaaacuggagcaagccccagugcaacaucaccggcuucgcccccuucagcaaggacaacagcaucagacugagcgccggcggcgacaucugggugaccagagagcccuacgugagcugcgaccccgacaagugcuaccaguucgcccugggccagggcaccacccugaacaacggccacagcaacgacaccgugcacgagagaacccccuacagaacccugcugaugaacgagcugggcgugcccuuccaccugggcaccagacaggugugcaucgccuggagcagcagcagcugccacgacggcaaggccuggcugcacgugugcgugaccggcgacgacaagaacgccaccgccagcuucaucuacaacggcagacugguggacagcaucggcagcuggagcaagaagauccugagaacccaggagagcgagugcgugugcaucaacggcaccugcaccguggugaugaccgacggcagcgccagcggcaaggccgacaccaagauccuguucaucgaggagggcaagaucgugcacaucagcacccugagcggcagcgcccagcacguggaggagugcagcugcuaccccagauaccccggcgugagaugcgugugcagagacaacuggaagggcagcaacagacccaucguggacaucaacgugaaggacuacagcaucgugagcagcuacgugugcagcggccuggugggcgacacccccagaaagaacgacagcuucagcagcagccacugccuggaccccaacaacgaggagggcggccacggcgugaagggcugggccuucgacgacggcaacgacguguggaugggcagaaccaucagcgagaagcugagaagcggcuacgagaccuucaaggugaucgagggcuggagcaagcccaacagcaagcugcagaucaacagacaggugaucguggagagaggcaacagaagcggcuacagcggcaucuucagcguggagggcaagagcugcaucaacagaugcuucuacguggagcugaucagaggcagaaaggaggagaccgaggugugguggaccagcaacagcaucgugguguucugcggcaccagcggcaccuacggcaccggcagcuggcccgacggcgccgacaucaaccugaugcccaucuga

SEQ ID NO: 181816 - RNA, 1410 nt, Artificial Sequence; identical to SEQ ID NO: 181790
  derived and/or modified CDS sequence (opt4) from neuraminidase__InfluenzaA__AFD64057

SEQ ID NO: 181817 - RNA, 1410 nt, Artificial Sequence
  derived and/or modified CDS sequence (opt4) from neuraminidase__InfluenzaA__AFD64068
augaaccccaaccagaagaucaucaccaucggcagcgugagccugaccaucagcaccaucugcuucuucaugcagaucgccauccugaucaccaccgugacccugcacuucaagcaguacgaguucaacagcccccccaacaaccaggugaugcugugcgagcccaccaucaucgagagaaacaucaccgagaucguguaccugaccaacaccaccaucgagaaggagaucugccccaagcuggccgaguacagaaacuggagcaagccccagugcgacaucaccggcuucgcccccuucagcaaggacaacagcaucagacugagcgccggcggcgacaucugggugaccagagagcccuacgugagcugcgaccccgacaagugcuaccaguucgcccugggccagggcaccacccugaacaacgugcacagcaacgacaccgugcacaacagaacccccuacagaacccugcugaugaacgagcugggcgugcccuuccaccugggcaccaagcaggugugcaucgccuggagcagcagcagcugccacgacggcaaggccuggcugcacgugugcgugaccggcgacgacaagaacgccaccgccagcuucaucuacaacggcagacugguggacagcaucgugagcuggagcaagaagauccugagaacccaggagagcgagugcgugugcaucaacggcaccugcaccguggugaugaccgacggcagcgccagcggcaaggccgacaccaagauccuguucaucgaggagggcaagaucgugcacaccagcacccugagcggcagcgcccagcacguggaggagugcagcugcuaccccagauaccccggcgugagaugcgugugcagagacaacuggaagggcagcaacagacccaucguggacaucaacaucaaggacuacagcaucgugagcagcuacgugugcagcggccuggugggcgacacccccagaaagaacgacagcagcagcagcagccacugccuggaccccaacaacgaggagggcggccacggcgugaagggcugggccuucgacgacggcaacgacguguggaugggcagaaccaucagcgagaagagcagaagcggcuacgagaccuucaaggugaucgagggcuggagcaaccccaacagcaagcugcagaucaacagacaggugaucguggacagaggcaacagaagcggcuacagcggcaucuucagcguggagggcaagagcugcaucaacagaugcuucuacguggagcugaucagaggcagaaaggaggagaccgaggugcuguggaccagcaacagcaucgugguguucugcggcaccagcggcaccuacggcaccggcagcuggcccgacggcgccgacaucaaccugaugcccaucuga

SEQ ID NO: 181818 - RNA, 1410 nt, Artificial Sequence
  derived and/or modified CDS sequence (opt4) from neuraminidase__InfluenzaA__AFD64079
augaaccccaaccagaagaucaucaccaucggcagcgugagccugaccaucgccgccaucugcuuccugaugcagaucgccauccuggugaccaccgugacccugcacuucaagcagcacgagugcaacagcccccccaacaaccaggugaugcugugcgagcccaccaucaucgagagaaacaucaccgagaucguguaccugaccaacaccaccaucgagaaggagaucugccccaagcuggccgaguacagaaacuggagcaagccccagugcaacaucaccggcuucgcccccuucagcaaggacaacagcaucagaaucagcgccggcggcgacaucugggugaccagagagcccuacgugagcugcgaccccgacaagugcuaccaguucgcccugggccagggcaccacccugaacaacggccacagcaacgacaccgugcacgacagaacccccuacagaacccugcugaugaacgagcugggcgugcccuuccaccugggcaccagacaggugugcaucgccuggagcagcagcagcugccacgacggcaaggccuggcugcacgugugcgugaccggcgacgacaagaacgccaccgccagcuucaucuacaacggcagacugguggacagcaucggcagcuggagcaagaagauccugagaacccaggagagcgagugcgugugcaucaacggcaccugcaccguggugaugaccgacggcagcgccagcggcaaggccgacaccaagauccuguucaucgaggagggcaagaucgugcacaucagcacccugagcggcagcgcccagcacguggaggagugcagcugcuaccccagauaccccggcgugagaugcgugugcagagacaacuggaagggcagcaacagacccaucguggacaucaacgugaaggacuacagcaucgugagcagcuacgugugcagcggccuggugggcgacacccccagaaagaacgacagcuucagcagcagccacugccuggaccccaacaacgaggagggcggccacggcgugaagggcugggccuucgacgacggcaacgacguguggaugggcagaaccaucagcgagaagcugagaagcggcuacgagaccuucaaggugaucgagggcuggagcaagcccaacagcaagcugcagaucaacagacaggugaucguggagagaggcaacagaagcggcuacagcggcaucuucagcguggagggcaagagcugcaucaacagaugcuucuacguggagcugaucagaggcagaaaggaggagaccgaggugugguggaccagcaacagcaucgugguguucugcggcaccagcggcaccuacggcaccggcagcuggcccgacggcgccgacaucaaccugaugcccaucuga

SEQ ID NO: 181819 - RNA, 1410 nt, Artificial Sequence; identical to SEQ ID NO: 174285
  derived and/or modified CDS sequence (opt4) from neuraminidase__InfluenzaA__AFD64090

SEQ ID NO: 181820 - RNA, 1410 nt, Artificial Sequence
  derived and/or modified CDS sequence (opt4) from neuraminidase__InfluenzaA__AFD64101
augaaccccaaccagaagaucaucaccaucggcagcgugagccugaccaucgccgccaucugcuuccugaugcagaucgccauccuggugaccaccgugacccugcacuucaagcagcacgagugcaacagcccccccaacaaccaggugaugcugugcgagcccaccaucaucgagagaaacaucaccgagaucguguaccugaccaacaccaccaucgagaaggagaucugccccaagcuggccgaguacagaaacuggagcaagccccagugcaacaucaccggcuucgcccccuucagcaaggacaacagcaucagacugagcgccggcggcgacaucugggugaccagagagcccuacgugagcugcgaccccgacaagugcuaccaguucgcccugggccagggcaccacccugaacaacggccacagcaacgacaccgugcacggcagaacccccuacagaacccugcugaugaacgagcugggcgugcccuuccaccugggcaccagacaggugugcaucgccuggagcagcagcagcugccacgacggcaaggccuggcugcacgugugcgugaccggcgacgacaagaacgccaccgccagcuucaucuacaacggcagacugguggacagcaucggcagcuggagcaagaagauccugagaacccaggagagcgagugcgugugcaucaacggcaccugcaccguggugaugaccgacggcagcgccagcggcaaggccgacaccaagauccuguucaucgaggagggcaagaucgugcacaucagcacccugagcggcagcgcccagcacguggaggagugcagcugcuaccccagauaccccggcgugagaugcgugugcagagacaacuggaagggcagcaacagacccaucguggacaucaacgugaaggacuacagcaucgugagcagcuacgugugcagcggccuggugggcgacacccccagaaagaacgacagcuucagcagcagccacugccuggaccccaacaacgaggagggcggccacggcgugaagggcugggccuucgacgacggcaacgacguguggaugggcagaaccaucagcgagaagcugagaagcggcuacgagaccuucaaggugaucgagggcuggagcaagcccaacagcaagcugcagaucaacagacaggugaucguggagagaggcaacagaagcggcuacagcggcaucuucagcguggagggcaagagcugcaucaacagaugcuucuacguggagcugaucagaggcagaaaggaggagaccgaggugugguggaccagcaacagcaucgugguguucugcggcaccagcggcaccuacggcaccggcagcuggcccgacggcgccgacaucaaccugaugcccaucuga

SEQ ID NO: 181821 - RNA, 1410 nt, Artificial Sequence
  derived and/or modified CDS sequence (opt4) from neuraminidase__InfluenzaA__AFD64112
augaaccccaaccagaagaucaucaccaucggcagcgugagccugaccaucgccaccaucugcuuccugaugcagaucgccauccuggugaccaccgugacccugcacuucaagcaguacgagugcaacagcccccccaacaaccaggugaugcugugcgagcccaccaucaucgagagaaacaucaccgagaucguguaccugaccaacaccaccaucgagaaggagaucugccccaagcuggccgaguacagaaacuggagcaagccccagugcaacaucaccggcuucgcccccuucagcaaggacaacagcaucagacugagcgccggcggcgacaucugggugaccagagagcccuacgugagcugcgaccccgacaagugcuaccaguucgcccugggccagggcaccacccugaacaacggccacagcaacgacaccgugcacgacagaacccccuacagaacccugcugaugaacgagcugggcgugcccuuccaccugggcaccagacaggugugcaucgccuggagcagcagcagcugccacgacggcaaggccuggcugcacgugugcgugaccggcgacgacaagaacgccaccgccagcuucaucuacaacggcagacugguggacagcaucggcagcuggagcaagaagauccugagaacccaggagagcgagugcgugugcaucaacggcaccugcaccguggugaugaccgacggcagcgccagcggcaaggccgacaccaagauccuguucaucgaggagggcaagaucauccacaucagcacccugagcggcagcgcccagcacguggaggagugcagcugcuaccccagauaccccggcgugagaugcgugugcagagacaacuggaagggcagcaacagacccaucguggacaucaacgugaaggacuacagcaucgugagcagcuacgugugcagcggccuggugggcgacacccccagaaagaacgacagcagcagcagcagccacugccuggaccccaacaacgaggagggcggccacggcgugaagggcugggccuucgacgacggcaacgacguguggaugggcagaaccaucagcgagaagcugagaagcggcuacgagaccuucaaggugaucgagggcuggagcaagcccaacagcaagcugcagaucaacagacaggugaucguggagagagacaacagaagcggcuacagcggcaucuucagcguggagggcaagagcugcaucaacagaugcuucuacguggagcugaucagaggcagaaaggaggagaccgaggugugguggaccagcaacagcaucgugguguucugcggcaccagcggcaccuacggcaccggcagcuggcccgacggcgccgacaucaaccugaugcccaucuga

SEQ ID NO: 181822 - RNA, 1410 nt, Artificial Sequence; identical to SEQ ID NO: 175991
  derived and/or modified CDS sequence (opt4) from neuraminidase__InfluenzaA__AFD64123

SEQ ID NO: 181823 - RNA, 1410 nt, Artificial Sequence; identical to SEQ ID NO: 174285
  derived and/or modified CDS sequence (opt4) from neuraminidase__InfluenzaA__AFD64134

SEQ ID NO: 181824 - RNA, 1410 nt, Artificial Sequence; identical to SEQ ID NO: 174285
  derived and/or modified CDS sequence (opt4) from neuraminidase__InfluenzaA__AFD64145

SEQ ID NO: 181825 - RNA, 1410 nt, Artificial Sequence; identical to SEQ ID NO: 174285
  derived and/or modified CDS sequence (opt4) from neuraminidase__InfluenzaA__AFD64156

SEQ ID NO: 181826 - RNA, 1410 nt, Artificial Sequence; identical to SEQ ID NO: 174205
  derived and/or modified CDS sequence (opt4) from neuraminidase__InfluenzaA__AFD64167

SEQ ID NO: 181827 - RNA, 1410 nt, Artificial Sequence; identical to SEQ ID NO: 174285
  derived and/or modified CDS sequence (opt4) from neuraminidase__InfluenzaA__AFD64181

SEQ ID NO: 181828 - RNA, 1410 nt, Artificial Sequence
  derived and/or modified CDS sequence (opt4) from neuraminidase__InfluenzaA__AFD64192
augaaccccaaccagaagaucaucaccaucggcagcgugagccugaccaucgccgccaucugcuuccugaugcagaucgccauccuggugaccaccgugacccugcacuucaagcagcacgagugcaacagcccccccaacaaccaggugaugcugugcgagcccaccaucaucgagagaaacaucaccgagaucguguaccugaccaacaccaccaucgagaaggagaucugccccaagcuggccgaguacagaaacuggagcaagccccagugcaacaucaccggcuucgcccccuucagcaaggacaacagcaucagacugagcgccggcggcgacaucugggugaccagagagcccuacgugagcugcgaccccgacaagugcuaccaguucgcccugggccagggcaccacccugaacaacggccacagcaacgacaccgugcacgacagaacccccuacagaacccugcugaugaacgagcugggcgugcccuuccaccugggcaccagacaggugugcaucgccuggagcagcagcagcugccacgacggcaaggccuggcugcacgugugcgugaccggcgacgacaagaacgccaccgccagcuucaucuacaacggcagacugguggacagcaucggcagcuggagcaagaagauccugagaacccaggagagcgagugcgugugcaucaacggcaccugcaccguggugaugaccgacggcagcgccagcggcaaggccgacaccaagauccuguucaucgaggagggcaagaucgugcacgugagcacccugagcggcagcgcccagcacguggaggagugcagcugcuaccccagauaccccggcgugagaugcgugugcagagacaacuggaagggcagcaacagacccaucguggacaucaacgugaaggacuacagcaucgugagcagcuacgugugcagcggccuggugggcgacacccccagaaagaacgacagcuucagcagcagccacugccuggaccccaacaacgaggagggcggccacggcgugaagggcugggccuucgacgacggcaacgacguguggaugggcagaaccaucagcgagaagcugagaagcggcuacgagaccuucaaggugaucgagggcuggagcaagcccaacagcaagcugcagaucaacagacaggugaucguggagagaggcaacagaagcggcuacagcggcaucuucagcguggagggcaagagcugcaucaacagaugcuucuacguggagcugaucagaggcagaaaggaggagaccgaggugugguggaccagcaacagcaucgugguguucugcggcaccagcggcaccuacggcaccggcagcuggcccgacggcgccgacaucaaccugaugcccaucuga

SEQ ID NO: 181829 - RNA, 1410 nt, Artificial Sequence
  derived and/or modified CDS sequence (opt4) from neuraminidase__InfluenzaA__AFD64203
augaaccccaaccagaagaucaucaccaucggcagcgugagccugaccaucgccgccaucugcuuccugaugcagaucgccauccuggugaccaccgugacccugcacuucaagcagcacgagugcaacagcccccccaacaaccaggugaugcugugcgagcccaccaucaucgagagaaacaucaccgagaucguguaccugaccaacaccaccaucgagaaggagaucugccccaagcuggccgaguacagaaacuggagcaagccccagugcaacaucaccggcuucgcccccuucagcaaggacaacagcaucagacugagcgccggcggcgacaucugggugaccagagagcccuacgugagcugcgaccccgacaagugcuaccaguucgcccugggccagggcaccacccugaacaacagacacagcaacgacaccgugcacgacagaacccccuacagaacccugcugaugaacgagcugggcgugcccuuccaccugggcaccagacaggugugcaucgccuggagcagcagcagcugccacgacggcaaggccuggcugcacgugugcgugaccggcgacgacaagaacgccaccgccagcuucaucuacaacggcagacugguggacagcaucggcagcuggagcaagaagauccugagaacccaggagagcgagugcgugugcaucaacggcaccugcaccguggugaugaccgacggcagcgccagcggcaaggccgacaccaagauccuguucaucgaggagggcaagaucgugcacaucagcacccugagcggcagcgcccagcacguggaggagugcagcugcuaccccagauaccccggcgugagaugcgugugcagagacaacuggaagggcagcaacagacccaucguggacaucaacgugaaggacuacagcaucgugagcagcuacgugugcagcggccuggugggcgacacccccagaaagaacgacagcuucagcagcagccacugccuggaccccaacaacgaggagggcggccacggcgugaagggcugggccuucgacgacggcaacgacguguggaugggcagaacccugagcgagaagcugagaagcggcuacgagaccuucaaggugaucgagggcuggagcaagcccaacagcaagcugcagaucaacagacaggugaucguggagagaggcaacagaagcggcuacagcggcaucuucagcguggagggcaagagcugcaucaacagaugcuucuacguggagcugaucagaggcagaaaggaggagaccgaggugugguggaccagcaacagcaucgugguguucugcggcaccagcggcaccuacggcaccggcagcuggcccgacggcgccgacaucaaccugaugcccaucuga

SEQ ID NO: 181830 - RNA, 1410 nt, Artificial Sequence; identical to SEQ ID NO: 181790
  derived and/or modified CDS sequence (opt4) from neuraminidase__InfluenzaA__AFD64214

SEQ ID NO: 181831 - RNA, 1410 nt, Artificial Sequence; identical to SEQ ID NO: 175989
  derived and/or modified CDS sequence (opt4) from neuraminidase__InfluenzaA__AFD64225

SEQ ID NO: 181832 - RNA, 1410 nt, Artificial Sequence; identical to SEQ ID NO: 174285
  derived and/or modified CDS sequence (opt4) from neuraminidase__InfluenzaA__AFD64317

SEQ ID NO: 181833 - RNA, 1410 nt, Artificial Sequence; identical to SEQ ID NO: 175991
  derived and/or modified CDS sequence (opt4) from neuraminidase__InfluenzaA__AFD64328

SEQ ID NO: 181834 - RNA, 1410 nt, Artificial Sequence; identical to SEQ ID NO: 181790
  derived and/or modified CDS sequence (opt4) from neuraminidase__InfluenzaA__AFD64339

SEQ ID NO: 181835 - RNA, 1410 nt, Artificial Sequence; identical to SEQ ID NO: 174285
  derived and/or modified CDS sequence (opt4) from neuraminidase__InfluenzaA__AFD64350

SEQ ID NO: 181836 - RNA, 1410 nt, Artificial Sequence; identical to SEQ ID NO: 181790
  derived and/or modified CDS sequence (opt4) from neuraminidase__InfluenzaA__AFD64361

SEQ ID NO: 181837 - RNA, 1410 nt, Artificial Sequence; identical to SEQ ID NO: 181790
  derived and/or modified CDS sequence (opt4) from neuraminidase__InfluenzaA__AFD64372

SEQ ID NO: 181838 - RNA, 1410 nt, Artificial Sequence; identical to SEQ ID NO: 174285
  derived and/or modified CDS sequence (opt4) from neuraminidase__InfluenzaA__AFD64383

SEQ ID NO: 181839 - RNA, 1410 nt, Artificial Sequence; identical to SEQ ID NO: 181790
  derived and/or modified CDS sequence (opt4) from neuraminidase__InfluenzaA__AFD64394

SEQ ID NO: 181840 - RNA, 1410 nt, Artificial Sequence; identical to SEQ ID NO: 174285
  derived and/or modified CDS sequence (opt4) from neuraminidase__InfluenzaA__AFD64405

SEQ ID NO: 181841 - RNA, 1410 nt, Artificial Sequence; identical to SEQ ID NO: 174285
  derived and/or modified CDS sequence (opt4) from neuraminidase__InfluenzaA__AFD64416

SEQ ID NO: 181842 - RNA, 1410 nt, Artificial Sequence; identical to SEQ ID NO: 174285
  derived and/or modified CDS sequence (opt4) from neuraminidase__InfluenzaA__AFD64427

SEQ ID NO: 181843 - RNA, 1410 nt, Artificial Sequence
  derived and/or modified CDS sequence (opt4) from neuraminidase__InfluenzaA__AFD64438
augaaccccaaccagaagaucaucaccaucggcagcgugagccugaccaucgccgccaucugcuuccugaugcagaucgccauccuggugaccaccgugacccugcacuucaagcagcacgagugcaacagcccccccaacaaccaggugaugcugugcgagcccaccaucaucgagagaaacaucaccgagaucguguaccugaccaacaccaccaucgagaaggagaucugccccaaccuggccgaguacagaaacuggagcaagccccagugcaacaucaccggcuucgcccccuucagcaaggacaacagcaucagacugagcgccggcggcgacaucugggugaccagagagcccuacgugagcugcgaccccgacaagugcuaccaguucgcccugggccagggcaccacccugaacaacggccacagcaacgacaccgugcacgacagaacccccuacagaacccugcugaugaacgagcugggcgugcccuuccaccugggcaccagacaggugugcaucgccuggagcagcagcagcugccacgacggcaaggccuggcugcacgugugcgugaccggcgacgacaagaacgccaccgccagcuucaucuacaacggcagacugguggacagcaucggcagcuggagcaagaagauccugagaacccaggagagcgagugcgugugcaucaacggcaccugcaccguggugaugaccgacggcagcgccagcggcaaggccgacaccaagauccuguucaucgaggagggcaagaucgugcacaucagcacccugagcggcagcgcccagcacguggaggagugcagcugcuaccccagauaccccggcgugagaugcgugugcagagacaacuggaagggcagcaacagacccaucguggacaucaacgugaaggacuacagcaucgugagcagcuacgugugcagcggccuggugggcgacacccccagaaagaacgacagcuucagcagcagccacugccuggaccccaacaacgaggagggcggccacggcgugaagggcugggccuucgacgacggcaacgacguguggaugggcagaaccaucagcgagaagcugagaagcggcuacgagaccuucaaggugaucgagggcuggagcaagcccaacagcaagcugcagaucaacagacaggugaucguggagagaggcaacagaagcggcuacagcggcaucuucagcguggagggcaagagcugcaucaacagaugcuucuacguggagcugaucagaggcagaaaggaggagaccgaggugugguggaccagcaacagcaucgugguguucugcggcaccagcggcaccuacggcaccggcagcuggcccgacggcgccgacaucaaccugaugcccaucuga

SEQ ID NO: 181844 - RNA, 1410 nt, Artificial Sequence; identical to SEQ ID NO: 174285
  derived and/or modified CDS sequence (opt4) from neuraminidase__InfluenzaA__AFD64449

SEQ ID NO: 181845 - RNA, 1410 nt, Artificial Sequence; identical to SEQ ID NO: 174205
  derived and/or modified CDS sequence (opt4) from neuraminidase__InfluenzaA__AFD64460

SEQ ID NO: 181846 - RNA, 1410 nt, Artificial Sequence; identical to SEQ ID NO: 181203
  derived and/or modified CDS sequence (opt4) from neuraminidase__InfluenzaA__AFD98098

SEQ ID NO: 181847 - RNA, 1410 nt, Artificial Sequence
  derived and/or modified CDS sequence (opt4) from neuraminidase__InfluenzaA__AFD98120
augaaccccaaccagaagaucaucaccaucggcagcgugagccugaccaucagcaccaucugcuucuucaugcagaucgccauccugaucaccaccgugacccugcacuucaagcaguacgaguucaacagcccccccaacaaccaggugaugcugugcgagcccaccaucaucgagagaaacaucaccgagaucguguaccugaccaacaccaccaucgagaaggagaucugccccaagcuggccgaguacagaaacuggagcaagccccagugcgacaucaccggcuucgcccccuucagcaaggacaacagcaucagacugagcgccggcggcgacaucugggugaccagagagcccuacgugagcugcgaccccgacaagugcuaccaguucgcccugggccagggcaccacccugaacaacgugcacagcaacaacaccgugagagacagaacccccuacagaacccugcugaugaacgagcugggcgugcccuuccaccugggcaccaagcaggugugcaucgccuggagcagcagcagcugccacgacggcaaggccuggcugcacgugugcaucaccggcgacgacaagaacgccaccgccagcuucaucuacaacggcagacugguggacagcguggugagcuggagcaaggagauccugagaacccaggagagcgagugcgugugcaucaacggcaccugcaccguggugaugaccgacggcagcgccagcggcaaggccgacaccaagauccuguucaucgaggagggcaagaucgugcacaccagcacccugagcggcagcgcccagcacguggaggagugcagcugcuaccccagauaccccggcgugagaugcgugugcagagacaacuggaagggcagcaacagacccaucguggacaucaacaucaaggaccacagcaucgugagcagcuacgugugcagcggccuggugggcgacacccccagaaagaacgacagcagcagcagcagccacugccuggaccccaacaacgaggagggcggccacggcgugaagggcugggccuucgacgacggcaacgacguguggaugggcagaaccaucaacgagaccagcagacugggcuacgagaccuucaaggugaucgagggcuggagcaaccccaagagcaagcugcagaucaacagacaggugaucguggacaagggcaacagaagcggcuacagcggcaucuucagcguggagggcaagagcugcaucaacagaugcuucuacguggagcugaucagaggcagaaaggaggagaccgaggugcuguggaccagcaacagcaucgugguguucugcggcaccagcggcaccuacggcaccggcagcuggcccgacggcgccgaccugaaccugaugcccaucuga

SEQ ID NO: 181848 - RNA, 1410 nt, Artificial Sequence; identical to SEQ ID NO: 179578
  derived and/or modified CDS sequence (opt4) from neuraminidase__InfluenzaA__AFD98131

SEQ ID NO: 181849 - RNA, 1410 nt, Artificial Sequence; identical to SEQ ID NO: 181203
  derived and/or modified CDS sequence (opt4) from neuraminidase__InfluenzaA__AFD98142

SEQ ID NO: 181850 - RNA, 1410 nt, Artificial Sequence; identical to SEQ ID NO: 181847
  derived and/or modified CDS sequence (opt4) from neuraminidase__InfluenzaA__AFD98164

SEQ ID NO: 181851 - RNA, 1410 nt, Artificial Sequence
  derived and/or modified CDS sequence (opt4) from neuraminidase__InfluenzaA__AFD98175
augaaccccaaccagaagaucaucaccaucggcagcgugagccugaccaucagcaccaucugcuucuucaugcagaucgccauccugaucaccaccgugacccugcacuucaagcaguacgaguucaacagcccccccaacaaccaggugaugcugugcgagcccaccaucaucgagagaaacaucaccgagaucguguaccugaccaacaccaccaucgagaaggagaucugccccaagcuggccgaguacagaaacuggagcaagccccagugcgacaucaccggcuucgcccccuucagcaaggacaacagcaucagacugagcgccggcggcgacaucugggugaccagagagcccuacgugagcugcgaccccgacaagugcuaccaguucgcccugggccagggcaccacccugaacaacgugcacagcaacaacaccgugcacgacagaacccccuacagaacccugcugaugaacgagcugggcgugcccuuccaccugggcaccaagcaggugugcaucgccuggagcagcagcagcugccacgacggcaaggccuggcugcacgugugcaucaccggcgacgacaagaacgccaccgccagcuucaucuacaacggcagacugguggacagcguggugagcuggagcaaggagauccugagaacccaggagagcgagugcgugugcaucaacggcaccugcaccguggugaugaccgacggcagcgccagcggcaaggccgacaccaagauccuguucaucgaggagggcaagaucgugcacaccagcacccugagcggcagcgcccagcacguggaggagugcagcugcuaccccagauaccccggcgugagaugcgugugcagagacaacuggaagggcagcaacagacccaucguggacaucaacaucaaggaccacagcaucgugagcagcuacgugugcagcggccuggugggcgacacccccagaaagaacgacagcagcagcagcagccacugccuggaccccaacaacgaggagggcggccacggcgugaagggcugggccuucgacgacggcaacgacguguggaugggcagaaccaucaacgagaccagcagacugggcuacgagaccuucaaggugaucgagggcuggagcaaccccaagagcaagcugcagaucaacagacaggugaucguggacaagggcaacagaagcggcuacagcggcaucuucagcguggagggcaagagcugcaucaacagaugcuucuacguggagcugaucagaggcagaaaggaggagaccgaggugcuguggaccagcaacagcaucgugguguucugcggcaccagcggcaccuacggcaccggcagcuggcccgacggcgccgaccugaaccugaugcccaucuga

SEQ ID NO: 181852 - RNA, 1410 nt, Artificial Sequence
  derived and/or modified CDS sequence (opt4) from neuraminidase__InfluenzaA__AFD98186
augaaccccaaccagaagaucaucaccaucggcagcgugagccugaccaucagcaccaucugcuucuucaugcagaucgccauccugaucaccaccgugacccugcacuucaagcaguacgaguucaacagcccccccaacaaccaggugaugcugugcgagcccaccaucaucgagagaaacaucaccgagaucguguaccugaccaacaccaccaucgagaaggagaucugccccaagcuggccgaguacagaaacuggagcaagccccagugcgacaucaccggcuucgcccccuucagcaaggacaacagcaucagacugagcgccggcggcgacaucugggugaccagagagcccuacgugagcugcgaccccgacaagugcuaccaguucgcccugggccagggcaccacccugaacaacgugcacagcaacaacaccgugagagacagaacccccuacagaacccugcugaugaacgagcugggcgugcccuuccaccugggcaccaagcaggugugcaucgccuggagcagcagcagcugccacgacggcaaggccuggcugcacgugugcaucaccggcgacgacaagaacgccaccgccagcuucaucuacaacggcaagcugguggacagcguggugagcuggagcaaggagauccugagaacccaggagagcgagugcgugugcaucaacggcaccugcaccguggugaugaccgacggcagcgccagcggcaaggccgacaccaagauccuguucguggaggagggcaagaucgugcacaccagcacccugagcggcagcgcccagcacguggaggagugcagcugcuaccccagauaccccggcgugagaugcgugugcagagacaacuggaagggcagcaacagacccaucguggacaucaacaucaaggaccacagcaucaucagcagcuacgugugcagcggccuggugggcgacacccccagaaagaacgacagcagcagcagcagccacugccuggaccccaacaacgaggagggcggccacggcgugaagggcugggccuucgacgacggcaacgacguguggaugggcagaaccaucaacgagaccagcagacugggcuacgagaccuucaaggugaucgagggcuggagcaaccccaagagcaagcugcagaucaacagacaggugaucguggacagaggcaacagaagcggcuacagcggcaucuucagcguggagggcaagagcugcaucaacagaugcuucuacguggagcugaucagaggcagaaaggaggagaccgaggugcuguggaccagcaacagcaucgugguguucugcggcaccagcggcaccuacggcaccggcagcuggcccgacggcgccgaccugaaccugaugcccaucuga

SEQ ID NO: 181853 - RNA, 1410 nt, Artificial Sequence; identical to SEQ ID NO: 179578
  derived and/or modified CDS sequence (opt4) from neuraminidase__InfluenzaA__AFD98197

SEQ ID NO: 181854 - RNA, 1410 nt, Artificial Sequence; identical to SEQ ID NO: 180315
  derived and/or modified CDS sequence (opt4) from neuraminidase__InfluenzaA__AFD98208

SEQ ID NO: 181855 - RNA, 1410 nt, Artificial Sequence
  derived and/or modified CDS sequence (opt4) from neuraminidase__InfluenzaA__AFD98218
augaaccccaaccagaagaucaucaccaucggcagcgugagccugaccaucagcaccaucugcuucuucaugcagaucgccauccugaucaccaccgugacccugcacuucaagcaguacgaguucaacagcccccccaacaaccaggugaugcugugcgagcccaccaucaucgagagaaacaucaccgagaucguguaccugaccaacaccaccaucgagaaggagaucugccccaagcccgccgaguacagaaacuggagcaagccccagugcgacaucaccggcuucgcccccuucagcaaggacaacagcaucagacugagcgccggcggcgacaucugggugaccagagagcccuacgugagcugcgaccccgacaagugcuaccaguucgcccugggccagggcaccacccugaacaacgugcacagcaacaacaccgugagagacagaacccccuacagaacccugcugaugaacgagcugggcgugcccuuccaccugggcaccaagcaggugugcaucgccuggagcagcagcagcugccacgacggcaaggccuggcugcacgugugcaucaccggcgacgacaagaacgccaccgccagcuucaucuacaacggcagacugguggacagcguggugagcuggagcaaggagauccugagaacccaggagagcgagugcgugugcaucaacggcaccugcaccguggugaugaccgacggcagcgccagcggcaaggccgacaccaagauccuguucaucgaggagggcaagaucgugcacaccagcacccugagcggcagcgcccagcacguggaggagugcagcugcuaccccagauaccccggcgugagaugcgugugcagagacaacuggaagggcagcaacagacccaucguggacaucaacaucaaggaccacagcaucgugagcagcuacgugugcagcggccuggugggcgacacccccagaaagaacgacagcagcagcagcagccacugccuggaccccaacaacgaggagggcggccacggcgugaagggcugggccuucgacgacggcaacgacguguggaugggcagaaccaucgacgagaccagcagacugggcuacgagaccuucaaggugaucgagggcuggagcaaccccaagagcaagcugcagaucaacagacaggugaucguggacaagggcaacagaagcggcuacagcggcaucuucagcguggagggcaagagcugcaucaacagaugcuucuacguggagcugaucagaggcagaaaggaggagaccgaggugcuguggaccagcaacagcaucguggugagcugcggcaccagcggcaccuacggcaccggcagcuggcccgacggcgccgaccugaaccugaugcccaucuga

SEQ ID NO: 181856 - RNA, 1410 nt, Artificial Sequence; identical to SEQ ID NO: 179578
  derived and/or modified CDS sequence (opt4) from neuraminidase__InfluenzaA__AFD98229

SEQ ID NO: 181857 - RNA, 1410 nt, Artificial Sequence; identical to SEQ ID NO: 179578
  derived and/or modified CDS sequence (opt4) from neuraminidase__InfluenzaA__AFD98240

SEQ ID NO: 181858 - RNA, 1410 nt, Artificial Sequence; identical to SEQ ID NO: 181847
  derived and/or modified CDS sequence (opt4) from neuraminidase__InfluenzaA__AFD98251

SEQ ID NO: 181859 - RNA, 1410 nt, Artificial Sequence; identical to SEQ ID NO: 181847
  derived and/or modified CDS sequence (opt4) from neuraminidase__InfluenzaA__AFD98262

SEQ ID NO: 181860 - RNA, 1410 nt, Artificial Sequence; identical to SEQ ID NO: 180769
  derived and/or modified CDS sequence (opt4) from neuraminidase__InfluenzaA__AFD98273

SEQ ID NO: 181861 - RNA, 1410 nt, Artificial Sequence; identical to SEQ ID NO: 180317
  derived and/or modified CDS sequence (opt4) from neuraminidase__InfluenzaA__AFD98283

SEQ ID NO: 181862 - RNA, 1410 nt, Artificial Sequence; identical to SEQ ID NO: 179578
  derived and/or modified CDS sequence (opt4) from neuraminidase__InfluenzaA__AFD98293

SEQ ID NO: 181863 - RNA, 1410 nt, Artificial Sequence; identical to SEQ ID NO: 180769
  derived and/or modified CDS sequence (opt4) from neuraminidase__InfluenzaA__AFD98313

SEQ ID NO: 181864 - RNA, 1410 nt, Artificial Sequence; identical to SEQ ID NO: 180317
  derived and/or modified CDS sequence (opt4) from neuraminidase__InfluenzaA__AFD98323

SEQ ID NO: 181865 - RNA, 1410 nt, Artificial Sequence; identical to SEQ ID NO: 180769
  derived and/or modified CDS sequence (opt4) from neuraminidase__InfluenzaA__AFD98333

SEQ ID NO: 181866 - RNA, 1410 nt, Artificial Sequence; identical to SEQ ID NO: 181847
  derived and/or modified CDS sequence (opt4) from neuraminidase__InfluenzaA__AFD98343

SEQ ID NO: 181867 - RNA, 1410 nt, Artificial Sequence
  derived and/or modified CDS sequence (opt4) from neuraminidase__InfluenzaA__AFD98354
augaaccccaaccagaagaucaucaccaucggcagcgugagccugaccaucagcaccaucugcuucuucaugcagaucgccauccugaucaccaccgugacccugcacuucaagcaguacgaguucaacagcccccccaacaaccaggugaugcugugcgagcccaccaucaucgagagaaacaucaccgagaucguguaccugaccaacaccaccaucgagaaggagaucugccccaagcuggccgaguacagaaacuggagcaagccccagugcgacaucaccggcuucgcccccuucagcaaggacaacagcaucagacugagcgccggcggcgacaucugggugaccagagagcccuacgugagcugcgaccccgacaagugcuaccaguucgcccugggccagggcaccacccugaacaacgugcacagcaacaacaccgugagagacagaacccccuacagaacccugcugaugaacgagcugggcgugcccuuccaccugggcaccaagcaggugugcaucgccuggagcagcagcagcugccacgacggcaaggccuggcugcacgugugcaucaccggcgacgacaagaacgccaccgccagcuucaucuacaacggcagacugguggacagcguggugagcuggagcaaggagauccugagaacccaggagagcgagugcgugugcaucaacggcaccugcaccguggugaugaccgacggcaacgccagcggcaaggccgacaccaagauccuguucaucgaggagggcaagaucgugcacaccagcacccugcugggcagcgcccagcacguggaggagugcagcugcuaccccagauaccccggcgugagaugcgugugcagagacaacuggaagggcagcaacagacccaucguggacaucaacaucaaggaccacagcaucgugagcagcuacgugugcagcggccuggugggcgacacccccagaaagaacgacagcagcagcagcagccacugccuggaccccaacaacgaggagggcggccacggcgugaagggcugggccuucgacgacggcaacgacguguggaugggcagaaccaucaacgagaccagcagacugggcuacgagaccuucaaggugaucgagggcuggagcaaccccaagagcaagcugcagaucaacagacaggugaucguggacaagggcaacagaagcggcuacagcggcaucuucagcguggagggcaagagcugcaucaacagaugcuucuacguggagcugaucagaggcagaaaggaggagaccgaggugcuguggaccagcaacagcaucgugguguucugcggcaccagcggcaccuacggcaccggcagcuggcccgacggcgccgaccugaaccugaugcccaucuga

SEQ ID NO: 181868 - RNA, 1410 nt, Artificial Sequence
  derived and/or modified CDS sequence (opt4) from neuraminidase__InfluenzaA__AFD98365
augaaccccaaccagaagaucaucaccaucggcagcgugagccugaccaucagcaccaucugcuucuucaugcagaucgccauccugaucaccaccgugacccugcacuucaagcaguacgaguucuacagcccccccaacaaccaggugaugcugugcgagcccaccaucaucgagagaaacaucaccgagaucguguaccugaccaacaccaccaucgagaaggagaucugccccaagcuggccgaguacagaaacuggagcaagccccagugcgacaucaccggcuucgcccccuucagcaaggacaacagcaucagacugagcgccggcggcgacaucugggugaccagagagcccuacgugagcugcgaccccgacaagugcuaccaguucgcccugggccagggcaccacccugaacaacgugcacagcaacaacaccgugagagacagaacccccuacagaacccugcugaugaacgagcugggcgugcccuuccaccugggcaccaagcaggugugcaucgccuggagcagcagcagcugccacgacggcaaggccuggcugcacgugugcaucaccggcgacgacaagaacgccaccgccagcuucaucuacaacggcagacugguggacagcguggugagcuggagcaaggagauccugagaacccaggagagcgagugcgugugcaucaacggcaccugcaccguggugaugaccgacggcagcgccagcggcaaggccgacaccaagauccuguucaucgaggagggcaagaucgugcacaccagcacccugagcggcagcgcccagcacguggaggagugcagcugcuaccccagauaccccggcgugagaugcgugugcagagacaacuggaagggcagcaacagacccaucguggacaucaacaucaaggaccacagcaucgugagcagcuacgugugcagcggccuggugggcgacacccccagaaagaacgacagcagcagcagcagccacugccuggaccccaacaacgaggagggcggccacggcgugaagggcugggccuucgacgacggcaacgacguguggaugggcagaaccaucaacgagaccagcagacugggcuacgagaccuucaaggugaucgagggcuggagcaaccccaagagcaagcugcagaucaacagacaggugaucguggacagaggcaacagaagcggcuacagcggcaucuucagcguggagggcaagagcugcaucaacagaugcuucuacguggagcugaucagaggcagaaaggaggagaccaaggugcuguggaccagcaacagcaucgugguguucugcggcaccagcggcaccuacggcaccggcagcuggcccgacggcgccgaccugaaccugaugcccaucuga

SEQ ID NO: 181869 - RNA, 1410 nt, Artificial Sequence
  derived and/or modified CDS sequence (opt4) from neuraminidase__InfluenzaA__AFD98376
augaaccccaaccagaagaucaucaccaucggcagcgugagccugaccaucagcaccaucugcuucuucaugcagaucgccauccugaucaccaccgugacccugcacuucaagcaguacgaguucaacuucccccccaacaaccaggugaugcugugcgagcccaccaucaucgagagaaacaucaccgagaucguguaccugaccaacaccaccaucgagaaggagaucugccccaagcuggccgaguacagaaacuggagcaagccccagugcgacaucaccggcuucgcccccuucagcaaggacaacagcaucagacugagcgccggcggcgacaucugggugaccagagagcccuacgugagcugcgaccccgacaagugcuaccaguucgcccugggccagggcaccacccugaacaacgugcacagcaacaacaccgugagagacagaacccccuacagaacccugcugaugaacgagcugggcgugcccuuccaccugggcaccaagcaggugugcaucgccuggagcagcagcagcugccacgacggcaaggccuggcugcacgugugcaucaccggcgacgacaagaacgccaccgccagcuucaucuacaacggcagacugguggacagcguggugagcuggagcaaggagauccugagaacccaggagagcgagugcgugugcaucaacggcaccugcaccguggugaugaccgacggcagcgccagcggcaaggccgacaccaagauccuguucaucgaggagggcaagaucgugcacaccagcacccugagcggcagcgcccagcacguggaggagugcagcugcuaccccagauaccccggcgugagaugcgugugcagagacaacuggaagggcagcaacagacccaucguggacaucaacaucaaggaccacagcaucgugagcagcuacgugugcagcggccuggugggcgacacccccagaaagaacgacagcagcagcagcggccacugccuggaccccaacaacgaggagggcggccacggcgugaagggcugggccuucgacgacggcaacgacguguggaugggcagaaccaucaacgagaccagcagacugggcuacgagaccuucaaggugaucgagggcuggagcaaccccaagagcaagcugcagaucaacagacaggugaucguggacaagggcaacagaagcggcuacagcggcaucuucagcguggagggcaagagcugcaucaacagaugcuucuacguggagcugaucagaggcagaaaggaggagaccgaggugcuguggaccagcaacagcaucgugguguucugcggcaccagcggcaccuacggcaccggcagcuggcccgacggcgccgaccugaaccugaugcccaucuga

SEQ ID NO: 181870 - RNA, 1410 nt, Artificial Sequence
  derived and/or modified CDS sequence (opt4) from neuraminidase__InfluenzaA__AFD98387
augaaccccaaccagaagaucaucaccaucggcagcgugagccugaccaucagcaccaucugcuuccugaugcagaucgccauccugaucaccaccgugacccugcacuucaagcaguacgaguucaacagcccccccaacaaccaggugaugcugugcgagcccaccaucaucgagagaaacaucaccgagaucguguaccugaccaacaccaccaucgagaaggagaucugccccaagcuggccgaguacagagacuggagcaagccccagugcgacaucaccggcuucgcccccuucagcaaggacaacagcaucagacugagcgccggcggcgacaucugggugaccagagagcccuacgugagcugcgaccccgacaagugcuaccaguucgcccugggccagggcaccacccugaacaacgugcacagcaacaacaccgugagagacagaacccccuacagaacccugcugaugaacgagcugggcgugcccuuccaccugggcaccaagcaggugugcaucgccuggagcagcagcagcugccacgacggcaaggccuggcugcacgugugcaucaccggcgacgacaagaacgccaccgccagcuucaucuacaacggcaagcugguggacagcguggugagcuggagcaaggagauccugagaacccaggagagcgagugcgugugcaucaacggcaccugcaccguggugaugaccgacggcagcgccagcggcaaggccgacaccaagauccuguucaucgaggagggcaagaucgugcacaccagcacccugagcggcagcgcccagcacguggaggagugcagcugcuaccccagauaccccggcgugagaugcgugugcagagacaacuggaagggcagcaacagacccaucguggacaucaacaucaaggaccacagcaucgugagcagcuacgugugcagcggccuggugggcgacacccccagaaagaacgacagaagcagcaacagccacugccuggaccccaacaacgaggagggcggccacggcgugaagggcugggccuucgacgacggcaacgacguguggaugggcagaaccaucaacgagaccagcagacugggcuacgagaccuucaaggugaucgagggcuggagcaaccccaagagcaagcugcagaucaacagacaggugaucguggacagaggcaacagaagcggcuacagcggcaucuucagcguggagggcaagagcugcaucaacagaugcuucuacguggagcugaucagaggcagaaaggaggagaccgaggugcuguggaccagcaacagcaucgugguguucugcggcaccagcggcaccuacggcaccggcagcuggcccgacggcgccgaccugaaccugaugcccaucuga

SEQ ID NO: 181871 - RNA, 1410 nt, Artificial Sequence
  derived and/or modified CDS sequence (opt4) from neuraminidase__InfluenzaA__AFD98398
augaaccccaaccagaagaucaucaccaucggcagcgugagccugaccaucagcaccaucugcuucuucaugcagaucgccauccugaucaccaccgugacccugcacuucaagcaguacgaguucaacagcccccccaacaaccaggugaugcugugcgagcccaccaucaucgagagaaacaucaccgagaucguguaccugaccaacaccaccaucgagaaggagaucugccccaagcuggccgaguacagaaacuggagcaagccccagugcgacaucaccggcuucgcccccuucagcaaggacaacagcaucagacugagcgccggcggcgacaucugggugaccagagagcccuacgugagcugcgaccccgacaagugcuaccaguucgcccugggccagggcaccacccugaacaacgugcacagcaacaacaccgugagagacagaacccccuacagaacccugcugaugaacgagcugggcgugcccuuccaccugggcaccagacaggugugcaucgccuggagcagcagcagcugccacgacggcaaggccuggcugcacgugugcaucaccggcgacgacaagaacgccaccgccagcuucaucuacaacggcagacugguggacagcguggugagcuggagcaaggagauccugagaacccaggagagcgagugcgugugcaucaacggcaccugcaccguggugaugaccgacggcagcgccagcggcaaggccgacaccaagauccuguucaucgaggagggcaagaucgugcacaccagcacccugagcggcagcgcccagcacguggaggagugcagcugcuaccccagauaccccggcgugagaugcgugugcagagacaacuggaagggcagcaacagacccaucguggacaucaacaucaaggaccacagcaucgugagcagcuacgugugcagcggccuggugggcgacacccccagaaagaacgacagcagcagcagcagccacugccuggaccccaacaacgaggagggcggccacggcgugaagggcugggccuucgacgacggcaacgacguguggaugggcagaaccaucaacgagaccagcagacugggcuacgagaccuucaaggugaucgagggcuggagcaaccccaagagcaagcugcagaucaacagacaggugaucguggacaagggcaacagaagcggcuacagcggcaucuucagcguggagggcaagagcugcaucaacagaugcuucuacguggagcugaucagaggcagaaaggaggagaccgaggugcuguggaccagcaacagcaucgugguguucugcggcaccagcggcaccuacggcaccggcagcuggcccgacggcgccgaccugaaccugaugcccaucuga

SEQ ID NO: 181872 - RNA, 1410 nt, Artificial Sequence
  derived and/or modified CDS sequence (opt4) from neuraminidase__InfluenzaA__AFD98409
augaaccccaaccagaagaucaucaccaucggcagcgugagccugaccaucagcaccaucugcuucuucaugcagaucgccauccugaucaccaccgugacccugcacuucaagcaguacgaguucaacagcccccccaacaaccaggugaugcugugcgagcccaccaucaucgagagaaacaucaccgagaucguguaccugaccaacaccaccaucgagaaggagaucugccccaagcuggccgaguacagaaacuggagcaagccccagugcgacaucaccggcuucgcccccuucagcaaggacaacagcaucagacugagcgccggcggcgacaucugggugaccagagagcccuacgugagcugcgaccccgacaagugcuaccaguucgcccugggccagggcaccacccugaacaacgugcacagcaacaacaccgugagagacagaacccccuacagaacccugcugaugaacgagcugggcgugcccuuccaccugggcaccaagcaggugugcaucgccuggagcagcagcagcugccacgacggcaaggccuggcugcacgugugcaucaccggcgacgacaagaacgccaccgccagcuucaucuacaacggcagacugguggacagcguggugagcuggagcaaggagauccugagaacccaggagagcgagugcgugugcaucaacggcaccugcaccguggugaugaccgacggcagcgccagcggcaaggccgacaccaagauccuguucaucgaggagggcaagaucgugcacaccagcacccugagcggcagcgcccagcacguggaggagugcagcugcuaccccagauaccccggcgugagaugcgugugcagagacaacuggaagggcagcaacagacccaucguggacaucaacaucaaggaccacagcaucgugagcagcuacgugugcagcggccuggugggcgacacccccagaaagaacgacagcagcagcagcggccacugccuggaccccaacaacgaggagggcggccacggcgugaagggcugggccuucgacgacggcaacgacguguggaugggcagaaccaucaacgagaccagcagacugggcuacgagaccuucaaggugaucgagggcuggagcaaccccaagagcaagcugcagaucaacagacaggugaucguggacaagggcaacagaagcggcuacagcggcaucuucagcguggagggcaagagcugcaucaacagaugcuucuacguggagcugaucagaggcagaaaggaggagaccgaggugcuguggaccagcaacagcaucgugguguucugcggcaccagcggcaccuacggcaccggcagcuggcccgacggcgccgaccugaaccugaugcccaucuga

SEQ ID NO: 181873 - RNA, 1410 nt, Artificial Sequence; identical to SEQ ID NO: 181847
  derived and/or modified CDS sequence (opt4) from neuraminidase__InfluenzaA__AFD98420

SEQ ID NO: 181874 - RNA, 1410 nt, Artificial Sequence
  derived and/or modified CDS sequence (opt4) from neuraminidase__InfluenzaA__AFD98431
augaaccccaaccagaagaucaucaccaucggcagcgugagccugaccaucagcaccaucugcuucuucaugcagaucgccauccugaucaccaccgugacccugcacuucaagcaguacgaguucaacagcccccccaacaaccaggugaugcugugcgagcccaccaucaucgagagaaacaucaccgagaucguguaccugaccaacaccaccaucgagaaggagaucugccccaagcuggccgaguacagaaacuggagcaagccccagugcgacaucaccggcuucgcccccuucagcaaggacaacagcaucagacugagcgccggcggcgacaucugggugaccagagagcccuacgugagcugcgaccccgacaagugcuaccaguucgcccugggccagggcaccacccugaacaacgugcacagcaacaacaccgugagagacagaacccccuacagaacccugcugaugaacgagcugggcgugcccuuccaccugggcaccaagcaggugugcaucgccuggagcagcagcagcugccacgacggcaaggccuggcugcacgugugcaucaccggcgacgacaagaacgccaccgccagcuucaucuacaacggcagacugguggacagcguggugagcuggagcaaggagauccugagaacccaggagagcgagugcgugugcaucaacggcaccugcaccguggugaugaccgacggcagcgccagcggcaaggccgacaccaagauccuguucaucgaggagggcaagaucgugcacaccagcacccugagcggcagcgcccagcacguggaggagugcagcugcuaccccagauaccccggcgugagaugcgugugcagagacaacuggaagggcagcaacagacccaucguggacaucaacaucaaggaccacagcaucgugagcagcuacgugugcagcggccuggugggcgacacccccagaaagaacgacagcagcagcagcagccacugccuggaccccaacaacgaggagggcggccacggcgugaagggcugggccuucgacgacggcaacgacguguggaugggcagaaccaucaacgagaccagcagacugggcuacgagaccuucaaggugaucgagggcuggagcaaccccaagagcaagcugcagaucaacagacaggugaucgugggcagaggcaacagaagcggcuacagcggcaucuucagcguggagggcaagagcugcaucaacagaugcuucuacguggagcugaucagaggcagaaaggaggagaccgaggugcuguggaccagcaacagcaucgugguguucugcggcaccagcggcaccuacggcaccggcagcuggcccgacggcgccgaccugaaccugaugcccaucuga

SEQ ID NO: 181875 - RNA, 1410 nt, Artificial Sequence
  derived and/or modified CDS sequence (opt4) from neuraminidase__InfluenzaA__AFD98442
augaaccccaaccagaagaucaucaccaucggcagcgugugcaugaccaucggcauggccaaccugauccugcagaucggcaacaucaucagcaucuggaucagccacagcauccagcugggcaaccagaaccagaucgagaccugcaaccagagcgugaucaccuacgagaacaacaccugggugaaccagaccuacgugaacaucagcaacaccaacuucgccgccggccagagcguggugagcgugaagcuggccggcaacagcagccugugccccgugagcggcugggccaucuacagcaaggacaacagcaucagaaucggcagcaagggcgacguguucgugaucagagagcccuucaucagcugcagcccccuggagugcagaaccuucuuccugacccagggcgcccugcugaacgacaagcacagcaacggcaccaucaaggacagaagccccuacagaacccugaugagcugccccaucggcgaggugcccagccccuacaacagcagauucgagagcguggccuggagcgccagcgccugccacgacggcaucaacuggcugaccaucggcaucagcggccccgacaacggcgccguggccgugcugaaguacaacggcaucaucaccgacaccaucaagagcuggagaaacaacauccugagaacccaggagagcgagugcgccugcgugaacggcagcugcuucaccaucaugaccgacggccccagcgacggccaggccagcuacaagaucuucagaaucgagaagggcaagaucgugaagagcguggagaugaacgcccccaacuaccacuacgaggagugcagcugcuaccccgacagcggcgagaucaccugcgugugcagagacaacuggcacggcagcaacagacccugggugagcuucaaccagaaccuggaguaccagaucggcuacaucugcagcggcaucuucggcgacaaccccagacccaacgacaagaccggcagcugcggccccgugagcagcaacggcgccaacggcgugaagggcuucagcuucaaguacggcaacggcguguggaucggcagaaccaagagcaucagcagcagaaagggcuucgagaugaucugggaccccaacggcuggaccggcaccgacaacaacuucgccaucaagcaggacaucgugggcaucaacgaguggagcggcuacagcggcagcuucgugcagcaccccgagcugaccggccuggacugcaucagacccugcuucuggguggagcugaucagaggcagacccaaggagaacaccaucuggaccagcggcagcagcaucagcuucugcggcgugaacagcgacaccgugggcuggagcuggcccgacggcgccgagcugcccuucaccaucgacaaguga

SEQ ID NO: 181876 - RNA, 1410 nt, Artificial Sequence
  derived and/or modified CDS sequence (opt4) from neuraminidase__InfluenzaA__AFD98452
augaaccccaaccagaagaucaucacccugggcagcgugagccugaccaucagcaccaucugcuucuucauccagaucgccauccugaucaccaccgugacccugcacuucaagcaguacgaguucaacagcccccccaacaaccaggugaugcugugcgagcccaccaucaucgagagaaacaucaccgagaucguguaccugaccaacaccaccaucgagaaggagaucugccccaagcuggccgaguacagaaacuggagcaagccccagugcgacaucaccggcuucgcccccuucagcaaggacaacagcaucagacugagcgccggcggcgacaucugggugaccagagagcccuacgugagcugcgaccccgacaagugcuaccaguucgcccugggccagggcaccacccugaacaacgugcacagcaacaacaccgugagagacagaacccccuacagaacccugcugaugaacgagcugggcgugcccuuccaccugggcaccaagcaggugugcaucgccuggagcagcagcagcugccacgacggcaaggccuggcugcacgugugcaucaccggcgacgacaagaacgccaccgccagcuucaucuacaacggcagacugguggacagcguggugagcuggagcaaggagauccugagaacccaggagagcgagugcgugugcaucaacggcaccugcaccguggugaugaccgacggcagcgccagcggcaaggccgacaccaagauccuguucaucgaggagggcaagaucgugcacaccagcacccugagcggcagcgcccagcacguggaggagugcagcugcuaccccagauaccccggcgugagaugcgugugcagagacaacuggaagggcagcaacagacccaucguggacaucaacaucaaggaccacagcaucgugagcagcuacgugugcagcggccuggugggcgacacccccagaaagaacgacagcagcagcagcagccacugccuggaccccaacaacgaggagggcggccacggcgugaagggcugggccuucgacgacggcaacgacguguggaugggcagaaccaucaacgagaccagcagacugggcuacgagaccuucaaggugaucgagggcuggagcaaccccaagagcaagcugcagaucaacagacaggugaucguggacagaggcaacagaagcggcuacagcggcaucuucagcguggagggcaagagcugcaucaacagaugcuucuacguggagcugaucagaggcagaaaggaggagaccgaggugcuguggaccagcaacagcaucgugguguucugcggcaccagcggcaccuacggcaccggcagcuggcccgacggcgccgaccugaaccugaugcccaucuga

SEQ ID NO: 181877 - RNA, 1410 nt, Artificial Sequence; identical to SEQ ID NO: 181847
  derived and/or modified CDS sequence (opt4) from neuraminidase__InfluenzaA__AFD98463

SEQ ID NO: 181878 - RNA, 1410 nt, Artificial Sequence
  derived and/or modified CDS sequence (opt4) from neuraminidase__InfluenzaA__AFD98474
augaaccccaaccagaagaucaucaccaucggcagcgugugcaugaccaucggcauggccaaccugauccugcagaucggcaacaucaucagcaucuggaucagccacagcauccagcugggcaaccagaaccagaucgagaccugcaaccagagcgugaucaccuacgagaacaacaccugggugaaccagaccuacgugaacaucagcaacaccaacuucgccgccggccagagcguggugagcgugaagcuggccggcaacagcagccugugccccgugagcggcugggccaucuacagcaaggacaacagcaucagaaucggcagcaagggcgacguguucgugaucagagagcccuucaucagcugcagcccccuggagugcagaaccuucuuccugacccagggcgcccugcugaacgacaagcacagcaacggcaccaucaaggacagaagccccuacagaacccugaugagcugccccaucggcgaggugcccagccccuacaacagcagauucgagagcguggccuggagcgccagcgccugccacgacggcaucaacuggcugaccaucggcaucagcggccccgacaacggcgccguggccgugcugaaguacaacggcaucaucaccgacaccaucaagagcuggagaaacaacauccugagaacccaggagagcgagugcgccugcgugaacggcagcugcuucaccaucaugaccgacggccccagcgacggccaggccagcuacaagaucuucagaaucgagaagggcaagaucgugaagagcguggagaugaacgcccccaacuaccacuacgaggagugcagcugcuaccccgacagcagcgagaucaccugcgugugcagagacaacuggcacggcagcaacagacccugggugagcuucaaccagaaccuggaguaccagaucggcuacaucugcagcggcaucuucggcgacaaccccagacccaacgacaagaccggcagcugcggccccgugagcagcaacggcgccaacggcgugaagggcuucagcuucaaguacggcaacggcguguggaucggcagaaccaagagcaucagcagcagaaagggcuucgagaugaucugggaccccaacggcuggaccggcaccgacaacaacuucagcaucaagcaggacaucaucggcaucaacgaguggagcggcuacagcggcagcuucgugcagcaccccgagcugaccggccuggacugcaucagacccugcuucuggguggagcugaucagaggcagacccaaggagaacaccaucuggaccagcggcagcagcaucagcuucugcggcgugaacagcgacaccgugggcuggagcuggcccgacggcgccgagcugcccuucaccaucgacaaguga

SEQ ID NO: 181879 - RNA, 1410 nt, Artificial Sequence
  derived and/or modified CDS sequence (opt4) from neuraminidase__InfluenzaA__AFD98484
augaaccccaaccagaagaucaucaccaucggcagcgugagccugaccaucagcaccaucugcuucuucaugcagaucgccauccugaucaccaccgugacccugcacuucaagcaguacgaguucaacagcccccccaacaaccaggugaugcugugcgagcccaccaucaucgagagaaacaucaccgagaucguguaccugaccaacaccaccaucgagaaggagaucugccccaagcuggccgaguacagaaacuggagcaagccccagugcgacaucaccggcuucgcccccuucagcaaggacaacagcaucagacugagcgccggcggcgacaucugggugaccagagagcccuacgugagcugcgaccccgacaagugcuaccaguucgcccugggccagggcaccacccugaacaacgugcacagcaacaacaccgugagagacagaacccccuacagaacccugcugaugaacgagcugggcgugcccuuccaccugggcaccaagcaggugugcaucgccuggagcagcagcagcugccacgacggcaaggccuggcugcacgugugcaucaccggcgacgacaagaacgccaccgccagcuucaucuacaacggcagacugguggacagcguggugagcuggagcaaggagauccugagaacccaggagagcgagugcgugugcaucaacggcaccugcaccguggugaugaccgacggcagcgccagcggcaaggccgacaccaagauccuguucaucgaggagggcaagaucgugcacaccagcacccugagcggcagcgcccagcacguggaggagugcagcugcuaccccagauaccccggcgugagaugcgugugcagagacaacuggaagggcagcaacagacccaucguggacaucaacaucaaggaccacagcaucgugagcagcuacgugugcagcggccuggugggcgacacccccagaaagaacgacagcagcagcagcagccacugccuggaccccaacaacgaggagggcggccacggcgugaagggcugggccuucgacgacggcaacgacguguggaugggcagaaccaucaacgagaccagcagacugggcuacgagaccuucaaggugaucgagggcuggagcaaccccaagagcaagcugcagaugaacagacaggugaucguggacagaggcaacagaagcggcuacagcggcaucuucagcguggagggcaagagcugcaucaacagaugcuucuacguggagcugaucagaggcagaaaggaggagaccgaggugcuguggaccagcaacagcaucgugguguucugcggcaccagcggcaccuacggcaccggcagcuggcccgacggcgccgaccugaaccugaugcccaucuga

SEQ ID NO: 181880 - RNA, 1410 nt, Artificial Sequence
  derived and/or modified CDS sequence (opt4) from neuraminidase__InfluenzaA__AFD98495
augaaccccaaccagaagaucaucaccaucggcagcgugagccugaccaucagcaccaucugcuucuucaugcagaucgccauccugaucaccaccgugacccugcacuucaagcaguacgaguucaacagcccccccaacaaccaggugaugcugugcgagcccaccaucaucgagagaaacaucaccgagaucguguaccugaccaacaccaccaucgagaaggagaucugccccaagcuggccgaguacagaaacuggagcaagccccagugcgacaucaccggcuucgcccccuucagcaaggacaacagcaucagacugagcgccggcggcgacaucugggugaccagagagcccuacgugagcugcgaccccgacaagugcuaccaguucgcccugggccagggcaccacccugaacaacgugcacagcaacaacaccgugagagacagaacccccuacagaacccugcugaugaacgagcugggcgugcccuuccaccugggcaccaagcaggugugcaucgccuggagcagcagcagcugccacgacggcaaggccuggcugcacgugugcaucaccggcgacgacaagaacgccaccgccagcuucaucuacaacggcaagcugguggacagcguggugagcuggagcaaggagauccugagaacccaggagagcgagugcgugugcaucaacggcaccugcaccguggugaugaccgacggcagcgccagcggcaaggccaacaccaagauccuguucaucgaggagggcaagaucgugcacaccagcacccugagcggcagcgcccagcacguggaggagugcagcugcuaccccagauaccccggcgugagaugcgugugcagagacaacuggaagggcagcaacagacccaucguggacaucaacaucaaggaccacagcaucgugagcagcuacgugugcagcggccuggugggcgacacccccagaaagaacgacagcagcagcagcagccacugccuggaccccaacaacgaggagggcggccacggcgugaagggcugggccuucgacgacggcaacgacguguggaugggcagaaccaucaacgagaccagcagacugggcuacgagaccuucaaggugaucgagggcuggagcaaccccaagagcaagcugcagaucaacagacaggugaucguggacagaggcaacagaagcggcuacagcggcaucuucagcguggagggcaagagcugcaucaacagaugcuucuacguggagcugaucagaggcagaaaggaggagaccgaggugcuguggaccagcaacagcaucgugguguucugcggcaccagcggcaccuacggcaccggcagcuggcccgacggcgccgaccugaaccugaugcccaucuga

SEQ ID NO: 181881 - RNA, 1410 nt, Artificial Sequence; identical to SEQ ID NO: 181847
  derived and/or modified CDS sequence (opt4) from neuraminidase__InfluenzaA__AFD98506

SEQ ID NO: 181882 - RNA, 1410 nt, Artificial Sequence
  derived and/or modified CDS sequence (opt4) from neuraminidase__InfluenzaA__AFD98517
augaaccccaaccagaagaucaucaccaucggcagcgugagccugaccaucagcaccaucugcuucuucaugcagaucgccauccugaucaccaccgugacccugcacuucaagcaguacgaguucaacagcccccccaacaaccaggugaugcugugcgagcccaccaucaucgagagaaacaucaccgagaucguguaccugaccaacaccaccaucgagaaggagaucugccccaagcuggccgaguacagaaacuggagcaagccccagugcgacaucaccggcuucgcccccuucagcaaggacaacagcaucagacugagcgccggcggcgacaucugggugaccagagagcccuacgugagcugcgaccccgacaagugcuaccaguucgcccugggccagggcaccacccugaacaacgugcacagcaacaacaccgugagagacagaacccccuacagaacccugcugaugaacgagcugggcgugcccuuccaccugggcaccaagcaggugugcaucgccuggagcagcagcagcugccacgacggcaaggccuggcugcacgugugcaucaccggcgacgacaagaacgccaccgccagcuucaucuacaacggcaagcugguggacagcguggugagcuggagcaaggagauccugagaacccaggagagcgagugcgugugcaucaacggcaccugcaccguggugaugaccgacggcagcgccagcggcaaggccgacaccaagauccuguucaucaaggagggcaagaucgugcacaccagcacccugagcggcagcgcccagcacguggaggagugcagcugcuaccccagauaccccggcgugagaugcgugugcagagacaacuggaagggcagcaacagacccaucguggacaucaacaucaaggaccacagcaucgugagcagcuacgugugcagcggccuggugggcgacacccccagaaagaacgacagcagcagcagcagccacugccuggaccccaacaacgaggagggcggccacggcgugaagggcugggccuucgacgacggcaacgacguguggaugggcagaaccaucaacgagaccagcagacugggcuacgagaccuucaaggugaucgagggcuggagcaaccccaagagcaagcugcagaucaacagacaggugaucguggacagaggcaacagaagcggcuacagcggcaucuucagcguggagggcaagagcugcaucaacagaugcuucuacguggagcugaucagaggcagaaaggaggagaccgaggugcuguggaccagcaacagcaucgugguguucugcggcaccagcggcaccuacggcaccggcagcuggcccgacggcgccgaccugaaccugaugcccaucuga

SEQ ID NO: 181883 - RNA, 1410 nt, Artificial Sequence; identical to SEQ ID NO: 179578
  derived and/or modified CDS sequence (opt4) from neuraminidase__InfluenzaA__AFD98528

SEQ ID NO: 181884 - RNA, 1410 nt, Artificial Sequence; identical to SEQ ID NO: 181847
  derived and/or modified CDS sequence (opt4) from neuraminidase__InfluenzaA__AFD98539

SEQ ID NO: 181885 - RNA, 1410 nt, Artificial Sequence; identical to SEQ ID NO: 181847
  derived and/or modified CDS sequence (opt4) from neuraminidase__InfluenzaA__AFD98550

SEQ ID NO: 181886 - RNA, 1410 nt, Artificial Sequence
  derived and/or modified CDS sequence (opt4) from neuraminidase__InfluenzaA__AFD98561
augaaccccaaccagaagaucaucaccaucggcagcgugagccugaccaucagcaccaucugcuucuucaugcagaucgccauccugaucaccaccgugacccugcacuucaagcaguacgaguucaacagcccccccaacaaccaggugaugcugugcgagcccaccaucaucgagagaaacaucaccgagaucguguaccugaccaacaccaccaucgagaaggagaucugccccaagcuggccgaguacagaaacuggagcaagccccagugcgacaucaccggcuucgcccccuucagcaaggacaacagcaucagacugagcgccggcggcgacaucugggugaccagagagcccuacgugagcugcgaccccgacaagugcuaccaguucgcccugggccagggcaccacccugaacaacgugcacagcaacaacaccgugagagacagaacccccuacagaacccugcugaugaacgagcugggcgugcccuuccaccugggcaccaagcaggugugcaucgccuggagcagcagcagcugccacgacggcaaggccuggcugcacgugugcaucaccggcgacgacaagaacgccaccgccagcuucaucuacaacggcagacugguggacagcguggugagcuggagcaaggagauccugagaacccaggagagcgagugcgugugcaucaacggcaccugcgccguggugaugaccgacggcagcgccagcggcaaggccgacaccaagauccuguucaucgaggagggcaagaucgugcacaccagcacccugagcggcagcgcccagcacguggaggagugcagcugcuaccccagauaccccggcgugagaugcgugugcagagacaacuggaagggcagcaacagacccaucguggacaucaacaucaaggaccacagcaucgugagcagcuacgugugcagcggccuggugggcgacacccccagaaagagcgacagcagcagcagcagccacugccuggaccccaacaacgaggagggcggccacggcgugaagggcugggccuucgacgacggcaacgacguguggaugggcagaaccaucaacgagaccagcagacugggcuacgagaccuucaaggugaucgagggcuggagcaaccccaagagcaagcugcagaucaacagacaggugaucguggacagaggcaacagaagcggcuacagcggcaucuucagcguggagggcaagagcugcaucaacagaugcuucuacguggagcugaucagaggcagaaaggaggagaccgaggugcuguggaccagcaacagcaucgugguguucugcggcaccagcggcaccuacggcaccggcagcuggcccgacggcgccgaccugaaccugaugcccaucuga

SEQ ID NO: 181887 - RNA, 1410 nt, Artificial Sequence
  derived and/or modified CDS sequence (opt4) from neuraminidase__InfluenzaA__AFD98572
augaaccccaaccagaagaucaucaccaucggcagcgugagccugaccaucagcaccaucugcuucuucaugcagaucgccauccugaucaccaccgugacccugcacuucaagcaguacgaguucaacagcccccccaacaaccaggugaugcugugcgagcccaccaucaucgagagaaacaucaccgagaucguguaccugaccaacaccacccuggagaaggagaucugccccaagcuggccgaguacagaaacuggagcaagccccagugcgacaucaccggcuucgcccccuucagcaaggacaacagcaucagacugagcgccggcggcgacaucugggugaccagagagcccuacgugagcugcgaccccgacaagugcuaccaguucgcccugggccagggcaccacccugaacaacgugcacagcaacaacaccgugagagacagaacccccuacagaacccugcugaugaacgagcugggcgugcccuuccaccugggcaccaagcaggugugcaucgccuggagcagcagcagcugccacgacggcaaggccuggcugcacgugugcaucaccggcgacgacaagaacgccaccgccagcuucaucuacaacggcagacugguggacagcguggugagcuggagcaaggagauccugagaacccaggagagcgagugcgugugcaucaacggcaccugcaccguggugaugaccgacggcagcgccagcggcaaggccgacaccaagauccuguucaucgaggagggcaagaucgugcacaccagcacccugagcggcagcgcccagcacguggaggagugcagcugcuaccccagauaccccggcgugagaugcgugugcagagacaacuggaagggcagcaacagacccaucguggacaucaacaucaaggaccacagcaucgugagcagcuacgugugcagcggccuggugggcgacacccccagaaagaacgacagcagcagcagcagccacugccuggaccccaacaacgaggagggcggccacggcgugaagggcugggccuucgacgacggcaacgacguguggaugggcagaaccaucaacgagaccagcagacugggcuacgagaccuucaaggugaucgagggcuggagcaaccccaagagcaagcugcagaucaacagacaggugaucguggacagaggcaacagaagcggcuacagcggcaucuucagcguggagggcaagagcugcaucaacagaugcuucuacguggagcugaucagaggcagaaaggaggagaccgaggugcuguggaccagcaacagcaucgugguguucugcggcaccagcggcaccuacggcaccggcagcuggcccgacggcgccgaccugaaccugaugcccaucuga

SEQ ID NO: 181888 - RNA, 1410 nt, Artificial Sequence
  derived and/or modified CDS sequence (opt4) from neuraminidase__InfluenzaA__AFD98583
augaaccccaaccagaagaucaucaccaucggcagcgugagccugaccaucagcaccaucugcuucuucaugcagaucgccauccugaucaccaccgugacccugcacuucaagcaguacgaguucaacagcccccccaacaaccaggugaugcugugcgagcccaccaucaucgagagaaacaucaccgagaucguguaccugaccaacaccaccaucgagaaggagaucugccccaagcuggccgaguacagaaacuggagcaagccccagugcgacaucaccggcuucgcccccuucagcagagacaacagcaucagacugagcgccggcggcgacaucugggugaccagagagcccuacgugagcugcgaccccgacaagugcuaccaguucgcccugggccagggcaccacccugaacaacgugcacagcaacaacaccgugagagacagaacccccuacagaacccugcugaugaacgagcugggcgugcccuuccaccugggcaccaagcaggugugcaucgccuggagcagcagcagcugccacgacggcaaggccuggcugcacgugugcaucaccggcgacgacaagaacgccaccgccagcuucaucuacaacggcagacugguggacagcguggugagcuggagcaaggagauccugagaacccaggagagcgagugcgugugcaucaacggcaccugcaccguggugaugaccgacggcagcgccagcggcaaggccgacaccaagauccuguucaucgaggagggcaagaucgugcacaccagcacccugagcggcagcgcccagcacguggaggagugcagcugcuaccccagauaccccggcgugagaugcgugugcagagacaacuggaagggcagcaacagacccaucguggacaucaacaucaaggaccacagcaucgugagcagcuacgugugcagcggccuggugggcgacacccccagaaagagcgacagcagcagcagcagccacugccuggaccccaacaacgaggagggcggccacggcgugaagggcugggccuucgacgacggcaacgacguguggaugggcagaaccaucaacgagaccagcagacugggcuacgagaccuucaaggugaucgagggcuggagcaaccccaagagcaagcugcagaucaacagacaggugaucguggacagaggcaacagaagcggcuacagcggcaucuucagcguggagggcaagagcugcaucaacagaugcuucuacguggagcugaucagaggcagaaaggaggagaccgaggugcuguggaccagcaacagcaucgugguguucugcggcaccagcggcaccuacggcaccggcagcuggcccgacggcgccgaccugaaccugaugcccaucuga

SEQ ID NO: 181889 - RNA, 1410 nt, Artificial Sequence
  derived and/or modified CDS sequence (opt4) from neuraminidase__InfluenzaA__AFE02944
augaaccccaaccagaagaucaucaccaucggcagcgugugcaugaccaucggcauggccaaccugauccugcagaucggcaacaucaucagcaucuggaucagccacagcauccagcugggcaaccagaaccagaucgagaccugcaaccagagcgugaucaccuacgagaacaacaccugggugaaccagaccuacgugaacaucagcaacaccaacuucgccgccggccagagcguggugagcgugaagcuggccggcaacagcagccugugccccgugagcggcugggccaucuacagcaaggacaacagcaucagaaucggcagcaagggcgacguguucgugaucagagagcccuucaucagcugcagcccccuggagugcagaaccuucuuccugacccagggcgcccugcugaacgacaagcacagcaacggcaccaucaaggacagaagccccuacagaacccugaugagcugccccaucggcgaggugcccagccccuacaacagcagauucgagagcguggccuggagcgccagcgccugccacgacggcaucaacuggcugaccaucggcaucagcggccccgacaacggcgccguggccgugcugaaguacaacggcaucaucaccgacaccaucaagagcuggagaaacaacauccugagaacccaggagagcgagugcgccugcgugaacggcagcugcuucaccgugaugaccgacggccccagcgacggccaggccagcuacaagaucuucagaaucgagaagggcaagaucgugaagagcguggagaugaacgcccccaacuaccacuacgaggagugcagcugcuaccccgacagcagcgagaucaccugcgugugcagagacaacuggcacggcagcaacagacccugggugagcuucaaccagaaccuggaguaccagaucggcuacaucugcagcggcaucuucggcgacaaccccagacccaacgacaagaccggcagcugcggccccgugagcagcaacggcgccaacggcgugaagggcuucagcuucaaguacggcaacggcguguggaucggcagaaccaagagcaucagcagcagaaacggcuucgagaugaucugggaccccaacggcuggaccggcaccgacaacaacuucagcaucaagcaggacaucgugggcaucaacgaguggagcggcuacagcggcagcuucgugcagcaccccgagcugaccggccugaacugcaucagacccugcuucuggguggagcugaucagaggcagacccaaggagaacaccguguggaccagcggcagcagcaucagcuucugcggcgugaacagcgacaccgugggcuggagcuggcccgacggcgccgagcugcccuucaccaucgacaaguga

SEQ ID NO: 181890 - RNA, 1410 nt, Artificial Sequence
  derived and/or modified CDS sequence (opt4) from neuraminidase__InfluenzaA__AFE47627
augaaccccaaccagaagaucaucaccaucggcagcgugagccugaccaucgccaccaucugcuuccugaugcagaucgccauccuggugaccaccgugacccugcacuucaagcaguacgagugcaacagcccccccaacaaccaggugaugcugugcgagcccaccaucaucgagagaaacaucaccgagaucguguaccugaccaacaccaccaucgagaaggagaucugccccaagcuggccgaguacagaaacuggagcaagccccagugcaacaucaccggcuucgcccccuucagcaaggacaacagcaucagacugagcgccggcggcgacaucugggugaccagagagcccuacgugagcugcgaccccgacaagugcuaccaguucgcccugggccagggcaccacccugaacaacggccacagcaacgacaccgugcacgacagaacccccuacagaacccugcugaugaacgagcugggcgugcccuuccaccugggcaccaagcaggugugcaucgccuggagcagcagcagcugccacgacggcaaggccuggcugcacgugugcgugaccggcgacgacgagaacgccaccgccagcuucaucuacaacggcagacugguggacagcaucggcagcuggagcaagaagauccugagaacccaggagagcgagugcgugugcaucaacggcaccugcaccguggugaugaccgacggcagcgccagcggcaaggccgacaccaagauccuguucaucgaggagggcaagaucgugcacaccagcagccugagcggcagcgcccagcacguggaggagugcagcugcuaccccagauaccccggcgugagaugcgugugcagagacaacuggaagggcagcaacagacccaucguggacaucaacgugaaggacuacagcaucgugagcagcuacgugugcagcggccuggugggcgacacccccagaaagaacgacagcagcagcagcagccacugccuggaccccaacaacgaggagggcggccacggcgugaagggcugggccuucgacgacggcaacgacguguggaugggcagaaccaucagcgagaagcugagaagcggcuacgagaccuucaaggugaucgagggcuggagcaagcccaacagcaagcugcagaccaacagacaggugaucguggacagaggcaacagaagcggcuacagcggcaucuucagcguggagagcaagagcugcaucaacagaugcuucuacguggagcugaucagaggcagaaagcaggagaccgaggugcuguggaccagcaacagcaucgugguguucugcggcaccagcggcaccuacggcaccggcagcuggcccgacggcgccgacaucaaccugaugcccaucuga

SEQ ID NO: 181891 - RNA, 1410 nt, Artificial Sequence; identical to SEQ ID NO: 181203
  derived and/or modified CDS sequence (opt4) from neuraminidase__InfluenzaA__AFF18509

SEQ ID NO: 181892 - RNA, 1410 nt, Artificial Sequence
  derived and/or modified CDS sequence (opt4) from neuraminidase__InfluenzaA__AFF57129
augaaccccaaccagaagaucaucaccaucggcagcgugugcaugaccaucggcauggccaaccugauccugcagaucggcaacaucaucagcaucuggaucagccacagcauccagcugggcaaccagaaccagaucgagaccugcaaccagagcgugaucaccuacgagaacaacaccugggugaaccagaccuacgugaacaucagcaacaccaacuucgccgccggccagagcguggugagcgugaagcuggccggcaacagcagccugugccccgugagcggcugggccaucuacagcaaggacaacagcaucagaaucggcagcaagggcgacguguucgugaucagagagcccuucaucagcugcagcccccuggagugcagaaccuucuuccugacccagggcgcccugcugaacgacaagcacagcaacggcaccaucaaggacagaagccccuacagaacccugaugagcugccccaucggcgaggugcccagccccuacaacagcagauucgagagcguggccuggagcgccagcgccugccacgacggcaucaacuggcugaccaucggcaucagcggccccgacaacggcgccguggccgugcugaaguacaacggcaucaucaccgacaccaucaagagcuggagaaacaacauccugagaacccaggagagcgagugcgccugcgugaacggcagcugcuucaccaucaugaccgacggccccagcgacggccaggccagcuacaagaucuucagaaucgagaagggcaagaucgugaagagcguggagaugaacgcccccaacuaccacuacgaggagugcagcugcuaccccgacagcagcgagaucaccugcgugugcagagacaacuggcacggcagcaacagacccugggugagcuucaaccagaaccuggaguaccagaucggcuacaucugcagcggcaucuucggcgacaaccccagacccaacgacaagaccggcagcugcggccccgugagcagcaacggcgccaacggcgugaagggcuucagcuucaaguacggcaacggcguguggaucggcagaaccaagagcaucagcagcagaaagggcuucgagaugaucugggaccccaacggcuggaacggcaccgacaacaacuucagcaucaagcaggacaucgugggcaucaacgaguggagcggcuacagcggcagcuucgugcagcaccccgagcugaccggccuggacugcaucagacccugcuucuggguggagcugaucagaggcagacccaaggagaacaccaucuggaccagcggcagcagcaucagcuucugcggcgugaacagcgacaccgugggcuggagcuggcccgacggcgccgagcugcccuucaccaucgacaaguga

SEQ ID NO: 181893 - RNA, 1410 nt, Artificial Sequence
  derived and/or modified CDS sequence (opt4) from neuraminidase__InfluenzaA__AFF57133
augaaccccaaccagaagaucaucaccaucggcagcgugugcaugaccaucggcauggccaaccugauccugcagaucggcaacaucaucagcaucuggaucagccacagcauccagcugggcaaccagagccagaucgagaccugcaaccagagcgugaucaccuacgagaacaacaccuggcugaaccagaccuacgugaacaucagcaacaccaacuucgccgccggccagagcguggugagcgugaagcuggccggcaacagcagccugugccccgugagcggcugggccaucuacagcaaggacaacagcaucagaaucggcagcaagggcgacguguucgugaucagagagcccuucaucagcugcagccccagcgagugcagaaccuucuuccugacccagggcgcccugcugaacgacaagcacagcaacggcaccaucaaggacagaagccccuacagaacccugaugagcugccccaucggcgaggugcccagccccuacaacagcagauucgagagcguggccuggagcgccagcgccugccacgacggcaucaacuggcugaccaucggcaucagcggccccgacaacggcgccguggccgugcugaaguacaacggcaucaucaccgacaccaucaagagcuggagaaacaacauccugagaacccaggagagcgagugcgccugcgugaacggcagcugcuucaccaucaugaccgacggccccagcgacggccaggccagcuacaagaucuucagaaucgagaagggcaagaucgugaagagcguggagaugaacgcccccaacuaccacuacgaggagugcagcugcuaccccgacagcagcgagaucaccugcgugugcagagacaacuggcacggcagcaacagacccugggugagcuucaaccagaaccuggaguaccagaucggcuacaucugcagcggcaucuucggcgacaaccccagacccaacgacaagaccggcagcugcggccccgugagcagcaacggcgccaacggcgugaagggcuucagcuucaaguacggcaacggcguguggaucggcagaaccaagagcaucagcagcagaaagggcuucgagaugaucugggaccccaacggcuggaccggcaccgacaacaacuucagcaucaagcaggacaucgugggcaucaacgaguggagcggcuacagcggcagcuucgugcagcaccccgagcugaccggccuggacugcaucagacccugcuucuggguggagcugaucagaggcagacccaaggagaacaccaucuggaccagcggcagcagcaucagcuucugcggcgugaacagcgacaccgugggcuggagcuggcccgacggcgccgagcugcccuucaccaucgacaaguga

SEQ ID NO: 181894 - RNA, 1410 nt, Artificial Sequence; identical to SEQ ID NO: 176953
  derived and/or modified CDS sequence (opt4) from neuraminidase__InfluenzaA__AFF57137

SEQ ID NO: 181895 - RNA, 1410 nt, Artificial Sequence; identical to SEQ ID NO: 176953
  derived and/or modified CDS sequence (opt4) from neuraminidase__InfluenzaA__AFF57141

SEQ ID NO: 181896 - RNA, 1410 nt, Artificial Sequence; identical to SEQ ID NO: 176953
  derived and/or modified CDS sequence (opt4) from neuraminidase__InfluenzaA__AFF57145

SEQ ID NO: 181897 - RNA, 1410 nt, Artificial Sequence; identical to SEQ ID NO: 176953
  derived and/or modified CDS sequence (opt4) from neuraminidase__InfluenzaA__AFF57149

SEQ ID NO: 181898 - RNA, 1410 nt, Artificial Sequence; identical to SEQ ID NO: 176953
  derived and/or modified CDS sequence (opt4) from neuraminidase__InfluenzaA__AFF57153

SEQ ID NO: 181899 - RNA, 1410 nt, Artificial Sequence; identical to SEQ ID NO: 176953
  derived and/or modified CDS sequence (opt4) from neuraminidase__InfluenzaA__AFF57157

SEQ ID NO: 181900 - RNA, 1410 nt, Artificial Sequence; identical to SEQ ID NO: 176953
  derived and/or modified CDS sequence (opt4) from neuraminidase__InfluenzaA__AFF57161

SEQ ID NO: 181901 - RNA, 1410 nt, Artificial Sequence; identical to SEQ ID NO: 176953
  derived and/or modified CDS sequence (opt4) from neuraminidase__InfluenzaA__AFF57165

SEQ ID NO: 181902 - RNA, 1410 nt, Artificial Sequence; identical to SEQ ID NO: 176953
  derived and/or modified CDS sequence (opt4) from neuraminidase__InfluenzaA__AFF57169

SEQ ID NO: 181903 - RNA, 1410 nt, Artificial Sequence; identical to SEQ ID NO: 176953
  derived and/or modified CDS sequence (opt4) from neuraminidase__InfluenzaA__AFF57173

SEQ ID NO: 181904 - RNA, 1410 nt, Artificial Sequence; identical to SEQ ID NO: 176953
  derived and/or modified CDS sequence (opt4) from neuraminidase__InfluenzaA__AFF57177

SEQ ID NO: 181905 - RNA, 1410 nt, Artificial Sequence; identical to SEQ ID NO: 176953
  derived and/or modified CDS sequence (opt4) from neuraminidase__InfluenzaA__AFF57181

SEQ ID NO: 181906 - RNA, 1410 nt, Artificial Sequence; identical to SEQ ID NO: 176953
  derived and/or modified CDS sequence (opt4) from neuraminidase__InfluenzaA__AFF57185

SEQ ID NO: 181907 - RNA, 1410 nt, Artificial Sequence; identical to SEQ ID NO: 176953
  derived and/or modified CDS sequence (opt4) from neuraminidase__InfluenzaA__AFF57189

SEQ ID NO: 181908 - RNA, 1350 nt, Artificial Sequence
  derived and/or modified CDS sequence (opt4) from neuraminidase__InfluenzaA__AFF60789
augaaccccaacaagaagaucaucaccaucggcagcaucugcauggugaccggcauggugagccugaugcugcagaucggcaaccugaucagcaucugggugagccacagcauccacaccggcaaccagcacaaggccgagcccaucagcaacaccaacuuccugaccgagaaggccguggccagcgugaagcuggccggcaacagcagccugugccccaucaacggcugggccguguacagcaaggacaacagcaucagaaucggcagcaagggcgacguguucgugaucagagagcccuucaucagcugcagccaccuggagugcagaaccuucuuccugacccagggcgcccugcugaacgacaagcacagcaacggcaccgugaaggacagaagcccccacagaacccugaugagcugccccgugggcgaggcccccagccccuacaacagcagauucgagagcguggccuggagcgccagcgccugccacgacggcaccagcuggcugaccaucggcaucagcggccccgacaacggcgccguggccgugcugaaguacaacggcaucaucaccgacaccaucaagagcuggagaaacaacauccugagaacccaggagagcgagugcgccugcgugaacggcagcugcuucaccgugaugaccgacggccccagcaacggccaggccagccacaagaucuucaagauggagaagggcaagguggugaagagcguggagcuggacgcccccaacuaccacuacgaggagugcagcugcuaccccgacgccggcgagaucaccugcgugugcagagacaacuggcacggcagcaacagacccugggugagcuucaaccagaaccuggaguaccagaucggcuacaucugcagcggcguguucggcgacaaccccagacccaacgacggcaccggcagcugcggccccgugagcagcaacggcgccuacggcgugaagggcuucagcuucaaguacggcaacggcguguggaucggcagaaccaagagcaccaacagcagaagcggcuucgagaugaucugggaccccaacggcuggaccgagaccgacagcagcuucagcgugaagcaggacaucguggccaucaccgacuggagcggcuacagcggcagcuucgugcagcaccccgagcugaccggccuggacugcaucagacccugcuucuggguggagcugaucagaggcagacccaaggagagcaccaucuggaccagcggcagcagcaucagcuucugcggcgugaccagcgacaccgugggcuggagcuggcccgacggcgccgagcugcccuucaccaucgacaaguga

SEQ ID NO: 181909 - RNA, 1410 nt, Artificial Sequence
  derived and/or modified CDS sequence (opt4) from neuraminidase__InfluenzaA__AFG29043
augaaccccaaccagaagaucaucaccaucggcagcgugugcaugaccaucggcauggccaaccugauccugcagaucggcaacaucaucagcaucuggaucagccacagcauccagcugggcaaccagaaccagaucgagaccugcaaccagagcgugaucaccuacgagaacaacaccugggugaaccagaccuacgugaacaucagcaacaccaacuucgccgccggccagagcguggugagcgugaagcuggccggcaacagcagccugugccccgugagcggcugggccaucuacagcaaggacaacagcaucagaaucggcagcaagggcgacguguucgugaucagagagcccuucaucagcugcagcccccuggagugcagaaccuucuuccugacccagggcgcccugcugaacgacaagcacagcaacggcaccaucagagacagaagccccuacagaacccugaugagcugccccaucggcgaggugcccagccccuacaacagcagauucgagagcguggccuggagcgccagcgccugccacgacggcaucaacuggcugaccaucggcaucagcggccccgacaacggcgccguggccgugcugaaguacaacggcaucaucaccgacaccaucaagagcuggagaaacaacauccugagaacccaggagagcgagugcgccugcgugaacggcagcugcuucaccgugaugaccgacggccccagcgacggccaggccagcuacaagaucuucagaaucgagaagggcaagaucgugaagagcguggagaugaacgcccccaacuaccacuacgaggagugcagcugcuaccccgacagcagcgagaucaccugcgugugcagagacaacuggcacggcagcaacagacccugggugagcuucaaccagaaccuggaguaccagaucggcuacaucugcagcggcaucuucggcgacaaccccagacccaacgacaagaccggcagcugcggccccgugagcagcaacggcgccaacggcgugaagggcuucagcuucaaguacggcaacggcguguggaucggcagaaccaagagcaucagcagcagaaacggcuucgagaugaucugggaccccaacggcuggaccggcaccgacaacaacuucagcaucaagcaggacaucgugggcaucaacgaguggagcggcuacagcggcagcuucgugcagcaccccgagcugaccggccuggacugcaucagacccugcuucuggguggagcugaucagaggcagacccaaggagaacaccaucuggaccagcggcagcagcaucagcuucugcggcgugaacagcgacaccgugggcuggagcuggcccgacggcgccgagcugcccuucaccaucgacaaguga

SEQ ID NO: 181910 - RNA, 1410 nt, Artificial Sequence; identical to SEQ ID NO: 178579
  derived and/or modified CDS sequence (opt4) from neuraminidase__InfluenzaA__AFG29045

SEQ ID NO: 181911 - RNA, 1410 nt, Artificial Sequence; identical to SEQ ID NO: 178711
  derived and/or modified CDS sequence (opt4) from neuraminidase__InfluenzaA__AFG31063

SEQ ID NO: 181912 - RNA, 1410 nt, Artificial Sequence; identical to SEQ ID NO: 176798
  derived and/or modified CDS sequence (opt4) from neuraminidase__InfluenzaA__AFG31073

SEQ ID NO: 181913 - RNA, 1410 nt, Artificial Sequence
  derived and/or modified CDS sequence (opt4) from neuraminidase__InfluenzaA__AFG31083
augaaccccaaccagaagaucaucaccaucggcagcgugugcaugaccaucggcauggccaaccugauccugcagaucggcaacaucaucagcaucuggaucagccacagcauccagcuggugaaccagaaccagaucgagaccugcaaccagagcgugaucaccuacgagaacaacaccugggugaaccagaccuacgugaacaucagcaacaccaacuucgccgccggccagagcguggugagcgugaagcuggccggcaacagcagccugugccccgugagcggcugggccaucuacagcaaggacaacagcgugagaaucggcagcaagggcgacguguucgugaucagagagcccuucaucagcugcagcccccuggagugcagaaccuucuuccugacccagggcgcccugcugaacgacaagcacagcaacggcaccaucaaggacagaagccccuacagaacccugaugagcugccccaucggcgaggugcccagccccuacaacagcagauucgagagcguggccuggagcgccagcgccugccacgacggcaucaacuggcugaccaucggcaucagcggccccgacaacggcgccguggccgugcugaaguacaacggcaucaucaccgacaccaucaagagcuggagaaacaacauccugagaacccaggagagcgagugcgccugcgugaacggcagcugcuucaccgugaugaccgacggccccagcaacggccaggccagcuacaagaucuucagaaucgagaagggcaagaucgugaagagcguggagaugaacgcccccaacuaccacuacgaggagugcagcugcuaccccgacagcagcgagaucaccugcgugugcagagacaacuggcacggcagcaacagacccugggugagcuucaaccagaaccuggaguaccagaucggcuacaucugcagcggcaucuucggcgacaaccccagacccaacgacaagaccggcagcugcggccccgugagcagcaacggcgccaacggcgugaagggcuucagcuucaaguacggcaacggcguguggaucggcagaaccaagagcaucagcagcagaaacggcuucgagaugaucugggaccccaacggcuggaccggcaccgacaacaacuucagcaucaagcaggacaucgugggcaucaacgaguggagcggcuacagcggcagcuucgugcagcaccccgagcugaccggccuggacugcaucagacccugcuucuggguggagcugaucagaggcagacccaaggagaacaccaucuggaccagcggcagcagcaucagcuucugcggcgugaacagcgacaccgugggcuggagcuggcccgacggcgccgagcugcccuucaccaucgacaaguga

SEQ ID NO: 181914 - RNA, 1410 nt, Artificial Sequence; identical to SEQ ID NO: 176798
  derived and/or modified CDS sequence (opt4) from neuraminidase__InfluenzaA__AFG31093

SEQ ID NO: 181915 - RNA, 1410 nt, Artificial Sequence; identical to SEQ ID NO: 176798
  derived and/or modified CDS sequence (opt4) from neuraminidase__InfluenzaA__AFG31103

SEQ ID NO: 181916 - RNA, 1410 nt, Artificial Sequence; identical to SEQ ID NO: 176798
  derived and/or modified CDS sequence (opt4) from neuraminidase__InfluenzaA__AFG31113

SEQ ID NO: 181917 - RNA, 1410 nt, Artificial Sequence; identical to SEQ ID NO: 176798
  derived and/or modified CDS sequence (opt4) from neuraminidase__InfluenzaA__AFG31123

SEQ ID NO: 181918 - RNA, 1410 nt, Artificial Sequence; identical to SEQ ID NO: 176798
  derived and/or modified CDS sequence (opt4) from neuraminidase__InfluenzaA__AFG31133

SEQ ID NO: 181919 - RNA, 1410 nt, Artificial Sequence; identical to SEQ ID NO: 176798
  derived and/or modified CDS sequence (opt4) from neuraminidase__InfluenzaA__AFG31143

SEQ ID NO: 181920 - RNA, 1410 nt, Artificial Sequence; identical to SEQ ID NO: 176798
  derived and/or modified CDS sequence (opt4) from neuraminidase__InfluenzaA__AFG31153

SEQ ID NO: 181921 - RNA, 1410 nt, Artificial Sequence; identical to SEQ ID NO: 176798
  derived and/or modified CDS sequence (opt4) from neuraminidase__InfluenzaA__AFG31163

SEQ ID NO: 181922 - RNA, 1410 nt, Artificial Sequence
  derived and/or modified CDS sequence (opt4) from neuraminidase__InfluenzaA__AFG31173
augaaccccaaccagaagaucaucaccaucggcagcgugugcaugaccaucggcauggccaaccugauccugcagaucggcaacaucaucagcaucuggaucagccacagcauccagcugggcaaccagaaccagaucgagaccugcaaccagagcgugaucaccuacgagaacaacaccugggugaaccagaccuacgugaacaucagcaacaccaacuucgccgccggccagagcguggugagcgugaagcuggccggcaacagcagccugugccccgugagcggcugggccaucuacagcaaggacaacagcaucagaaucggcagcaagggcgacguguucgugaucagagagcccuucaucagcugcagcccccuggagugcagaaccuucuuccugacccagggcgcccugcugaacgacaagcacagcaacggcaccaucaaggacagaagccccuacagaacccugaugagcugccccaucggcgaggugcccagccccuacaacagcagauucgagagcguggccuggagcgccagcgccugccacgacggcaucaacuggcugaccaucggcaucagcggccccgacaacggcgccguggccgugcugaaguacaacggcaucaucaccgacaccaucaagagcuggagaaacaacauccugagaacccaggagagcgagugcgccugcgugaacggcagcugcuucaccgugaugaccgacggccccagcgacggccaggccagcuacaagaucuucagaaucgagaagggcaagaucgugaagagcguggagaugaacgcccccaacuaccacuacgaggagugcagcugcuaccccgacagcagcgagaucaccugcgugugcagagacaacuggcacggcagcaacagacccugggugagcuucaaccagaaccuggaguaccagaucggcuacaucugcagcggcaucuucggcgacaaccccagacccaacgacaagaccggcagcugcggccccgugagcagcaacggcgccaacggcgugaagggcuucagcuucaaguacggcaacggcguguggaucggcagaaccaagagcaucagcagcagaaacggcuucgagaugaucugggaccccaacggcuggaccggcaccgacaacaacuucagcaucaagcaggacaucgugggcaucaacgaguggagcggcuacagcggcagcuucgugcagcaccccgagcugaccggccuggacugcaucagacccugcuucuggguggagcugaucagaggccugcccaaggagaacaccaucuggaccagcggcagcagcaucagcuucugcggcgugaacagcgacaccgugggcuggagcuggcccgacggcgccgagcugcccuucaccaucgacaaguga

SEQ ID NO: 181923 - RNA, 1410 nt, Artificial Sequence; identical to SEQ ID NO: 181922
  derived and/or modified CDS sequence (opt4) from neuraminidase__InfluenzaA__AFG31183

SEQ ID NO: 181924 - RNA, 1410 nt, Artificial Sequence; identical to SEQ ID NO: 176798
  derived and/or modified CDS sequence (opt4) from neuraminidase__InfluenzaA__AFG31193

SEQ ID NO: 181925 - RNA, 1410 nt, Artificial Sequence; identical to SEQ ID NO: 176798
  derived and/or modified CDS sequence (opt4) from neuraminidase__InfluenzaA__AFG31203

SEQ ID NO: 181926 - RNA, 1410 nt, Artificial Sequence; identical to SEQ ID NO: 176798
  derived and/or modified CDS sequence (opt4) from neuraminidase__InfluenzaA__AFG31213

SEQ ID NO: 181927 - RNA, 1410 nt, Artificial Sequence; identical to SEQ ID NO: 176798
  derived and/or modified CDS sequence (opt4) from neuraminidase__InfluenzaA__AFG31223

SEQ ID NO: 181928 - RNA, 1410 nt, Artificial Sequence; identical to SEQ ID NO: 176798
  derived and/or modified CDS sequence (opt4) from neuraminidase__InfluenzaA__AFG31233

SEQ ID NO: 181929 - RNA, 1410 nt, Artificial Sequence
  derived and/or modified CDS sequence (opt4) from neuraminidase__InfluenzaA__AFG31243
augaaccccaaccagaagaucaucaccaucggcagcgugugcaugaccaucggcauggccaaccugauccugcagaucggcaacaucaucagcaucuggaucagccacagcauccagcugggcaaccagaaccagaucgagaccugcaaccagagcgugaucaccuacgagaacaacaccugggugaaccagaccuacgugaacaucagcaacaccaacuucguggccggccagagcguggugagcgugaagcuggccggcaacagcagccugugccccgugagcggcugggccaucuacagcaaggacaacagcaucagaaucggcagcaagggcgacguguucgugaucagagagcccuucaucagcugcagcccccuggagugcagaaccuucuuccugacccagggcgcccugcugaacgacaagcacagcaacggcaccaucaaggacagaagccccuacagaacccugaugagcugccccaucggcgaggugcccagccccuacaacagcagauucgagagcguggccuggagcgccagcgccugccacgacggcaucaacuggcugaccaucggcaucagcggccccgacaacggcgccguggccgugcugaaguacaacggcaucaucaccgacaccaucaagagcuggagaaacaacauccugagaacccaggagagcgagugcgccugcgugaacggcagcugcuucaccgugaugaccgacggccccagcgacggccaggccagcuacaagaucuucagaaucgagaagggcaagaucgugaagagcguggagaugaacgcccccaacuaccacuacgaggagugcagcugcuaccccgacagcagcgagaucaccugcgugugcagagacaacuggcacggcagcaacagacccugggugagcuucaaccagaaccuggaguaccagaucggcuacaucugcagcggcaucuucggcgacaaccccagacccaacgacaagaccggcagcugcggccccgugagcagcaacggcgccaacggcgugaagggcuucagcuucaaguacggcaacggcguguggaucggcagaaccaagagcaucagcagcagaaacggcuucgagaugaucugggaccccaacggcuggaccggcaccgacaacaacuucagcaucaagcaggacaucgugggcaucaacgaguggagcggcuacagcggcagcuucgugcagcaccccgagcugaccggccuggacugcaucagacccugcuucuggguggagcugaucagaggcagacccaaggagaacaccaucuggaccagcggcagcagcaucagcuucugcggcgugaacagcgacaccgugggcuggagcuggcccgacggcgccgagcugcccuucaccaucgacaaguga

SEQ ID NO: 181930 - RNA, 1410 nt, Artificial Sequence; identical to SEQ ID NO: 179790
  derived and/or modified CDS sequence (opt4) from neuraminidase__InfluenzaA__AFG31253

SEQ ID NO: 181931 - RNA, 1410 nt, Artificial Sequence; identical to SEQ ID NO: 176798
  derived and/or modified CDS sequence (opt4) from neuraminidase__InfluenzaA__AFG31263

SEQ ID NO: 181932 - RNA, 1410 nt, Artificial Sequence; identical to SEQ ID NO: 176798
  derived and/or modified CDS sequence (opt4) from neuraminidase__InfluenzaA__AFG31273

SEQ ID NO: 181933 - RNA, 1410 nt, Artificial Sequence; identical to SEQ ID NO: 176798
  derived and/or modified CDS sequence (opt4) from neuraminidase__InfluenzaA__AFG31283

SEQ ID NO: 181934 - RNA, 1410 nt, Artificial Sequence; identical to SEQ ID NO: 176798
  derived and/or modified CDS sequence (opt4) from neuraminidase__InfluenzaA__AFG31293

SEQ ID NO: 181935 - RNA, 1410 nt, Artificial Sequence; identical to SEQ ID NO: 176798
  derived and/or modified CDS sequence (opt4) from neuraminidase__InfluenzaA__AFG31303

SEQ ID NO: 181936 - RNA, 1410 nt, Artificial Sequence; identical to SEQ ID NO: 176798
  derived and/or modified CDS sequence (opt4) from neuraminidase__InfluenzaA__AFG31313

SEQ ID NO: 181937 - RNA, 1410 nt, Artificial Sequence; identical to SEQ ID NO: 176798
  derived and/or modified CDS sequence (opt4) from neuraminidase__InfluenzaA__AFG31326

SEQ ID NO: 181938 - RNA, 1410 nt, Artificial Sequence; identical to SEQ ID NO: 176798
  derived and/or modified CDS sequence (opt4) from neuraminidase__InfluenzaA__AFG31336

SEQ ID NO: 181939 - RNA, 1410 nt, Artificial Sequence; identical to SEQ ID NO: 179790
  derived and/or modified CDS sequence (opt4) from neuraminidase__InfluenzaA__AFG31346

SEQ ID NO: 181940 - RNA, 1410 nt, Artificial Sequence; identical to SEQ ID NO: 179790
  derived and/or modified CDS sequence (opt4) from neuraminidase__InfluenzaA__AFG31356

SEQ ID NO: 181941 - RNA, 1410 nt, Artificial Sequence; identical to SEQ ID NO: 179790
  derived and/or modified CDS sequence (opt4) from neuraminidase__InfluenzaA__AFG31366

SEQ ID NO: 181942 - RNA, 1410 nt, Artificial Sequence; identical to SEQ ID NO: 179790
  derived and/or modified CDS sequence (opt4) from neuraminidase__InfluenzaA__AFG31379

SEQ ID NO: 181943 - RNA, 1410 nt, Artificial Sequence; identical to SEQ ID NO: 179790
  derived and/or modified CDS sequence (opt4) from neuraminidase__InfluenzaA__AFG31389

SEQ ID NO: 181944 - RNA, 1410 nt, Artificial Sequence; identical to SEQ ID NO: 179790
  derived and/or modified CDS sequence (opt4) from neuraminidase__InfluenzaA__AFG31399

SEQ ID NO: 181945 - RNA, 1410 nt, Artificial Sequence; identical to SEQ ID NO: 179790
  derived and/or modified CDS sequence (opt4) from neuraminidase__InfluenzaA__AFG31409

SEQ ID NO: 181946 - RNA, 1410 nt, Artificial Sequence; identical to SEQ ID NO: 176798
  derived and/or modified CDS sequence (opt4) from neuraminidase__InfluenzaA__AFG31419

SEQ ID NO: 181947 - RNA, 1410 nt, Artificial Sequence; identical to SEQ ID NO: 176798
  derived and/or modified CDS sequence (opt4) from neuraminidase__InfluenzaA__AFG31429

SEQ ID NO: 181948 - RNA, 1410 nt, Artificial Sequence; identical to SEQ ID NO: 176798
  derived and/or modified CDS sequence (opt4) from neuraminidase__InfluenzaA__AFG31439

SEQ ID NO: 181949 - RNA, 1410 nt, Artificial Sequence; identical to SEQ ID NO: 176798
  derived and/or modified CDS sequence (opt4) from neuraminidase__InfluenzaA__AFG31449

SEQ ID NO: 181950 - RNA, 1410 nt, Artificial Sequence; identical to SEQ ID NO: 176798
  derived and/or modified CDS sequence (opt4) from neuraminidase__InfluenzaA__AFG31459

SEQ ID NO: 181951 - RNA, 1410 nt, Artificial Sequence; identical to SEQ ID NO: 176798
  derived and/or modified CDS sequence (opt4) from neuraminidase__InfluenzaA__AFG31469

SEQ ID NO: 181952 - RNA, 1410 nt, Artificial Sequence; identical to SEQ ID NO: 176798
  derived and/or modified CDS sequence (opt4) from neuraminidase__InfluenzaA__AFG31479

SEQ ID NO: 181953 - RNA, 1410 nt, Artificial Sequence; identical to SEQ ID NO: 176798
  derived and/or modified CDS sequence (opt4) from neuraminidase__InfluenzaA__AFG31499

SEQ ID NO: 181954 - RNA, 1410 nt, Artificial Sequence; identical to SEQ ID NO: 178689
  derived and/or modified CDS sequence (opt4) from neuraminidase__InfluenzaA__AFG31509

SEQ ID NO: 181955 - RNA, 1410 nt, Artificial Sequence; identical to SEQ ID NO: 179790
  derived and/or modified CDS sequence (opt4) from neuraminidase__InfluenzaA__AFG31519

SEQ ID NO: 181956 - RNA, 1410 nt, Artificial Sequence; identical to SEQ ID NO: 176798
  derived and/or modified CDS sequence (opt4) from neuraminidase__InfluenzaA__AFG31529

SEQ ID NO: 181957 - RNA, 1410 nt, Artificial Sequence; identical to SEQ ID NO: 178689
  derived and/or modified CDS sequence (opt4) from neuraminidase__InfluenzaA__AFG31539

SEQ ID NO: 181958 - RNA, 1410 nt, Artificial Sequence; identical to SEQ ID NO: 176798
  derived and/or modified CDS sequence (opt4) from neuraminidase__InfluenzaA__AFG31549

SEQ ID NO: 181959 - RNA, 1410 nt, Artificial Sequence; identical to SEQ ID NO: 176798
  derived and/or modified CDS sequence (opt4) from neuraminidase__InfluenzaA__AFG31559

SEQ ID NO: 181960 - RNA, 1410 nt, Artificial Sequence; identical to SEQ ID NO: 179790
  derived and/or modified CDS sequence (opt4) from neuraminidase__InfluenzaA__AFG31569

SEQ ID NO: 181961 - RNA, 1410 nt, Artificial Sequence; identical to SEQ ID NO: 176798
  derived and/or modified CDS sequence (opt4) from neuraminidase__InfluenzaA__AFG31579

SEQ ID NO: 181962 - RNA, 1410 nt, Artificial Sequence; identical to SEQ ID NO: 176798
  derived and/or modified CDS sequence (opt4) from neuraminidase__InfluenzaA__AFG31589

SEQ ID NO: 181963 - RNA, 1410 nt, Artificial Sequence; identical to SEQ ID NO: 176798
  derived and/or modified CDS sequence (opt4) from neuraminidase__InfluenzaA__AFG31599

SEQ ID NO: 181964 - RNA, 1410 nt, Artificial Sequence; identical to SEQ ID NO: 176798
  derived and/or modified CDS sequence (opt4) from neuraminidase__InfluenzaA__AFG31609

SEQ ID NO: 181965 - RNA, 1410 nt, Artificial Sequence; identical to SEQ ID NO: 176798
  derived and/or modified CDS sequence (opt4) from neuraminidase__InfluenzaA__AFG31619

SEQ ID NO: 181966 - RNA, 1410 nt, Artificial Sequence; identical to SEQ ID NO: 176798
  derived and/or modified CDS sequence (opt4) from neuraminidase__InfluenzaA__AFG31629

SEQ ID NO: 181967 - RNA, 1410 nt, Artificial Sequence; identical to SEQ ID NO: 179790
  derived and/or modified CDS sequence (opt4) from neuraminidase__InfluenzaA__AFG31639

SEQ ID NO: 181968 - RNA, 1410 nt, Artificial Sequence; identical to SEQ ID NO: 176798
  derived and/or modified CDS sequence (opt4) from neuraminidase__InfluenzaA__AFG31649

SEQ ID NO: 181969 - RNA, 1410 nt, Artificial Sequence; identical to SEQ ID NO: 176798
  derived and/or modified CDS sequence (opt4) from neuraminidase__InfluenzaA__AFG31659

SEQ ID NO: 181970 - RNA, 1410 nt, Artificial Sequence; identical to SEQ ID NO: 176798
  derived and/or modified CDS sequence (opt4) from neuraminidase__InfluenzaA__AFG31669

SEQ ID NO: 181971 - RNA, 1410 nt, Artificial Sequence; identical to SEQ ID NO: 174155
  derived and/or modified CDS sequence (opt4) from neuraminidase__InfluenzaA__AFG71868

SEQ ID NO: 181972 - RNA, 1410 nt, Artificial Sequence; identical to SEQ ID NO: 174155
  derived and/or modified CDS sequence (opt4) from neuraminidase__InfluenzaA__AFG71890

SEQ ID NO: 181973 - RNA, 1410 nt, Artificial Sequence; identical to SEQ ID NO: 174155
  derived and/or modified CDS sequence (opt4) from neuraminidase__InfluenzaA__AFG71901

SEQ ID NO: 181974 - RNA, 1410 nt, Artificial Sequence; identical to SEQ ID NO: 174174
  derived and/or modified CDS sequence (opt4) from neuraminidase__InfluenzaA__AFG71912

SEQ ID NO: 181975 - RNA, 1410 nt, Artificial Sequence
  derived and/or modified CDS sequence (opt4) from neuraminidase__InfluenzaA__AFG71934
augaaccccaaccagaagaucaucaccaucggcagcgugagccugaccaucgccaccgugugcuuccugaugcagaucgccauccugaucaccaccgugacccugcacuucaagcaguacgagugcgacagccccgccaacaaccaggugaugcccugcgagcccaucaucaucgagagaaacaucaccgagaucguguaccugaccaacaccaccaucgagaaggagaucugccccaagcugguggaguacagaaacuggagcaagccccagugcaagaucaccggcuucgcccccuucagcaaggacaacagcaucagacugagcgccggcggcgacaucugggugaccagagagcccuacgugagcugcgaccccggcaagugcuaccaguucgcccugggccagggcaccacccuggacaacaagcacagcaacgacaccauccacgacagaaucccccacagaacccugcugaugaacgagcugggcgugcccuuccaccugggcaccagacaggugugcaucgccuggagcagcagcagcugccacgacggcaaggccuggcugcacgugugcgugaccggcgacgacaagaacgccaccgccagcuucaucuacgacggcagacugguggacagcaucggcagcuggagccagaacauccugagaacccaggagagcgagugcgugugcaucaacggcaccugcaccguggugaugaccgacggcagcgccagcggcagagccgacaccagaauccuguucaucgaggagggcaagaucgugcacaucagcccccugagcggcagcgcccagcacguggaggagugcagcugcuaccccagauaccccggcgugagaugcaucugcagagacaacuggaagggcagcaacagacccgugguggacaucaacgugaaggacuacagcaucgacagcagauacgugugcagcggccuggugggcgacacccccagaaacaacgacagauucagcaacagcaacugcagaaaccccaacaacgagagaggcaaccacggcgugaagggcugggccuucgacgacggcaacgacguguggaugggcagaaccaucagcaaggacagcagaagcggcuacgagaccuucaaggugaucggcggcuggagcacccccaacagcaagagccagaucaacagacaggugaucguggacagcgacaacagaagcggcuacagcggcaucuucagcguggagggcaagagcugcaucaacagaugcuucuacguggagcugaucagaggcagagagcaggagaccagagugugguggaccagcaacagcaucgugguguucugcggcaccagcggcaccuacggcaccggcagcuggcccgacggcgccgacaucaaccugaugcccaucuga

SEQ ID NO: 181976 - RNA, 1410 nt, Artificial Sequence
  derived and/or modified CDS sequence (opt4) from neuraminidase__InfluenzaA__AFG71945
augaaccccaaccagaagaucaucaccaucggcagcgugagccugaccaucgccaccgugugcuuccugaugcagaucgccauccuggugaccaccgugacccugcacuucaagcaguacgagugcgacagccccgccaacaaccaggugaugcccugcgagcccaucaucaucgagagaaacaucaccgagaucguguaccugaccaacaccaccaucgagaaggagaucugccccaagcugguggaguacagaaacuggagcaagccccagugcaagaucaccggcuucgcccccuucagcaaggacaacagcaucagacugagcgccggcggcgacaucugggugaccagagagcccuacgugagcugcgaccccggcaagugcuaccaguucgcccugggccagggcaccacccuggacaacaagcacagcaacgacaccauccacgacagaaucccccacagaacccugcugaugaacgagcugggcgugcccuuccaccugggcaccagacaggugugcaucgccuggagcagcagcagcugccacgacggcaaggccuggcugcacgugugcgugaccggcgacgacgagaacgccaccgccagcuucaucuacgacggcagacugguggacagcaucggcagcuggagccagaacauccugagaacccaggagagcgagugcgugugcaucaacggcaccugcaccguggugaugaccgacggcagcgccagcggcagagccgacaccagaauccuguucaucgaggagggcaagaucgugcacaucagcccccugagcggcagcgcccagcacguggaggagugcagcugcuaccccagauaccccggcgugagaugcaucugcagagacaacuggaagggcagcaacagacccgugguggacaucaacgugaaggacuacagcaucgacagcagauacgugugcagcggccuggugggcgacacccccagaaacaacgacaagagcagcaacagcaacugcagaaaccccaacaacgacaagggcaaccacggcgugaagggcugggccuucgacgacggcaacgacguguggaugggcagaaccaucagcaaggacagcagaagcggcuacgagaccuucaaggugaucggcggcuggagcacccccaacagcaagagccagaucaacagacaggugaucguggacagcgacaacagaagcggcuacagcggcaucuucagcguggagggcaagagcugcaucaacagaugcuucuacguggagcugaucagaggcagagagcaggagaccaaggugugguggaccagcaacagcaucgugguguucugcggcaccagcggcaccuacggcaccggcagcuggcccgacggcgccgacaucaaccugaugagcaucuga

SEQ ID NO: 181977 - RNA, 1410 nt, Artificial Sequence; identical to SEQ ID NO: 174178
  derived and/or modified CDS sequence (opt4) from neuraminidase__InfluenzaA__AFG71967

SEQ ID NO: 181978 - RNA, 1410 nt, Artificial Sequence; identical to SEQ ID NO: 174178
  derived and/or modified CDS sequence (opt4) from neuraminidase__InfluenzaA__AFG71978

SEQ ID NO: 181979 - RNA, 1410 nt, Artificial Sequence
  derived and/or modified CDS sequence (opt4) from neuraminidase__InfluenzaA__AFG71988
augaaccccaaccagaagaucaucaccaucggcagcgugagccugaccaucgccaccaucugcuuccugaugcagaucgccauccuggugaccaccgugacccugcacuucaagcaguacgagugcgacagccccgccaacaaccaggugaugcccugcgagcccaucaucaucgagagaaacaucaccgagaucguguaccugaccaacaccaccaucgagaaggagaucugccccaagcugguggaguacagaaacuggagcaagccccagugcaagaucaccggcuucgcccccuucagcaaggacaacagcaucagacugagcgccggcggcgacaucugggugaccagagagcccuacgugagcugcgaccccggcaagugcuaccaguucgcccugggccagggcaccacccuggacaacaagcacagcaacgacaccauccacgacagaaccccccacagaacccugcugaugaacgagcugggcgugcccuuccaccugggcaccagacaggugugcaucgccuggagcagcagcagcugccacgacggcaaggccuggcugcacgugugcgugaccggcuacgacaagaacgccaccgccagcuucaucuacgacggcagacugguggacagcaucggcagcuggagccagaacauccugagaacccaggagagcgagugcaucugcaucaacggcaccugcaccguggugaugaccgacggcagcgccagcggcagagccgacaccaagauccuguucaucgaggagggcaagaucgugcacaucagcccccugagcggcagcgcccagcacguggaggagugcagcugcuaccccagauaccccggcgugagaugcaucugcagagacaacuggaagggcagcaacagacccgugguggacaucaacgugaaggacuacagcaucgacagcagcuacgugugcagcggccuggugggcgacacccccagaaacaacgacagaagcagcaacagcuacugcagaaaccccaacaacgagaagggcaaccacggcgugaagggcugggccuucgacgacggcaacgacguguggaugggcagaaccaucagcgaggacagcagaagcggcuacgagaccuucaaggugaucggcggcuggagcacccccaacagcaagcugcagaucaacagacaggugaucguggacagcgacaacagaagcggcuacagcggcaucuucagcguggagggcaagagcugcaucaacagaugcuucuacguggagcugaucagaggcagagagcaggagaccagagugugguggaccagcaacagcaucgugguguucugcggcaccagcggcaccuacggcaccggcagcuggcccgacggcgccgacaucaaccugaugcccaucuga

SEQ ID NO: 181980 - RNA, 1410 nt, Artificial Sequence; identical to SEQ ID NO: 174178
  derived and/or modified CDS sequence (opt4) from neuraminidase__InfluenzaA__AFG71999

SEQ ID NO: 181981 - RNA, 1410 nt, Artificial Sequence; identical to SEQ ID NO: 174636
  derived and/or modified CDS sequence (opt4) from neuraminidase__InfluenzaA__AFG72021

SEQ ID NO: 181982 - RNA, 1410 nt, Artificial Sequence
  derived and/or modified CDS sequence (opt4) from neuraminidase__InfluenzaA__AFG72032
augaaccccaaccagaagaucaucaccaucggcagcgugagccugaccaucgccaccaucugcuuccugaugcagaucgccauccuggugaccaccgugacccugcacuucaagcaguacgagugcagcagcccccccaacaaccaggugaugcccugcgagcccaucaucaucgagagaaacaucaccgagaucguguaccugaccaacaccaccaucgagaaggagaucugccccaagcugguggaguacagaaacuggagcaagccccagugcaagaucaccggcuucgcccccuucagcaaggacaacagcaucagacugagcgccggcggcgacaucugggugaccagagagcccuacgugagcugcgaccccggcaagugcuaccaguucgcccugggccagggcaccacccuggacaacaagcacagcaacgacaccauccacgacagaacccccuacagaacccugcugaugaacgagcugggcgugcccuuccaccugggcaccagacaggugugcaucgccuggagcagcagcagcugccacgacggcaaggccuggcugcacgugugcgugaccggcuacgacaagaacgccaccgccagcuucaucuacgacggcagacugguggacagcaucggcagcuggagcaagaacauccugagaacccaggagagcgagugcgugugcaucaacggcaccugcaccguggugaugaccgacggcagcgccagcgagagagccgacaccaagauccuguucaucgaggagggcaagaucgugcacaucagcccccugagcggcagcgcccagcacguggaggagugcagcugcuaccccagauaccccggcgugagaugcgugugcagagacaacuggaagggcagcaacagacccgugguggacaucaacgugaaggacuacagcaucgugagcagcuacgugugcagcggccuggugggcgacacccccagaaagaacgacagaagcagcagcagcuacugcagaaaccccaacaacgagaagggcaaccacggcgugaagggcugggccuucgacgacggcaacgacguguggaugggcagaaccaucagcgaggagagcagaagcggcuacgagaccuucaaggugaucggcggcuggagcacccccaacagcaagcugcagaucaacagacaggugaucguggacagcgacaacagaagcggcuacagcggcaucuucagcguggagggcaagagcugcaucaacagaugcuucuacguggagcugaucagaggcagagagcaggagaccagagugugguggaccagcaacagcaucgugguguucugcggcaccagcggcaccuacggcaccggcagcuggcccgacggcgccgacaucaaccugaugcccaucuga

SEQ ID NO: 181983 - RNA, 1410 nt, Artificial Sequence; identical to SEQ ID NO: 174873
  derived and/or modified CDS sequence (opt4) from neuraminidase__InfluenzaA__AFG72088

SEQ ID NO: 181984 - RNA, 1410 nt, Artificial Sequence
  derived and/or modified CDS sequence (opt4) from neuraminidase__InfluenzaA__AFG72121
augaaccccaaccagaagaucaucaccaucggcagcgugagccugaccaucgccaccaucugcuuccugaugcagaucgccauccuggugaccaccgugacccugcacuucaagcaguacgagugcagcagcccccccaacaacagagugaugcccugcgagcccaccaucaucgagagaaacaucaccgagaucguguaccugaccaacaccaccaucgagaaggagaucugccccaagcugguggaguacagaaacuggagcaagccccagugcaagaucaccggcuucgcccccuucagcaaggacaacagcaucagacugagcgccggcggcgacaucugggugaccagagagcccuacgugagcugcgaccccggcaagugcuaccaguucgcccugggccagggcaccacccugaacaacagacacagcaacgacaccgugcacgacagaacccccuacagaacccugcugaugaacgagcugggcgugcccuuccaccugggcaccaagcaggugugcauggccuggagcagcagcagcugccacgacggcaaggccuggcugcacgugugcgugaccggccacgacgagaacgccaccgccagcuucaucuacgacggcagacugguggacagcaucggcagcuggagcaagaacauccugagaacccaggagagcgagugcgugugcaucaacggcaccugcaccguggugaugaccgacggcagcgccagcgagagagccgacaccaagauccuguucaucgaggagggcaagaucgugcacaucagcccccugagcggcagcgcccagcacguggaggagugcagcugcuaccccagauaccccggcgugagaugcgugugcagagacaacuggaagggcagcaacagacccaucguggacaucaacgugaaggacuacagcaucgugagcagcuacgugugcagcggccuggugggcgacacccccagaaagaacgacagaagcagcagcagcuacugcagaaaccccaacaacgagaagggcagccacggcgugaagggcugggccuucgacgacggcaacgacguguggaugggcagaaccaucggcgaggagcugagaagcggcuacgagaccuucaaggugaucggcggcuggagcacccccaacagcaagcugcagaucaacagacaggugaucguggacagcggcaacagaagcggcuacagcggcaucuucagcguggagggcaagagcugcaucaacagaugcuucuacguggagcugaucagaggcagaaagcaggagaccagagugugguggaccagcaacagcaucgugguguucugcggcaccagcggcaccuacggcaccggcagcuggcccgacggcgccgacaucaaccugaugcccaucuga

SEQ ID NO: 181985 - RNA, 1410 nt, Artificial Sequence
  derived and/or modified CDS sequence (opt4) from neuraminidase__InfluenzaA__AFG72143
augaaccccaaccagaagaucaucaccaucggcagcgugagccugaccaucgccaccaucugccugcugaugcagaucgccauccuggugaccaccgugacccugcacuucaagcaguacgagugcagcagcccccccaacaaccaggugaugcccugcgagcccaccaucaucgagagaaacaucaccgagaucguguaccugaccaacaccaccaucgagaaggagaucugccccaagcugguggaguacagaaacuggagcaagccccagugcaagaucaccggcuucgcccccuucagcaaggacaacagcaucagacugagcgccggcggcgacaucugggugaccagagagcccuacgugagcugcgaccccggcaagugcuaccaguucgcccugggccagggcaccacccugaacaacagacacagcaacgacaccgugcacgacagaacccccuacagaacccugcugaugaacgagcugggcgugcccuuccaccugggcaccaagcaggugugcaucgccuggagcagcagcagcugccacgacggcaaggccuggcugcacgugugcgugaccggccacgacgagaacgccaccgccagcuucaucuacgacggcagacugguggacagcaucggcagcuggagcaagaacauccugagaacccaggagagcgagugcgugugcaucaacggcaccugcaccguggugaugaccgacggcagcgccagcgagagagccgacaccaagauccuguucaucgaggagggcaagaucgugcacaucagcccccugagcggcagcgcccagcacguggaggagugcagcugcuaccccagauaccccggcgugagaugcgugugcagagacaacuggaagggcagcaacagacccaucguggacaucaacgugaaggacuacagcaucgugagcagcuacgugugcagcggccuggugggcgacacccccagaaagaacgacagcagcagcagcagcuacugcagaaaccccaacaacgagaagggcagccacggcgugaagggcugggccuucgacgacggcaacgacguguggaugggcagaaccaucggcgaggagcugagaagcggcuacgagaccuucaaggugaucggcggcuggagcacccccaacagcaagcugcagaucaacagacaggugaucguggacagcggcaacagaagcggcuacagcggcaucuucagcguggagggcaagagcugcaucaacagaugcuucuacguggagcugaucagaggcagaaagcaggagaccaaggugugguggaccagcaacagcaucgugguguucugcggcaccagcggcaccuacggcaccggcagcuggcccgacggcgccgacaucaaccugaugcccaucuga

SEQ ID NO: 181986 - RNA, 1410 nt, Artificial Sequence
  derived and/or modified CDS sequence (opt4) from neuraminidase__InfluenzaA__AFG72165
augaaccccaaccagaagaucaucaccaucggcagcgugagccugaccaucgccaccaucugcuuccugaugcagaucgccauccuggugaccaccgugacccugcacuucaagcaguacgagugcaacagcccccccaacaaccaggugaugcccugcgagcccaccaucaucgagagaaacaucaccgagaucguguaccugaccaacaccaccaucgagaaggagaucugccccaagcugguggaguacagaaacuggagcaagccccagugcaagaucaccggcuucgcccccuucagcaaggacaacagcaucagacugagcgccggcggcgacaucugggugaccagagagcccuacgugagcugcgaccccggcaagugcuaccaguucgcccugggccagggcaccacccugaacaacagacacagcaacgacaccgugcacgacagaacccccuacagaacccugcugaugaacgagcugggcgugcccuuccaccugggcaccaagcaggugugcaucgccuggagcagcagcagcugccacgacggcaaggccuggcugcacgugugcgugaccggccacgacgagaacgccaccgccagcuucaucuacgacggcagacugguggacagcaucgugagcuggagcaagaacauccugagaacccaggagagcgagugcgugugcaucaacggcaccugcaccguggugaugaccgacggcagcgccagcgagagagccgacaccaagauccuguucaucgaggagggcaagaucgugcacaucagcccccugagcggcagcgcccagcacguggaggagugcagcugcuaccccagauaccccggcgugagaugcgugugcagagacaacuggaagggcagcaacagacccaucguggacaucaacgugaaggacuacagcaucgugagcagcuacgugugcagcggccuggugggcgacacccccagaaagaacgacagcagcagcagcagcuacugcagaaaccccaacaacgagaagggcagccacggcgugaagggcugggccuucgacgacggcaacgacguguggaugggcagaaccaucggcgaggagcugagaagcggcuacgagaccuucaaggugaucggcggcuggagcacccccaacagcaagcugcagaccaacagacaggugaucguggacagaggcaacagaagcggcuacagcggcaucuucagcguggagggcaagagcugcaucaacagaugcuucuacguggagcugaucagaggcagaaagcaggagaccaaggugugguggaccagcaacagcaucgugguguucugcggcaccagcggcaccuacggcaccggcagcuggcccgacggcgccgacaucaaccugaugcccaucuga

SEQ ID NO: 181987 - RNA, 1410 nt, Artificial Sequence
  derived and/or modified CDS sequence (opt4) from neuraminidase__InfluenzaA__AFG72176
augaaccccaaccagaagaucaucaccaucggcagcgugagccugaccaucgccaccaucugcuuccugaugcagaucaccauccuggugaccaccgugacccugcacuucaagcaguacgagugcaacagcccccccaacaaccaggugaugcugugcgagcccaccaucaucgagagaaacaucaccgagaucguguaccugaccaacaccaccaucgagaaggagaagugccccaagcugguggaguacagaaacuggagcaagccccagugcaagaucaccggcuucgcccccuucagcaaggacaacagcaucagacugagcgccggcggcgacaucugggugaccagagagcccuacgugagcugcgaccccggcaagugcuaccaguucgcccugggccagggcaccacccugaacaacagacacagcaacgacaccgugcacgacagaacccccuacagaacccugcugaugaacgagcugggcgugcccuuccaccugggcaccaagcaggugugcaucgccuggagcagcagcagcugccacgacggcaaggccuggcugcacgugugcgugaccggccacgacgagaacgccaccgccagcuucaucuacgacggcagacugguggacagcaucggcagcuggagcaagaacauccugagaacccaggagagcgagugcgugugcaucaacggcaccugcaccguggugaugaccgacggcagcgccagcgagagagccgacaccaagauccuguucaucgaggagggcaagaucgugcacaucagcccccugagcggcagcgcccagcacguggaggagugcagcugcuaccccagauaccccggcgugagaugcgugugcagagacaacuggaagggcagcaacagacccaucguggacaucaacgugaaggacuacagcaucgugagcagcuacgugugcagcggccuggugggcgacacccccagaaagaacgacagcagcagcagcagcuacugcagaaaccccaacaacgagaagggcagccacggcgugaagggcugggccuucgacgacggcaacgacguguggaugggcagaaccaucagcgaggagcugagaagcggcuacgagaccuucaaggugaucggcggcuggagcacccccaacagcaagcugcagaucaacagacaggugaucguggacagaggcaacagaagcggcuacagcggcaucuucagcguggagggcaagagcugcaucaacagaugcuucuacguggagcugaucagaggcagaaagcaggagaacaaggugugguggaccagcaacagcaucgugguguucugcggcaccagcggcaccuacggcaccggcagcuggcccgacggcgccgacaucaaccugaugcccaucuga

SEQ ID NO: 181988 - RNA, 1410 nt, Artificial Sequence; identical to SEQ ID NO: 181986
  derived and/or modified CDS sequence (opt4) from neuraminidase__InfluenzaA__AFG72198

SEQ ID NO: 181989 - RNA, 1410 nt, Artificial Sequence; identical to SEQ ID NO: 181986
  derived and/or modified CDS sequence (opt4) from neuraminidase__InfluenzaA__AFG72209

SEQ ID NO: 181990 - RNA, 1410 nt, Artificial Sequence
  derived and/or modified CDS sequence (opt4) from neuraminidase__InfluenzaA__AFG72220
augaaccccaaccagaagaucaucaccaucggcagcgugagccugaccaucgccaccaucugcuuccugaugcagaucgccauccuggugaccaccgugacccugcacuucaagcaguacgagugcaacagcccccccaacaaccaggugaugcugugcgagcccaccaucaucgagagaaacaucaccgagaucgugcaccugaccaacaccaccaucgagaaggagaucugccccaagcuggccgaguacagaaacuggagcaagccccagugcaagaucaccggcuucgcccccuucagcaaggacaacagcaucagacugagcgccggcggcgacaucugggugaccagagagcccuacgugagcugcgaccccggcaagugcuaccaguucgcccugggccagggcaccacccugaacaacagacacagcaacgacaccgugcacgacagaacccccuacagaacccugcugaugaacgagcugggcgugcccuuccaccugggcaccaagcaggugugcaucgccuggagcagcagcagcugccacgacggcaaggccuggcugcacgugugcgugaccggccacgacgagaacgccaccgccagcuucaucuacgacggcagacugguggacagcaucggcagcuggagcaagaacauccugagaacccaggagagcgagugcgugugcaucaacggcaccugcaccguggugaugaccgacggcagcgccagcgagagagccgacaccaagauccuguucaucgaggagggcaagaucgugcacaucagcccccugagcggcagcgcccagcacguggaggagugcagcugcuaccccagauaccccggcgugagaugcgugugcagagacaacuggaagggcagcaacagacccaucguggacaucaacgugaaggacuacagcaucgugagcagcuacgugugcagcggccuggugggcgacacccccagaaagaacgacagcagcagcagcagcuacugcagaaaccccaacaacgagaagggcagccacggcgugaagggcugggccuucgacgacggcaacgacguguggaugggcagaaccaucagcgaggagcugagaagcggcuacgagaccuucaaggugaucggcggcuggagcaagcccaacagcaagcugcagaucaacagacaggugaucguggacagaggcaacagaagcggcuacagcggcaucuucagcguggagggcaagagcugcaucaacagaugcuucuacguggagcugaucagaggcagaaagcaggagaccgaggugugguggaccagcaacagcaucgugguguucugcggcaccagcggcaccuacggcaccggcagcuggcccgacggcgccgacaucaaccugaugcccaucuga

SEQ ID NO: 181991 - RNA, 1410 nt, Artificial Sequence; identical to SEQ ID NO: 181986
  derived and/or modified CDS sequence (opt4) from neuraminidase__InfluenzaA__AFG72231

SEQ ID NO: 181992 - RNA, 1410 nt, Artificial Sequence
  derived and/or modified CDS sequence (opt4) from neuraminidase__InfluenzaA__AFG72297
augaaccccaaccagaagaucaucaccaucggcagcgugagccugaccaucgccaccaucugcuuccugaugcagaucgccauccuggugaccaccgugacccugcacuucaagcaguacgagugcaacagcccccccaacaaccaggugaugcugugcgagcccaccaucaucgagagaaacaucaccgagaucguguaccugaccaacaccaccaucgagagagagaucugccccaagcuggccgaguacagaaacuggagcaagccccagugcaagaucaccggcuucgcccccuucagcaaggacaacagcaucagacugagcgccggcggcgacaucugggugaccagagagcccuacgugagcugcgaccccggcaagugcuaccaguucgcccugggccagggcaccacccugaacaacagacacagcaacgacaccgugcacgagagaacccccuacagaacccugcugaugaacgagcugggcgugcccuuccaccugggcaccaagcaggugugcaucgccuggagcagcagcagcugccacgacggcaaggccuggcugcacgugugcgugaccggccacgacgagaacgccaccgccagcuucaucuacgacggcagacugguggacagcaucggcagcuggagcaagaacauccugagaacccaggagagcgagugcgugugcaucaacggcaccugcaccguggugaugaccgacggcagcgccagcgagagagccgacaccaagauccuguucaucgaggagggcaagaucgugcacaucagcccccugagcggcagcgcccagcacguggaggagugcagcugcuaccccagauaccccggcgugagaugcgugugcagagacaacuggaagggcagcaacagacccaucguggacaucaacgugaaggacuacagcaucgugagcagcuacgugugcagcggccuggugggcgacacccccagaaagaacgacagcagcagcagcagcuacugcagaaaccccaacaacgagaagggcagccacggcgugaagggcugggccuucgacgacggcaacgacguguggaugggcagaaccaucagcgaggagcugagaagcggcuacgagaccuucaaggugaucggcggcuggagcaagcccaacagcaagcugcagaucaacagacaggugaucguggacagaggcaacagaagcggcuacagcggcaucuucagcguggagggcaagagcugcaucaacagaugcuucuacguggagcugaucagaggcagaaagcaggagaccgaggugugguggaccagcaacagcaucgugguguucugcggcaccagcggcaccuacggcaccggcagcuggcccgacggcgccgacaucaaccugaugcccaucuga

SEQ ID NO: 181993 - RNA, 1410 nt, Artificial Sequence
  derived and/or modified CDS sequence (opt4) from neuraminidase__InfluenzaA__AFG72308
augaaccccaaccagaagaucaucaccaucggcagcgugagccugaccaucgccaccaucugcuuccugaugcagaucgccauccuggugaccaccgugacccugcacuucaagcaguacgagugcaacagcccccccagcaaccaggugaugcugugcgagcccaccaucaucgagagaaacaucaccgagaucguguaccugaccaacaccaccaucgagaaggagaucugccccaagcuggccgaguacagaaacuggagcaagccccagugcaagaucaccggcuucgcccccuucagcaaggacaacagcaucagacugagcgccggcggcgacaucugggugaccagagagcccuacgugagcugcgaccccggcaagugcuaccaguucgcccugggccagggcaccacccugaacaacagacacagcaacgacaccgugcacgacagaacccccuacagaacccugcugaugaacgagcugggcgugcccuuccaccugggcaccaagcaggugugcaucgccuggagcagcagcagcugccacgacggcaaggccuggcugcacgugugcgugaccggccacgacgagaacgccaccgccagcuucaucuacgacggcagacugguggacagcaucggcagcuggagcaagaacauccugagaacccaggagagcgagugcgugugcaucaacggcaccugcaccguggugaugaccgacggcagcgccagcgagagagccgacaccaagauccuguucaucgaggagggcaagaucgugcacaucagcccccugagcggcagcgcccagcacguggaggagugcagcugcuaccccagauaccccggcgugagaugcgugugcagagacaacuggaagggcagcaacagacccaucguggacaucaacgugaaggacuacagcaucgugagcagcuacgugugcagcggccuggugggcgacacccccagaaagaacgacagcagcagcagcagcuacugcagaaaccccaacaacgagaagggcagccacggcgugaagggcugggccuucgacgacggcaacgacguguggaugggcagaaccaucagcgaggagcugagaagcggcuacgagaccuucagagugaucggcggcuggagcaagcccaacagcaagcugcagaucaacagacaggugaucguggacagaggcaacagaagcggcuacagcggcaucuucagcguggagggcaagagcugcaucaacagaugcuucuacguggagcugaucagaggcagaaagcaggagaccgaggugugguggaccagcaacagcaucgugguguucugcggcaccagcggcaccuacggcaccggcagcuggcccgacggcgccgacaucaaccugaugcccaucuga

SEQ ID NO: 181994 - RNA, 1410 nt, Artificial Sequence; identical to SEQ ID NO: 175245
  derived and/or modified CDS sequence (opt4) from neuraminidase__InfluenzaA__AFG72320

SEQ ID NO: 181995 - RNA, 1410 nt, Artificial Sequence
  derived and/or modified CDS sequence (opt4) from neuraminidase__InfluenzaA__AFG72331
augaaccccaaccagaagaucaucaccaucggcagcgugagccugaccguggccaccaucugcuuccugaugcagaucgccauccuggugaccaccgugacccugcacuucaagcaguacgagugcaacagcccccccaacaaccaggugaugcugugcgagcccaccaucaucgagagaaacaucaccgagaucguguaccugaccaacaccaccaucgagaaggagaucugccccaagcuggccgaguacagaaacuggagcaagccccagugcaagaucaccggcuucgcccccuucagcaaggacaacagcaucagacugagcgccggcggcgacaucugggugaccagagagcccuacgugagcugcgaccccggcaagugcuaccaguucgcccugggccagggcaccacccugaacaacagacacagcaacgacaccgugcacgacagaacccccuacagaacccugcugaugaacgagcugggcgugcccuuccaccugggcaccaagcaggugugcaucgccuggagcagcagcagcugccacgacggcaaggccuggcugcacgugugcgugaccggccacgacgagaacgccaccgccagcuucaucuacgacggcagacugguggacagcaucggcagcuggagcaagaacauccugagaacccaggagagcgagugcgugugcaucaacggcaccugcaccguggugaugaccgacggcagcgccagcgagagagccgacaccaagauccuguucaucgaggagggcaagaucgugcacaucagcccccugagcggcagcgcccagcacguggaggagugcagcugcuaccccagauaccccggcgugagaugcgugugcagagacaacuggaagggcagcaacagacccaucguggacaucaacgugaaggacuacagcaucgugagcagcuacgugugcagcggccuggugggcgacacccccagaaagaacgacagcagcagcagcagcuacugcagaaaccccaacaacgagaagggcagccacggcgugaagggcugggccuucgacgacggcaacgacguguggaugggcagaaccaucagcgaggagcugagaagcggcuacgagaccuucaaggugaucggcggcuggagcaagcccaacagcaagcugcagaucaacagacaggugaucguggacagaggcaacagaagcggcuacagcggcaucuucagcguggagggcaagagcugcaucaacagaugcuucuacguggagcugaucagaggcagaaagcaggagaccgaggugugguggaccagcaacagcaucgugguguucugcggcaccagcggcaccuacggcaccggcagcuggcccgacggcgccgacaucaaccugaugcccaucuga

SEQ ID NO: 181996 - RNA, 1410 nt, Artificial Sequence
  derived and/or modified CDS sequence (opt4) from neuraminidase__InfluenzaA__AFG72353
augaaccccaaccagaagaucaucaccaucggcagcgugagccugaccaucgccaccaucugcuuccugaugcagaucgccauccuggugaccaccgugacccugcacuucaagcaguacgagugcaacagcccccccaacaaccaggugaugcugugcgagcccaccaucaucgagagaaacaucaccgagaucguguaccugaccaacaccaccaucgagaaggagaucugccccaagcuggccgaguacagaaacuggagcaagccccagugcaagaucaccggcuucgcccccuucagcaaggacaacagcaucagacugagcgccggcggcgacaucugggugaccagagagcccuacgugagcugcgacagcggcaagugcuaccaguucgcccugggccagggcaccacccugaacaacagacacagcaacgacaccgugcacgacagaacccccuacagaacccugcugaugaacgagcugggcgugcccuuccaccugggcaccaagcaggugugcaucgccuggagcagcagcagcugccacgacggcaaggccuggcugcacgugugcgugaccggccacgacgagaacgccaccgccagcuucaucuacgacggcagacugguggacagcaucggcagcuggagcaagaacauccugagaacccaggagagcgagugcgugugcaucaacggcaccugcaccguggugaugaccgacggcagcgccagcgagagagccgacaccaagauccuguucaucgaggagggcaagaucgugcacaucagcccccugagcggcagcgcccagcacguggaggagugcagcugcuaccccagauaccccggcgugagaugcgugugcagagacaacuggaagggcagcaacagacccaucguggacaucaacgugaaggacuacagcaucgugagcagcuacgugugcagcggccuggugggcgacacccccagaaagaacgacagcagcagcagcagcuacugcagaaaccccaacaacgagaagggcagccacggcgugaagggcugggccuucgacgacggcaacgacguguggaugggcagaaccaucagcgaggagcugagaagcggcuacgagaccuucaaggugaucggcggcuggagcaagcccaacagcaagcugcagaucaacagacaggugaucguggacagaggcaacagaagcggcuacagcggcaucuucagcguggagggcaagagcugcaucaacagaugcuucuacguggagcugaucagaggcagaaagcaggagaccgaggugugguggaccagcaacagcaucgugguguucugcggcaccagcggcaccuacggcaccggcagcuggcccgacggcgccgacaucaaccugaugcccaucuga

SEQ ID NO: 181997 - RNA, 1410 nt, Artificial Sequence; identical to SEQ ID NO: 175245
  derived and/or modified CDS sequence (opt4) from neuraminidase__InfluenzaA__AFG72364

SEQ ID NO: 181998 - RNA, 1410 nt, Artificial Sequence
  derived and/or modified CDS sequence (opt4) from neuraminidase__InfluenzaA__AFG72430
augaaccccaaccagaagaucaucaccaucggcagcgugagccugaccaucaccaccaucugcuuccugaugcagaucgccauccuggugaucaccgugacccugcacuucaagcagugcgagugcaacagcccccccaacaaccaggugaugcugugcgagcccaccaucaucgagagaaacaucaccgagaucguguaccugaccaacaccaccaucgagaaggagaucugccccaagcuggccgaguacagaaacuggagcaagccccagugcaagaucaccggcuucgcccccuucagcaaggacaacagcaucagacugagcgccggcggcgacaucugggugaccagagagcccuacgugagcugcgaccccggcaagugcuaccaguucgcccugggccagggcaccacccugaacaacagacacagcaacgacaccgugcacgacagaacccccuacagaacccugcugaugaacgagcugggcgugcccuuccaccugggcaccaagcaggugugcaucgccuggagcagcagcagcugccacgacggcaaggccuggcugcacgugugcgugaccggccacaacgagaacgccaccgccagcuucaucuacgacggcagacugguggacagcaucggcagcuggagcaagaacauccugagaacccaggagagcgagugcgugugcaucaacggcaccugcaccguggugaugaccgacggcagcgccagcggcagagccgacaccaagauccuguucaucgaggagggcaagaucgugcacaucagccagcugagcggcagcgcccagcacguggaggagugcagcugcuaccccagauaccccggcgugagaugcgugugcagagacaacuggaagggcagcaacagacccaucguggacaucaacgugaaggacuacagcaucgugagcagcuacgugugcagcggccuggugggcgacacccccagaaagaacgacagcagcagcagcagcaacugccuggaccccaacaacgaggagggcggccacggcgugaagggcugggccuucgacgacggcaacgacguguggaugggcagaaccaucagcgagaagcugagaagcggcuacgagaccuucaaggugaucggcggcuggagcaagcccaacagcaagcugcagaucaacagacaggugaucguggacagaggcaacagaagcggcuacagcggcaucuucagcguggagggcaagagcugcaucaacagaugcuucuacguggagcugaucagaggcagaaagcaggagaccgaggugugguggaccagcaacagcaucgugguguucugcggcaccagcggcaccuacggcaccggcagcuggcccgacggcgccgacaucaaccugaugcccaucuga

SEQ ID NO: 181999 - RNA, 1410 nt, Artificial Sequence; identical to SEQ ID NO: 175245
  derived and/or modified CDS sequence (opt4) from neuraminidase__InfluenzaA__AFG72452

SEQ ID NO: 182000 - RNA, 1410 nt, Artificial Sequence
  derived and/or modified CDS sequence (opt4) from neuraminidase__InfluenzaA__AFG72474
augaaccccaaccagaagaucaucaccaucggcagcgugagccugaccaucgccaccaucugcuuccugaugcagaucgccauccuggugaccaccgugacccugcacuucaagcaguacgagugcaacagcccccccaacaaccaggugaugcugugcgagcccaccaucaucgagagaaacaucaccgagaucguguaccugaccaacaccaccaucgagaaggagaucugccccaagcuggccgaguacagaaacuggagcaagccccagugcgagaucaccggcuucgcccccuucagcaaggacaacagcaucagacugagcgccggcggcgacaucugggugaccagagagcccuacgugagcugcgaccccggcaagugcuaccaguucgcccugggccagggcaccacccugaacaacagacacagcaacgacaccgugcacgacagaacccccuacagaacccugcugaugaacgagcugggcgugcccuuccaccugggcaccaagcaggugugcaucgccuggagcagcagcagcugccacgacggcaaggccuggcugcacgugugcgugaccggccacgacgagaacgccaccgccagcuucaucuacgacggcagacugguggacagcaucggcagcuggagcaagaacauccugagaacccaggagagcgagugcgugugcaucaacggcaccugcaccguggugaugaccgacggcagcgccagcgagagagccgacaccaagauccuguucaucgaggagggcaagaucgugcacaucagcccccugagcggcagcgcccagcacguggaggagugcagcugcuaccccagauaccccggcgugagaugcgugugcagagacaacuggaagggcagcaacagacccaucguggacaucaacgugaaggacuacagcaucgugagcagcuacgugugcagcggccuggugggcgacacccccagaaagaacgacagcagcagcagcagcuacugcagaaaccccaacaacgagaagggcagccacggcgugaagggcugggccuucgacgacggcaacgacguguggaugggcagaaccaucagcgaggagcugagaagcggcuacgagaccuucaaggugaucggcggcuggagcaagcccaacagcaagcugcagaucaacagacaggugaucguggacagaggcaacagaagcggcuacagcggcaucuucagcguggagggcaagagcugcaucaacagaugcuucuacguggagcugaucagaggcagaaagcaggagaccgaggugugguggaccagcaacagcaucgugguguucugcggcaccagcggcaccuacggcaccggcagcuggcccgacggcgccgacaucaaccugaugcccaucuga

SEQ ID NO: 182001 - RNA, 1410 nt, Artificial Sequence
  derived and/or modified CDS sequence (opt4) from neuraminidase__InfluenzaA__AFG72485
augaaccccaaccagaagaucaucaccaucggcagcgugagccugaccaucgccaccaucugcuuccugaugcagaucgccauccuggugaccaccgugacccugcacuucaagcagcacgagugcaacagcccccccaacaaccaggugaugcugugcgagcccaccaucaucgagagaaacaucaccgagaucguguaccugaccaacaccaccaucgagaaggagaucugccccaagcuggccgaguacagaaacuggagcaagccccagugcaagaucaccggcuucgcccccuucagcaaggacaacagcaucagacugagcgccggcggcgacaucugggugaccagagagcccuacgugagcugcgaccccggcaagugcuaccaguucgcccugggccagggcaccacccugaacaacagacacagcaacgacaccgugcacgacagaacccccuacagaacccugcugaugaacgagcugggcgugcccuuccaccugggcaccaagcaggugugcaucgccuggagcagcagcagcugccacgacggcaaggccuggcugcacgugugcgugaccggccacgacgagaacgccaccgccagcuucaucuacgacggcagacugguggacagcaucggcagcuggagcaagaacauccugagaacccaggagagcgagugcgugugcaucaacggcaccugcaccguggugaugaccgacggcagcgccagcgagagagccgacaccaagauccuguucaucgaggagggcaagaucgugcacaucagcccccugagcggcagcgcccagcacguggaggagugcagcugcuaccccagauaccccggcgugagaugcgugugcagagacaacuggaagggcagcaacagacccaucguggacaucaacgugaaggacuacagcaucgugagcagcuacgugugcagcggccuggugggcgacacccccagaaagaacgacagcagcagcagcagcuacugcagaaaccccaacaacgagaagggcagccacggcgugaagggcugggccuucgacgacggcaacgacguguggaugggcagaaccaucagcgaggagcugagaagcggcuacgagaccuucaaggugaucggcggcuggagcaagcccaacagcaagcugcagaucaacagacaggugaucguggacagaggcaacagaagcggcuacagcggcaucuucagcguggagggcaagagcugcaucaacagaugcuucuacguggagcugaucagaggcagaaagcaggagaccgaggugugguggaccagcaacagcaucgugguguucugcggcaccagcggcaccuacggcaccggcagcuggcccgacggcgccgacaucaaccugaugcccaucuga

SEQ ID NO: 182002 - RNA, 1410 nt, Artificial Sequence; identical to SEQ ID NO: 175161
  derived and/or modified CDS sequence (opt4) from neuraminidase__InfluenzaA__AFG72507

SEQ ID NO: 182003 - RNA, 1410 nt, Artificial Sequence
  derived and/or modified CDS sequence (opt4) from neuraminidase__InfluenzaA__AFG72529
augaaccccaaccagaagaucaucaccaucggcagcgugagccugaccaucgccaccaucugcuuccugaugcagaucgccauccuggugaccaccgugacccugcacuucaagcaguacgagugcaacagcccccccaacaaccaggugaugcugugcgagcccaccaucaucgagagaaacaucaccgagaucguguaccugaccaacaccaccaucgagaaggagaucugccccaagcuggccgaguacagaaacuggagcaagccccagugcaagaucaccggcuucgcccccuucagcaaggacaacagcaucagacugagcgccggcggcgacaucugggugaccagagagcccuacgugagcugcgaccccggcaagugcuaccaguucgcccugggccagggcaccacccugaacaacagacacagcaacgacaccgugcacgacagaacccccuacagaacccugcugaugaacgagcugggcgugcccuuccaccugggcaccaagcaggugugcaucgccuggagcagcagcagcugccacgacggcaaggccuggcugcacgugugcgugaccggccacgacgagaacgccaccgccagcuucaucuacgacggcagacugguggacagcaucggcagcuggagcaagaagauccugagaacccaggagagcgagugcgugugcaucaacggcaccugcaccguggugaugaccgacggcagcgccagcgagagagccgacaccaagauccuguucaucgaggagggcaagaucgugcacaucagcccccugagcggcagcgcccagcacguggaggagugcagcugcuaccccagauaccccggcgugagaugcgugugcagagacaacuggaagggcagcaacagacccaucguggacaucaacgugaaggacuacagcaucgugagcagcuacgugugcagcggccuggugggcgacacccccagaaagaacgacagcagcagcagcagcuacugccagaaccccaacaacgagaacggcagccacggcgugaagggcugggccuucgacgacggcaacgacguguggaugggcagaaccaucagcgaggagcugagaagcggcuacgagaccuucaaggugaucggcggcuggagcaagcccaacagcaagcugcagaucaacagacaggugaucguggacagaggcaacagaagcggcuacagcggcaucuucagcguggagggcaagagcugcaucaacagaugcuucuacguggagcugaucagaggcagaaagcaggagaccgaggugugguggaccagcaacagcaucgugguguucugcggcaccagcggcaccuacggcaccggcagcuggcccgacggcgccgacaucaaccugaugcccaucuga

SEQ ID NO: 182004 - RNA, 1410 nt, Artificial Sequence
  derived and/or modified CDS sequence (opt4) from neuraminidase__InfluenzaA__AFG72540
augaaccccaaccagaagaucaucaccaucggcagcgugagccugaccaucgccaccaucugcuuccugaugcagaucgccauccuggugaccaccgugacccugcacuucaagcaguacgagugcaaccccccccccaacaaccaggugaugcugugcgagcccaccaucaucgagagaaacaucaccgagaucguguaccugaccaacaccaccaucaagaaggagaucugccccaagcuggccgaguacagaaacuggagcaagccccagugcaagaucaccggcuucgcccccuucagcaaggacaacagcaucagacugagcgccggcggcgacaucugggugaccagagagcccuacgugagcugcgaccccggcaagugcuaccaguucgcccugggccagggcaccacccugaacaacagacacagcaacgacaccgugcacgacagaacccccuacagaacccugcugaugaacgagcugggcgugcccuuccaccugggcaccaagcaggugugcaucgccuggagcagcagcagcugccacgacggcaaggccuggcugcacgugugcgugaccggccacgacgagaacgccaccgccagcuucaucuacgacggcagacugguggacagcaucggcagcuggagcaagaacauccugagaacccaggagagcgagugcgugugcaucaacggcaccugcaccguggugaugaccgacggcagcgccagcgagagagccgacaccaagauccuguucaucgaggagggcaagaucgugcacaucagcccccugagcggcagcgcccagcacguggaggagugcagcugcuaccccagauaccccggcgugagaugcgugugcagagacaacuggaagggcagcaacagacccaucguggacaucaacgugaaggacuacagcaucgugagcagcuacgugugcagcggccuggugggcgacacccccagaaagaacgacagcagcagcagcagcuacugcuggaaccccaacaacgagaagggcggccacggcgugaagggcugggccuucgacgacggcaacgacguguggaugggcagaaccaucagcgaggagcugagaagcggcuacgagaccuucaaggugaucggcggcuggagcaagcccaacagcaagcugcagaucaacagacaggugaucguggacagaggcaacagaagcggcuacagcggcaucuucagcguggagggcaagagcugcaucaacagaugcuucuacguggagcugaucagaggcagaaagcaggagaccgaggugugguggaccagcaacagcaucgugguguucugcggcaccagcggcaccuacggcaccggcagcuggcccgacggcgccgacaucaaccugaugcccaucuga

SEQ ID NO: 182005 - RNA, 1410 nt, Artificial Sequence
  derived and/or modified CDS sequence (opt4) from neuraminidase__InfluenzaA__AFG72562
augaaccccaaccagaagaucaucaccaucggcagcgugagccugaccaucgccaccaucugcuuccugaugcagaucgccauccuggugaccaccgugacccugcacuucaagcaguacgagugcaacagcccccccaacaaccaggugaugcugugcgagcccaccaucaucgagagaaacaucaccgagaucguguaccugaccaacaccaccaucgagaaggagaucugccccaagcuggccgaguacagaaacuggagcaagccccagugcaagaucaccggcuucgcccccuucagcaaggacaacagcaucagacugagcgccggcggcgacaucugggugaccagagagcccuacgugagcugcgaccccggcaagugcuaccaguucgcccugggccagggcaccacccugaacaacagacacagcaacgacaccgugcacgacagaacccccuacagaacccugcugaugaacgagcugggcgugcccuuccaccugggcaccaagcaggugugcaucgccuggagcagcagcagcugccacgacggcaaggccuggcugcacgugugcgugaccggccacgacgagaacgccaccgccagcuucaucuacgacggcagacugguggacagcaucggcagcuggagcaagaacauccugagaacccaggagagcgagugcgugugcaucaacggcaccugcaccguggugaugaccgacggcagcgccagcgagagagccgacaccaagauccuguucaucgaggagggcaagaucgugcacaucagcccccugagcggcagcgcccagcacguggaggagugcagcugcuaccccagauaccccggcgugagaugcgugugcagagacaacuggaagggcagcaacagacccaucguggacaucaacgugaaggacuacagcaucgugagcagcuacgugugcagcggccuggugggcgacacccccagaaagaacgacagcagcagcagcagcuacugcuggaaccccaacaacgagaagggcggccacggcgugaagggcugggccuucgacgacggcaacgacguguggaugggcagaaccaucagcgaggagcugagaagcggcuacgagaccuucaaggugaucggcggcuggagcaagcccaacagcaagcugcagaucaacagacaggugaucguggacagaggcaacagaagcggcuacagcggcaucuucagcguggagggcaagagcugcaucaacagaugcuucuacguggagcugaucagaggcagaaagcaggagaccgaggugugguggaccagcaacagcaucgugguguucugcggcaccagcggcaccuacggcaccggcagcuggcccgacggcgccgacaucaaccugaugcccaucuga

SEQ ID NO: 182006 - RNA, 1410 nt, Artificial Sequence
  derived and/or modified CDS sequence (opt4) from neuraminidase__InfluenzaA__AFG72584
augaaccccaaccagaagaucaucaccaucggcagcgugagccugaccaucgccaccaucugcuuccugaugcagaucgccauccuggugaccaccgugacccugcacuucaagcaguacgagugcaacagcccccccaacaaccaggugaugcugugcgagcccaccaucaucgagagaaacaucaccgagaucguguaccugaccaacaccaccaucgagaaggaggugugccccaagcuggccgaguacagaaacuggagcaagccccagugcaagaucaccggcuucgcccccuucagcaaggacaacagcaucagacugagcgccggcggcgacaucugggugaccagagagcccuacgugagcugcgaccccggcaagugcuaccaguucgcccugggccagggcaccacccugaacaacaagcacagcaacgacaccgugcacgacagaacccccuacagaacccugcugaugaacgagcugggcgugcccuuccaccugggcaccaagcaggugugcaucgccuggagcagcagcagcugccacgacggcaaggccuggcugcacgugugcgugaccggccacgacgagaacgccaccgccagcuucaucuacgacggcagacugguggacagcaucggcagcuggagcaagaacauccugagaacccaggagagcgagugcgugugcaucaacggcaccugcaccguggugaugaccgacggcagcgccagcgagaaggccgacaccaagauccuguucaucgaggagggcaagaucgugcacaucagcccccugagcggcagcgcccagcacguggaggagugcagcugcuaccccagauaccccggcgugagaugcgugugcagagacaacuggaagggcagcaacagacccaucguggacaucaacgugaaggacuacagcaucgugagcagcuacgugugcagcggccuggugggcgacacccccagaaagaacgacagcagcagcagcagcuacugcuggaaccccaacaacgagaagggcggccacggcgugaagggcugggccuucgacgacggcaacgacguguggaugggcagaaccaucagcgaggagcugagaagcggcuacgagaccuucaaggugaucggcggcuggagcaagcccaacagcaagcugcagaucaacagacaggugaucguggacagaggcaacagaagcggcuacagcggcaucuucagcguggagggcaagagcugcaucaacagaugcuucuacguggagcugaucagaggcagaaagcaggagaccgaggugugguggaccagcaacagcaucgugguguucugcggcaccagcggcaccuacggcaccggcagcuggcccgacggcgccgacaucaaccugaugcccaucuga

SEQ ID NO: 182007 - RNA, 1410 nt, Artificial Sequence
  derived and/or modified CDS sequence (opt4) from neuraminidase__InfluenzaA__AFG72606
augaaccccaaccagaagaucaucaccaucggcagcgugagccugaccaucgccaccaucugcuuccugaugcagaucgccauccuggugaccaccgugacccugcacuucaagcaguacgagugcaacagcccccccaacaaccaggugaugcugugcgagcccaccaucaucgagagaaacaucaccgagaucguguaccugaccaacaccaccaucgagaaggagaucugccccaagcuggccgaguacagaaacuggagcaagccccagugcaagaucaccggcuucgcccccuucagcaaggacaacagcaucagacugagcgccggcggcgacaucugggugaccagagagcccuacgugagcugcgaccccggcaagugcuaccaguucgcccugggccagggcaccacccugaacaacagacacagcaacgacaccgugcacgacagaacccccuacagaacccugcugaugaacgagcugggcgugcccuuccaccugggcaccaagcaggugugcaucgccuggagcagcagcagcugccacgacggcaaggccuggcugcacgugugcgugaccggccacgacgagaacgccaccgccagcuucaucuacgacggcagacugguggacagcaucggcagcuggagcaagaacauccugagaacccaggagagcgagugcgugugcaucaacggcaccugcaccguggugaugaccgacggcagcgccagcgagagagccgacaccaagauccuguucaucgaggagggcaagaucgugcacaucagcccccugagcggcagcgcccagcacguggaggagugcagcugcuaccccagauaccccggcgugagaugcgugugcagagacaacuggaagggcagcaacagacccaucguggacaucaacgugaaggaccacagcaucgugagcagcuacgugugcagcggccuggugggcgacacccccagaaagaacgacagcagcagcagcagcuacugccugaaccccaacaacgaggagggcggccacggcgugaagggcugggccuucgacgacggcaacgacguguggaugggcagaaccaucagcgagaagcugagaagcggcuacgagaccuucaaggugaucggcggcuggagcaagcccaacagcaagcugcagaucaacagacaggugaucguggacagaggcaacagaagcggcuacagcggcaucuucagcguggagggcaagagcugcgugaacagaugcuucuacguggagcugaucagaggcagaaagcaggagaccgaggugugguggaccagcaacagcaucgugguguucugcggcaccagcggcaccuacggcaccggcagcuggcccgacggcgccgacaucaaccugaugcccaucuga

SEQ ID NO: 182008 - RNA, 1410 nt, Artificial Sequence
  derived and/or modified CDS sequence (opt4) from neuraminidase__InfluenzaA__AFG72617
augaaccccaaccagaagaucaucaccaucggcagcgugagccugaccaucaccaccaucugcuuccugaugcagaucgccauccuggugaucaccgugacccugcacuucaagcagugcgagugcaacagcccccccaacaaccaggugaugcugugcgagcccaccaucaucgagagaaacaucaccgagaucguguaccugaccaacaccaccaucgagaaggagaucugccccaagcuggccgaguacagaaacuggagcaagccccagugcaagaucaccggcuucgcccccuucagcaaggacaacagcaucagacugagcgccggcggcgacaucugggugaccagagagcccuacgugagcugcgaccccggcaagugcuaccaguucgcccugggccagggcaccacccugaacaacagacacagcaacgacaccgugcacgacagaacccccuacagaacccugcugaugaacgagcugggcgugcccuuccaccugggcaccaagcaggugugcaucgccuggagcagcagcagcugccacgacggcaaggccuggcugcacgugugcgugaccggccacaacgagaacgccaccgccagcuucaucuacgacggcagacugguggacagcaucggcagcuggagcaagaacauccugagaacccaggagagcgagugcgugugcaucaacggcaccugcaccguggugaugaccgacggcagcgccagcggcagagccgacaccaagauccuguucaucgaggagggcaagaucgugcacaucagcccccugagcggcagcgcccagcacguggaggagugcagcugcuaccccagauaccccggcgugagaugcgugugcagagacaacuggaagggcagcaacagacccaucguggacaucaacgugaaggacuacagcaucgugagcagcuacgugugcagcggccuggugggcgacacccccagaaagaacgacagcagcagcagcagcuacugccugaaccccaacaacgaggagggcggccacggcgugaagggcugggccuucgacgacggcaacgacguguggaugggcagaaccaucagcgagaagcugagaagcggcuacgagaccuucaaggugaucggcggcuggagcaagcccaacagcaagcugcagaucaacagacaggugaucguggacagaggcaacagaagcggcuacagcggcaucuucagcguggagggcaagagcugcaucaacagaugcuucuacguggagcugaucagaggcagaaagcaggagaccgaggugugguggaccagcaacagcaucgugguguucugcggcaccagcggcaccuacggcaccggcagcuggcccgacggcgccgacaucaaccugaugcccaucuga

SEQ ID NO: 182009 - RNA, 1410 nt, Artificial Sequence
  derived and/or modified CDS sequence (opt4) from neuraminidase__InfluenzaA__AFG72628
augaaccccaaccagaagaucaucaccaucggcagcgugagccugaccaucgccaccaucugcuuccugaugcagaucgccauccuggugaccaccgugacccugcacuucaagcaguacgagugcaacagcccccccaacaaccaggugaugcugugcgagcccaccaucaucgagagaaacaucaccgagaucguguaccugaccaacaccaccaucgagaaggagaucugccccaagcuggccgaguacagaaacuggagcaagccccagugcaagaucaccggcuucgcccccuucagcaaggacaacagcaucagacugagcgccggcggcgacaucugggugaccagagagcccuacgugagcugcgaccccgacaagugcuaccaguucgcccugggccagggcaccacccugaacaacagacacagcaacgacaccgugcacgacagaacccccuacagaacccugcugaugaacgagcugggcgugcccuuccaccugggcaccaagcaggugugcaucgccuggagcagcagcagcugccacgacggcaaggccuggcugcacgugugcgugaccggccacgacgagaacgccaccgccagcuucaucuacgacggcagacugguggacagcaucggcagcuggagcaagaagauccugagaacccaggagagcgagugcgugugcaucaacggcaccugcaccguggugaugaccgacggcagcgccagcggcagagccgacaccaagauccuguucaucgaggagggcaagaucgugcacaucagcccccugagcggcagcgcccagcacguggaggagugcagcugcuaccccagauacagcggcgugagaugcgugugcagagacaacuggaagggcagcaacagacccaucguggacaucaacgugaaggacuacagcaucgugagcagcuacgugugcagcggccuggugggcgacacccccagaaagaacgacagcagcagcagcagccacugccugaaccccaacaacgaggagggcggccacggcgugaagggcugggccuucgacgacggcaacgacguguggaugggcagaaccaucagcgagaagcugagaagcggcuacgagaccuucaaggugaucggcggcuggagcaagcccaacagcaagcugcagaucaacagacaggugaucguggacagaggcaacagaagcggcuacagcggcaucuucagcguggagggcaagagcugcaucaacagaugcuucuacguggagcugaucagaggcagaaagcaggagaccgaggugugguggaccagcaacagcaucgugguguucugcggcaccagcggcaccuacggcaccggcagcuggcccgacggcgccgacaucaaccugaugcccaucuga

SEQ ID NO: 182010 - RNA, 1410 nt, Artificial Sequence; identical to SEQ ID NO: 175040
  derived and/or modified CDS sequence (opt4) from neuraminidase__InfluenzaA__AFG72639

SEQ ID NO: 182011 - RNA, 1410 nt, Artificial Sequence
  derived and/or modified CDS sequence (opt4) from neuraminidase__InfluenzaA__AFG72650
augaaccccaaccagaagaucaucaccaucggcagcgugagccugaccaucgccaccaucugcuuccugaugcagaucgccauccuggugaccaccgugacccugcacuucaagcaguacgagugcaacagcccccccaacaaccaggugaugcugugcgagcccaccaucaucgagagaaacaucaccgagaucguguaccugaccaacaccaccaucgagaaggagaucugccccaagcuggccgaguacagaaacuggagcaagccccagugcaagaucaccggcuucgcccccuucagcaaggacaacagcaucagacugagcgccggcggcgacaucugggugaccagagagcccuacgugagcugcgaccccggcaagugcuaccaguucgcccugggccagggcaccacccugaacaacagacacagcaacgacaccgugcacgacagaacccccuacagaacccugcugaugaacgagcugggcgugcccuuccaccugggcaccaagcaggugugcaucgccuggagcagcagcagcugccacgacggcaaggccuggcugcacgugugcgugaccggccacgacgagaacgccaccgccagcuucaucuacgacggcagacugguggacagcaucggcagcuggagcaagaacauccugagaacccaggagagcgagugcgugugcaucaacggcaccugcaccguggugaugaccgacggcagcgccagcgagagagccgacaccaagauccuguucaucgaggagggcaagaucgugcacaucagcccccugagcggcagcgcccagcacguggaggagugcagcugcuaccccagauaccccggcgugagaugcgugugcagagacaacuggaagggcagcaacagacccaucguggacaucaacgugaaggacuacagcaucgugagcagcuacgugugcagcggccuggugggcgacacccccagaaagaacgacagcagcagcagcagcuacugccugaaccccaacaacgaggagggcggccacggcgugaagggcugggccuucgacgacggcaacgacguguggaugggcagaaccaucagcgagaagcugagaagcggcuacgagaccuucaaggugaucggcggcuggagcaagcccaacagcaagcugcagaucaacagacaggugaucguggacagaggcaacagaagcggcuacagcggcaucuucagcguggagggcaagagcugcgugaacagaugcuucuacguggagcugaucagaggcagaaagcaggagaccgaggugugguggaccagcaacagcaucgugguguucugcggcaccagcggcaccuacggcaccggcagcuggcccgacggcgccgacaucaaccugaugcccaucuga

SEQ ID NO: 182012 - RNA, 1410 nt, Artificial Sequence; identical to SEQ ID NO: 182009
  derived and/or modified CDS sequence (opt4) from neuraminidase__InfluenzaA__AFG72672

SEQ ID NO: 182013 - RNA, 1407 nt, Artificial Sequence
  derived and/or modified CDS sequence (opt4) from neuraminidase__InfluenzaA__AFG72683
augaaccccaaccagaagaucaucaccaucggcagcgugagccugaccaucgccaccaucugcuuccugaugcagaucgccauccuggugaucaccgugacccugcacuucaagcaguacgagugcaacagcccccccaacaaccaggugaugcugugcgagcccaccaucaucgagagaaacaucaccgagaucguguaccugaccaacaccaccaucgagaaggagaucugccccaagcuggccgaguacagaaacuggagcaagccccagugcaagaucaccggcuucgcccccuucagcaaggacaacagcaucagacugagcgccggcggcgacaucugggugaccagagagcccuacgugagcugcgaccccggcaagugcuaccaguucgcccugggccagggcaccacccugaacaacagacacagcaacgaggugcacgacagaacccccuacagaacccugcugaugaacgagcugggcgugcccuuccaccugggcaccaagcaggugugcaucgccuggagcagcagcagcugccacgacggcaaggccuggcugcacgugugcgugaccggccacaacgagaacgccaccgccagcuucaucuacgacggcagacugguggacagcaucggcagcuggagcaagaacauccugagaacccaggagagcgagugcgugugcaucaacggcaccugcaccguggugaugaccgacggcagcgccagcggcagagccgacaccaagauccuguucaucgaggagggcaagaucgugcacaucagcccccugagcggcagcgcccagcacguggaggagugcagcugcuaccccagauaccccggcgugagaugcgugugcagagacaacuggaagggcagcaacagacccaucguggacaucaacgugaaggacuacagcaucgugagcagcuacgugugcagcggccuggugggcgacacccccagaaagaacgacagcagcagcagcagccacugccugaaccccaacaacgaggagggcggccacggcgugaagggcugggccuucgacgacggcaacgacguguggaugggcagaaccaucagcgagaagcugagaagcggcuacgagaccuucaaggugaucggcggcuggagcaagcccaacagcaagcugcagaucaacagacaggugaucguggacagaggcaacagaagcggcuacagcggcaucuucagcguggagggcaagagcugcaucaacagaugcuucuacguggagcugaucagaggcagaaagcaggagaccgaggugugguggaccagcaacagcaucgugguguucugcggcaccagcggcaccuacggcaccggcagcuggcccgacggcgccgacaucaaccugaugcccaucuga

SEQ ID NO: 182014 - RNA, 1410 nt, Artificial Sequence
  derived and/or modified CDS sequence (opt4) from neuraminidase__InfluenzaA__AFG72705
augaaccccaaccagaagaucaucaccaucggcagcgugagccugaccaucgccaccaucugcuuccugaugcagaucgccauccuggugaccaccgugacccugcacuucaagcaguacgagugcaacagcccccccaacaaccaggugaugcugugcgagcccaccaucaucgagagaaacaucaccgagaucguguaccugaccaacaccaccaucgagaaggagaucugccccaagcuggccgaguacagaaacuggagcaagccccagugcaagaucaccggcuucgcccccuucagcaaggacaacagcaucagacugagcgccggcggcgacaucugggugaccagagagcccuacgugagcugcgaccccgacaagugcuaccaguucgcccugggccagggcaccacccugaacaacagacacagcaacgacaccgugcacgacagaacccccuacagaacccugcugaugaacgagcugggcgugcccuuccaccugggcaccaagcaggugugcaucgccuggagcagcagcagcugccacgacggcaaggccuggcugcacgugugcgugaccggccacgacgagaacgccaccgccagcuucaucuacgacggcagacugguggacagcaucggcagcuggagcaagaagauccugagaacccaggagagcgagugcgugugcaucaacggcaccugcaccguggugaugaccgacggcagcgccagcggcagagccgacaccaagauccuguucaucgaggagggcaagaucgugcacaucagccagcugagcggcagcgcccagcacguggaggagugcagcugcuaccccagauaccccggcgugagaugcgugugcagagacaacuggaagggcagcaacagacccaucguggacaucaacgugaaggaccacagcaucgugagcagcuacgugugcagcggccuggugggcgacacccccagaaagaacgacagcagcagcagcagccacugccugaaccccaacaacgaggagggcggccacggcgugaagggcugggccuucgacgacggcaacgacguguggaugggcagaaccaucagcgagaagcugagaagcggcuacgagaccuucaaggugaucgagggcuggagcaagcccaacagcaagcugcagaucaacagacaggugaucguggacagaggcaacagaagcggcuacagcggcaucuucagcguggagggcaagagcugcaucaacagaugcuucuacguggagcugaucagaggcagaaagcaggagaccgaggugugguggaccagcaacagcaucgugguguucugcggcaccagcggcaccuacggcaccggcagcuggcccgacggcgccgacaucaaccugaugcccaucuga

SEQ ID NO: 182015 - RNA, 1410 nt, Artificial Sequence
  derived and/or modified CDS sequence (opt4) from neuraminidase__InfluenzaA__AFG72716
augaaccccaaccagaagaucaucaccaucggcagcgugagccugaccaucaccaccaucugcuuccugaugcagaucgccauccuggugaucaccgugacccugcacuucaagcagugcgagugcaacagcccccccaacaaccaggugaugcugugcgagcccaccaucaucgagagaaacaucaccgagaucguguaccugaccaacaccaccaucgagaaggagaucugccccaagcuggccgaguacagaaacuggagcaagccccagugcaagaucaccggcuucgcccccuucagcaaggacaacagcaucagacugagcgccggcggcgacaucugggugaccagagagcccuacgugagcugcgaccccggcaagugcuaccaguucgcccugggccagggcaccacccugaacaacagacacagcaacgacaccgugcacgacagaacccccuacagaacccugcugaugaacgagcugggcgugcccuuccaccugggcaccaagcaggugugcaucgccuggagcagcagcagcugccacgacggcaaggccuggcugcacgugugcgugaccggccacaacgagaacgccaccgccagcuucaucuacgacggcagacugguggacagcaucggcagcuggagcaagaacauccugagaacccaggagagcgagugcgugugcaucaacggcaccugcaccguggugaugaccgacggcagcgccagcggcagagccgacaccaagauccuguucaucgaggagggcaagaucgugcacaucagcccccugagcggcagcgcccagcacguggaggagugcagcugcuaccccagauaccccggcgugagaugcgugugcagagacaacuggaagggcagcaacagacccaucguggacaucaacgugaaggacuacagcaucgugagcagcuacgugugcagcggccuggugggcgacacccccagaaagaacgacagcagcagcagcagcuacugccuggaccccaacaacgaggagggcggccacggcgugaagggcugggccuucgacgacggcaacgacguguggaugggcagaaccaucagcgagaagagcagaagcggcuacgagaccuucaaggugaucggcggcuggagcaagcccaacagcaagcugcagaucaacagacaggugaucguggacagaggcaacagaagcggcuacagcggcaucuucagcguggagggcaagagcugcaucaacagaugcuucuacguggagcugaucagaggcagaagacaggagaccgaggugugguggaccagcaacagcaucgugguguucugcggcaccagcggcaccuacggcaccggcagcuggcccgacggcgccgacaucaaccugaugcccaucuga

SEQ ID NO: 182016 - RNA, 1410 nt, Artificial Sequence
  derived and/or modified CDS sequence (opt4) from neuraminidase__InfluenzaA__AFG72738
augaaccccaaccagaagaucaucaccaucggcagcgugagccugaccaucaccaccaucugcuuccugaugcagaucgccauccuggugaucaccgugacccugcacuucaagcagugcgagugcaacagcccccccaacaaccaggugaugcugugcgagcccaccaucaucgagagaaacaucaccgagaucguguaccugaccaacaccaccaucgagaaggagaucugccccaagcuggccgaguacagaaacuggagcaagccccagugcaagaucaccggcuucgcccccuucagcaaggacaacagcaucagacugagcgccggcggcgacaucugggugaccagagagcccuacgugagcugcgaccccggcaagugcuaccaguucgcccugggccagggcaccacccugaacaacagacacagcaacgacaccgugcacgacagaacccccuacagaacccugcugaugaacgagcugggcgugcccuuccaccugggcaccaagcaggugugcaucgccuggagcagcagcagcugccacgacggcaaggccuggcugcacgugugcgugaccggccacaacgagaacgccaccgccagcuucaucuacgacggcagacugguggacagcaucggcagcuggagcaagaacauccugagaacccaggagagcgagugcgugugcaucaacggcaccugcaccguggugaugaccgacggcagcgccagcggcagagccgacaccaagauccuguucaucgaggagggcaagaucgugcacaucagccagcugagcggcagcgcccagcacguggaggagugcagcugcuaccccagauaccccggcgugagaugcgugugcagagacaacuggaagggcagcaacagacccaucguggacaucaacgugaaggacuacagcaucgugagcagcuacgugugcagcggccuggugggcgacacccccagaaagaacgacagcagcagcagcagcuacugccuggaccccaacaacgaggagggcggccacggcgugaagggcugggccuucgacgacggcaacgacguguggaugggcagaaccaucagcgagaagcugagaagcggcuacgagaccuucaaggugaucggcggcuggagcaagcccaacagcaagcugcagaucaacagacaggugaucguggacagaggcaacagaagcggcuacagcggcaucuucagcguggagggcaagagcugcaucaacagaugcuucuacguggagcugaucagaggcagaaagcaggagaccgaggugugguggaccagcaacagcaucgugguguucugcggcaccagcggcaccuacggcaccggcagcuggcccgacggcgccgacaucaaccugaugcccaucuga

SEQ ID NO: 182017 - RNA, 1410 nt, Artificial Sequence; identical to SEQ ID NO: 175245
  derived and/or modified CDS sequence (opt4) from neuraminidase__InfluenzaA__AFG72749

SEQ ID NO: 182018 - RNA, 1410 nt, Artificial Sequence; identical to SEQ ID NO: 174633
  derived and/or modified CDS sequence (opt4) from neuraminidase__InfluenzaA__AFG72760

SEQ ID NO: 182019 - RNA, 1410 nt, Artificial Sequence; identical to SEQ ID NO: 174100
  derived and/or modified CDS sequence (opt4) from neuraminidase__InfluenzaA__AFG72771

SEQ ID NO: 182020 - RNA, 1410 nt, Artificial Sequence
  derived and/or modified CDS sequence (opt4) from neuraminidase__InfluenzaA__AFG72782
augaaccccaaccagaagaucaucaccaucggcagcgugagccugaccaucgccaccaucugcuuccugaugcagaucgccauccuggugaccaccgugacccugcacuucaagcaguacgagugcaacagccugcccaacaaccaggugaugcugugcgagcccaccaucaucgagagaaacaucaccgagaucguguaccugaccaacaccaccaucgagaaggagaucugccccaagcuggccgaguacagaaacuggagcaagccccagugcaagaucaccggcuucgcccccuucagcaaggacaacagcaucagacugagcgccggcggcgacaucugggugaccagagagcccuacgugagcugcgaccccgacaagugcuaccaguucgcccugggccagggcaccacccugaacaacagacacagcaacgacaccgugcacgacagaacccccuacagaacccugcugaugaacgagcugggcgugcccuuccaccugggcaccaagcaggugugcaucgccuggagcagcagcagcugccacgacggcaaggccuggcugcacgugugcgugaccggccacgacgagaacgccaccgccagcuucaucuacgacggcagacugguggacagcaucggcagcuggagcaagaagauccugagaacccaggagagcgagugcgugugcaucaacggcaccugcaccguggugaugaccgacggcagcgccagcggcagagccgacaccaagauccuguucaucgaggagggcaagaucauccacaccagccagcugagcggcagcgcccagcacguggaggagugcagcugcuaccccagauaccccggcgugagaugcgugugcagagacaacuggaagggcagcaacagacccaucguggacaucaacgugaaggacuacagcaucgugagcagcuacgugugcagcggccuggugggcgacacccccagaaagaacgacagcagcagcagcagccacugccugaaccccaacaacgaggagggcggccacggcgugaagggcugggccuucgacgacggcaacgacguguggaugggcagaaccaucagcgagaaguucagaagcggcuacgagaccuucaaggugaucgagggcuggagcaagcccaacagcaagcugcagaucaacagacaggugaucguggacagagacaacagaagcggcuacagcggcaucuucagcguggagggcaagagcugcaucaacagaugcuucuacguggagcugaucagaggcagaaagcaggagaccgaggugugguggaccagcaacagcaucgugguguucugcggcaccagcggcaccuacggcaccggcagcuggcccgacggcgccgacaucaaccugaugcccaucuga

SEQ ID NO: 182021 - RNA, 1410 nt, Artificial Sequence; identical to SEQ ID NO: 175809
  derived and/or modified CDS sequence (opt4) from neuraminidase__InfluenzaA__AFG72793

SEQ ID NO: 182022 - RNA, 1410 nt, Artificial Sequence; identical to SEQ ID NO: 174344
  derived and/or modified CDS sequence (opt4) from neuraminidase__InfluenzaA__AFG72804

SEQ ID NO: 182023 - RNA, 1410 nt, Artificial Sequence; identical to SEQ ID NO: 175989
  derived and/or modified CDS sequence (opt4) from neuraminidase__InfluenzaA__AFG72826

SEQ ID NO: 182024 - RNA, 1410 nt, Artificial Sequence
  derived and/or modified CDS sequence (opt4) from neuraminidase__InfluenzaA__AFG72837
augaaccccaaccagaagaucaucaccaucggcagcgugagccugaccaucgccaccaucugcuuccugaugcagaucgccauccuggugaccaccgugacccugcacuucaagcaguacgagugcaacagcccccccaacaaccaggugaugcugugcgagcccaccaucaucgagagaaacaucaccgagaucguguaccugaccaacaccaccaucgagaaggagaucugccccaagcuggccgaguacagaaacuggagcaagccccagugcaacaucaccggcuucgcccccuucagcaaggacaacagcaucagacugagcgccggcggcgacaucugggugaccagagagcccuacgugagcugcgaccccgacaagugcuaccaguucgcccugggccagggcaccacccugaacaacggccacagcaacgacaccgugcacgagagaacccccuacagaacccugcugaugaacgagcugggcgugcccuuccaccugggcaccaagcaggugugcaucgccuggagcagcagcagcugccacgacggcaaggccuggcugcacgugugcgugaccggcgacgacgagaacgccaccgccagcuucaucuacaacggcagacugguggacagcaucggcagcuggagcaagaagauccugagaacccaggagagcgagugcgugugcaucaacggcaccugcaccguggugaugaccgacggcagcgccagcggcaaggccgacaccaagauccuguucaucgaggagggcaagaucgugcacaucagcacccugagcggcagcgcccagcacguggaggagugcagcugcuaccccagauaccccggcgugagaugcgugugcagagacaacuggaagggcagcaacagacccaucguggacaucaacgugaaggacuacagcaucgugagcagcuacgugugcagcggccuggugggcgacacccccagaaagaacgacagcuucagcagcagccacugccuggaccccaacaacgaggagggcggccacggcgugaagggcugggccuucgacgacggcaacgacguguggaugggcagaaccaucagcgagaagcugagaagcggcuacgagaccuucaaggugaucgagggcuggagcaagcccaacagcaagcugcagaucaacagacaggugaucguggagagaggcaacagaagcggcuacagcggcaucuucagcguggagggcaagagcugcaucaacagaugcuucuacguggagcugaucagaggcagaaaggaggagaccgaggugugguggaccagcaacagcaucgugguguucugcggcaccagcggcaccuacggcaccggcagcuggcccgacggcgccgacaucaaccugaugcccaucuga

SEQ ID NO: 182025 - RNA, 1413 nt, Artificial Sequence
  derived and/or modified CDS sequence (opt4) from neuraminidase__InfluenzaA__AFG72848
augaaccccaaccagaagaucaucaccaucggcagcgugagccugaccaucgccaccaucugcuuccugaugcagaucgccauccuggugaccaccgugacccugcacuucaagcaguacgagugcaacagcccccccaacaaccaggugaugcugugcgagcccaccaucaucgagagaaacaucaccgagaucguguaccugaccaacaccaccaucgagaaggagaucugccccaagagcgccgaguacagaaacuggagcaagccccagugcaacaucaccggcuucgcccccuucagcaaggacaacagcaucagacugagcgccggcggcgacaucugggugaccagagagcccuacgugagcugcgaccccgacaagugcuaccaguucgcccugggccagggcaccacccugaacaacggccacagcaacgacaccgugcacgacagaacccccuacagaacccugcugaugaacgagcugggcgugcccuuccaccugggcaccagacaggugugcaucgccuggagcagcagcagcugccacgacggcaaggccuggcugcacgugugcgugaccggcgacgacaagaacgccaccgccagcuucaucuacaacggcagacugguggacagcaucggcagcuggagcaagaaguacauccugagaacccaggagagcgagugcgugugcaucaacggcaccugcaccguggugaugaccgacggcagcgccagcggcaaggccgacaccaagauccuguucaucgaggagggcaagaucauccacaucagcacccugagcggcagcgcccagcacguggaggagugcagcugcuaccccagauaccccggcgugagaugcgugugcagagacaacuggaagggcagcaacagacccaucguggacaucaacgugaaggacuacagcaucgugagcagcuacgugugcagcggccuggugggcgacacccccagaaagaacgacagcagcagcagcagccacugccuggaccccaacaacgaggagggcggccacggcgugaagggcugggccuucgacgacggcaacgacguguggaugggcagaaccaucagcgagaagcugagaagcggcuacgagaccuucaaggugaucgagggcuggagcaagcccaacagcaagcugcagaucaacagacaggugaucguggagagaggcaacagaagcggcuacagcggcaucuucagcguggagggcaagagcugcaucaacagaugcuucuacguggagcugaucagaggcagaaaggaggagaccgaggugugguggaccagcaacagcaucgugguguucugcggcaccagcggcaccuacggcaccggcagcuggcccgacggcgccgacaucaaccugaugcccaucuga

SEQ ID NO: 182026 - RNA, 1410 nt, Artificial Sequence
  derived and/or modified CDS sequence (opt4) from neuraminidase__InfluenzaA__AFG72859
augaaccccaaccagaagaucaucaccaucggcagcgugagccugaccaucagcaccaucugcuucuucaugcagaucgccauccugaucaccaccgugacccugcacuucaagcaguacgaguucaacagcccccccaacaaccaggugaugcugugcgagcccaccaucaucgagagaaacaucaccgagaucguguaccugaccaacaccaccaucgagaaggagaucugccccaagcuggccgaguacagaaacuggagcaagccccagugcaacaucaccggcuucgcccccuucagcaaggacaacagcaucagacugagcgccggcggcgacaucugggugaccagagagcccuacgugagcugcgaccccgacaagugcuaccaguucgcccugggccagggcaccacccugaacaacgugcacagcaacgacaucgugcacgacagaacccccuacagaacccugcugaugaacgagcugggcgugcccuuccaccugggcaccaagcaggugugcaucgccuggagcagcagcagcugccacgacggcaaggccuggcugcacgugugcgugaccggcgacgacgagaacgccaccgccagcuucaucuacaacggcagacugguggacagcaucgugagcuggagcaagaagauccugagaacccaggagagcgagugcgugugcaucaacggcaccugcaccguggugaugaccgacggcagcgccagcggcaaggccgacaccaagauccuguucaucgaggagggcaagaucgugcacaccagcacccugagcggcagcgcccagcacguggaggagugcagcugcuaccccagauaccccggcgugagaugcgugugcagagacaacuggaagggcagcaacagacccaucguggacaucaacaucaaggacuacagcaucgugagcagcuacgugugcagcggccuggugggcgacacccccagaaagaacgacagcagcagcagcagccacugccuggaccccaacaacgaggagggcggccacggcgugaagggcugggccuucgacgacggcaacgacguguggaugggcagaaccaucagcgagaagcugagaagcggcuacgagaccuucaaggugaucgagggcuggagcaaccccaacagcaagcugcagaucaacagacaggugaucguggacagaggcaacagaagcggcuacagcggcaucuucagcguggagggcaagagcugcaucaacagaugcuucuacguggagcugaucagaggcagaaagcaggagaccgaggugcuguggaccagcaacagcaucgugguguucugcggcaccagcggcaccuacggcaccggcagcuggcccgacggcgccgacaucaaccugaugcccaucuga

SEQ ID NO: 182027 - RNA, 1410 nt, Artificial Sequence
  derived and/or modified CDS sequence (opt4) from neuraminidase__InfluenzaA__AFG72870
augaaccccaaccagaagaucaucaccaucggcagcgugagccugaccaucgccaccaucugcuuccugaugcagaucgccauccuggugaccaccgugacccugcacuucaagcaguacgagugcaacagcccccccaacaaccaggugaugcugugcgagcccaccaucaucgagagaaacaucaccgagaucguguaccugaccaacaccaccaucgagaaggagaucugccccaagcuggccgaguacagaaacuggagcaagccccagugcaacaucaccggcuucgcccccuucagcaaggacaacagcaucagacugagcgccggcggcgacaucugggugaccagagagcccuacgugagcugcgaccccgacaagugcuaccaguucgcccugggccagggcaccacccugaacaacggccacagcaacgacaccgugcacgacagaacccccuacagaacccugcugaugaacgagcugggcgugcccuuccaccugggcaccaagcaggugugcaucgccuggagcagcagcagcugccacgacggcaaggccuggcugcacgugugcgugaccggcgacgacgagaacgccaccgccagcuucaucuacaacggcagacugguggacagcaucggcagcuggagcaagaagauccugagaacccaggagagcgagugcgugugcaucaacggcaccugcaccguggugaugaccgacggcagcaccagcggcaaggccgacaccaagauccuguucaucgaggagggcaagaucgugcacaucagcacccugagcggcagcgcccagcacguggaggagugcagcugcuaccccagauaccccggcgugagaugcgugugcagagacaacuggaagggcagcaacagacccaucguggacaucaacgugaaggacuacagcaucgugagcagcuacgugugcagcggccuggugggcgacacccccagaaagaacgacagcuucagcagcagccacugccuggaccccaacaacgaggagggcggccacggcgugaagggcugggccuucgacgacggcaacgacguguggaugggcagaaccaucagcgagaagcugagaagcggcuacgagaccuucaaggugaucgagggcuggagcaagcccaacagcaagcugcagaucaacagacaggugaucguggagagaggcaacagaagcggcuacagcggcaucuucagcguggagagcaagagcugcaucaacagaugcuucuacguggagcugaucagaggcagaaaggaggagaccgaggugugguggaccagcaacagcaucgugguguucugcggcaccagcggcaccuacggcaccggcagcuggcccgacggcgccgacaucaaccugaugcccaucuga

SEQ ID NO: 182028 - RNA, 1410 nt, Artificial Sequence
  derived and/or modified CDS sequence (opt4) from neuraminidase__InfluenzaA__AFG72892
augaaccccaaccagaagaucaucaccaucggcagcgugagccugaccaucagcaccaucugcuucuucaugcagaucgccauccugaucaccaccgugacccugcacuucaagcaguacgaguucaacagcccccccaacaaccaggugaugcugugcgagcccaccaucaucgagagaaacaucaccgagaucguguaccugaccaacaccaccaucgagaaggagaucugccccaagcuggccgaguacagaaacuggagcaagccccagugcgacaucaccggcuucgcccccuucagcaaggacaacagcaucagacugagcgccggcggcgacaucugggugaccagagagcccuacgugagcugcgaccccgacaagugcuaccaguucgcccugggccagggcaccacccugaacaacgugcacagcaacgacaccgugcacgacagaacccccuacagaacccugcugaugaacgagcugggcgugcccuuccaccugggcaccaagcaggugugcaucgccuggagcagcagcagcugccacgacggcaaggccuggcugcacgugugcgugaccggcgacgacaagaacgccaccgccagcuucaucuacaacggcagacugguggacagcaucgugagcuggagcaaggagauccugagaacccaggagagcgagugcgugugcaucaacggcaccugcaccguggugaugaccgacggcagcgccagcggcaaggccgacaccaagauccuguucaucgaggagggcaagaucgugcacaccagcacccugagcggcagcgcccagcacguggaggagugcagcugcuaccccagauaccccggcgugagaugcgugugcagagacaacuggaagggcagcaacagacccaucguggacaucaacaucaaggacuacagcaucgugagcagcuacgugugcagcggccuggugggcgacacccccagaaagaacgacagcagcagcagcagccacugccuggaccccaacaacgaggagggcggccacggcgugaagggcugggccuucgacgacggcaacgacguguggaugggcagaaccaucagcgagaagcugagaagcggcuacgagaccuucaaggugaucgagggcuggagcaaccccaacagcaagcugcagaucaacagacaggugaucguggacagaggcaacagaagcggcuacagcggcaucuucagcguggagggcaagagcugcaucaacagaugcuucuacguggagcugaucagaggcagaaaggagaagaccgaggugcuguggaccagcaacagcaucgugguguucugcggcaccagcggcaccuacggcaccggcagcuggcccgacggcgccgacaucaaccugaugcccaucuga

SEQ ID NO: 182029 - RNA, 1410 nt, Artificial Sequence
  derived and/or modified CDS sequence (opt4) from neuraminidase__InfluenzaA__AFG72903
augaaccccaaccagaagaucaucaccaucggcagcgugagccugaccaucagcaccaucugcuucuucaugcagaucgccauccugaucaccaccgugacccugcacuucaagcaguacgaguucaacagcccccccaacaaccaggugaugcugugcgagcccaccaucaucgagagaaacaucaccgagaucguguaccugaccaacaccaccaucgagaaggagaucugccccaagcuggccgaguacagaaacuggagcaagccccagugcaacaucaccggcuucgcccccuucagcaaggacaacagcaucagacugagcgccggcggcgacaucugggugaccagagagcccuacgugagcugcgaccccgacaagugcuaccaguucgcccugggccagggcaccacccugaacaacgugcacagcaacgacaccgugcacgacagaacccccuacagaacccugcugaugaacgagcugggcgugcccuuccaccugggcaccaagcaggugugcaucgccuggagcagcagcagcugccacgacggcaaggccuggcugcacgugugcgugaccggcgacgacaagaacgccaccgccagcuucaucuacaacggcagacugguggacagcaucgugagcuggagcaaggagauccugagaacccaggagagcgagugcgugugcaucaacggcaccugcaccguggugaugaccgacggcagcgccagcggcaaggccgacaccaagauccuguucaucgaggagggcaagaucgugcacaccagcacccugagcggcagcgcccagcacguggaggagugcagcugcuaccccagauaccccggcgugagaugcgugugcagagacaacuggaagggcagcaacagacccaucguggacaucaacaucaaggacuacagcaucgugagcagcuacgugugcagcggccuggugggcgacacccccagaaagaaggacagcagcagcagcagccacugccuggaccccaacaacgaggagggcggccacggcgugaagggcugggccuucgacgacggcaacgacguguggaugggcagaaccaucagcgagaagcugagaagcggcuacgagaccuucaaggugaucgagggcuggagcaaccccaacagcaagcugcagaucaacagacaggugaucguggacagaggcgacagaagcggcuacagcggcaucuucagcguggagggcaagagcugcaucaacagaugcuucuacguggagcugaucagaggcagaaaggaggagaccgaggugcuguggaccagcaacagcaucgugguguucugcggcaccagcggcaccuacggcaccggcagcuggcccgacggcgccgacaucaaccugaugcccaucuga

SEQ ID NO: 182030 - RNA, 1410 nt, Artificial Sequence
  derived and/or modified CDS sequence (opt4) from neuraminidase__InfluenzaA__AFG72936
augaaccccaaccagaagaucaucaccaucggcagcgugagccugaccaucagcaccaucugcuucuucauccagaucgccauccugaucaccaccgugacccugcacuucaagcaguacgaguucaacagcccccccaacaaccaggugaugcugugcgagcccaccaucaucgagagaaacaucaccgagaucguguaccugaccaacaccaccaucgagaaggagaucugccccaagcuggccgaguacagaaacuggagcaagccccagugcgacaucaccggcuucgcccccuucagcaaggacaacagcaucagacugagcgccggcggcgacaucugggugaccagagagcccuacgugagcugcgaccccgacaagugcuaccaguucgcccugggccagggcaccacccugaacaacgugcacagcaacaacaucgugagagacagaacccccuacagaacccugcugaugaacgagcugggcgugcccuuccaccugggcaccaagcaggugugcaucgccuggagcagcagcagcugccacgacggcaaggccuggcugcacgugugcaucaccggcgacgacaagaacgccaccgccagcuucaucuacaacggcagacugguggacagcguggugagcuggagcaaggagauccugagaacccaggagagcgagugcgugugcaucaacggcaccugcaccguggugaugaccgacggcagcgccagcggcaaggccgacaccaagauccuguucaucgaggagggcaagaucgugcacaccagcacccugagcggcagcgcccagcacguggaggagugcagcugcuaccccagauaccccggcgugagaugcgugugcagagacaacuggaagggcagcaacagacccaucguggacaucaacaucaaggaccacagcaucgugagcagcuacgugugcagcggccuggugggcgacacccccagaaagaacgacagcagcagcagcagccacugccuggaccccaacaacgaggagggcggccacggcgugaagggcugggccuucgacgacggcaacgacguguggaugggcagaaccaucagcgagaagagcagacugggcuacgagaccuucaaggugaucgagggcuggagcaaccacaagagcaagcugcagaucaacagacaggugaucguggacagaggcaacagaagcggcuacagcggcaucuucagcguggagggcaagagcugcaucaacagaugcuucuacguggagcugaucagaggcagaaaggaggagaccgaggugcuguggaccagcaacagcaucgugguguucugcggcaccagcggcaccuacggcaccggcagcuggcccgacggcgccgaccugaaccugaugcccaucuga

SEQ ID NO: 182031 - RNA, 1410 nt, Artificial Sequence
  derived and/or modified CDS sequence (opt4) from neuraminidase__InfluenzaA__AFG72958
augaaccccaaccagaagaucaucaccaucggcagcgugagccugaccaucagcaccaucugcuucuucaugcagaucgccauccugaucaccaccgugacccugcacuucaagcaguacgaguucaacagcccccccaacaaccaggugaugcugugcgagcccaccaucaucgagagaaacaucaccgagaucguguaccugaccaacaccaccaucgagaaggagaucugccccaagcuggccgaguacagaaacuggagcaagccccagugcgacaucaccggcuucgcccccuucagcaaggacaacagcaucagacugagcgccggcggcgacaucugggugaccagagagcccuacgugagcugcgaccccgacaagugcuaccaguucgcccugggccagggcaccacccugaacaacgugcacagcaacaacaucgugagagacagaacccccuacagaacccugcugaugaacgagcugggcgugcccuuccaccugggcaccaagcaggugugcaucgccuggagcagcagcagcugccacgacggcaaggccuggcugcacgugugcaucaccggcgacgacaagaacgccaccgccagcuucaucuacaacggcagacugguggacagcguggugagcuggagcaaggagauccugagaacccaggagagcgagugcgugugcaucaacggcaccugcaccguggugaugaccgacggcagcgccagcggcaaggccgacaccaagauccuguucaucgaggagggcaagaucgugcacaccagcacccugagcggcagcgcccagcacguggaggagugcagcugcuaccccagauaccccggcgugagaugcgugugcagagacaacuggaagggcagcaacagacccaucguggacaucaacaucaaggaccacagcaucgugagcagcuacgugugcagcggccuggugggcgacacccccagaaagaacgacagcagcagcagcagccacugccuggaccccaacaacgaggagggcggccacggcgugaagggcugggccuucgacgacggcaacgacguguggaugggcagaaccaucaacgagaccagcagacugggcuacgagaccuucaaggugaucgagggcuggagcaaccccaagagcaagcugcagaucaacagacaggugaucguggacagaggcaacagaagcggcuacagcggcaucuucagcguggagggcaagagcugcaucaacagaugcuucuacguggagcugaucagaggcagaaaggaggagaccgaggugcuguggaccagcaacagcaucgugguguucugcggcaccagcggcaccuacggcaccggcagcuggcccgacggcgccgaccugaaccugaugcccaucuga

SEQ ID NO: 182032 - RNA, 1410 nt, Artificial Sequence; identical to SEQ ID NO: 174163
  derived and/or modified CDS sequence (opt4) from neuraminidase__InfluenzaA__AFG98811

SEQ ID NO: 182033 - RNA, 1410 nt, Artificial Sequence
  derived and/or modified CDS sequence (opt4) from neuraminidase__InfluenzaA__AFG98822
augaaccccaaccagaagaucaucaccaucggcagcgugagccugaucaucgccaccgugugcuuccugaugcagaucgccauccuggugaccaccgugacccugcacuucaagcagcacgagugcgacagccccagcagcaaccaggugaugcugugcgagcccaucaucaucgagagaaacaucaccgagaucguguaccugaacaacaccaccaucgagaaggagaccugccccaagcugguggaguacagaaacuggagcaagccccagugcaagaucaccggcuucgcccccuucagcaaggacaacagcaucagacugagcgccggcggcgacaucugggugaccagagagcccuacgugagcugcgaccccggcaagugcuaccaguucgcccugggccagggcaccacccuggacaacaagcacagcaacgacaccauccacgacagaaucccccacagaacccugcugaugaacgagcugggcgugcccuuccaccugggcaccagacaggugugcaucgccuggagcagcagcagcugccacgacggcaaggccuggcugcacgugugcgugaccggcgacgacaagaacgccaccgccagcuucaucuacgacggcagacugguggacagcaucggcagcuggagccagaacauccugagaacccaggagagcgagugcgugugcaucaacggcaccugcaccguggugaugaccgacggcagcgccagcggcagagccgacaccagaauccuguucaucgaggagggcaagaucgugcacaucagcccccugagcggcagcgcccagcacguggaggagugcagcugcuaccccagauaccccgacgugagaugcaucugcagagacaacuggaagggcagcaacagacccaucguggacaucaacaugaaggacuacagcaucgacagcagcuacgugugcagcggccuggugggcgacacccccagaaacgacgacagaagcagcaagagcaacugcagaaaccccaacaacgagagaggcaaccacggcgugaagggcugggccuucgacaacggcaacgacguguggaugggcagaaccaucagcaaggaccugagaagcggcuacgagaccuucaaggugaucggcggcuggagcacccccaacagcaagagccagaucaacagacaggugaucguggacagcgacaacagaagcggcuacagcggcaucuucagcguggagggcaagagcugcaucaacagaugcuucuacguggagcugaucagaggcagagagcaggagaccagagugugguggaccagcaacagcaucgugguguucugcggcaccagcggcaccuacggcaccggcagcuggcccgacggcgccaacaucaacuucaugcccaucuga

SEQ ID NO: 182034 - RNA, 1410 nt, Artificial Sequence; identical to SEQ ID NO: 180187
  derived and/or modified CDS sequence (opt4) from neuraminidase__InfluenzaA__AFG98833

SEQ ID NO: 182035 - RNA, 1410 nt, Artificial Sequence
  derived and/or modified CDS sequence (opt4) from neuraminidase__InfluenzaA__AFG98844
augaaccccaaccagaagaucaucaccaucggcagcgugagccugaccaucgccaccaucugcuuccugaugcagaucgccauccuggugaccaccgugacccugcacuucaagcaguacgagugcgacagccccgccaacaaccaggugaugcccugcgagcccaucaucaucgagagaaacaucaccgagaucguguaccugaccaacaccaccaucgagaaggagaugugccccaagcugguggaguacagaaacuggagcaagccccagugcaagaucaccggcuucgcccccuucagcaaggacaacagcaucagacugagcgccggcggcgacaucugggugaccagagagcccuacgugagcugcgaccccggcaagugcuaccaguucgcccugggccagggcaccacccugaacaacagacacagcaacgacaccauccacgacagaaucccccacagaacccugcugaugaacgagcugggcgugcccuuccaccugggcaccagacaggugugcaucgccuggagcagcagcagcugccacgacggcaaggccuggcugcacgugugcgugaccggcgacgacaagaacgccaccgccagcuucaucuacgacggcagacugguggacagcaucggcagcuggagccagaacauccugagaacccaggagagcgagugcgugugcaucaacagaaccugcaccguggugaugaccgacggcagcgccagcggcaaggccgacaccagaauccuguucaucgaggagggcaagaucgugcacaucagcccccugagcggcagcgcccagcacguggaggagugcagcugcuaccccagauaccccggcgugagaugcaucugcagagacaacuggaagggcagcaacagacccgugguggacaucaacgugaaggacuacagcaucgacagcagcuacgugugcagcggccuggugggcgacacccccagaaacaacgacagaagcagcagcagcuacugcagaaaccccaacaacgagagaggcaaccacggcgugaagggcugggccuucgacgacgagaacgacguguggaugggcagaaccaucagcaaggacagcagaagcggcuacgagaccuucaaggugaucggcggcuggagcacccccaacagcaagagccagaucaacagacaggugaucguggacagcgacaacagaagcggcuacagcggcaucuucagcguggagggcaagagcugcaucaacagaugcuucuacguggagcugaucagaggcagagagcaggagaccagagugugguggaccagcaacagcaucgugguguucugcggcaccagcggcaccuacggcaccggcagcuggcccgacggcgccgacaucaaccugaugcccaucuga

SEQ ID NO: 182036 - RNA, 1410 nt, Artificial Sequence; identical to SEQ ID NO: 174178
  derived and/or modified CDS sequence (opt4) from neuraminidase__InfluenzaA__AFG98855

SEQ ID NO: 182037 - RNA, 1410 nt, Artificial Sequence; identical to SEQ ID NO: 175032
  derived and/or modified CDS sequence (opt4) from neuraminidase__InfluenzaA__AFG98866

SEQ ID NO: 182038 - RNA, 1410 nt, Artificial Sequence
  derived and/or modified CDS sequence (opt4) from neuraminidase__InfluenzaA__AFG98877
augaaccccaaccagaagaucaucaccaucggcagcgugagccugaccaucgccaccaucugcuuccugaugcagaucgccauccuggugaccaccgugacccugcacuucaagcaguacgagugcgacagcccccccaacaaccaggugaugcccugcgagcccaucaucaucgagagaaacaucaccgagaucguguaccugaccaacaccaccaucgagaaggagaucugccccaagcugguggaguacagaaacuggagcaagccccagugcaagaucaccggcuucgcccccuucagcaaggacaacagcaucagacugagcgccggcggcgacaucugggugaccagagagcccuacgugagcugcgaccccggcaagugcuaccaguucgcccugggccagggcaccacccuggacaacaagcacagcaacgacaccauccacgacagaaccccccacagaacccugcugaugaacgagcugggcgugcccuuccaccugggcaccagacaggugugcaucgccuggagcagcagcagcugccacgacggcaaggccuggcugcacgugugcgugaccggcuacgacaagaacgccaccgccagcuucaucuacgacggcagacugguggacagcaucggcagcuggagccagaacauccugagaacccaggagagcgagugcgugugcaucaacggcaccugcaccguggugaugaccgacggcagcgccagcggcagagccgacaccaagauccuguucaucgaggagggcaagaucgugcacaucagcccccugagcggcagcgcccagcacguggaggagugcagcugcuaccccagauaccccggcgugagaugcaucugcagagacaacuggaagggcagcaacagacccgugguggacaucaacgugaaggacuacagcaucgacagcagcuacgugugcagcggccuggugggcgacacccccagaaacaacgacagaagcagcaacagcuacugcagaaaccccaacaacgagaagggcaaccacggcgugaagggcugggccuucgacgacggcaacgacguguggaugggcagaaccaucagcgaggacagcagaagcggcuacgagaccuucaaggugaucggcggcuggagcacccccaacagcaagcugcagaucaacagacaggugaucguggacagcgacaacagaagcggcuacagcggcaucuucagcguggagggcaagagcugcaucaacagaugcuucuacguggagcugaucagaggcagagagcaggagaccagagugugguggaccagcaacagcaucgugguguucugcggcaccagcggcaccuacggcaccggcagcuggcccgacggcgccgacaucaaccugaugcccaucuga

SEQ ID NO: 182039 - RNA, 1410 nt, Artificial Sequence; identical to SEQ ID NO: 174178
  derived and/or modified CDS sequence (opt4) from neuraminidase__InfluenzaA__AFG98888

SEQ ID NO: 182040 - RNA, 1410 nt, Artificial Sequence
  derived and/or modified CDS sequence (opt4) from neuraminidase__InfluenzaA__AFG98899
augaaccccaaccagaagaucaucaccaucggcagcgugagccugaucaucgccaccaucugcuuccugaugcagaucgccauccuggugaccaccgugacccugcacuucaagcaguacgagugcgacagccccgccaacaaccaggugaugcccugcgagcccaucaucaucgagagaaacaucaccgagaucguguaccugaccaacaccaccaucgagaaggagaucugccccaagcugguggaguacagaaacuggagcaagccccagugcaagaucaccggcuucgcccccuucagcaaggacaacagcaucagacugagcgccggcggcgacaucugggugaccagagagcccuacgugagcugcgaccccggcaagugcuaccaguucgcccugggccagggcaccacccuggacaacaagcacagcaacgacaccauccacgacagaaccccccacagaacccugcugaugaacgagcugggcgugcccuuccaccugggcaccagacaggugugcaucgccuggagcagcagcagcugccacgacggcaaggccuggcugcacgugugcgugaccggcuacgacaagaacgccaccgccagcuucaucuacgacggcagacugguggacagcaucggcagcuggagccagaacauccugagaacccaggagagcgagugcgugugcaucaacggcaccugcaccguggugaugaccgacggcagcgccagcggcagagccgacaccaagauccuguucaucgaggagggcaagaucgugcacaucagcccccugagcggcagcgcccagcacguggaggagugcagcugcuaccccagauaccccggcgugagaugcaucugcagagacaacuggaagggcagcaacagacccgugguggacaucaacgugaaggacuacagcaucgacagcagcuacgugugcagcggccuggugggcgacacccccagaaacaacgacagaagcagcaacagcuacugcagaaaccccaacaacgagaagggcaaccacggcgugaagggcugggccuucgacgacggcaacgacguguggaugggcagaaccaucagcgaggacagcagaagcggcuacgagaccuucaaggugaucggcggcuggagcacccccaacagcaagcugcagaucaacagacaggugaucguggacagcgacaacagaagcggcuacagcggcaucuucagcguggagggcaagagcugcaucaacagaugcuucuacguggagcugaucagaggcagagagcaggagaccagagugugguggaccagcaacagcaucgugguguucugcggcaccagcggcaccuacggcaccggcagcuggcccgacggcgccgacaucaaccugaugcccaucuga

SEQ ID NO: 182041 - RNA, 1410 nt, Artificial Sequence; identical to SEQ ID NO: 174178
  derived and/or modified CDS sequence (opt4) from neuraminidase__InfluenzaA__AFG98910

SEQ ID NO: 182042 - RNA, 1410 nt, Artificial Sequence; identical to SEQ ID NO: 174178
  derived and/or modified CDS sequence (opt4) from neuraminidase__InfluenzaA__AFG98921

SEQ ID NO: 182043 - RNA, 1410 nt, Artificial Sequence
  derived and/or modified CDS sequence (opt4) from neuraminidase__InfluenzaA__AFG98932
augaaccccaaccagaagaucaucaccaucggcagcgugagccugaccaucgccaccaucugcuuccugaugcagaucgccauccuggugaccaccgugacccugcacuucaagcaguacgagugcgacagccccgccaacaaccaggugaugcccugcgagcccaucaucguggagagaaacaucaccgagaucguguaccugaccaacaccaccaucgagaaggagaucugccccaagcugguggaguacagaaaguggagcaagccccagugcaagaucaccggcuucgcccccuucagcaaggacaacagcaucagacugagcgccggcggcgacaucugggugaccagagagcccuacgugagcugcgaccccggcaagugcuaccaguucgcccugggccagggcaccacccuggacaacaagcacagcaacgacaccauccacgacagaaccccccacagaacccugcugaugaacgagcugggcgugcccuuccaccugggcaccagacaggugugcaucgccuggagcagcagcagcugccacgacggcaaggccuggcugcacgugugcgugaccggcuacgacaagaacgccaccgccagcuucaucuacgacggcagacugguggacagcaucggcagcuggagccagaacauccugagaacccaggagagcgagugcgugugcaucaacggcaccugcaccguggugaugaccgacggcagcgccagcggcagagccgacaccaagauccuguucaucgaggagggcaagaucgugcacaucagcccccugagcggcagcgcccagcacguggaggagugcagcugcuaccccagauaccccggcgugagaugcaucugcagagacaacuggaagggcagcaacagacccgugguggacaucaacgugaaggacuacagcaucgacagcagcuacgugugcagcggccuggugggcgacacccccagaaacaacgacagaagcagcaacagcuacugcagaaaccccaacaacgagaagggcaaccacggcgugaagggcugggccuucgacgacggcaacgacguguggaugggcagaaccaucagcgaggacagcagaagcggcuacgagaccuucaaggugaucggcggcuggagcacccccaacagcaagcugcagaucaacagacaggugaucguggacagcgacaacagaagcggcuacagcggcaucuucagcguggagggcaagagcugcaucaacagaugcuucuacguggagcugaucagaggcagagagcaggagaccagagugugguggaccagcaacagcaucgugguguucugcggcaccagcggcaccuacggcaccggcagcuggcccgacggcgccgacaucaaccugaugcccaucuga

SEQ ID NO: 182044 - RNA, 1410 nt, Artificial Sequence
  derived and/or modified CDS sequence (opt4) from neuraminidase__InfluenzaA__AFG98943
augaaccccaaccagaagaucaucaccaucggcagcgugagccugaccaucgccaccaucugcuuccugaugcagaucgccauccuggugaccaccgugacccugcacuucaagcaguacgagugcgacagccccgccaacaaccaggugaugcccugcgagcccaucaucaucgagagaaacaucaccgagaucguguaccugaccaacaccaccaucgagaaggagaucugccccaagcugguggaguacagaaacuggagcaagccccagugcaagaucaccggcuucgcccccuucagcaaggacaacagcaucagacugagcgccggcggcgacaucugggugaccagagagcccuacgugagcugcgaccccggcaagugcuaccaguucgcccugggccagggcaccacccuggacaacaagcacagcaacgacaccauccacgacagaaccccccacagaacccugcugaugaacgagcugggcgugcccuuccaccugggcaccagacaggugugcaucgccuggagcagcagcagcugccacgacggcaaggccuggcugcacgugugcgugaccggcuacgacaagaacgccaccgccagcuucaucuacgacggcagacugguggacagcaucggcagcuggagccagaacauccugagaacccaggagagcgagugcgugugcaucaacggcaccugcaccguggugaugaccgacggcagcgccagcggcagagccgacaccaagauccuguucaucgaggagggcaagaucgugcacaucagcccccugagcggcagcgcccagcacguggaggagugcagcugcuaccccagauaccccggcgugagaugcaucugcagagacaacuggaagggcagcaacagacccgugguggacaucaacgugaaggacuacagcaucgacagcagcuacgugugcagcggccuggugggcgacacccccagaaagaacgacagaagcagcaacagcuacugcagaaaccccaacaacgagaagggcaaccacggcgugaagggcugggccuucgacgacggcaacgacguguggaugggcagaaccaucagcgaggacagcagaagcggcuacgagaccuucaaggugaucggcggcuggagcacccccaacagcaagcugcagaucaacagacaggugaucguggacagcgacaacagaagcggcuacagcggcaucuucagcguggagggcaagagcugcaucaacagaugcuucuacguggagcugaucagaggcagagagcaggagaccagagugugguggaccagcaacagcaucgugguguucugcggcaccagcggcaccuacggcaccggcagcuggcccgacggcgccgacaucgaccugaugcccaucuga

SEQ ID NO: 182045 - RNA, 1410 nt, Artificial Sequence
  derived and/or modified CDS sequence (opt4) from neuraminidase__InfluenzaA__AFG98965
augaaccccaaccagaagaucaucaccaucggcagcgugagccugaccaucgccaccaucugcuuccugaugcagaucgccauccuggugaccaccgugacccugcacuucaagcaguacgagugcgacagccccgccaacaaccaggugaugcccugcgagcccaccaucaucgagagaaacaucaccgagaucguguaccugaccaacaucaccaucgagaaggagaucugccccaagcugguggaguacagaaacuggagcaagccccagugcaagaucaccggcuucgcccccuucagcaaggacaacagcaucagacugagcgccggcggcgacaucugggugaccagagagcccuacgugagcugcgaccccggcaagugcuaccaguucgcccugggccagggcaccacccuggacaacaagcacagcaacgacaccauccacgacagaaccccccacagaacccugcugaugaacgagcugggcgugcccuuccaccugggcaccagacaggugugcaucgccuggagcagcagcagcugccacgacggcaaggccuggcugcacgugugcgugaccggcuacgacaagaacgccaccgccagcuucaucuacgacggcagacugguggacagcaucggcagcuggagccagaacauccugagaacccaggagagcgagugcgugugcaucaacggcaccugcaccguggugaugaccgacggcagcgccagcggcagagccgacaccaagauccuguucaucgaggagggcaagaucgugcacaucagcccccugagcggcagcgcccagcacguggaggagugcagcugcuaccccagauaccccggcgugagaugcaucugcagagacaacuggaagggcagcaacagacccgugguggacaucaacgugaaggacuacagcaucgacagcagcuacgugugcagcggccuggugggcgacacccccagaaacaacgacagaagcagcaacagcuacugcagaaaccccaacaacgagaagggcaaccacggcgugaagggcugggccuucgacgacggcaacgacguguggaugggcagaaccaucagcgaggacagcagaagcggcuacgagaccuucaaggugaucggcggcuggagcacccccaacagcaagcugcagaucaacagacaggugaucguggacagcgacaacagaagcggcuacagcggcaucuucagcguggagggcaagagcugcaucaacagaugcuucuacguggagcugaucagaggcagagagcaggagaccagagugugguggaccagcaacagcaucgugguguucugcggcaccagcggcaccuacggcgccggcagcuggcccgacggcgccgacaucaaccugaugcccaucuga

SEQ ID NO: 182046 - RNA, 1410 nt, Artificial Sequence
  derived and/or modified CDS sequence (opt4) from neuraminidase__InfluenzaA__AFG98976
augaaccccaaccagaagaucaucaccaucggcagcgugagccugaccaucgccaccaucugcuuccugaugcagaucgccauccuggugaccaccgugacccugcacuucaagcaguacgagugcgacagccccgccaacaaccaggugaugcccugcgagcccaucaucaucgagagaaacaucaccgagaucguguaccuggccaacaccaccaucgagaaggagaucugccccaagcugguggaguacagaaacuggagcaagccccagugcaagaucaccggcuucgcccccuucagcaaggacaacagcaucagacugagcgccggcggcgacaucugggugaccagagagcccuacgugagcugcgaccccggcaagugcuaccaguucgcccugggccagggcaccacccuggacaacaagcacagcaacgacaccauccacgacagaaccccccacagaacccugcugaugaacgagcugggcgugcccuuccaccugggcaccagacaggugugcaucgccuggagcagcagcagcugccacgacggcaaggccuggcugcacgugugcgugaccggcuacgacaagaacgccaccgccagcuucaucuacgacggcagacugguggacagcaucggcagcuggagcaagaacauccugagaacccaggagagcgagugcgugugcaucaacggcaccugcaccguggugaugaccgacggcagcgccagcggcagagccgacaccaagauccuguucaucgaggagggcaagaucgugcacaucagcccccugagcggcagcgcccagcacguggaggagugcagcugcuaccccagauaccccggcgugagaugcaucugcagagacaacuggaagggcagcaacagacccgugguggacaucaacgugaaggacuacagcaucgacagcagcuacgugugcagcggccuggugggcgacacccccagaaacaacgacagaagcagcagcagcuacugcagaaaccccaacaacgagaagggcaaccacggcgugaagggcugggccuucgacgacggcaacgacguguggaugggcagaaccaucagcgaggacagcagaagcggcuacgagaccuucaaggugaucggcggcuggagcacccccaacagcaagcugcagaucaacagacaggugaucguggacagcgacaacagaagcggcuacagcggcguguucagcguggagggcaagagcugcaucaacagaugcuucuacguggagcugaucagaggcagagagcuggagaccagagugugguggaccagcaacagcaucgugguguucugcggcaccagcggcaccuacggcaccggcagcuggcccgacggcgccgacaucaaccugaugcccaucuga

SEQ ID NO: 182047 - RNA, 1410 nt, Artificial Sequence; identical to SEQ ID NO: 182046
  derived and/or modified CDS sequence (opt4) from neuraminidase__InfluenzaA__AFG98987

SEQ ID NO: 182048 - RNA, 1410 nt, Artificial Sequence
  derived and/or modified CDS sequence (opt4) from neuraminidase__InfluenzaA__AFG98998
augaaccccaaccagaagaucaucaccaucggcagcgugagccugaccaucgccaccaucugcuuccugaugcagaucgccauccuggugaccaccgugacccugcacuucaagcaguacgagugcgacagccccgccaacaaccaggugaugcccugcgagcccaucaucaucgagagaaacaucaccgagaucguguaccugaccaacaccaccaucgagaaggagaucugccccaagcugguggaguacagaaacuggagcaagccccagugcaagaucaccggcuucgcccccuucagcaaggacaacagcaucagacugagcgccggcggcgacaucugggugaccagagagcccuacgugagcugcgaccccggcaagugcuaccaguucgcccugggccagggcaccacccuggagaacaagcacagcaacgacaccauccacgacagaaccccccacagaacccugcugaugaacgagcugggcgugcccuuccaccugggcaccagacaggugugcaucgccuggagcagcagcagcugccacgacggcaaggccuggcugcacgugugcgugaccggcuacgacaagaacgccaccgccagcuucaucuacgacggcagacugguggacagcaucggcagcuggagccagaacauccugagaacccaggagagcgagugcgugugcaucaacggcaccugcaccguggugaugaccgacggcagcgccagcggcagagccgacaccaagauccuguucaucgaggagggcaagaucgugcacaucagcccccugagcggcagcgcccagcacguggaggagugcagcugcuaccccagauaccccggcgugagaugcaucugcagagacaacuggaagggcagcaacagacccgugguggacaucaacgugaaggacuacagcaucgacagcagcuacgugugcagcggccuggugggcgacacccccagaaagaacgacagaagcagcagcagcuacugcagaaaccccaacaacgagaagggcaaccacggcgugaagggcugggccuucgacgacggcaacgacguguggaugggcagaaccaucagcgaggacagcagaagcggcuacgagaccuucaaggugaucggcggcuggagcacccccaacagcaagcugcagaucaacagacaggugaucguggacagcgccaacagaagcggcuacagcggcaucuucagcguggagggcaagagcugcaucaacagaugcuucuacguggagcugaucagaggcagagagcaggagaccagagugugguggaccagcaacagcaucgugguguucugcggcaccagcggcaccuacggcaccggcagcuggcccgacggcgccgacaucaaccugaugcccaucuga

SEQ ID NO: 182049 - RNA, 1410 nt, Artificial Sequence; identical to SEQ ID NO: 182046
  derived and/or modified CDS sequence (opt4) from neuraminidase__InfluenzaA__AFG99009

SEQ ID NO: 182050 - RNA, 1410 nt, Artificial Sequence
  derived and/or modified CDS sequence (opt4) from neuraminidase__InfluenzaA__AFG99020
augaaccccaaccagaagaucaucaccaucggcagcgugagccugaccaucgccaccaucugcuuccugaugcagaucgccauccuggugaccaccgugacccugcacuucaagcaguacgagugcgacagccccgccaacaaccaggugaugcccugcgagcccaucaucaucgagagaaacaucaccgagaucguguaccugaccaacaccaccaucgagaaggagaucugccccaagcugguggaguacagaaacuggagcaagccccagugcaagaucaccggcuucgcccccuucagcaaggacaacagcaucagacugagcgccggcggcgacaucugggugaccagagagcccuacgugagcugcgaccccggcaagugcuaccaguucgcccugggccagggcaccacccuggacaacaagcacagcaacgacaccauccacgacagaaccccccacagaacccugcugaugaacgagcugggcgugcccuuccaccugggcaccagacaggugugcaucgccuggagcagcagcagcugccacgacggcaaggccuggcugcacgugugcgugaccggcuacgacaagaacgccaccgccagcuucaucuacgacggcagacugguggacagcaucggcagcuggagccagaacauccugagaacccaggagagcgagugcgugugcaucaacggcaccugcaccguggugaugaccgacggcagcgccagcggcagagccgacaccaagauccuguucaucgaggagggcaagaucgugcacaccagcccccugagcggcagcgcccagcacguggaggagugcagcugcuaccccagauaccccggcgugagaugcaucugcagagacaacuggaagggcagcaacagacccgugguggacaucaacgugaaggacuacagcaucgacagcagcuacgugugcagcggccuggugggcgacacccccagaaacaacgacagaagcagcagcagcuacugcagaaaccccaacaacgagaagggcacccacggcgugaagggcugggccuucgacgacggcaacgacguguggaugggcagaaccaucagcgaggacagcagaagcggcuacgagaccuucaaggugaucggcggcuggagcacccccaacagcaagcugcagaucaacagacaggugaucguggacagcgacaacagaagcggcuacagcggcaucuucagcguggagggcaagagcugcaucaacagaugcuucuacguggagcugaucagaggcagagagcaggagaccagagugugguggaccagcaacagcaucgugguguucugcggcaccagcggcaccuacggcaccggcagcuggcccgacggcgccgacaucaacaucaugcccaucuga

SEQ ID NO: 182051 - RNA, 1410 nt, Artificial Sequence
  derived and/or modified CDS sequence (opt4) from neuraminidase__InfluenzaA__AFG99031
augaaccccaaccagaagaucaucaccaucggcagcgugagccugaccaucgccaccaucugcuuccugaugcagaucgccauccuggugaccaccgugacccugcacuucaagcaguacgagugcgacagccccgccaacaaccaggugaugcccugcgagcccaucaucaucgagagaaacaucaccgagaucguguaccugaccaacaccaccaucgagaaggagaucugccccaagcugguggaguacagaaacuggagcaagccccagugcaagaucaccggcuucgcccccuucagcaaggacaacagcaucagacugagcgccggcggcgacaucugggugaccagagagcccuacgugagcugcgaccccggcaagugcuaccaguucgcccugggccagggcaccacccuggacaacaagcacagcaacgacaccauccacgacagaaccccccacagaacccugcugaugaacgagcugggcgugcccuuccaccugggcaccagacaggugugcaucgccuggagcagcagcagcugccacgacggcaaggccuggcugcacgugugcgugaccggcuacgacaagaacgccaccgccagcuucaucuacgacggcagacugguggacagcaucggcagcuggagccagaacauccugagaacccaggagagcgagugcgugugcaucaacggcaccugcaccguggugaugaccgacggcagcgccagcggcagagccgacaccaagauccuguucaucgaggagggcaagaucgugcacaccagcccccugagcggcagcgcccagcacguggaggagugcagcugcuaccccagauaccccggcgugagaugcaucugcagagacaacuggagaggcagcaacagacccgugguggacaucaacgugaaggacuacagcaucgacagcagcuacgugugcagcggccuggugggcgacacccccagaaacaacgacagaagcagcagcagcuacugcagaaaccccaacaacgagaagggcacccacggcgugaagggcugggccuucgacgacggcaacgacguguggaugggcagaaccaucagcgaggacagcagaagcggcuacgagaccuucaaggugaucggcggcuggagcacccccaacagcaagcugcagaucaacagacaggugaucguggacagcgacaacagaagcggcuacagcggcaucuucagcguggagggcaagagcugcaucaacagaugcuucuacguggagcuggugagaggcagagagcaggagaccagagugugguggaccagcaacagcaucgugguguucugcggcaccagcggcaccuacggcaccggcagcuggcccgacggcgccgacaucaaccugaugcccaucuga

SEQ ID NO: 182052 - RNA, 1410 nt, Artificial Sequence; identical to SEQ ID NO: 174636
  derived and/or modified CDS sequence (opt4) from neuraminidase__InfluenzaA__AFG99042

SEQ ID NO: 182053 - RNA, 1410 nt, Artificial Sequence
  derived and/or modified CDS sequence (opt4) from neuraminidase__InfluenzaA__AFG99053
augaaccccaaccagaagaucaucaccaucggcagcgugagccugaccaucgccaccaucugcuuccugaugcagaucgccauccuggugaccaccgugacccugcacuucaagcaguacgagugcgacagccccgccaacaaccaggugaugcccugcgagcccaucaucaucgagagaaacaucaccgagaucguguaccugaccaacaccaccaucgagaaggagaucugccccaagcugguggaguacagaaacuggagcaagccccagugcaagaucaccggcuucgcccccuucagcaaggacaacagcaucagacugagcgccggcggcgacaucugggugaccagagagcccuacgugagcugcgaccccggcaagugcuaccaguucgcccugggccagggcaccacccuggacaacaagcacagcaacgacaccauccacgacagaaccccccacagaacccugcugaugaacgagcugggcgugcccuuccaccugggcaccagacaggugugcaucgccuggagcagcagcagcugccacgacggcaaggccuggcugcacgugugcgugaccggcuacgacaagaacgccaccgccagcuucaucuacgacggcagacugguggacagcaucggcagcuggagccagaacauccugagaacccaggagagcgagugcgugugcaucaacggcaccugcaccguggugaugaccgacggcagcgccagcggcagagccgacaccaagauccuguucaucgaggagggcaagaucgugcacaccagcagccugagcggcagcgcccagcacguggaggagugcagcugcuaccccagauaccccggcgugagaugcaucugcagagacaacuggaagggcagcaacagacccgugguggacaucaacgugaaggacuacagcaucgacagcagcuacgugugcagcggccuggugggcgacacccccagaaacaacgacagaagcagcagcagcuacugcagaaaccccaacaacgagaagggcacccacggcgugaagggcugggccuucgacgacggcaacgacguguggaugggcagaaccaucagcgaggacagcagaagcggcuacgagaccuucaaggugaucggcggcuggagcauccccaacagcaagcugcagaucaacagacaggugaucguggacagcgacaacagaagcggcuacagcggcaucuucagcguggagggcaagagcugcaucaacagaugcuucuacguggagcugaucagaggcagagagcaggagaccagagugugguggaccagcaacagcaucgugguguucugcggcaccagcggcaccuacggcaccggcagcuggcccgacggcgccgacaucaaccugaugcccaucuga

SEQ ID NO: 182054 - RNA, 1410 nt, Artificial Sequence
  derived and/or modified CDS sequence (opt4) from neuraminidase__InfluenzaA__AFG99064
augaaccccaaccagaagaucaucaccaucggcagcgugagccugaccaucgccaccgugugcuuccugaugcagaucgccauccuggugaccaccgugacccugcacuucaagcaguacgagugcgacagcccccccaacaaccaggugaugcccugcgagcccaucaucaucgagagaaacgugaccgagaucguguaccugaccaacaccaccaucgagaaggagaucugccccaagcugguggaguacagaaacuggagcaagccccagugcaagaucaccggcuucgcccccuucagcaaggacaacagcaucagacugagcgccggcggcgacaucugggugaccagagagcccuacgugagcugcgaccccagcaagugcuaccaguucgcccugggccagggcaccacccuggacaacaagcacagcaacgacaccauccacgacagaaccccccacagaacccugcugaugaacgagcugggcgugcccuuccaccugggcaccagacaggugugcaucgccuggagcagcagcagcugccacgacggcaaggccuggcugcacgugugcaucaccggcuacgacaagaacgccaccgccagcuucaucuacgacggcagacugguggacagcaucggcagcuggagcaagaacauccugagaacccaggagagcgagugcgugugcaucaacggcaccugcaccguggugaugaccgacggcagcgccagcgagagagccgacaccaagauccuguucaucgaggagggcaagaucgugcacaucagcccccugagcggcagcgcccagcacguggaggagugcagcugcuaccccagauaccccggcgugagaugcaucugcagagacaacuggaagggcagcaacagacccgugguggacaucaacgugaaggacuacagcaucgugagcagcuacgugugcagcggccuggugggcgacacccccagaaagaacgacagaagcagcagcagcuacugcagaaaccccaacaacgagaagggcaaccacggcgugaagggcugggccuucgacgacggcaacgacguguggaugggcagaaccaucagcgaggagagcagaagcggcuacgagaccuucaaggugaucggcggcuggagcacccccaacagcaagcugcagaucaacagacaggugaucguggacagcgacaacagaagcggcuacagcggcaucuucagcguggagggcaagagcugcaucaacagaugcuucuacguggagcugaucagaggcagagagcaggagaccagagugugguggaccagcaacagcaucgugguguucugcggcaccagcggcaccuacggcaccggcagcuggcccgacggcgccgacaucaaccugaugcccaucuga

SEQ ID NO: 182055 - RNA, 1410 nt, Artificial Sequence
  derived and/or modified CDS sequence (opt4) from neuraminidase__InfluenzaA__AFG99086
augaaccccaaccagaagaucaucaccaucggcagcgugagccugaccaucgccaccaucugcuuccugaugcagaucgccauccuggugaccaccgugacccugcacuucaagcaguacgagugcgacagccccgccaacaaccaggugaugcccugcgagcccaucaucaucgagagaaacgugaccgagaucguguaccugaccaacaccaccaucgagaaggagaucugccccaagcugguggaguacagaaacuggagcaagccccagugcaagaucaccggcuucgcccccuucagcaaggacaacagcaucagacugagcgccggcggcgacaucugggugaccagagagcccuacgugagcugcgaccccggcaagugcuaccaguucgcccugggccagggcaccacccuggacaacaagcacagcaacgacaccauccacgacagaacccccuacagaacccugcugaugaacgagcugggcgugcccuuccaccugggcaccagacaggugugcaucgccuggagcagcagcagcugccacgacggcaaggccuggcugcacgugugcgugaccggcuacgacaagaacgccaccgccagcuucaucuacgacggcagacugguggacagcaucggcagcuggagcaagaacauccugagaacccaggagagcgagugcgugugcaucaacggcaccugcaccguggugaugaccgacggcagcgccagcgagagagccgacaccaagauccuguucaucgaggagggcaagaucgugcacaucagcccccugagcggcagcgcccagcacguggaggagugcagcugcuaccccagauaccccggcgugagaugcaucugcagagacaacuggaagggcagcaacagacccgugguggacaucaacgugaaggacuacagcaucgugagcagcuacgugugcagcggccuggugggcgacacccccagaaagaacgacagaagcagcagcagcuacugcagaaaccccaacaacgagaagggcaaccacggcgugaagggcugggccuucgacgacggcaacgacguguggaugggcagaaccaucagcgaggagagcagaagcggcuacgagaccuucaaggugaucggcggcuggagcacccccaacagcaagcugcagaucaacagacaggugaucguggacagcgacaacagaagcggcuacagcggcaucuucagcguggagggcaagagcugcaucaacagaugcuucuacguggagcugaucagaggcagagagcaggagaccagagugugguggaccagcaacagcaucgugguguucugcggcaccagcggcaccuacggcaccggcagcuggcccgacggcgccgacaucaaccugaugcccaucuga

SEQ ID NO: 182056 - RNA, 1410 nt, Artificial Sequence
  derived and/or modified CDS sequence (opt4) from neuraminidase__InfluenzaA__AFG99097
augaaccccaaccagaagaucaucaccaucggcagcgugagccugaccaucgccaccaucugcuuccugaugcagaucgccauccuggugaccaccgugacccugcacuucaagcaguacgagugcgacagccccgccaacaaccaggugaugcccugcgagcccaucaucaucgagagaaacgugaccgagaucguguaccugaccaacaccaccaucgagaaggagaucugccccaagcugguggaguacagaaacuggagcaagccccagugcaagaucaccggcuucgcccccuucagcaaggacaacagcaucagacugagcgccggcggcgacaucugggugaccagagagcccuacgugagcugcgaccccggcaagugcuaccaguucgcccugggccagggcaccacccuggacaacaagcacagcaacgacaccauccacgacagaacccccuacagaacccugcugaugaacgagcugggcgugcccuuccaccugggcaccagacaggugugcaucgccuggagcagcagcagcugccacgacggcaaggccuggcugcacgugugcgugaccggcuacgacaagaacgccaccgccagcuucaucuacgacggcagacugguggacagcaucggcagcuggagcaagaacauccugagaacccaggagagcgagugcgugugcaucaacggcaccugcaccguggugaugaccgacggcagcgccagcgagagagccgacaccaagauccuguucaucgaggagggcaagaucgugcacaucagcccccugagcggcagcgcccagcacguggaggagugcagcugcuaccccagauaccccggcgugagaugcaucugcagagacaacuggaagggcagcaacagacccgugguggacaucaacgugaaggacuacagcaucgugagcagcuacgugugcagcggccuggugggcgacacccccagaaagaacgacagaagcagcagcagcuacugcagaaaccccaacaacgagaagggcaaccacggcgugaagggcugggccuucgacgacggcaacgacguguggaugggcagaaccaucagcgaggagagcagacugggcuacgagaccuucaaggugaucggcggcuggagcacccccaacagcaagcugcagaucaacagacaggugaucguggacagcgacaacagaagcggcuacagcggcaucuucagcguggagggcaagagcugcaucaacagaugcuucuacguggagcugaucagaggcagagagcaggagaccagagugugguggaccagcaacagcaucgugguguucugcggcaccagcggcaccuacggcaccggcagcuggcccgacggcgccgacaucaaccugaugcccaucuga

SEQ ID NO: 182057 - RNA, 1410 nt, Artificial Sequence
  derived and/or modified CDS sequence (opt4) from neuraminidase__InfluenzaA__AFG99119
augaaccccaaccagaagaucaucaccaucggcagcgugagccugaccaucgccaccaucugcuuccugaugcagaucgccauccuggugaccaccgugacccugcacuucaagcaguacgagugcagcagcccccccaacaaccaggugaugcccugcgagcccaucaucaucgagagaaacaucaccgagaucguguaccugaccaacaccaccaucgagaaggagaucugccccaagcugguggaguacagaaacuggagcaagccccagugcaagaucaccggcuucgcccccuucagcaaggacaacagcaucagacugagcgccggcggcgacaucugggugaccagagagcccuacgugagcugcgaccccggcaagugcuaccaguucgcccugggccagggcaccacccuggacaacaagcacagcaacgacaccauccacgacagaacccccuacagaacccugcugaugaacgagcugggcgugcccuuccaccugggcaccagacaggugugcaucgccuggagcagcagcagcugccacgacggcaaggccuggcugcacgugugcgugaccggccacgacaagaacgccaccgccagcuucaucuacgacggcagacugguggacagcaucggcagcuggagcaagaacauccugagaacccaggagagcgagugcgugugcaucaacggcaccugcaccguggugaugaccgacggcagcgccagcgagagagccgacaccaagauccuguucaucgaggagggcaagaucgugcacaucagcccccugagcggcagcgcccagcacguggaggagugcagcugcuaccccagauaccccggcgugagaugcgugugcagagacaacuggaagggcagcaacagacccaucguggacaucaacgugaaggacuacagcaucgugagcagcuacgugugcagcggccuggugggcgacacccccagaaagaacgacagaagcagcagcagcuacugcagaaaccccaacaacgagaagggcaaccacggcgugaagggcugggccuucgacgacggcaacgacguguggaugggcagaaccaucagcgaggagagcagaagcggcuacgagaccuucaaggugaucggcggcuggagcacccccaacagcaagcugcagaucaacagacaggugaucguggacagcgacaacagaagcggcuacagcggcaucuucagcguggagggcaagagcugcaucaacagaugcuucuacguggagcugaucagaggcagagagcaggagaccagagugugguggaccagcaacagcaucgugguguucugcggcaccagcggcaccuacggcaccggcagcuggcccgacggcgccgacaucaaccugaugcccaucuga

SEQ ID NO: 182058 - RNA, 1410 nt, Artificial Sequence
  derived and/or modified CDS sequence (opt4) from neuraminidase__InfluenzaA__AFG99130
augaaccccaaccagaagaucaucaccaucggcagcgugagccugaccaucgccaccaucugcuuccugaugcagaucgccauccuggugaccaccgugacccugcacuucaagcaguacgagugcagcagcccccccaacaaccaggugaugcccugcggccccaucaucaucgagagaaacaucaccgagaucguguaccugaccaacaccaccaucgagaaggagaucugccccaagcugguggaguacagaaacuggagcaagccccagugcaagaucaccggcuucgcccccuucagcaaggacaacagcaucagacugagcgccggcggcgacaucugggugaccagagagcccuacgugagcugcgaccccggcaagugcuaccaguucgcccugggccagggcaccacccuggacaacaagcacagcaacgacaccauccacgacagaacccccuacagaacccugcugaugaacgagcugggcgugcccuuccaccugggcaccagacaggugugcaucgccuggagcagcagcagcugccacgacggcaaggccuggcugcacgugugcgugaccggccacgacaagaacgccaccgccagcuucaucuacgacggcagacugguggacagcaucggcagcuggagcaagaacauccugagaacccaggagagcgagugcgugugcaucaacggcaccugcaccguggugaugaccgacggcagcgccagcgagagagccgacaccaagauccuguucaucgaggagggcaagaucgugcacaucagcccccugagcggcagcgcccagcacguggaggagugcagcugcuaccccagauaccccggcgugagaugcgugugcagagacaacuggaagggcagcaacagacccgugguggacaucaacgugaaggacuacagcaucgugagcagcuacgugugcagcggccuggugggcgacacccccagaaagaacgacagaagcagcagcagcuacugcagaaaccccaacaacgagaagggcaaccacggcgugaagggcugggccuucgacgacggcaacgacguguggaugggcagaaccaucagcgaggagagcagaagcggcuacgagaccuucaaggugaucggcggcuggagcacccccaacagcaagcugcagaccaacagacaggugaucguggacagcgacaacagaagcggcuacagcggcaucuucagcguggagggcaagagcugcaucaacagaugcuucuacguggagcugaucagaggcagagagcaggagaccagagugugguggaccagcaacagcaucgugguguucugcggcaccagcggcaccuacggcaccggcagcuggcccgacggcgccgacaucaaccugaugcccaucuga

SEQ ID NO: 182059 - RNA, 1410 nt, Artificial Sequence
  derived and/or modified CDS sequence (opt4) from neuraminidase__InfluenzaA__AFG99141
augaaccccaaccagaagaucaucaccaucggcagcgugagccugaccaucgccaccaucugcuuccugaugcagaucgccauccuggugaccaccgugacccugcacuucaagcaguacgagugcagcagcccccccaacaaccaggugaugcccugcgagcccaucaucaucgagagaaacaucaccgagaucguguaccugaccaacaccaccaucgagaaggagaucugccccaagcugguggaguacagaaacuggagcaagccccagugcaagaucaccggcuucgcccccuucagcaaggacaacagcaucagacugagcgccggcggcgacaucugggugaccagagagcccuacgugagcugcgaccccggcaagugcuaccaguucgcccugggccagggcaccacccuggacaacaagcacagcaacgacaccauccacgacagaacccccuacagaacccugcugaugaacgagcugggcgugcccuuccaccugggcaccagacaggugugcaucgccuggagcagcagcagcugccacgacggcaaggccuggcugcacgugugcgugaccggccacgacaagaacgccaccgccagcuucaucuacgacggcagacugguggacagcaucggcagcuggagcaagaacauccugagaacccaggagagcgagugcgugugcaucaacggcaccugcaccguggugaugaccgacggcagcgccagcgagagagccgagaccaagauccuguucaucgaggagggcaagaucgugcacaucagcccccugagcggcagcgcccagcacguggaggagugcagcugcuaccccagauaccccggcgugagaugcgugugcagagacaacuggaagggcagcaacagacccgugguggacaucaacgugaaggacuacagcaucgugagcagcuacgugugcagcggccuggugggcgacacccccagaaagaacgacagaagcagcagcagcuacugcagaaaccccaacaacgagaagggcaaccacggcgugaagggcugggccuucgacgacggcaacgacguguggaugggcagaaccaucagcgaggagagcagaagcggcuacgagaccuucaaggugaucggcggcuggagcacccccaacagcaagcugcagaucaacagacaggugaucguggacagcgacaacagaagcggcuacagcggcaucuucagcguggagggcaagagcugcaucaacagaugcuucuacguggagcugaucagaggcagagagcaggagaccagagugugguggaccagcaacagcaucgugguguucugcggcaccagcggcaccuacggcaccggcagcuggcccgacggcgccgacaucaaccugaugcccaucuga

SEQ ID NO: 182060 - RNA, 1410 nt, Artificial Sequence
  derived and/or modified CDS sequence (opt4) from neuraminidase__InfluenzaA__AFG99152
augaaccccaaccagaagaucaugaccaucggcagcgugagccugaccaucgccaccaucugcuuccugaugcagaucgccauccuggugaccaccgugacccugcacuucaagcacuacgaguucagcagcccccccaacaaccaggugaugcccugcgagcccaucaucaucgagagaaacaucaccgagaucguguaccugaccaacaccaccaucgagaaggaggugugccccaagcugguggaguacagaaacuggagcaagccccagugcaagaucaccggcuucgcccccuucagcaaggacaacagcaucagacugagcgccggcggcgacaucugggugaccagagagcccuacgugagcugcgaccccggcaagugcuaccaguucgcccugggccagggcaccacccugaacaacaagcacagcaacgacaccauccacgacagaacccccuacagaacccugcugaugaacgagcugggcgugcccuuccaccugggcaccagacaggugugcaucgccuggagcagcagcagcugccacgacggcaaggccuggcugcacgugugcgugaccggccacgacaagaacgccaccgccagcuucaucuacgacggcagacugguggacagcaucggcagcuggagcaagaacauccugagaacccaggagagcgagugcgugugcaucaacggcaccugcaccguggugaugaccgacggcagcgccagcggcagagccgacaccaagauccuguucaucgaggagggcaagaucgugcacaucagcccccugagcggcagcgcccagcacguggaggagugcagcugcuaccccagauaccccggcgugagaugcgugugcagagacaacuggaagggcagcaacagacccaucguggacaucaacgugaaggacuacagcaucgugagcagcuacgugugcagcggccuggugggcgacacccccagaaagaacgacagaagcagcagcagcuacugcagaaaccccaacaacgagaagggcaaccacggcgugaagggcugggccuucgacgacggcaacgacguguggaugggcagaaccaucggcgaggagcugagaagcggcuacgagaccuucaaggugaucggcggcuggagcacccccaacagcaagcugcagaucaacagacaggugaucguggacagcgacaacagaagcggcuacagcggcaucuucagcguggagggcaagagcugcaucaacagaugcuucuacguggagcugaucagaggcagagagcaggagaccagagugcuguggaccagcaacagcaucgugguguucugcggcaccagcggcaccuacggcaccggcagcuggcccgacggcgccgacaucaaccugaugcccaucuga

SEQ ID NO: 182061 - RNA, 1410 nt, Artificial Sequence; identical to SEQ ID NO: 179055
  derived and/or modified CDS sequence (opt4) from neuraminidase__InfluenzaA__AFG99163

SEQ ID NO: 182062 - RNA, 1410 nt, Artificial Sequence
  derived and/or modified CDS sequence (opt4) from neuraminidase__InfluenzaA__AFG99174
augaaccccagccagaagaucaucaccaucggcagcgugagccugaccaucgccaccaucugcuuccugaugcagaucgccauccuggugaccaccgugacccugcacuucaagcaguacgagugcagcagcccccccaacaaccaggugaugcccugcgagcccaucaucaucgagagaaacaucaccgagaucguguaccugaccaacaccaccaucgagaaggagaucugccccaagcugauggaguacagaaacuggagcaagccccagugcaagaucaccggcuucgcccccuucagcaaggacaacagcaucagacugagcgccggcggcgacaucugggugaccagagagcccuacgugagcugcgaccccggcaagugcuaccaguucgcccugggccagggcaccacccuggacaacaagcacagcaacgacaccauccacgacagaacccccuacagaacccugcugaugaacgagcugggcgugcccuuccaccugggcaccagacaggugugcaucgccuggagcagcagcagcugccacgacggcaaggccuggcugcacgugugcgugaccggccacgacaagaacgccaccgccagcuucaucuacgacggcagacugguggacagcaucggcagcuggagcaagaacauccugagaacccaggagagcgagugcgugugcaucaacggcaccugcaccguggugaugaccgacggcagcgccagcgagagagccgagaccaagauccuguucaucgaggagggcaagaucgugcacaucagcccccugagcggcagcgcccagcacguggaggagugcagcugcuaccccagauaccccggcgugagaugcgugugcagagacaacuggaagggcagcaacagacccgugguggacaucaacgugaaggacuacagcaucgugagcagcuacgugugcagcggccuggugggcgacacccccagaaagaacgacagaagcagcagcagcuacugcagaaaccccaacaacgagaagggcaaccacggcgugaagggcugggccuucgacgacggcaacgacguguggaugggcagaaccaucagcgaggagagcagaagcggcuacgagaccuucaaggugaucggcggcuggagcacccccaacagcaagcugcagaucaacagacaggugaucguggacagcgacaacagaagcggcuacagcggcaucuucagcguggagggcaagagcugcaucaacagaugcuucuacguggagcugaucagaggcagagagcaggagaccagagugugguggaccagcaacagcaucgugguguucugcggcaccagcggcaccuacggcaccggcagcuggcccgacggcgccgacaucaaccugaugcccaucuga

SEQ ID NO: 182063 - RNA, 1410 nt, Artificial Sequence
  derived and/or modified CDS sequence (opt4) from neuraminidase__InfluenzaA__AFG99185
augaaccccaaccagaagaucaucaccaucggcagcgugagccugaccaucgccaccaucugcuuccugaugcagaucgccauccuggugaccaccgugacccugcacuucaagcaguacgagugcagcagcccccccaacaaccaggugaugcccugcgagcccaucaucaucgagagaaacaucaccgagaucguguaccugaccaacaccaccaucgagaaggagaucugccccaagcugguggaguacagaaacuggagcaagccccagugcaagaucaccggcuucgcccccuucagcaaggacaacagcaucagacugagcgccggcggcgacaucugggugaccagagagcccuacgugagcugcgaccccggcaagugcuaccaguucgcccugggccagggcaccacccugaacaacaagcacagcaacgacaccauccacgacagaacccccuacagaacccugcugaugaacgagcugggcgugcccuuccaccugggcaccaagcaggugugcaucgccuggagcagcagcagcugccacgacggcaaggccuggcugcacgugugcgugaccggccacgacaagaacgccaccgccagcuucaucuacgacggcagacugguggacagcaucggcagcuggagcaagaacauccugagaacccaggagagcgagugcgugugcaucaacggcaccugcaccguggugaugaccgacggcagcgccagcgagagagccgacaccaagauccuguucaucgaggagggcaagaucgugcacaucagcccccugagcggcagcgcccagcacguggaggagugcagcugcuaccccagauaccccggcgugagaugcgugugcagagacaacuggaagggcagcaacagacccaucguggacaucaacgugaaggacuacagcaucgugagcagcuacgugugcagcggccuggugggcgacacccccagaaagaacgacagaagcagcagcagcuacugcagaaaccccaacaacgagaagggcaaccacggcgugaagggcugggccuucgacgacggcaacgacguguggaugggcagaaccaucggcgaggagcugagaagcggcuacgagaccuucaaggugaucggcggcuggagcacccccaacagcaagcugcagaucaacagacaggugaucguggacagcaagaacagaagcggcuacagcggcaucuucagcguggagggcaagagcugcaucaacagaugcuucuacguggagcugaucagaggcagagagcaggagaccagagugugguggaccagcaacagcaucgugguguucugcggcaccagcggcaccuacggcaccggcagcuggcccgacggcgccgacaucaaccugaugcccaucuga

SEQ ID NO: 182064 - RNA, 1410 nt, Artificial Sequence
  derived and/or modified CDS sequence (opt4) from neuraminidase__InfluenzaA__AFG99196
augaaccccaaccagaagaucaucaccaucggcagcgugagccugaccaucgccaccaucugcuuccugacccagaucgccauccuggugaccaccgugacccugcacuucaagcaguacgagugcagcagcagccccaacaaccaggugaugcccugcgagcccaucaucaucgagagaaacaucaccgagaucguguaccugaccaacaccaccaucgagaaggagaucugccccaagcugguggaguacagaaacuggagcaagccccagugcaagaucaccggcuucgcccccuucagcaaggacaacagcaucagacugagcgccggcggcgacaucugggugaccagagagcccuacgugagcugcgaccccggcaagugcuaccaguucgcccugggccagggcaccacccugaacaacaagcacagcaacgacaccauccacgacagaacccccuacagaacccugcugaugaacgagcugggcgugcccuuccaccugggcaccaagcaggugugcaucgccuggagcagcagcagcugccacgacggcaaggccuggcugcacgugugcaucaccggccacgacaagaacgccaccgccagcuucaucuacgacggcagacugguggacagcaucggcagcuggagcaagaacauccugagaacccaggagagcgagugcgugugcaucaacggcaccugcaccguggugaugaccgacggcagcgccagcgagagagccgacaccaagauccuguucaucgaggagggcaagaucgugcacaucagcccccugagcggcagcgcccagcacguggaggagugcagcugcuaccccagauaccccggcgugagaugcgugugcagagacaacuggaagggcagcaacagacccaucguggacaucaacgugaaggacuacagcaucgugagcagcuacgugugcagcggccuggugggcgacacccccagaaagaacgacagaagcagcagcagcuacugcagaaaccccaacaacgagaagggcaaccacggcgugaagggcugggccuucgacgacggcaacgacguguggaugggcagaaccaucggcgaggagcugagaagcggcuacgagaccuucaaggugaucggcggcuggagcacccccaacagcaagcugcagaucaacagacaggugaucguggacagcggcaacagaagcggcuacagcggcaucuucagcguggagggcaagagcugcaucaacagaugcuucuacguggagcugaucagaggcagagagcaggagaccagagugugguggaccagcaacagcaucgugguguucugcggcaccagcggcaccuacggcaccggcagcuggcccgacggcgccgacaucaaccugaugcccaucuga

SEQ ID NO: 182065 - RNA, 1410 nt, Artificial Sequence
  derived and/or modified CDS sequence (opt4) from neuraminidase__InfluenzaA__AFG99207
augaaccccaaccagaagaucaucaccaucggcagcgugagccugaccaucgccaccaucugcuuccugaugcagaucgccauccuggugaccaccgugacccugcacuucaagcccuacgagugcagcagcccccccaacaaccaggugaugcccugcgagcccaucaucaucgagagaaacaucaccgagaucguguaccugaccaacaccaccaucgagaaggagaucugccccaagcugguggaguacagaaacuggagcaagccccagugcaagaucaccggcuucgcccccuucagcaaggacaacagcaucagacugagcgccggcggcgacaucugggugaccagagagcccuacgugagcugcgaccccggcaagugcuaccaguucgcccugggccagggcaccacccugaacaacaagcacagcaacgacaccauccacgacagaacccccuacagaacccugcugaugaacgagcugggcgugcccuuccaccugggcaccaagcaggugugcaucgccuggagcagcagcagcugccacgacggcaaggccuggcugcacgugugcgugaccggccacgacaagaacgccaccgccagcuucaucuacgacggcagacugguggacagcaucggcagcuggagcaagaacauccugagaacccaggagagcgagugcgugugcaucaacggcaccugcaccguggugaugaccgacggcagcgccagcgagagagccgacaccaagauccuguucaucgaggagggcaagaucgugcacaucagcccccugagcggcagcgcccagcacguggaggagugcagcugcuaccccagauaccccggcgugagaugcgugugcagagacaacuggaagggcagcaacagacccaucguggacaucaacgugaaggacuacagcaucgugagcagcuacgugugcagcggccuggugggcgacacccccagaaagaacgacagaagcagcagcagcuacugcagaaaccccaacaacgagaagggcaaccacggcgugaagggcugggccuucgacgacggcaacgacguguggaugggcagaaccaucggcgaggagcugagaagcggcuacgagaccuucaaggugaucggcggcuggagcacccccaacagcaagcugcagaucaacagacaggugaucguggacagcaagagcagaagcggcuacagcggcaucuucagcguggagggcaagagcugcaucaacagaugcuucuacguggagcugaucagaggcagagagcaggagaccagagugugguggaccagcaacagcaucgugguguucugcggcaccagcggcaccuacggcaccggcagcuggcccgacggcgccgacaucaaccugaugcccaucuga

SEQ ID NO: 182066 - RNA, 1410 nt, Artificial Sequence; identical to SEQ ID NO: 174874
  derived and/or modified CDS sequence (opt4) from neuraminidase__InfluenzaA__AFG99218

SEQ ID NO: 182067 - RNA, 1410 nt, Artificial Sequence
  derived and/or modified CDS sequence (opt4) from neuraminidase__InfluenzaA__AFG99229
augaaccccaaccagaagaucaucaccaucggcagcgugagccugaccaucgccaccaucugcuuccugaugcagaucgccauccuggugaccaccgugacccugcacuucaagcaguacgagugcagcagcccccccaacaaccaggugaugcccugcgagcccaucaucaucgagagaaacaucaccaagaucguguaccugaccaacaccaccaucgagaaggagaucugccccaagcugguggaguacagaaacuggagcaagccccagugcaagaucaccggcuucgcccccuucagcaaggacaacagcaucagacugagcgccggcggcgacaucugggugaccagagagcccuacgugagcugcgaccccggcaagugcuaccaguucgcccugggccagggcaccacccugaacaacaagcacagcaacgacaccauccacgacagaacccccuacagaacccugcugaugaacgagcugggcgugcccuuccaccugggcaccaagcaggugugcaucgccuggagcagcagcagcugccacgacggcaaggccuggcugcacgugugcgugaccggccacgacaagaacgccaccgccagcuucaucuacgacggcagacugguggacagcaucggcagcuggagcaagaacauccugagaacccaggagagcgagugcgugugcaucaacggcaccugcaccguggugaugaccgacggcagcgccagcgagagagccgacaccaagauccuguucaucgaggagggcaagaucgugcacaucagcccccugagcggcagcgcccagcacguggaggagugcagcugcuaccccagauaccccggcgugagaugcgugugcagagacaacuggaagggcagcaacagacccaucguggacaucaacgugaaggacuacagcaucgugagcagcuacgugugcagcggccuggugggcgacacccccagaaagaacgacagaagcagcagcagcuacugcagaaaccccaacaacgagaagggcaaccacggcgugaagggcugggccuucgacgacggcaacgacguguggaugggcagaaccaucggcgaggagcugagaagcggcuacgagaccuucaaggugaucggcggcuggagcacccccaacagcaagcugcagaucaacagacaggugaucguggacagcaagaacagaagcggcuacagcggcaucuucagcguggagggcaagagcugcaucaacagaugcuucuacguggagcugaucagaggcagagagcaggagaccagagugugguggaccagcaacagcaucgugguguucugcggcaccagcggcaccuacggcaccggcagcuggcccgacggcgccgacaucaaccugaugcccaucuga

SEQ ID NO: 182068 - RNA, 1410 nt, Artificial Sequence
  derived and/or modified CDS sequence (opt4) from neuraminidase__InfluenzaA__AFG99240
augaaccccaaccagaagaucaucaccaucggcagcgugagccugaccaucgccaccaucugcuuccugaugcagaucgccauccuggugaccaccgugacccugcacuucaagcaguacgagugcagcagcccccccagcaaccaggugaugcccugcgagcccaucaucaucgagagaaacaucaccgagaucguguaccugaccaacaccaccaucgagaaggagaucugccccaagcccguggaguacagaaacuggagcaagccccagugcaagaucaccggcuucgcccccuucagcaaggacaacagcaucagacugagcgccggcggcgacaucugggugaccagagagcccuacgugagcugcgaccccggcaagugcuaccaguucgcccugggccagggcaccacccugaacaacaagcacagcaacgacaccauccacgacagaacccccuacagaacccugcugaugaacgagcugggcgugcccuuccaccugggcaccaagcaggugugcaucgccuggagcagcagcagcugccacgacggcaaggccuggcugcacgugugcgugaccggccacgacaagaacgccaccgccagcuucaucuacgacggcagacugguggacagcaucggcagcuggagcaagaacauccugagaacccaggagagcgagugcgugugcaucaacggcaccugcaccguggugaugaccgacggcagcgccagcgagagagccgacaccaagauccuguucaucgaggagggcaagaucgugcacaucagcccccugagcggcagcgcccagcacguggaggagugcagcugcuaccccagauaccccggcgugagaugcgugugcagagacaacuggaagggcagcaacagacccaucguggacaucaacgugaaggacuacagcaucgugagcagcuacgugugcagcggccuggugggcgacacccccagaaagaacgacagauucagcagcagcuacugcagaaaccccaacaacgagaagggcaaccacggcgugaagggcugggccuucgacgacggcaacgacguguggaugggcagaaccaucggcgaggagcugagaagcggcuacgagaccuucaaggugaucggcggcuggagcacccccaacagcaagcugcagaucaacagacaggugaucguggacagcaagaacagaagcggcuacagcggcaucuucagcguggagggcaagagcugcaucaacagaugcuucuacguggagcugaucagaggcagagagcaggagaccagagugugguggaccagcaacagcaucgugguguucugcggcaccagcggcaccuacggcaccggcagcuggcccgacggcgccgacaucaaccugaugcccaucuga

SEQ ID NO: 182069 - RNA, 1410 nt, Artificial Sequence; identical to SEQ ID NO: 174873
  derived and/or modified CDS sequence (opt4) from neuraminidase__InfluenzaA__AFG99251

SEQ ID NO: 182070 - RNA, 1410 nt, Artificial Sequence
  derived and/or modified CDS sequence (opt4) from neuraminidase__InfluenzaA__AFG99273
augaaccccaaccagaagaucaucaccaucggcagcgugagccugaccaucgccaccaugugcuuccugaugcagaucgccauccuggugaccaccgugacccugcacuucaagcaguacgagugcagcagcccccccaacaaccaggugaugcccugcgagcccaccaucaucgagagaaacaucaccgagaucguguaccugaccaacaccaccaucgagaaggagaucugccccaagcugguggaguacagaaacuggagcaagccccagugcaagaucaccggcuucgcccccuucagcaaggacaacagcaucagacugagcgccggcggcgacaucugggugaccagagagcccuacgugagcugcgaccccggcaagugcuaccaguucgcccugggccagggcaccacccugaacaacagacacagcaacgacaccgugcacgacagaacccccuacagaacccugcugaugaacgagcugggcgugcccuuccaccugggcaccaagcaggugugcaucgccuggagcagcagcagcugccacgacggcaaggccuggcugcacgugugcgugaccggccacgacaagaacgccaccgccagcuucaucuacgacggcagacugguggacagcaucggcagcuggagcaagaacauccugagaacccaggagagcgagugcgugugcaucaacggcaccugcaccguggugaugaccgacggcagcgccagcgagagagccgacaccaagauccuguucaucgaggagggcaagaucgugcacaucagcccccugagcggcagcgcccagcacguggaggagugcagcugcuaccccagauaccccggcgugagaugcgugugcagagacaacuggaagggcagcaacagacccaucguggacaucaacgugaaggacuacagcaucgugagcagcuacgugugcagcggccuggugggcgacacccccagaaagaacgacagaagcagcagcagcuacugcagaaaccccaacaacgagaagggcagccacggcgugaagggcugggccuucgacgacggcaacgacguguggaugggcagaaccaucggcgaggagcugagaagcggcuacgagaccuucaaggugaucggcggcuggagcacccccaacagcaagcugcagaucaacagacaggugaucguggacagcggcaacagaagcggcuacagcggcaucuucagcguggagggcaagagcugcaucaacagaugcuucuacguggagcugaucagaggcagagagcaggagaccagagugugguggaccagcaacagcaucgugguguucugcggcaccagcggcaccuacggcaccggcagcuggcccgacggcgccgacaucaaccugaugcccaucuga

SEQ ID NO: 182071 - RNA, 1410 nt, Artificial Sequence
  derived and/or modified CDS sequence (opt4) from neuraminidase__InfluenzaA__AFG99284
augaaccccaaccagaagaucaucaccaucggcagcgugagccugaccaucgccaccaucugcuuccugaugcagaucgccauccuggugaccaccgugacccugcacuucaagcaguacgagugcagcagcccccccagcaaccaggugaugcccugcgagcccaucaucaucgagagaaacaucaccaagaucguguaccugaccaacaccaccaucgagaaggagaucugccccaagcugguggaguacagaaacuggagcaagccccagugcaagaucaccggcuucgcccccuucagcaaggacaacagcaucagacugagcgccggcggcgacaucugggugaccagagagcccuacgugagcugcgaccccagcaagugcuaccaguucgcccugggccagggcaccacccugaacaacaagcacagcaacgacaccauccacgacagaacccccuacagaacccugcugaugaacgagcugggcgugcccuuccaccugggcaccaagcaggugugcaucgccuggagcagcagcagcugccacgacggcaaggccuggcugcacgugugcgugaccggccacgacgacaacgccaccgccagcuucaucuacgacggcagacugguggacagcaucggcagcuggagcaagaacauccugagaacccaggagagcgagugcgugugcaucaacggcaccugcaccguggugaugaccgacggcagcgccagcgagagagccgacaccaagauccuguucaucgaggagggcaagaucgugcacaucagcccccugagcggcagcgcccagcacguggaggagugcagcugcuaccccagauaccccggcgugagaugcgugugcagagacaacuggaagggcagcaacagacccaucguggacaucaacgugaaggacuacagcaucgugagcagcuacgugugcagcggccuggugggcgacacccccagaaagaacgacagaagcagcagcagcuacugcagaaaccccaacaacgagaagggcagccacggcgugaagggcugggccuucgacgacggcaacgacguguggaugggcagaaccaucggcgaggagcugagaagcggcuacgagaccuucaaggugaucggcggcuggagcacccccaacagcaagcugcagaucaacagacaggugaucguggacagcaagaacagaagcggcuacagcggcaucuucagcguggagggcaagagcugcaucaacagaugcuucuacguggagcugaucagaggcagagagcaggagaccagagugugguggaccagcaacagcaucgugguguucugcggcaccagcggcaccuacggcaccggcagcuggcccgacggcgccgacaucaaccugaugcccaucuga

SEQ ID NO: 182072 - RNA, 1410 nt, Artificial Sequence
  derived and/or modified CDS sequence (opt4) from neuraminidase__InfluenzaA__AFG99295
augaaccccaaccagaagaucaucaccaucggcagcgugagccugaccaucgccaccaucugcuuccugaugcagaucgccauccuggugaccaccgugacccugcacuucaagcaguacgagugcagcagcccccccaacaaccaggugaugcccugcgagcccaccaucaucgagagaaacaucaccgagaucguguaccugaccaacaccaccaucgagaaggagaucugccccaagcugguggaguacagaaacuggagcaagccccagugcaagaucaccggcuucgcccccuucagcaaggacaacagcaucagacugagcgccggcggcgacaucugggugaccagagagcccuacgugagcugcgaccccgacaagugcuaccaguucgcccugggccagggcaccacccugaacaacagacacagcaacgacaccgugcacgacagaacccccuacagaacccugcugaugaacgagcugggcgugcccuuccaccugggcaccaagcaggugugcaucgccuggagcagcagcagcugccacgacggcaaggccuggcugcacgugugcgugaccggccacgacaagaacgccaccgccagcuucaucuacaacggcagacugguggacagcaucggcagcuggagcaagaacauccugagaacccaggagagcgagugcgugugcaucaacggcaccugcaccguggugaugaccgacggcagcgccagcgagagagccgacaccaagauccuguucaucgaggagggcaagaucgugcacaucagcccccugagcggcagcgcccagcacguggaggagugcagcugcuaccccagauaccccggcgugagaugcgugugcagagacaacuggaagggcagcaacagacccaucguggacaucaacgugaaggacuacagcaucaucagcagcuacgugugcagcggccuggugggcgacacccccagaaagaacgacagaagcagcagcagcuacugccagaaccccaacaacgagaagggcagccacggcgugaagggcugggccuucgacgacggcaacgacguguggaugggcagaaccaucggcgaggagcugagaagcggcuacgagaccuucaaggugaucggcggcuggagcacccccaacagcaagcugcagaucaacagacaggugaucguggacagcggcaacagaagcggcuacagcggcaucuucagcguggagggcaagagcugcaucaacagaugcuucuacguggagcugaucagaggcagaaagcaggagaccagagugugguggaccagcaacagcaucgugguguucugcggcaccagcggcaccuacggcaccggcagcuggcccgacggcgccgacaucaaccugaugcccaucuga

SEQ ID NO: 182073 - RNA, 1410 nt, Artificial Sequence
  derived and/or modified CDS sequence (opt4) from neuraminidase__InfluenzaA__AFG99317
augaaccccaaccagaagaucaucaccaucggcagcgugagccugaccaucgccaccaucugcuuccugaugcagaucgccauccuggugaccaccgugacccugcacuucaagcaguacgagugcagcagcccccccaacaaccaggugaugcccugcgagcccaccaucaucgagagaaacaucaccgagaucguguaccugaccaacaccaccaucgagaaggagaucugccccaagcugguggaguacagaaacuggagcaagccccagugcaacaucaccggcuucgcccccuucagcaaggacaacagcaucagacugagcgccggcggcgacaucugggugaccagagagcccuacgugagcugcgaccccggcaagugcuaccaguucgcccugggccagggcaccacccugaacaacagacacagcaacgacaccgugcacgacagaacccccuacagaacccugcugaugaacgagcugggcgugcccuuccaccugggcaccaagcaggugugcaucgccuggagcagcagcagcugccacgacggcaaggccuggcugcacgugugcgugaccggccacgacgagaacgccaccgccagcuucaucuacgacggcagacugguggacagcaucggcagcuggagcaagaacauccugagaacccaggagagcgagugcgugugcaucaacggcaccugcaccguggugaugaccgacggcagcgccagcgagagagccgacaccaagauccuguucaucgaggagggcaagaucgugcacaucagcccccugagcggcagcgcccagcacguggaggagugcagcugcuaccccagauaccccggcgugagaugcgugugcagagacaacuggaagggcagcaacagacccaucguggacaucaacgugaaggacuacagcaucgugagcagcuacgugugcagcggccuggugggcgacacccccagaaagaacgacagaagcagcagcagcuacugcagaaaccccaacaacgagaagggcagccacggcgugaagggcugggccuucgacgacggcaacgacguguggaugggcagaaccaucgacgaggagcugagaagcggcuacgagaccuucaaggugaucggcggcuggagcacccccaacagcaagcugcagaucaacagacaggugaucguggacagcggcaacagaagcggcuacagcggcaucuucagcguggagggcaagagcugcaucaacagaugcuucuacguggagcugaucagaggcagaaagcaggagaccagagugugguggaccagcaacagcaucgugguguucugcggcaccagcggcaccuacggcaccggcagcuggcccgacggcgccgacaucaaccugaugcccaucuga

SEQ ID NO: 182074 - RNA, 1410 nt, Artificial Sequence
  derived and/or modified CDS sequence (opt4) from neuraminidase__InfluenzaA__AFG99328
augaaccccaaccagaagaucaucaccaucggcagcgugagccugacccuggccaccaucugcuuccugaugcagaucgccauccuggugaccaccgugacccugcacuucaagcaguacgagugcagcagcccccccaacaaccaggugaugcccugcgagcccaccaucaucgagagaaacaucaccgagaucguguaccugaccaacaccaccaucgagaaggagaucugccccaagcugguggaguacagaaacuggagcaagccccagugcaagaucaccggcuucgcccccuucagcaaggacaacagcaucagacugagcgccggcggcgacaucugggugaccagagagcccuacgugagcugcgaccccagcaagugcuaccaguucgcccugggccagggcaccacccugaacaacagacacagcaacgacaccgugcacgacagaacccccuacagaacccugcugaugaacgagcugggcgugcccuuccaccugggcaccagacaggugugcauggccuggagcagcagcagcugccacgacggcaaggccuggcugcacgugugcgugaccggccacgacgagaacgccaccgccagcuucaucuacgacggcagacugguggacagcaucggcagcuggagcaagaacgugcugagaacccaggagagcgagugcgugugcaucaacggcaccugcaccguggugaugaccgacggcagcgccagcgagagagccgacaccaagauccuguucaucgaggagggcaagaucgugcacaucagcccccugagcggcaacgcccagcacguggaggagugcagcugcuaccccagauaccccggcgugagaugcgugugcagagacaacuggaagggcagcaacagacccaucguggacaucaacgugaaggacuacagcaucgugagcagcuacgugugcagcggccuggugggcgacacccccagaaagaacgacagaagcagcagcagcuacugcagaaaccccaacaacgagaagggcagccacggcgugaagggcugggccuucgacgacggcaacgacguguggaugggcagaaccaucggcgaggagcugagaagcggcuacgagaccuucaaggugaucggcggcuggagcacccccaacagcaagcugcagaucaacagacaggugaucguggacagcggcaacagaagcggcuacagcggcaucuucagcguggagggcaagagcugcaucaacagaugcuucuacguggagcugaucagaggcagaaagcaggagaccagagugugguggaccagcaacagcaucgugguguucugcggcaccagcggcaccuacggcaccggcagcuggcccgacggcgccgacaucaaccugaugcccaucuga

SEQ ID NO: 182075 - RNA, 1410 nt, Artificial Sequence
  derived and/or modified CDS sequence (opt4) from neuraminidase__InfluenzaA__AFG99350
augaaccccaaccagaagaucaucaccaucggcagcgugagccugacccuggccaccaucugcuuccugaugcagaucgccauccuggugaccaccgugacccugcacuucaagcaguacgagugcagcagcccccccaacaaccaggugaugcccugcgagcccaccaucaucgagagaaacaucaccgagaucguguaccugaccaacaccaccaucgagaaggagaucugccccaagcugguggaguacagaaacuggagcaagccccagugcaagaucaccggcuucgcccccuucagcaaggacaacagcaucagacugagcgccggcggcgacaucugggugaccagagagcccuacgugagcugcgaccccagcaagugcuaccaguucgcccugggccagggcaccacccugaacaacagacacagcaacgacaccgugcacgacagaacccccuacagaacccugcugaugaacgagcugggcgugcccuuccaccugggcaccagacaggugugcauggccuggagcagcagcagcugccacgacggcaaggccuggcugcacgugugcgugaccggccacgacgagaacgccaccgccagcuucaucuacgacggcagacugguggacagcaucggcagcuggagcaagaacauccugagaacccaggagagcgagugcgugugcaucaacggcaccugcaccguggugaugaccgacggcagcgccagcgagagagccgacaccaagauccuguucaucgaggagggcaagaucgugcacaucagcccccugagcggcagcgcccagcacguggaggagugcagcugcuaccccagauaccccggcgugagaugcgugugcagagacaacuggaagggcagcaacagacccaucguggacaucaacgugaaggacuacagcaucgugagcagcuacgugugcagcggccuggugggcgacacccccagaaagaacgacagaagcagcagcagcuacugcagaaaccccaacaacgagaagggcagccacggcgugaagggcugggccuucgacgacggcaacgacguguggaugggcagaaccaucggcgaggagcugagaagcggcuacgagaccuucaaggugaucggcggcuggagcacccccaacagcaagcugcagaucaacagacaggugaucguggacagcggcaacagaagcggcuacagcggcaucuucagcguggagggcaagagcugcaucaacagaugcuucuacguggagcugaucagaggcagaaagcaggagaccagagugugguggaccagcaacagcaucgugguguucugcggcaccagcggcaccuacggcaccggcagcuggcccgacggcgccgacaucaaccugaugcccaucuga

SEQ ID NO: 182076 - RNA, 1410 nt, Artificial Sequence
  derived and/or modified CDS sequence (opt4) from neuraminidase__InfluenzaA__AFG99361
augaaccccaaccagaagaucaucaccaucggcagcgugagccugaccaucgccaccaucugcuuccugaugcagaucgccauccuggugaccaccgugacccugcacuucaagcaguacgagugcaacagcccccccaacaaccaggugaugcugugcgagcccaccaucaucgagagaaacaucaccgagaucguguaccugaccaacaccaccaucgagaaggagaagugccccaagcuggccgaguacagaaacuggagcaagccccagugcaagaucaccggcuucgcccccuucagcaaggacaacagcaucagacugagcgccggcggcgacaucugggugaccagagagcccuacgugagcugcgaccccggcaagugcuaccaguucgcccugggccagggcaccacccugaacaacagacacagcaacgacaccgugcacgacagaacccccuacagaacccugcugaugaacgagcugggcgugcccuuccaccugggcaccaagcaggugugcaucgccuggagcagcagcagcugccacgacggcaaggccuggcugcacgugugcgugaccggccacgacgagaacgccaccgccagcuucaucuacgacggcagacugguggacagcaucggcagcuggagcaagaacauccugagaacccaggagagcgagugcgugugcaucaacggcaccugcaccguggugaugaccgacggcagcgccagcgagagagccgacaccaagauccuguucaucgaggagggcaagaucgugcacaucagcccccugagcggcagcgcccagcacguggaggagugcagcugcuaccccagauaccccggcgugagaugcgugugcagagacaacuggaagggcagcaacagacccaucguggacaucaacgugaaggacuacagcaucgugagcagcuacgugugcagcggccuggugggcgacacccccagaaagaacgacagcagcagcagcagcuacugcagaaaccccaacaacgagaagggcagccacggcgugaagggcugggccuucgacgacggcaacgacguguggaugggcagaaccaucagcgaggagcugagaagcggcuacgagaccuucaaggugaucggcggcuggagcaagcccaacagcaagcugcagaucaacagacaggugaucguggacagaggcaacagaagcggcuacagcggcaucuucagcguggagggcaagagcugcaucaacagaugcuucuacguggagcugaucagaggcagaaagcaggagaccgaggugugguggaccagcaacagcaucgugguguucugcggcaccagcggcaccuacggcaccggcagcuggcccgacggcgccgacaucaaccugaugcccaucuga

SEQ ID NO: 182077 - RNA, 1410 nt, Artificial Sequence
  derived and/or modified CDS sequence (opt4) from neuraminidase__InfluenzaA__AFG99383
augaaccccaaccagaagaucaucaccaucggcagcgugagccugaccaucgccaccaucugcuuccugaugcagaucgccauccuggugaccaccgugacccugcacuucaagcaguacgagugcagcagcccccccaacaaccaggugaugcccugcgagcccaccaucaucgagagaaacaucaccgagaucguguaccugaccaacaccaccaucgagaaggagaucugccccaagcugguggaguacagaaacuggagcaagccccagugcaagaucaccggcuucgcccccuucagcaaggacaacagcaucagacugagcgccggcggcgacaucugggugaccagagagcccuacgugagcugcgaccccggcaagugcuaccaguucgcccugggccagggcaccacccugaacaacagacacagcaacgacaccgugcacgacagaacccccuacagaacccugcugaugaacgagcugggcgugcccuuccaccugggcaccaagcaggugugcaucgccuggagcagcagcagcugccacgacggcaaggccuggcugcacgugugcgugaccggccacgacgagaacgccaccgccagcuucaucuacgacggcagacugguggacagcaucggcagcuggagcaagaacauccugagaacccaggagagcgagugcgugugcaucaacggcaccugcaccguggugaugaccgacggcagcgccagcgagagagccgacaccaagauccuguucaucgaggagggcaagaucgugcacaucagcccccugagcggcagcgcccagcacguggaggagugcagcugcuaccccagauaccccggcgugagaugcgugugcagagacaacuggaagggcagcaacagacccaucguggacaucaacgugaaggacuacagcaucgugagcagcuacgugugcagcggccuggugggcgacacccccagaaagaacgacagcagcagcagcagcuacugcagaaaccccaacaacgagaagggcagccacggcgugaagggcugggccuucgacgacggcaacgacguguggaugggcagaaccaucggcgaggagcugagaagcggcuacgagaccuucaaggugaucggcggcuggagcacccccaacagcaagcugcagaucaacagacaggugaucguggacagcggcaacagaagcggcuacagcggcaucuucagcguggagggcaagagcugcaucaacagaugcuucuacguggagcugaucagaggcagaaagcaggagaccaaggugugguggaccagcaacagcaucgugguguucugcggcaccagcggcaccuacggcaccggcagcuggcccgacggcgccgacaucaaccugaugcccaucuga

SEQ ID NO: 182078 - RNA, 1410 nt, Artificial Sequence; identical to SEQ ID NO: 182077
  derived and/or modified CDS sequence (opt4) from neuraminidase__InfluenzaA__AFG99394

SEQ ID NO: 182079 - RNA, 1410 nt, Artificial Sequence
  derived and/or modified CDS sequence (opt4) from neuraminidase__InfluenzaA__AFG99405
augaaccccaaccagaagaucaucaccaucggcagcgugagccugaccaucgccaccaucugcuuccugaugcagaucgccauccuggugaccaccgugacccugcacuucaagcaguacgagugcagcagcccccccaacaaccaggugaugcccugcgagcccaccaucaucgagagaaacaucaccgagaucguguaccugaccaacaccaccaucgagaaggagaucugccccaagcugguggaguacagaaacuggagcaagccccagugcaagaucaccggcuucgcccccuucagcaaggacaacagcaucagacugagcgccggcggcgacaucugggugaccagagagcccuacgugagcugcgaccccggcaagugcuaccaguucgcccugggccagggcaccacccugaacaacagacacagcaacgacaccgugcacgacagaacccccuacagaacccugcugaugaacgagcugggcgugcccuuccaccugggcaccaagcaggugugcaucgccuggagcagcagcagcugccacgacggcaaggccuggcugcacgugugcgugaccggccacgacaagaacgccaccgccagcuucaucuacgacggcagacugguggacagcaucggcagcuggagcaagaacauccugagaacccaggagagcgagugcgugugcaucaacggcaccugcaccguggugaugaccgacggcagcgccagcgagagagccgacaccaagauccuguucaucgaggagggcaagaucgugcacaucagcccccugagcggcagcgcccagcacguggaggagugcagcugcuaccccagauaccccggcgugagaugcgugugcagagacaacuggaagggcagcaacagacccaucguggacaucaacgugaaggacuacagcaucaucagcagcuacgugugcagcggccuggugggcgacacccccagaaagaacgacagaagcagcagcagcuacugcagaaaccccaacaacgagaagggcagccacggcgugaagggcugggccuucgacgacggcaacgacguguggaugggcagaaccaucggcgaggagcugagaagcggcuacgagaccuucaaggugaucggcggcuggagcacccccaacagcaagcugcagaucaacagacaggugaucguggacagcggcaacagaagcggcuacagcggcaucuucagcguggagggcaagagcugcaucaacagaugcuucuacguggagcugaucagaggcagagagcaggagaccagagugugguggaccagcaacagcaucgugguguucugcggcaccagcggcaccuacggcaccggcagcuggcccgacggcgccgacaucaaccugaugcccaucuga

SEQ ID NO: 182080 - RNA, 1410 nt, Artificial Sequence
  derived and/or modified CDS sequence (opt4) from neuraminidase__InfluenzaA__AFG99416
augaaccccaaccagaagaucaucaccaucggcagcgugagccugaccaucgccaccaucugcuuccugaugcagaucgccauccuggugaccaccgugacccugcacuucaagcaguacgagugcagcagcccccccaacaaccaggugaugcccugcgagcccaccaucaucgagagaaacaucaccgagaucguguaccugaccaacaccaccaucgagaaggagaucugccccaagcugguggaguacagaaacuggagcaagccccagugcaagaucaccggcuucgcccccuucagcaaggacaacagcaucagacugagcgccggcggcgacaucugggugaccagagagcccuacgugagcugcgaccccggcaagugcuaccaguucgcccugggccagggcaccacccugaacaacagacacagcaacgacaccgugcacgacagaacccccuacagaacccugcugaugaacgagcugggcgugcccuuccaccugggcaccaagcaggugugcaucgccuggagcagcagcagcugccacgacggcaaggccuggcugcacgugugcgugaccggccacgacgagaacgccaccgccagcuucaucuacgacggcagacugguggacagcaucggcagcuggagcaagaacauccugagaacccaggagagcgagugcgugugcaucaacggcaccugcaccguggugaugaccgacggcagcgccagcgagagagccgacaccaagauccuguucaucgaggagggcaagaucauccacaucagcccccugagcggcagcgcccagcacguggaggagugcagcugcuaccccagauaccccggcgugagaugcgugugcagagacaacuggaagggcagcaacagacccaucguggacaucaacgugaaggacuacagcaucgugagcagcuacgugugcagcggccuggugggcgacacccccagaaagaacgacagcagcagcagcagcuacugcagaaaccccaacaacgagaagggcagccacggcgugaagggcugggccuucgacgacggcaacgacguguggaugggcagaaccaucggcgaggagcugagaagcggcuacgagaccuucaaggugaucggcggcuggagcacccccaacagcaagcugcagaucaacagacaggugaucguggacggcggcaacagaagcggcuacagcggcaucuucagcguggagggcaagagcugcaucaacagaugcuucuacguggagcugaucagaggcagaaagcaggagaccaaggugugguggaccagcaacagcaucgugguguucugcggcaccagcggcaccuacggcaccggcagcuggcccgacggcgccgacaucaaccugaugcccaucuga

SEQ ID NO: 182081 - RNA, 1410 nt, Artificial Sequence
  derived and/or modified CDS sequence (opt4) from neuraminidase__InfluenzaA__AFG99427
augaaccccaaccagaagaucaucaccaucggcagcgugagccugaccaucgccaccaucugcuuccugaugcagaucgccauccuggugaccaccgugacccugcacuucaagcaguacgagugcagcagcccccccaacaaccaggugaugcccugcgagcccaccaucaucgagagaaacaucaccgagaucguguaccugaccaacaccaccaucgagaaggaggugugccccaagcugguggaguacagaaacuggagcaagccccagugcaagaucaccggcuucgcccccuucagcaaggacaacagcaucagacugagcgccggcggcgacaucugggugaccagagagcccuacgugagcugcgaccccggcaagugcuaccaguucgcccugggccagggcaccacccugaacaacagacacagcaacgacaccgugcacgacagaacccccuacagaacccugcugaugaacgagcugggcgugcccuuccaccugggcaccaagcaggugugcaucgccuggagcagcagcagcugccacgacggcaaggccuggcugcacgugugcgugaccggccacgacgagaacgccaccgccagcuucaucuacgacggcagacugguggacagcaucggcagcuggagcaagaacauccugagaacccaggagagcgagugcgugugcaucaacggcaccugcaccguggugaugaccgacggcagcgccagcgagagagccgacaccaagauccuguucaucgaggagggcaagaucauccacaucagcccccugagcggcagcgcccagcacguggaggagugcagcugcuaccccagauaccccggcgugagaugcgugugcagagacaacuggaagggcagcaacagacccaucguggacaucaacgugaaggacuacagcaucgugagcagcuacgugugcagcggccuggugggcgacacccccagaaagaacgacagcagcagcagcagcuacugcagaaaccccaacaacgagaagggcagccacggcgugaagggcugggccuucgacgacggcaacgacguguggaugggcagaaccaucggcgaggagcugagaagcggcuacgagaccuucaaggugaucggcggcuggagcacccccaacagcaagcugcagaucaacagacaggugaucguggacagcggcaacagaagcggcuacagcggcaucuucagcguggagggcaagagcugcaucaacagaugcuucuacguggagcugaucagaggcagaaagcaggagaccaaggugugguggaccagcaacagcaucgugguguucugcggcaccagcggcaccuacggcaccggcagcuggcccgacggcgccgacaucaaccugaugcccaucuga

SEQ ID NO: 182082 - RNA, 1410 nt, Artificial Sequence
  derived and/or modified CDS sequence (opt4) from neuraminidase__InfluenzaA__AFG99438
augaaccccaaccagaagaucaucaccaucggcagcgugagccugaccaucgccaccaucugcuuccugaugcagaucgccauccuggugaccaccgugacccugcacuucagacaguacgagugcagcagcccccccaacaaccaggugaugcccugcgagcccaccaucaucgagagaaacaucaccgagaucguguaccugaccaacaccaccaucgagaaggagaucugccccaagcugguggaguacagaaacuggagcaagccccagugcaagaucaccggcuucgcccccuucagcaaggacaacagcaucagacugagcgccggcggcgacaucugggugaccagagagcccuacgugagcugcgaccccggcaagugcuaccaguucgcccugggccagggcaccacccugaacaacagacacagcaacgacaccgugcacgacagaacccccuacagaacccugcugaugaacgagcugggcgugcccuuccaccugggcaccaagcaggugugcauggccuggagcagcagcagcugccacgacggcaaggccuggcugcacgugugcgugaccggccacgacgagaacgccaccgccagcuucaucuacgacggcagacugguggacagcaucggcagcuggagcaagaacauccugagaacccaggagagcgagugcgugugcaucaacggcaccugcaccguggugaugaccgacggcagcgccagcgagagagccgacaccaagauccuguucaucgaggagggcaagaucgugcacaucagcccccugagcggcagcgcccagcacguggaggagugcagcugcuaccccagauaccccggcgugagaugcgugugcagagacaacuggaagggcagcaacagacccaucguggacaucaacgugaaggacuacagcaucgugagcagcuacgugugcagcggccuggugggcgacacccccagaaagaacgacagaagcagcagcagcuacugcagaaaccccaacaacgagaagggcagccacggcgugaagggcugggccuucgacgacggcaacgacguguggaugggcagaaccaucggcgaggagcugagaagcggcuacgagaccuucaaggugaucggcggcuggagcacccccaacagcaagcugcagaucaacagacaggugaucguggacagcggcaacagaagcggcuacagcggcaucuucagcguggagggcaagagcugcaucaacagaugcuucuacguggagcugaucagaggcagaaagcaggagaccagagugugguggaccagcaacagcaucgugguguucugcggcaccagcggcaccuacggcaccggcagcuggcccgacggcgccgacaucaaccugaugcccaucuga

SEQ ID NO: 182083 - RNA, 1410 nt, Artificial Sequence
  derived and/or modified CDS sequence (opt4) from neuraminidase__InfluenzaA__AFG99449
augaaccccaaccagaagaucaucaccaucggcagcgugagccugaccaucgccaccaucugcuuccugaugcagaucgccauccuggugaccaccgugacccugcacuucagacaguacgagugcagcagcccccccaacaaccaggugaugcccugcgagcccaccaucaucgagagaaacaucaccgagaucguguaccugaccaacaccaccaucgagaaggagaucugccccaagcugguggaguacagaaacuggagcaagccccagugcaagaucaccggcuucgcccccuucagcaaggacaacagcaucagacugagcgccggcggcgacaucugggugaccagagagcccuacgugagcugcgaccccggcaagugcuaccaguucgcccugggccagggcaccacccugaacaacagacacagcaacgacaccgugcacgacagaacccccuacagaacccugcugaugaacgagcugggcgugcccuuccaccugggcaccaagcaggugugcauggccuggagcagcagcagcugccacgacggcaaggccuggcugcacgugugcgugaccggccacgacgagaacgccaccgccagcuucaucuacgacggcagacugguggacagcaucggcagcuggagcaagaacauccugagaacccaggagagcgagugcgugugcaucaacggcaccugcaccguggugaugaccgacggcagcgccagcgagagagccgacaccaagauccuguucaucgaggagggcaagaucgugcacaucagcccccugagcggcagcgcccagcacguggaggagugcagcugcuaccccagauaccccggcgugagaugcgugugcagagacaacuggaagggcagcaacagacccaucguggacaucaacgugaaggacuacagcaucgugagcagcuacgugugcagcggccuggugggcgacacccccagaaagaacgacagaagcagcagcagcuacugcagaaaccccaacaacgagaagggcagccacggcgugaagggcugggccuucgacgacggcaacgacguguggaugggcagaaccaucggcgaggagcugagaagcggcuacgagaccuucaaggugaucggcggcuggagcacccccaacagcaagcugcagaucaacagacaggugaucguggacagcggcaacagaagcggcuacagcggcaucuucagcguggagggcaagaacugcaucaacagaugcuucuacguggagcugaucagaggcagaaagcaggagaccagagugugguggaccagcaacagcaucgugguguucugcggcaccagcggcaccuacggcaccggcagcuggcccgacggcgccgacaucaaccugaugcccaucuga

SEQ ID NO: 182084 - RNA, 1410 nt, Artificial Sequence
  derived and/or modified CDS sequence (opt4) from neuraminidase__InfluenzaA__AFG99471
augaaccccaaccagaagaucaucaccaucggcagcgugagccugauccuggccaccaucugcuuccugaugcagaucgccauccuggugaccaccgugacccugcacuucaagcaguacgagugcagcagcccccccaacaaccaggugaugcccugcgagcccaccaucaucgagagaaacaucaccgagaucguguaccugaccaacaccaccaucgagaaggagaucugccccaagcugguggaguacagaaacuggagcaagccccagugcaagaucaccggcuucgcccccuucagcaaggacaacagcaucagacugagcgccggcggcgacaucugggugaccagagagcccuacgugagcugcgaccccggcaagugcuaccaguucgcccugggccagggcaccacccugaacaacagacacagcaacgacaccgugcacgacagaaaccccuacagaacccugcugaugaacgagcugggcgugcccuuccaccugggcaccagacaggugugcauggccuggagcagcagcagcugccacgacggcaaggccuggcugcacgugugcgugaccggccacgacgagaacgccaccgccagcuucaucuacgacggcagacugguggacagcaucggcagcuggagcaagaacauccugagaacccaggagagcgagugcgugugcaucaacggcaccugcaccguggugaugaccgacggcagcgccagcgagagagccgacaccaagauccuguucaucgaggagggcaagaucgugcacaucagcccccugagcggcagcgcccagcacguggaggagugcagcugcuaccccagauaccccggcgugagaugcgugugcagagacaacuggaagggcagcaacagacccaucguggacaucaacgugaaggacuacagcaucgugagcagcuacgugugcagcggccuggugggcgacacccccagaaagaacgacagaagcagcagcagcuacugcagaaaccccaacaacgagaagggcagccacggcgugaagggcugggccuucgacgacggcaacgacguguggaugggcagaaccaucggcgaggagcugagaagcggcuacgagaccuucaaggugaucggcggcuggagcacccccaacagcaagcugcagaucaacagacaggugaucguggacagcggcaacagaagcggcuacagcggcaucuucagcguggagggcaagagcugcaucaacagaugcuucuacguggagcugaucagaggcagaaagcaggagaccagagugugguggaccagcaacagcaucgugguguucugcggcaccagcggcaccuacggcaccggcagcuggcccgacggcgccgacaucaaccugaugcccaucuga

SEQ ID NO: 182085 - RNA, 1410 nt, Artificial Sequence
  derived and/or modified CDS sequence (opt4) from neuraminidase__InfluenzaA__AFG99482
augaaccccaaccagaagaucaucaccaucggcagcgugagccugaccaucgccaccaucugcuuccugaugcagaucgccauccuggugaccaccgugacccugcacuucaagcaguacgagugcaacagcccccccaacaaccaggugaugcccugcgagcccaccaucaucgagagaaacaucaccgagaucguguaccugaccaacaccaccaucgagaaggagaucugccccaagcugguggaguacagaaacuggagcaagccccagugcaagaucaccggcuucgcccccuucagcaaggacaacagcaucagacugagcgccggcggcgacaucugggugaccagagagcccuacgugagcugcgaccccggcaagugcuaccaguucgcccugggccagggcaccacccugaacaacagacacagcaacgacaccgugcacgacagaacccccuacagaacccugcugaugaacgagcugggcgugcccuuccaccugggcaccaagcaggugugcaucgccuggagcagcagcagcugccacgacggcaaggccuggcugcacgugugcgugaccggccacgacgagaacgccaccgccagcuucaucuacgacggcagacugguggacagcaucggcagcuggagcaagaacauccugagaacccaggagagcgagugcgugugcaucaacggcaccugcaccguggugaugaccgacggcagcgccagcggcagagccgacaccaagauccuguucaucgaggagggcaagaucgugcacaucagcccccugagcggcagcgcccagcacguggaggagugcagcugcuaccccagauaccccggcgugagaugcgugugcagagacaacuggaagggcagcaacagacccaucguggacaucaacgugaaggacuacagcaucgugagcagcuacgugugcagcggccuggugggcgacacccccagaaagaacgacagcagcagcagcagcuacugcagaaaccccaacaacgagaagggcagccacggcgugaagggcugggccuucgacgacggcaacgacguguggaugggcagaaccaucggcgaggagcugagaagcggcuacgagaccuucaaggugaucggcggcuggagcacccccaacagcaagcugcagaucaacagacaggugaucguggacagaggcaacagaagcggcuacagcggcaucuucagcguggagggcaagaacugcaucaacagaugcuucuacguggagcugaucagaggcagaaagcaggagaccaaggugugguggaccagcaacagcaucgugguguucugcggcaccagcggcaccuacggcaccggcagcuggcccgacggcgccgacaucaaccugaugagcaucuga

SEQ ID NO: 182086 - RNA, 1410 nt, Artificial Sequence
  derived and/or modified CDS sequence (opt4) from neuraminidase__InfluenzaA__AFG99493
augaaccccaaccagaagaucaucaccaucggcagcgugagccugaccaucgccaccaucugcuuccugaugcagaucgccauccuggugaccaccgugacccugcacuucaagcaguacgagugcaacagcccccccaacaaccaggugaugcccugcgagcccaccaucaucgagagaaacaucaccgagaucguguaccugaccaacaccaccaucgagaaggagaucugccccaagcugguggaguacagaaacuggagcaagccccagugcaagaucaccggcuucgcccccuucagcaaggacaacagcaucagacugagcgccggcggcgacaucugggugaccagagagcccuacgugagcugcgaccccggcaagugcuaccaguucgcccugggccagggcaccacccugaacaacagacacagcaacgacaccgugcacgacagaacccccuacagaacccugcugaugaacgagcugggcgugcccuuccaccugggcaccaagcaggugugcaucgccuggagcagcagcagcugccacgacggcaaggccuggcugcacgugugcgugaccggccacgacgagaacgccaccgccagcuucaucuacgacggcagacugguggacagcaucggcagcuggagcaagaacauccugagaacccaggagagcgagugcgugugcaucaacggcaccugcaccguggugaugaccgacggcagcgccagcggcagagccgacaccaagauccuguucaucgaggagggcaagaucgugcacaucagcccccugagcggcagcgcccagcacguggaggagugcagcugcuaccccagauaccccggcgugagaugcgugugcagagacaacuggaagggcagcaacagacccaucguggacaucaacgugaaggacuacagcaucgugagcagcuacgugugcagcggccuggugggcgacacccccagaaagaacgacagcagcagcagcagcuacugcagaaaccccaacaacgagaagggcagccacggcgugaagggcugggccuucgacgacggcaacgacguguggaugggcagaaccaucggcgaggagcugagaagcggcuacgagaccuucaaggugaucggcggcuggagcacccccaacagcaagcugcagaucaacagacaggugaucguggacagaggcaacagaagcggcuacagcggcaucuucagcguggagggcaagagcugcaucaacagaugcuucuacguggagcugaucagaggcagaaagcaggagaccaaggugugguggaccagcaacagcaucgugguguucugcggcaccagcggcaccuacggcaccggcagcuggcccgacggcgccgacaucaaccugaugcccaucuga

SEQ ID NO: 182087 - RNA, 1410 nt, Artificial Sequence
  derived and/or modified CDS sequence (opt4) from neuraminidase__InfluenzaA__AFG99504
augaaccccaaccagaagaucaucaccaucggcagcgugagccugaccaucgccaccaucugcuuccugaugcagaucgccauccuggugaccaccgugacccugcacuucaagcaguacgagugcagcagcccccccaacaaccaggugaugcccugcgagcccaccaucaucgagagaaacaucaccgagaucguguaccugaccaacaccaccaucgagaaggagaucugccccaagcugguggaguacagaaacuggagcaagccccagugcaagaucaccggcuucgcccccuucagcaaggacaacagcaucagacugagcgccggcggcgacaucugggugaccagagagcccuacgugagcugcgaccccggcaagugcuaccaguucgcccugggccagggcaccacccugaacaacagacacagcaacgacaccgugcacgacagaacccccuacagaacccugcugaugaacgagcugggcgugcccuuccaccugggcaccaagcaggugugcaucgccuggagcagcagcagcugccacgacggcaaggccuggcugcacgugugcgugaccggccacgacgagaacgccaccgccagcuucaucuacgacggcagacugguggacagcaucggcagcuggagcaagaacauccugagaacccaggagagcgagugcgugugcaucaacggcaccugcaccguggugaugaccgacggcagcgccagcgagagagccgacaccaagauccuguucaucgaggagggcaagaucgugcacaucagcccccugagcggcagcgcccagcacguggaggagugcagcugcuaccccagauaccccggcgugagaugcgugugcagagacaacuggaagggcagcaacagacccaucguggacaucaacgugaaggacuacagcaucgugagcagcuacgugugcagcggccuggugggcgacacccccagaaagaacgacagaagcagcagcagcuacugcagaaaccccaacaacgagaagggcagccacggcgugaagggcugggccuucgacgacggcaacgacguguggaugggcagaaccaucggcgaggagcugagaagcggcuacgagaccuucaaggugaucggcggcuggagcacccccaacagcaagcugcagaucaacagacaggugaucguggacagcggcaacagaagcggcuacagcggcaucuucagcguggagggcaagagcugcaucaacagaugcuucuacguggagcugaucagaggcagaaagcaggagaccagagugugguggaccagcaacagcaucgugguguucugcggcaccagcggcaccuacggcaccggcagcuggcccgacggcgccgacaucaaccugaugcccaucuga

SEQ ID NO: 182088 - RNA, 1410 nt, Artificial Sequence
  derived and/or modified CDS sequence (opt4) from neuraminidase__InfluenzaA__AFG99515
augaaccccaaccagaagaucaucaccaucggcagcgugagccugaccaucgccaccaucugcuuccugaugcagaucgccauccuggugaccaccgugacccugcacuucaagcaguacgagugcaacagcccccccaacaaccaggugaugcugugcgagcccaccaucaucgagagaaacaucaccgagaucguguaccugaccaacaccaccaucgagaaggagaucugccccaagcuggccgaguacagaaacuggagcaagccccagugcaagaucaccggcuucgcccccuucagcaaggacaacagcaucagacugagcgccggcggcgacaucugggugaccagagagcccuacgugagcugcgaccccggcaagugcuaccaguucgcccugggccagggcaccacccugaacaacagacacagcaacgacaccgugcacgacagaacccccuacagaacccugcugaugaacgagcugggcgugcccuuccaccugggcaccaagcaggugugcaucgccuggagcagcagcagcugccacgacggcaaggccuggcugcacgugugcgugaccggccacgacgagaacgccaccgccagcuucaucuacgacggcagacugguggacagcaucggcagcuggagcaagaacauccugagaacccaggagagcgagugcgugugcaucaacggcaccugcaccguggugaugaccgacggcagcgccagcgagagagccgacaccaagauccuguucaucgaggagggcaagaucgugcacaucagcccccugagcggcagcgcccagcacguggaggagugcagcugcuaccccagauaccccggcgugagaugcgugugcagagacaacuggaagggcagcaacagacccaucguggacaucaacgugaaggacuacagcaucgugagcagcuacgugugcagcggccuggugggcgacacccccagaaagaacgacagcagcagcagcagcuacugcagaaaccccaacaacgagaagggcagccacggcgugaagggcugggccuucgacgacggcaacgacguguggaugggcagaaccaucggcgaggagcugagaagcggcuacgagaccuucaaggugaucggcggcuggagcacccccaacagcaagcugcagaucaacagacaggugaucguggacagaggcaacagaagcggcuacagcggcaucuucagcguggagggcaagagcugcaucaacagaugcuucuacguggagcugaucagaggcagaaagcaggagaccgaggugugguggaccagcaacagcaucgugguguucugcggcaccagcggcaccuacggcaccggcagcuggcccgacggcgccgacaucaaccugaugcccaucuga

SEQ ID NO: 182089 - RNA, 1410 nt, Artificial Sequence
  derived and/or modified CDS sequence (opt4) from neuraminidase__InfluenzaA__AFG99526
augaaccccaaccagaagaucaucaccaucggcagcgugagccugacccuggccaccaucugcuuccugaugcagaucgccauccuggugaccaccgugacccugcacuucaagcaguacgagugcagcagcccccccaacaaccaggugaugcccugcgagcccaccaucaucgagagaaacaucaccgagaucguguaccugaccaacaccaccaucgagaaggaggugugccccaagcugguggaguacagaaacuggagcaagccccagugcaagaucaccggcuucgcccccuucagcaaggacaacagcaucagacugagcgccggcggcgacaucugggugaccagagagcccuacgugagcugcgaccccggcaagugcuaccaguucgcccugggccagggcaccacccugaacaacagacacagcaacgacaccgugcacgacagaacccccuacagaacccugcugaugaacgagcugggcgugcccuuccaccugggcaccagacaggugugcauggccuggagcagcagcagcugccacgacggcaaggccuggcugcacgugugcgugaccggccacgacgagaacgccaccgccagcuucaucuacgacggcagacugguggacagcaucggcagcuggagcaagaacauccugagaacccaggagagcgagugcgugugcaucaacggcaccugcaccguggugaugaccgacggcagcgccagcggcagagccgacaccaagauccuguucaucgaggagggcaagaucgugcacaucagcccccugagcggcagcgcccagcacguggaggagugcagcugcuaccccagauaccccggcgugagaugcgugugcagagacaacuggaagggcagcaacagacccaucguggacaucaacgugaaggacuacagcaucgugagcagcuacgugugcagcggccuggugggcgacacccccagaaagaacgacagaagcagcagcagcuacugcagaaaccccaacaacgagaagggcagccacggcgugaagggcugggccuucgacgacggcaacgacguguggaugggcagaaccaucggcgaggagcugagaagcggcuacgagaccuucaaggugaucggcggcuggagcacccccaacagcaagcugcagaucaacagacaggugaucguggacagcggcaacagaagcggcuacagcggcaucuucagcguggagggcaagagcugcaucaacagaugcuucuacguggagcugaucagaggcagaaagcaggagaccagagugugguggaccagcaacagcaucgugguguucugcggcaccagcggcaccuacggcaccggcagcuggcccgacggcgccgacaucaaccugaugcccaucuga

SEQ ID NO: 182090 - RNA, 1410 nt, Artificial Sequence; identical to SEQ ID NO: 181986
  derived and/or modified CDS sequence (opt4) from neuraminidase__InfluenzaA__AFG99537

SEQ ID NO: 182091 - RNA, 1410 nt, Artificial Sequence; identical to SEQ ID NO: 181986
  derived and/or modified CDS sequence (opt4) from neuraminidase__InfluenzaA__AFG99548

SEQ ID NO: 182092 - RNA, 1410 nt, Artificial Sequence; identical to SEQ ID NO: 181986
  derived and/or modified CDS sequence (opt4) from neuraminidase__InfluenzaA__AFG99559

SEQ ID NO: 182093 - RNA, 1410 nt, Artificial Sequence; identical to SEQ ID NO: 181986
  derived and/or modified CDS sequence (opt4) from neuraminidase__InfluenzaA__AFG99570

SEQ ID NO: 182094 - RNA, 1410 nt, Artificial Sequence; identical to SEQ ID NO: 181986
  derived and/or modified CDS sequence (opt4) from neuraminidase__InfluenzaA__AFG99581

SEQ ID NO: 182095 - RNA, 1410 nt, Artificial Sequence
  derived and/or modified CDS sequence (opt4) from neuraminidase__InfluenzaA__AFG99592
augaaccccaaccagaagaucaucaccaucggcagcgugagccugaccaucgccaccaccugcuuccugaugcagaucgccauccuggugaccaccgugacccugcacuucaagcaguacgagugcaacagcccccccaacaaccaggugaugcccugcgagcccaccaucaucgagagaaacaucaccgagaucguguaccugaccaacaccaccaucgagaaggagaucugccccaagcugguggaguacagaaacuggagcaagccccagugcaagaucaccggcuucgcccccuucagcaaggacaacagcaucagacugagcgccggcggcgacaucugggugaccagagagcccuacgugagcugcgaccccggcaagugcuaccaguucgcccugggccagggcaccacccugaacaacagacacagcaacgacaccgugcacgacagaacccccuacagaacccugcugaugaacgagcugggcgugcccuuccaccugggcaccaagcaggugugcaucgccuggagcagcagcagcugccacgacggcaaggccuggcugcacgugugcgugaccggccacgacgagaacgccaccgccagcuucaucuacgacggcagacugguggacagcaucgugagcuggagcaagaacauccugagaacccaggagagcgagugcgugugcaucaacggcaccugcaccguggugaugaccgacggcagcgccagcgagagagccgacaccaagauccuguucaucgaggagggcaagaucgugcacaucagcccccugagcggcagcgcccagcacguggaggagugcagcugcuaccccagauaccccggcgugagaugcgugugcagagacaacuggaagggcagcaacagacccaucguggacaucaacgugaaggacuacagcaucgugagcagcuacgugugcagcggccuggugggcgacacccccagaaagaacgacagcagcagcagcagcuacugcagaaaccccaacaacgagaagggcagccacggcgugaagggcugggccuucgacgacggcaacgacguguggaugggcagaaccaucggcgaggagcugagaagcggcuacgagaccuucaaggugaucggcggcuggagcacccccaacagcaagcugcagaccaacagacaggugaucguggacagaggcaacagaagcggcuacagcggcaucuucagcguggagggcaagagcugcaucaacagaugcuucuacguggagcugaucagaggcagaaagcaggagaccaaggugugguggaccagcaacagcaucgugguguucugcggcaccagcggcaccuacggcaccggcagcuggcccgacggcgccgacaucaaccugaugcccaucuga

SEQ ID NO: 182096 - RNA, 1410 nt, Artificial Sequence; identical to SEQ ID NO: 181986
  derived and/or modified CDS sequence (opt4) from neuraminidase__InfluenzaA__AFG99603

SEQ ID NO: 182097 - RNA, 1410 nt, Artificial Sequence; identical to SEQ ID NO: 181986
  derived and/or modified CDS sequence (opt4) from neuraminidase__InfluenzaA__AFG99614

SEQ ID NO: 182098 - RNA, 1410 nt, Artificial Sequence; identical to SEQ ID NO: 181986
  derived and/or modified CDS sequence (opt4) from neuraminidase__InfluenzaA__AFG99625

SEQ ID NO: 182099 - RNA, 1410 nt, Artificial Sequence
  derived and/or modified CDS sequence (opt4) from neuraminidase__InfluenzaA__AFG99636
augaaccccaaccagaagaucaucaccaucggcagcgugagccugaccaucgccaccaucugcuuccugaugcagaucgccauccuggugaccaccgugacccugcacuucaagcaguacgagugcaacagcccccccaacaaccaggugaugcugugcgagcccaccaucaucgagagaaacaucaccgagaucguguaccugaccaacaccaccaucgagaaggagaucugccccaagcuggccgaguacagaaacuggagcaagccccagugcaagaucaccggcuucgcccccuucagcaaggacaacagcaucagacugagcgccggcggcgacaucugggugaccagagagcccuacgugagcugcgaccccggcaagugcuaccaguucgcccugggccagggcaccacccugaacaacagacacagcaacgacaccgugcacgacagaacccccuacagaacccugcugaugaacgagcugggcgugcccuuccaccugggcaccaagcaggugugcaucgccuggagcagcagcagcugccacgacggcaaggccuggcugcacgugugcgugaccggccacgacgagaacgccaccgccagcuucaucuacgacggcagacugguggacagcaucgugagcuggagcaagaacauccugagaacccaggagagcgagugcgugugcaucaacggcaccugcaccguggugaugaccgacggcagcgccagcgagagagccgacaccaagauccuguucaucgaggagggcaagaucgugcacaucagcccccugagcggcagcgcccagcacguggaggagugcagcugcuaccccagauaccccggcgugagaugcgugugcagagacaacuggaagggcagcaacagacccaucguggacaucaacgugaaggacuacagcaucgugagcagcuacgugugcagcggccuggugggcgacacccccagaaagaacgacagcagcagcagcagcuacugcagaaaccccaacaacgagaagggcagccacggcgugaagggcugggccuucgacgacggcaacgacguguggaugggcagaaccaucggcgaggaccugagaagcggcuacgagaccuucaaggugaucggcggcuggagcacccccaacagcaagcugcagaccaacagacaggugaucguggacagaggcaacagaagcggcuacagcggcaucuucagcguggagggcaagagcugcaucaacagaugcuucuacguggagcugaucagaggcagaaagcaggagaccaaggugugguggaccagcaacagcaucgugguguucugcggcaccagcggcaccuacggcaccggcagcuggcccgacggcgccgacaucaaccugaugcccaucuga

SEQ ID NO: 182100 - RNA, 1410 nt, Artificial Sequence
  derived and/or modified CDS sequence (opt4) from neuraminidase__InfluenzaA__AFG99658
augaaccccaaccagaagaucaucaccaucggcagcgugagccugaccaucgccaccaucugcuuccugaugcagaucaccauccuggugaccaccgugacccugcacuucaagcaguacgagugcaacagcccccccaacaaccaggugaugcugugcgagcccaccaucaucgagagaaacaucaccgagaucguguaccugaccaacaccaccaucgagaaggagaucugccccaagcugguggaguacagaaacuggagcaagccccagugcaagaucaccggcuucgcccccuucagcaaggacaacagcaucagacugagcgccggcggcgacaucugggugaccagagagcccuacgugagcugcgaccccggcaagugcuaccaguucgcccugggccagggcaccacccugaacaacagacacagcaacgacaccgugcacgacagaacccccuacagaacccugcugaugaacgagcugggcgugcccuuccaccugggcaccaagcaggugugcaucgccuggagcagcagcagcugccacgacggcaaggccuggcugcacgugugcgugaccggccacgacgagaacgccaccgccagcuucaucuacgacggcagacugguggacagcaucagcagcuggagcaagaacauccugagaacccaggagagcgagugcgugugcaucaacggcaccugcaccguggugaugaccgacggcagcgccagcgagagagccgacaccaagauccuguucaucgaggagggcaagaucgugcacaucagcccccugagcggcagcgcccagcacguggaggagugcagcugcuaccccagauaccccggcgugagaugcgugugcagagacaacuggaagggcagcaacagacccaucguggacaucaacgugaaggacuacagcaucgugagcagcuacgugugcagcggccuggugggcgacacccccagaaagaacgacagcagcagcagcagcuacugcagaaaccccaacaacgagaagggcagccacggcgugaagggcugggccuucgacgacggcaacgacguguggaugggcagaaccaucagcgaggagcugagaagcggcuacgagaccuucaaggugaucggcggcuggagcacccccaacagcaagcugcagaucaacagacaggugaucguggacagaggcaacagaagcggcuacagcggcaucuucagcguggagggcaagagcugcaucaacagaugcuucuacguggagcugaucagaggcagaaagcaggagaacaaggugugguggaccagcaacagcaucgugguguucugcggcaccagcggcaccuacggcaccggcagcuggcccgacggcgccgacaucaaccugaugcccaucuga

SEQ ID NO: 182101 - RNA, 1410 nt, Artificial Sequence
  derived and/or modified CDS sequence (opt4) from neuraminidase__InfluenzaA__AFG99680
augaaccccaaccagaagaucaucaccaucggcagcgugagccugaccaucgccaccaucugcuuccugaugcagaucgccauccuggugaccaccgugacccugcacuucaagcaguacgagugcagcagcccccccaacaaccaggugauccugugccagcccaccaucaucgagagaaacaucaccgagaucguguaccugaccaacaccaccaucgagaaggagaucugccccaagcugguggaguacagaaacuggagcaagccccagugcaagaucaccggcuucgcccccuucagcaaggacaacagcaucagacugagcgccggcggcgacaucugggugaccagagagcccuacgugagcugcgaccccagcaagugcuaccaguucgcccugggccagggcaccacccugaacaacagacacagcaacgacaccgugcacgacagaacccccuacagaacccugcugaugaacgagcugggcgugcccuuccaccugggcaccaagcaggugugcaucgccuggagcagcagcagcugccacgacggcaaggccuggcugcacgugugcgugaccggccacgacgagaacgccaccgccagcuucaucuacgacggcagacugguggacagcaucggcagcuggagcaagaacauccugagaacccaggagagcgagugcgugugcaucaacggcaccugcaccguggugaugaccgacggcagcgccagcgagagagccgacaccaagauccuguucaucgaggagggcaagguggugcacaucagcccccugagcggcagcgcccagcacguggaggagugcagcugcuaccccagauaccccggcgugagaugcgugugcagagacaacuggaagggcagcaacagacccaucguggacaucaacgugaaggacuacagcaucgugagcagcuacgugugcagcggccuggugggcgacacccccagaaagaacgacagcagcagcagcagcuacugcagaaaccccaacaacgagaagggcagccacggcgugaagggcugggccuucgacgacggcaacgacguguggaugggcagaaccaucagcgaggagcugagaagcggcuacgagaccuucaaggugaucggcggcuggagcacccccaacagcaagcugcagaucaacagacaggugaucguggacagcggcaacagaagcggcuacagcggcaucuucagcguggagggcaagagcugcaucaacagaugcuucuacguggagcugaucagaggcagaaagcaggagaccaaggugugguggaccagcaacagcaucgugguguucugcggcaccagcggcaccuacggcaccggcagcuggcccgacggcgccgacaucaaccugaugcccaucuga

SEQ ID NO: 182102 - RNA, 1410 nt, Artificial Sequence
  derived and/or modified CDS sequence (opt4) from neuraminidase__InfluenzaA__AFG99691
augaaccccaaccagaagaucaucaccaucggcagcgugagccugaccaucgccaccaucugcuuccugaugcagaucgccauccuggugaccaccgugacccugcacuucaagcaguacgagugcaacagcccccccaacaaccaggugaugcccugcgagcccaccaucaucgagagaaacaccaccgagaucguguaccugaccaacaccaccaucgagaaggagaucugccccaagcugguggaguacagaaacuggagcaagccccagugcaagaucaccggcuucgcccccuucagcaaggacaacagcaucagacugagcgccggcggcgacaucugggugaccagagagcccuacgugagcugcgaccccggcaagugcuaccaguucgcccugggccagggcaccacccugaacaacagacacagcaacgacaccgugcacgacagaacccccuacagaacccugcugaugaacgagcugggcgugcccuuccaccugggcaccaagcaggugugcaucgccuggagcagcagcagcugccacgacggcaaggccuggcugcacgugugcgugaccggccacgacgagaacgccaccgccagcuucaucuacgacggcagacugguggacagcaucgugagcuggagcaagaacauccugagaacccaggagagcgagugcgugugcaucaacggcaccugcaccguggugaugaccgacggcagcgccagcgagagagccgacaccaagauccuguucaucgaggagggcaagaucgugcacaucagcccccugagcggcagcgcccagcacguggaggagugcagcugcuaccccagauaccccggcgugagaugcgugugcagagacaacuggaagggcagcaacagacccaucguggacaucaacgugaaggacuacagcaucgugagcagcuacgugugcagcggccuggugggcgacacccccagaaagaacgacagcagcagcagcagcuacugcagaaaccccaacaacgagaagggcagccacggcgugaagggcugggccuucgacgacggcaacgacguguggaugggcagaaccaucggcgaggagcugagaagcggcuacgagaccuucaaggugaucggcggcuggagcacccccaacagcaagcugcagaccaacagacaggugaucguggacagaggcaacagaagcggcuacagcggcaucuucagcguggagggcaagagcugcaucaacagaugcuucuacguggagcugaucagaggcagaaagcaggagaccaaggugugguggaccagcaacagcaucgugguguucugcggcaccagcggcaccuacggcaccggcagcuggcccgacggcgccgacaucaaccugaugcccaucuga

SEQ ID NO: 182103 - RNA, 1410 nt, Artificial Sequence; identical to SEQ ID NO: 181986
  derived and/or modified CDS sequence (opt4) from neuraminidase__InfluenzaA__AFG99704

SEQ ID NO: 182104 - RNA, 1410 nt, Artificial Sequence; identical to SEQ ID NO: 181986
  derived and/or modified CDS sequence (opt4) from neuraminidase__InfluenzaA__AFG99715

SEQ ID NO: 182105 - RNA, 1410 nt, Artificial Sequence; identical to SEQ ID NO: 181986
  derived and/or modified CDS sequence (opt4) from neuraminidase__InfluenzaA__AFG99726

SEQ ID NO: 182106 - RNA, 1410 nt, Artificial Sequence
  derived and/or modified CDS sequence (opt4) from neuraminidase__InfluenzaA__AFG99737
augaaccccaaccagaagaucaucaccaucggcagcgugagccugaccaucgccaccaucugcuuccugaugcagaucaccauccuggugaccaccgugacccugcacuucaagcaguacgagugcaacagcccccccaacaaccaggugaugcugugcgagcccaccaucaucgagagaaacaucaccgagaucguguaccugaccaacaccaccaucgagaaggagaucugccccaagcugguggaguacagaaacuggagcaagccccagugcaagaucaccggcuucgcccccuucagcaaggacaacagcaucagacugagcgccggcggcgacaucugggugaccagagagcccuacgugagcugcgaccccggcaagugcuaccaguucgcccugggccagggcaccacccugaacaacagacacagcaacgacaccgugcacgacagaacccccuacagaacccugcugaugaacgagcugggcgugcccuuccaccugggcaccaagcaggugugcaucgccuggagcagcagcagcugccacgacggcaaggccuggcugcacgugugcgugaccggccacgacgagaacgccaccgccagcuucaucuacgacggcagacugguggacagcaucggcagcuggagcaagaacauccugagaacccaggagagcgagugcgugugcaucaacggcaccugcaccguggugaugaccgacggcagcgccagcgagagagccgacaccaagauccuguucaucgaggagggcaagaucgugcacaucagcccccugagcggcagcgcccagcacguggaggagugcagcugcuaccccagauaccccggcgugagaugcgugugcagagacaacuggaagggcagcaacagacccaucguggacaucaacgugaaggacuacagcaucgugagcagcuacgugugcagcggccuggugggcgacacccccagaaagaacgacagcagcagcagcagcuacugcagaaaccccaacaacgagaagggcagccacggcgugaagggcugggccuucgacgacggcaacgacguguggaugggcagaaccaucagcgaggagcugagaagcggcuacgagaccuucaaggugaucggcggcuggagcacccccaacagcaagcugcagaucaacagacaggugaucguggacagaggcaacagaagcggcuacagcggcaucuucagcguggagggcaagagcugcaucaacagaugcuucuacguggagcugaucagaggcagaaagcaggagaacaaggugugguggaccagcaacagcaucgugguguucugcggcaccagcggcaccuacggcaccggcagcuggcccgacggcgccgacaucaaccugaugcccaucuga

SEQ ID NO: 182107 - RNA, 1410 nt, Artificial Sequence
  derived and/or modified CDS sequence (opt4) from neuraminidase__InfluenzaA__AFG99748
augaaccccaaccagaagaucaucaccaucggcagcgugagccugaccaucgccaccaucugcuuccugaugcagaucgccauccuggugaccaccgugacccugcacuucaagcaguacgacugcaacagcccccccaacaaccaggccaugcugugcgagcccaccaucaucgagagaaacaucaccgagaucguguaccugaccaacaccaccaucgagaaggagaucugccccaagcuggccgaguacagaaacuggagcaagccccagugcaagaucaccggcuucgcccccuucagcaaggacaacagcaucagacugagcgccggcggcgacaucugggugaccagagagcccuacgugagcugcgaccccggcaagugcuaccaguucgcccugggccagggcaccacccugaacaacagacacagcaacgacaccgugcacgacagaacccccuacagaacccugcugaugaacgagcugggcgugcccuuccaccugggcaccaagcaggugugcaucgccuggagcagcagcagcugccacgacggcaaggccuggcugcacgugugcgugaccggccacgacgagaacgccaccgccagcuucaucuacgacggcagacugguggacagcaucggcagcuggagcaagaacauccugagaacccaggagagcgagugcgugugcaucaacggcaccugcaccguggugaugaccgacggcagcgccagcgagagagccgacaccaagauccuguucaucgaggagggcaagaucgugcacaucagcccccugagcggcagcgcccagcacguggaggagugcagcugcuaccccagauaccccggcgugagaugcgugugcagagacaacuggaagggcagcaacagacccaucguggacaucaacgugaaggacuacagcaucgugagcagcuacgugugcagcggccuggugggcgacacccccagaaagaacgacagcagcagcagcagcuacugcagaaaccccaacaacgagaagggcagccacggcgugaagggcugggccuucgacgacggcaacgacguguggaugggcagaaccaucggcgaggagcugagaagcggcuacgagaccuucaaggugaucggcggcuggagcacccccaacagcaagcugcagaucaacagacaggugaucguggacagaggcaacagaagcggcuacagcggcaucuucagcguggagggcaagagcugcaccaacagaugcuucuacguggagcugaucagaggcagaaagcaggagaccgaggugugguggaccagcaacagcaucgugguguucugcggcaccagcggcaccuacggcaccggcagcuggcccgacggcgccgacaucaaccugaugcccaucuga

SEQ ID NO: 182108 - RNA, 1410 nt, Artificial Sequence; identical to SEQ ID NO: 181986
  derived and/or modified CDS sequence (opt4) from neuraminidase__InfluenzaA__AFG99759

SEQ ID NO: 182109 - RNA, 1410 nt, Artificial Sequence
  derived and/or modified CDS sequence (opt4) from neuraminidase__InfluenzaA__AFG99770
augaaccccaaccagaagaucaucaccaucggcagcgugagccugaccaucgccaccaucugcuuccugaugcagaucgccauccuggugaccaccgugacccugcacuucaagcaguacgagugcaacagcccccccaacaaccagaucaugcugugcgagcccaccaucaucgagagaaacaucaccgagaucguguaccugaccaacaccaccaucgagagagagaucugccccaagcugguggaguacagaaacuggagcaagccccagugcaagaucaccggcuucgcccccuucagcaaggacaacagcaucagacugagcgccggcggcgacaucugggugaccagagagcccuacgugagcugcgaccccggcaagugcuaccaguucgcccugggccagggcaccacccugaacaacagacacagcaacgacaccgugcacgacagaacccccuacagaacccugcugaugaacgagcugggcgugcccuuccaccugggcaccaagcaggugugcaucgccuggagcagcagcagcugccacgacggcaaggccuggcugcacgugugcgugaccggccacgacgagaacgccaccgccagcuucaucuacgacggcagacugguggacagcaucggcagcuggagcaagaacauccugagaacccaggagagcgagugcgugugcaucaacggcaccugcaccguggugaugaccgacggcagcgccagcgagagagccgacaccaagauccuguucaucgaggagggcaagaucgugcacaucagcccccugagcggcagcgcccagcacguggaggagugcagcugcuaccccagauaccccggcgugagaugcgugugcagagacaacuggaagggcagcaacagacccaucguggacaucaacgugaaggacuacagcaucgugagcagcuacgugugcagcggccuggugggcgacacccccagaaagaacgacagcagcagcagcagcuacugcagaaaccccaacaacgagaagggcagccacggcgugaagggcugggccuucgacgacggcaacgacguguggaugggcagaaccaucggcgaggagcugagaagcggcuacgagaccuucaaggugaucggcggcuggagcacccccaacagcaagcugcagaucaacagacaggugaucguggacagaggcaacagaagcggcuacagcggcaucuucagcguggagggcaagagcugcaucaacagaugcuucuacguggagcugaucagaggcagaaagcaggagaccgaggugugguggaccagcaacagcaucgugguguucugcggcaccagcggcaccuacggcaccggcagcuggcccgacggcgccgacaucaaccugaugcccaucuga

SEQ ID NO: 182110 - RNA, 1410 nt, Artificial Sequence
  derived and/or modified CDS sequence (opt4) from neuraminidase__InfluenzaA__AFG99781
augaaccccaaccagaagaucaucaccaucggcagcgugagccugaccaucgccaccaucugcuuccugaugcagaucgccauccuggugaccaccgugacccugcacuucaagcaguacgagugcagcagcccccccaacaaccaggugaugcugugccagcccaccaucaucgagagaaacaucaccgagaucguguaccugaccaacaccaccaucgagaaggagaucugccccaagcugguggaguacagaaacuggagcaagccccagugcaagaucaccggcuucgcccccuucagcaaggacaacagcaucagacugagcgccggcggcgacaucugggugaccagagagcccuacgugagcugcgaccccggcaagugcuaccaguucgcccugggccagggcaccacccugaacaacagacacagcaacgacaccgugcacgacagaacccccuacagaacccugcugaugaacgagcugggcgugcccuuccaccugggcaccaagcaggugugcaucgccuggagcagcagcagcugccacgacggcaaggccuggcugcacgugugcgugaccggccacgacgagaacgccaccgccagcuucaucuacgacggcagacugguggacagcaucggcagcuggagcaagaacauccugagaacccaggagagcgagugcgugugcaucaacggcaccugcaccguggugaugaccgacggcagcgccagcaagagagccgacaccaagauccuguucaucgaggagggcaagaucgugcacaucagcccccugagcggcagcgcccagcacguggaggagugcagcugcuaccccagauaccccggcgugagaugcgugugcagagacaacuggaagggcagcaacagacccaucguggacaucaacgugaaggacuacagcaucgugagcagcuacgugugcagcggccuggugggcgacacccccagaaagaacgacagcagcagcagcagcuacugcagaaaccccaacaacgagaagggcagccacggcgugaagggcugggccuucgacgacggcaacgacguguggaugggcagaaccaucagcgaggagcugagaagcggcuacgagaccuucaaggugaucggcggcuggagcacccccaacagcaagcugcagaccaacagacaggugaucguggacagcggcaacagaagcggcuacagcggcaucuucagcguggagggcaagagcugcaucaacagaugcuucuacguggagcugaucagaggcagaaagcaggagaccaaggugugguggaccagcaacagcaucgugguguucugcggcaccagcggcaccuacggcaccggcagcuggcccgacggcgccgacaucaaccugaugcccaucuga

SEQ ID NO: 182111 - RNA, 1410 nt, Artificial Sequence; identical to SEQ ID NO: 181986
  derived and/or modified CDS sequence (opt4) from neuraminidase__InfluenzaA__AFG99792

SEQ ID NO: 182112 - RNA, 1410 nt, Artificial Sequence; identical to SEQ ID NO: 182106
  derived and/or modified CDS sequence (opt4) from neuraminidase__InfluenzaA__AFG99803

SEQ ID NO: 182113 - RNA, 1410 nt, Artificial Sequence; identical to SEQ ID NO: 181986
  derived and/or modified CDS sequence (opt4) from neuraminidase__InfluenzaA__AFG99825

SEQ ID NO: 182114 - RNA, 1410 nt, Artificial Sequence; identical to SEQ ID NO: 181986
  derived and/or modified CDS sequence (opt4) from neuraminidase__InfluenzaA__AFG99836

SEQ ID NO: 182115 - RNA, 1410 nt, Artificial Sequence; identical to SEQ ID NO: 181986
  derived and/or modified CDS sequence (opt4) from neuraminidase__InfluenzaA__AFG99847

SEQ ID NO: 182116 - RNA, 1410 nt, Artificial Sequence; identical to SEQ ID NO: 181986
  derived and/or modified CDS sequence (opt4) from neuraminidase__InfluenzaA__AFG99858

SEQ ID NO: 182117 - RNA, 1410 nt, Artificial Sequence; identical to SEQ ID NO: 181986
  derived and/or modified CDS sequence (opt4) from neuraminidase__InfluenzaA__AFG99869

SEQ ID NO: 182118 - RNA, 1410 nt, Artificial Sequence; identical to SEQ ID NO: 181986
  derived and/or modified CDS sequence (opt4) from neuraminidase__InfluenzaA__AFG99880

SEQ ID NO: 182119 - RNA, 1410 nt, Artificial Sequence
  derived and/or modified CDS sequence (opt4) from neuraminidase__InfluenzaA__AFG99891
augaaccccaaccagaagaucaucaccaucggcagcgugagccugaccaucgccaccaucugcuuccugaugcagaucgccauccuggugaccaccgugacccugcacuucaagcaguacgagugcaacagcccccccaacaaccaggugaugcugugcgagcccaccaucaucgagagaaacaucaccgagaucguguacuucaccaacaccaccaucgagaaggagaucugccccaagcuggccgaguacagaaacuggagcaagccccagugcaagaucaccggcuucgcccccuucagcaaggacaacagcaucagacugagcgccggcggcgacaucugggugaccagagagcccuacgugagcugcgaccccggcaagugcuaccaguucgcccugggccagggcaccacccugaacaacagacacagcaacgacaccgugcacgacagaacccccuacagaacccugcugaugaacgagcugggcgugcccuuccaccugggcaccaagcaggugugcaucgccuggagcagcagcagcugccacgacggcaaggccuggcugcacgugugcgugaccggccacgacgagaacgccaccgccagcuucaucuacgacggcagacugguggacagcaucggcagcuggagcaagaacauccugagaacccaggagagcgagugcgugugcaucaacggcaccugcaccguggugaugaccgacggcagcgccagcgagagagccgacaccaagauccuguucaucgaggagggcaagaucgugcacaucagcagccugagcggcagcgcccagcacguggaggagugcagcugcuaccccagauaccccggcgugagaugcgugugcagagacaacuggaagggcagcaacagacccaucguggacaucaacgugaaggacuacagcaucgugagcagcuacgugugcagcggccuggugggcgacacccccagaaagaacgacagcagcagcagcagcuacugcagaaaccccaacaacgagaagggcagccacggcgugaagggcugggccuucgacgacggcaacgacguguggaugggcagaaccaucggcgaggagcugagaagcggcuacgagaccuucagagugaucggcggcuggagcacccccaacagcaagcugcagaucaacagacaggugaucguggacagaggcaacagaagcggcuacagcggcaucuucagcguggagggcaagagcugcaucaacagaugcuucuacguggagcugaucagaggcagaaagcaggagaccgaggugugguggaccagcaacagcaucgugguguucugcggcaccagcggcaccuacggcaccggcagcuggcccgacggcgccgacaucaaccugaugcccaucuga

SEQ ID NO: 182120 - RNA, 1410 nt, Artificial Sequence; identical to SEQ ID NO: 181986
  derived and/or modified CDS sequence (opt4) from neuraminidase__InfluenzaA__AFG99902

SEQ ID NO: 182121 - RNA, 1410 nt, Artificial Sequence; identical to SEQ ID NO: 181986
  derived and/or modified CDS sequence (opt4) from neuraminidase__InfluenzaA__AFG99913

SEQ ID NO: 182122 - RNA, 1410 nt, Artificial Sequence; identical to SEQ ID NO: 181986
  derived and/or modified CDS sequence (opt4) from neuraminidase__InfluenzaA__AFG99924

SEQ ID NO: 182123 - RNA, 1410 nt, Artificial Sequence
  derived and/or modified CDS sequence (opt4) from neuraminidase__InfluenzaA__AFG99935
augaaccccaaccagaagaucaucaccaucggcagcgugagccugaccaucgccaccaucugcuuccugaugcagaucgccauccuggugaccaccgugacccugcacuucaagcaguacgagugcaacagcccccccaacaaccaggugaugcugugcgagcccaccaucguggagagaaacaucaccgagaucguguaccugaccaacaccaccaucgagaaggagaucugccccaagcuggccgaguacagaaacuggagcaagccccagugcaagaucaccggcuucgcccccuucagcaaggacaacagcaucagacugagcgccggcggcgacaucugggugaccagagagcccuacgugagcugcgaccccagcaagugcuaccaguucgcccugggccagggcaccacccugaacaacagacacagcaacgacaccgugcacgacagaacccccuacagaacccugcugaugaacgagcugggcgugcccuuccaccugggcaccaagcaggugugcaucgccuggagcagcagcagcugccacgacggcaaggccuggcugcacgugugcgugaccggccacgacgagaacgccaccgccagcuucaucuacgacggcagacugguggacagcaucggcagcuggagcaagaacauccugagaacccaggagagcgagugcgugugcaucaacggcaccugcaccguggugaugaccgacggcagcgccagcgagagagccgacaccaagauccuguucaucgaggagggcaagaucgugcacaucagcccccugagcggcagcgcccagcacguggaggagugcagcugcuaccccagauaccccggcgugagaugcgugugcagagacaacuggaagggcagcaacagacccaucguggacaucaacaugaaggacuacagcaucgugagcagcuacgugugcagcggccuggugggcgacacccccagaaacaacgacagcagcagcagcagcuacugcagaaaccccaacaacgagaagggcagccacggcgugaagggcugggccuucgacgacggcaacgacguguggaugggcagaaccaucggcgaggagcugagaagcggcuacgagaccuucaaggugaucggcggcuggagcacccccaacagcaagcugcagaucaacagacaggugaucguggacagaggcaacagaagcggcuacagcggcaucuucagcguggagggcaagagcugcaucaacagaugcuucuacguggagcugaucagaggcagaaagcaggagaccgaggugugguggaccagcaacagcaucgugguguucugcggcaccagcggcaccuacggcaccggcagcuggcccgacggcgccgacaucaaccugaugcccaucuga

SEQ ID NO: 182124 - RNA, 1410 nt, Artificial Sequence; identical to SEQ ID NO: 181986
  derived and/or modified CDS sequence (opt4) from neuraminidase__InfluenzaA__AFG99946

SEQ ID NO: 182125 - RNA, 1410 nt, Artificial Sequence
  derived and/or modified CDS sequence (opt4) from neuraminidase__InfluenzaA__AFG99957
augaaccccaaccagaagaucaucaccaucggcagcgugagccugaccaucgccaccaucugcuuccugaugcagaucgccauccuggugaccaccgugacccugcacuucaagcaguacgagugcaacagcccccccaacaaccaggccaugcugugcgagcccaccaucaucgagagaaacaucaccgagaucguguaccugaccaacaccaccaucgagaaggagaucugccccaagcuggccgaguacagaaacuggagcaagccccagugcaagaucaccggcuucgcccccuucagcaaggacaacagcaucagacugagcgccggcggcgacaucugggugaccagagagcccuacgugagcugcgaccccggcaagugcuaccaguucgcccugggccagggcaccacccugaacaacagacacagcaacgacaccgugcacgacagaacccccuacagaacccugcugaugaacgagcugggcgugcccuuccaccugggcaccaagcaggugugcaucgccuggagcagcagcagcugccacgacggcaaggccuggcugcacgugugcgugaccggccacgacgagaacgccaccgccagcuucaucuacgacggcagacugguggacagcaucggcagcuggagcaagaacauccugagaacccaggagagcgagugcgugugcaucaacggcaccugcaccguggugaugaccgacggcagcgccagcgagagagccgacaccaagauccuguucaucgaggagggcaagaucgugcacaucagcccccugagcggcagcgcccagcacguggaggagugcagcugcuaccccagauaccccggcgugagaugcgugugcagagacaacuggaagggcagcaacagacccaucguggacaucaacgugaaggacuacagcaucgugagcagcuacgugugcagcggccuggugggcgacacccccagaaagaacgacagcagcagcagcagcuacugcagaaaccccaacaacgagaagggcagccacggcgugaagggcugggccuucgacgacggcaacgacguguggaugggcagaaccaucggcgaggagcugagaagcggcuacgagaccuucaaggugaucggcggcuggagcacccccaacagcaagcugcagaucaacagacaggugaucguggacagaggcaacagaagcggcuacagcggcaucuucagcguggagggcaagagcugcaccaacagaugcuucuacguggagcugaucagaggcagaaagcaggagaccgaggugugguggaccagcaacagcaucgugguguucugcggcaccagcggcaccuacggcaccggcagcuggcccgacggcgccgacaucaaccugaugcccaucuga

SEQ ID NO: 182126 - RNA, 1410 nt, Artificial Sequence; identical to SEQ ID NO: 181986
  derived and/or modified CDS sequence (opt4) from neuraminidase__InfluenzaA__AFG99968

SEQ ID NO: 182127 - RNA, 1410 nt, Artificial Sequence
  derived and/or modified CDS sequence (opt4) from neuraminidase__InfluenzaA__AFG99979
augaaccccaaccagaagaucaucaccaucggcagcgugagccugaccaucgccaccaucugcuuccugaugcagaucgccauccuggugaccaccgugacccugcacuucaagcaguacgagugcaacagcccccccaacaaccaggugaugcccugcgagcccaccaucaucgagagaaacaucaccgagaucguguaccugaccaacaccaccaucgagaaggagaucugccccaagcugguggaguacagaaacuggagcaagccccagugcaagaucaccggcuucgcccccuucagcaaggacaacagcaucagacugagcgccggcggcgacaucugggugaccagagagcccuacgugagcugcgaccccggcaagugcuaccaguucgcccugggccagggcaccacccugaacaacagacacagcaacgacaccgugcacgacagaacccccuacagaacccugcugaugaacgagcugggcgugcccuuccaccugggcaccaagcaggugugcaucgccuggagcagcagcagcugccacgacggcaaggccuggcugcacgugugcgugaccggccacgacgagaacgccaccgccagcuucaucuacgacggcagacugguggacagcaucgugagcuggagcaagaacauccugagaacccaggagagcgagugcgugugcaucaacggcaccugcaccguggugaugaccgacggcagcgccagcgagagagccgacaccaagauccuguucaucgaggagggcaagaucgugcacaucagcccccugagcggcagcgcccagcacguggaggagugcagcugcuaccccagauaccccggcgugagaugcgugugcagagacaacuggaagggcagcaacagacccaucguggacaucaacgugaaggacuacagcaucgugagcagcuacgugugcagcggccuggugggcgacacccccagaaagaacgacagcagcagcagcagcuacugccugaaccccaacaacgagaagggcagccacggcgugaagggcugggccuucgacgacggcaacgacguguggaugggcagaaccaucggcgaggagcugagaagcggcuacgagaccuucaaggugaucggcggcuggagcacccccaacagcaagcugcagaccaacagacaggugaucguggacagaggcaacagaagcggcuacagcggcaucuucagcguggagagcaagagcugcaucaacagaugcuucuacguggagcugaucagaggcagaaagcaggagaccaaggugugguggaccagcaacagcaucgugguguucugcggcaccagcggcaccuacggcaccggcagcuggcccgacggcgccgacaucaaccugaugcccaucuga

SEQ ID NO: 182128 - RNA, 1410 nt, Artificial Sequence
  derived and/or modified CDS sequence (opt4) from neuraminidase__InfluenzaA__AFG99990
augaaccccaaccagaagaucaucaccaucggcagcgugagccugaccaucgccaccaucugcuuccugaugcagaucgccauccuggugaccaccgugacccugcacuucaagcaguacgagugcaacagcccccccaacaaccaggccaugcugugcgagcccaagaucaucgagagaaacaucaccgagaucguguaccugaccaacaccaccaucgagaaggagaucugccccaagcuggccgaguacagaaacuggagcaagccccagugcaagaucaccggcuucgcccccuucagcaaggacaacagcaucagacugagcgccggcggcgacaucugggugaccagagagcccuacgugagcugcgaccccggcaagugcuaccaguucgcccugggccagggcaccacccugaacaacagacacagcaacgacaccgugcacgacagaacccccuacagaacccugcugaugaacgagcugggcgugcccuuccaccugggcaccaagcaggugugcaucgccuggagcagcagcagcugccacgacggcaaggccuggcugcacgugugcgugaccggccacgacgagaacgccaccgccagcuucaucuacgacggcagacugguggacagcaucggcagcuggagcaagaacauccugagaacccaggagagcgagugcgugugcaucaacggcaccugcaccguggugaugaccgacggcagcgccagcgagagagccgacaccaagauccuguucaucgaggagggcaagaucgugcacaucagcccccugagcggcagcgcccagcacguggaggagugcagcugcuaccccagauaccccggcgugagaugcgugugcagagacaacuggaagggcagcaacagacccaucguggacaucaacgugaaggacuacagcaucgugagcagcuacgugugcagcggccuggugggcgacacccccagaaagaacgacagcagcagcagcagcuacugcagaaaccccaacaacgagaagggcagccacggcgugaagggcugggccuucgacgacggcaacgacguguggaugggcagaaccaucagcgaggagcugagaagcggcuacgagaccuucaaggugaucggcggcuggagcaagcccaacagcaagcugcagaucaacagacaggugaucguggacagaggcaacagaagcggcuacagcggcaucuucagcguggagggcaagagcugcaucaacagaugcuucuacguggagcugaucagaggcagaaagcaggagaccgaggugugguggaccagcaacagcaucgugguguucugcggcaccagcggcaccuacggcaccggcagcuggcccgacggcgccgacaucaaccugaugcccaucuga

SEQ ID NO: 182129 - RNA, 1410 nt, Artificial Sequence
  derived and/or modified CDS sequence (opt4) from neuraminidase__InfluenzaA__AFH00002
augaaccccaaccagaagaucaucaccaucggcagcgugagccugaccaucgccaccaucugcuuccugaugcagaucgccauccuggugaccaccgugacccugcacuucaagcaguacgagugcagcagcccccccaacaaccaggugauccccugccagcccaccaucaucgagagaaacaucaccgagaucguguaccugaccaacaccaccaucgagaaggagaucugccccaagcugguggaguacagaaacuggagcaagccccagugcaagaucaccggcuucgcccccuucagcaaggacaacagcaucagacugagcgccggcggcgacaucugggugaccagagagcccuacgugagcugcgaccccggcaagugcuaccaguucgcccugggccagggcaccacccugaacaacagacacagcaacgacaccgugcacgacagaacccccuacagaacccugcugaugaacgagcugggcgugcccuuccaccugggcaccaagcaggugugcaucgccuggagcagcagcagcugccacgacggcaaggccuggcugcacgugugcgugaccggccacgacgagaacgccaccgccagcuucaucuacgacggcagacugguggacagcaucggcagcuggagcaagaacauccugagaacccaggagagcgagugcgugugcaucaacggcaccugcgccguggugaugaccgacggcagcgccagcgagagagccgacaccaagauccuguucaucgaggagggcaagguggugcacaucagcccccugagcggcagcgcccagcacguggaggagugcagcugcuaccccagauaccccggcgugagaugcgugugcagagacaacuggaagggcagcaacagacccaucguggacaucaacgugaagaacuacagcaucgugagcagcuacgugugcagcggccuggugggcgacacccccagaaagaacgacagcagcagcagcagcuacugcagaaaccccaacaacgagaagggcagccacggcgugaagggcugggccuucgacgacggcaacgacguguggaugggcagaaccaucagcgaggagcugagaagcggcuacgagaccuucaaggugaucggcggcuggagcacccccaacagcaagcugcagaucaacagacaggugaucguggacagcggcaacagaagcggcuacagcggcaucuucagcguggagggcaagagcugcaucaacagaugcuucuacguggagcugaucagaggcagaaagcaggagaccaaggugugguggaccagcaacagcaucgugguguucugcggcaccagcggcaccuacggcaccggcagcuggcccgacggcgccgacaucaaccugaugcccaucuga

SEQ ID NO: 182130 - RNA, 1410 nt, Artificial Sequence; identical to SEQ ID NO: 175245
  derived and/or modified CDS sequence (opt4) from neuraminidase__InfluenzaA__AFH00013

SEQ ID NO: 182131 - RNA, 1410 nt, Artificial Sequence
  derived and/or modified CDS sequence (opt4) from neuraminidase__InfluenzaA__AFH00024
augaaccccaaccagaagaucaucaccaucggcagcgugagccugaccaucgccaccaucugcuuccugaugcagaucaccauccuggugaccaccgugacccugcacuucaagcaguacgagugcaacagcccccccaacaaccaggugaugcugugcgagcccaccaucaucgagagaaacaucaccgagaucguguaccugaccaacaccaccaucgagaaggagaucugccccaagcugguggaguacagaaacuggagcaagccccagugcaagaucaccggcuucgcccccuucagcaaggacaacagcaucagacugagcgccggcggcgacaucugggugaccagagagcccuacgugagcugcgaccccggcaagugcuaccaguucgcccugggccagggcaccacccugaacaacagacacagcaacgacaccgugcacgacagaacccccuacagaacccugcugaugaacgagcugggcgugcccuuccaccugggcaccaagcaggugugcaucgccuggagcagcagcagcugccacgacggcaaggccuggcugcacgugugcgugaccggccacgacgagaacgccaccgccagcuucaucuacgacggcagacugguggacagcaucggcagcuggagcaagaacauccugagaacccaggagagcgagugcgugugcaucaacggcaccugcaccguggugaugaccgacggcagcgccagcgagagagccgacaccaagauccuguucaucgaggagggcagaaucgugcacaucagcccccugagcggcagcgcccagcacguggaggagugcagcugcuaccccagauaccccggcgugagaugcgugugcagagacaacuggaagggcagcaacagacccaucguggacaucaacgugaaggacuacagcaucgugagcagcuacgugugcagcggccuggugggcgacacccccagaaagaacgacagcagcagcagcagcuacugcagaaaccccaacaacgagaagggcagccacggcgugaagggcugggccuucgacgacggcaacgacguguggaugggcagaaccaucagcgaggagcugagaagcggcuacgagaccuucaaggugaucggcggcuggagcacccccaacagcaagcugcagaucaacagacaggugaucguggacagaggcaacagaagcggcuacagcggcaucuucagcguggagggcaagagcugcaucaacagaugcuucuacguggagcugaucagaggcagaaagcaggagaacaaggugugguggaccagcaacagcaucgugguguucugcggcaccagcggcaccuacggcaccggcagcuggcccgacggcgccgacaucaaccugaugcccaucuga

SEQ ID NO: 182132 - RNA, 1410 nt, Artificial Sequence; identical to SEQ ID NO: 175245
  derived and/or modified CDS sequence (opt4) from neuraminidase__InfluenzaA__AFH00035

SEQ ID NO: 182133 - RNA, 1410 nt, Artificial Sequence; identical to SEQ ID NO: 175245
  derived and/or modified CDS sequence (opt4) from neuraminidase__InfluenzaA__AFH00046

SEQ ID NO: 182134 - RNA, 1410 nt, Artificial Sequence
  derived and/or modified CDS sequence (opt4) from neuraminidase__InfluenzaA__AFH00057
augaaccccaaccagaagaucaucaccaucggcagcgugagccugaccaucgccaccaucugcuuccugaugcagaucgccauccuggugaccaccgugacccugcacuucaagcaguacgagugcaacagcccccccaacaaccaggugaugcugugcgagcccaccaucaucgagagaaacaucaccgagaucguguaccugaccaacaccaccaucgagaaggagaucugccccaagcuggccgaguacagaaacuggagcaagccccagugcaagaucaccggcuucgcccccuucagcaaggacaacagcaucagacugagcgccggcggcgacaucugggugaccagagagcccuacgugagcugcgaccccggcaagugcuaccaguucgcccugggccagggcaccacccugaacaacagacacagcaacgacaccgugcacgacagaacccccuacagaacccugcugaugaacgagcugggcgugcccuuccaccugggcaccaagcaggugugcaucgccuggagcagcagcagcugccacgacggcaaggccuggcugcacgugugcgugaccggccacgacgagaacgccaccgccagcuucaucuacgacggcagacugguggacagcaucggcagcuggagcaagaacgugcugagaacccaggagagcgagugcgugugcaucaacggcaccugcaccguggugaugaccgacggcagcgccagcgagagagccgacaccaagauccuguucaucgaggagggcaagaucgugcacaucagcccccugagcggcagcgcccagcacguggaggagugcagcugcuaccccagauaccccggcgugagaugcgugugcagagacaacuggaagggcagcaacagacccaucguggacaucaacgugaaggacuacagcaucgugagcagcuacgugugcagcggccuggugggcgacacccccagaaagaacgacagcagcagcagcagcuacugcagaaaccccaacaacgagaagggcagccacggcgugaagggcugggccuucgacgacggcaacgacguguggaugggcagaaccaucagcgaggagcugagaagcggcuacgagaccuucaaggugaucggcggcuggagcaaccccaacagcaagcugcagaucaacagacaggugaucguggacagaggcaacagaagcggcuacagcggcaucuucagcguggagggcaagagcugcaucaacagaugcuucuacguggagcugaucagaggcagaaagcaggagaccgaggugugguggaccagcaacagcaucgugguguucugcggcaccagcggcaccuacggcaccggcagcuggcccgacggcgccgacaucaaccugaugcccaucuga

SEQ ID NO: 182135 - RNA, 1410 nt, Artificial Sequence; identical to SEQ ID NO: 175245
  derived and/or modified CDS sequence (opt4) from neuraminidase__InfluenzaA__AFH00068

SEQ ID NO: 182136 - RNA, 1410 nt, Artificial Sequence
  derived and/or modified CDS sequence (opt4) from neuraminidase__InfluenzaA__AFH00079
augaaccccaaccagaagaucaucaccaucggcagcgugagccugaccaucgccaccaucugcuuccugaugcagaucgccauccuggugaccaccgugacccugcacuucaagcaguacgagugcaacagcccccccaacaaccaggugaugcugugcgagcccaccaucaucgagagaaacaucaccgagaucguguaccugaccaacaccaccaucgagaaggagaucugccccaagcuggccgaguacagaaacuggagcaagccccagugcaagaucaccggcuucgcccccuucagcaaggacaacagcaucagacugagcgccggcggcgacaucugggugaccagagagcccuacgugagcugcgaccccggcaagugcuaccaguucgcccugggccagggcaccacccugaacaacagacacagcaacgacaccgugcacgacagaacccccuacagaacccugcugaugaacgagcugggcgugcccuuccaccugggcaccaagcaggugugcaucgccuggagcagcagcagcugccacgacggcaaggccuggcugcacgugugcgugaccggccacgacgagaacgccaccgccagcuucaucuacgacggcagacugguggacagcaucggcagcuggagcaagaacauccugagaacccaggagagcgagugcgugugcaucaacggcaccugcaccguggugaugaccgacggcagcgccagcgagagagccgacaccaagauccuguucaucgaggagggcaagaucgugcacaucagcccccugagcggcagcgcccagcacguggaggagugcagcugcuaccccagauaccccggcgugagaugcgugugcagagacaacuggaagggcagcaacagacccaucguggacaucaacgugaaggacuacagcaucgugagcagcuacgugugcagcggccuggugggcgacacccccagaaagaacgacagcagcagcagcagcuacugcagaaaccccaacaacgagaagggcagccacggcgugaagggcugggccuucgacgacggcaacgacguguggaugggcagaaccaucagcgaggagcugagaagcggcuacgagaccuucaaggugaucgagggcuggagcaagcccaacagcaagcugcagaucaacagacaggugaucguggacagaggcaacagaagcggcuacagcggcaucuucagcguggagggcaagagcugcaucaacagaugcuucuacguggagcugaucagaggcagaaagcaggagaccgaggugugguggaccagcaacagcaucgugguguucugcggcaccagcggcaccuacggcaccggcagcuggcccgacggcgccgacaucaaccugaugcccaucuga

SEQ ID NO: 182137 - RNA, 1410 nt, Artificial Sequence
  derived and/or modified CDS sequence (opt4) from neuraminidase__InfluenzaA__AFH00090
augaaccccaaccagaagaucaucaccaucggcagcgugagccugaccaucgccaccaucugcuuccugaugcagaucgccauccuggugaccaccgugacccugcacuucaagcaguacgagugcaacagcccccccaacaaccaggugaugcugugcgagcccaccaucaucgagagaaacaucaccgagaucguguaccugaccaacaccaccaucgagaaggagaucugccccaagcuggccgaguacagaaacuggagcaagccccagugcaagaucaccggcuucgcccccuucagcaaggacaacagcaucagacugagcgccggcggcgacaucugggugaccagagagcccuacgugagcugcgaccccggcaagugcuaccaguucgcccugggccagggcaccacccugaacaacagacacagcaacgacaccgugcacgacagaacccccuacagaacccugcugaugaacgagcugggcgugcccuuccaccugggcaccaagcaggugugcaucgccuggagcagcagcagcugccacgacggcaaggccuggcugcacgugugcgugaccggccacgacgagaacgccaccgccagcuucaucuacgacggcagacugguggacagcaucggcagcuggagcaagaacauccugagaacccaggagagcgagugcgugugcaucaacggcaccugcaccguggugaugaccgacggcagcgccagcgagagagccgacaccaagauccuguucaucgaggagggcaagaucgugcacaucagcccccugagcggcagcgcccagcacguggaggagugcagcugcuaccccagauaccccggcgugagaugcgugugcagagacaacuggaagggcagcaacagacccaucguggacaucaacgugaaggacuacagcaucgugagcagcuacgugugcagcggccuggugggcgacacccccagaaagaacgacagcagcagcagcagcuacugcuggaaccccaacaacgagaagggcagccacggcgugaagggcugggccuucgacgacggcaacgacguguggaugggcagaaccaucagcgaggagcugagaagcggcuacgagaccuucaaggugaucggcggcuggagcaagcccaacagcaagcugcagaucaacagacaggugaucguggacagaggcaacagaagcggcuacagcggcaucuucagcguggagggcaagagcugcaucaacagaugcuucuacguggagcugaucagaggcagaaagcaggagaccgaggugugguggaccagcaacagcaucgugguguucugcggcaccagcggcaccuacggcaccggcagcuggcccgacggcgccgacaucaaccugaugcccaucuga

SEQ ID NO: 182138 - RNA, 1410 nt, Artificial Sequence
  derived and/or modified CDS sequence (opt4) from neuraminidase__InfluenzaA__AFH00101
augaaccccaaccagaagaucaucaccaucggcagcgugagccugaccaucgccaccaucugcuuccugaugcagaucgccauccuggugaccaccgugacccugcacuucaagcaguacgagugcaacagcccccccaacaaccaggugaugcugugcgagcccaccaucaucgagagaaacaucaccgagaucguguaccugaccaacaccaccaucgagaaggagaucugccccaagcuggccgaguacagaaacuggagcaagccccagugcaagaucaccggcuucgcccccuucagcaaggacaacagcaucagacugagcgccggcggcgacaucugggugaccagagagcccuacgugagcugcgaccccggcaagugcuaccaguucgcccugggccagggcaccacccugaacaacagacacagcaacgacaccgugcacgacagaacccccuacagaacccugcugaugaacgagcugggcgugcccuuccaccugggcaccaagcaggugugcaucgccuggagcagcagcagcugccacgacggcaaggccuggcugcacgugugcgugaccggccacgacgagaacgccaccgccagcuucaucuacgacggcagacugguggacagcaucggcagcuggagcaagaagauccugagaacccaggagagcgagugcgugugcaucaacggcaccugcaccguggugaugaccgacggcagcgccagcgagagagccgacaccaagauccuguucaucgaggagggcaagaucgugcacaucagcccccugagcggcagcgcccagcacguggaggagugcagcugcuaccccagauaccccggcgugagaugcgugugcagagacaacuggaagggcagcaacagacccaucguggacaucaacgugaaggacuacagcaucgugagcagcuacgugugcagcggccuggugggcgacacccccagaaagaacgacagcagcagcagcagcuacugcagaaaccccaacaacgagaagggcagccacggcgugaagggcugggccuucgacgacggcaacgacguguggaugggcagaaccaucagcgaggagcugagaagcggcuacgagaccuucaaggugaucggcggcuggagcaagcccaacagcaagcugcagaucaacagacaggugaucguggacagaggcaacagaagcggcuacagcggcaucuucagcguggagggcaagagcugcaucaacagaugcuucuacguggagcugaucagaggcagaaagcaggagaccgaggugugguggaccagcaacagcaucgugguguucugcggcaccagcggcaccuacggcaccggcagcuggcccgacggcgccgacaucaaccugaugcccaucuga

SEQ ID NO: 182139 - RNA, 1410 nt, Artificial Sequence; identical to SEQ ID NO: 175161
  derived and/or modified CDS sequence (opt4) from neuraminidase__InfluenzaA__AFH00112

SEQ ID NO: 182140 - RNA, 1410 nt, Artificial Sequence; identical to SEQ ID NO: 175161
  derived and/or modified CDS sequence (opt4) from neuraminidase__InfluenzaA__AFH00123

SEQ ID NO: 182141 - RNA, 1410 nt, Artificial Sequence
  derived and/or modified CDS sequence (opt4) from neuraminidase__InfluenzaA__AFH00156
augaaccccaaccagaagaucaucaccaucggcagcgugagccugaccaucgccaccaucugcuuccugaugcagaucgccauccuggugaccaccgugacccugcacuucaagcaguacgagugcaacagcccccccaacaaccaggugaugcugugcgagcccaccaucaucgagagaaacaucaccgagaucguguaccugaccaacaccaccaucgagaaggagaucugccccaagcuggccgaguacagaaacuggagcaagccccagugcaagaucaccggcuucgcccccuucagcaaggacaacagcaucagacugagcgccggcggcgacaucugggugaccagagagcccuacgugagcugcgaccccggcaagugcuaccaguucgcccugggccagggcaccacccugaacaacagacacagcaacgacaccgugcacgacagaacccccuacagaacccugcugaugaacgagcugggcgugcccuuccaccugggcaccaagcaggugugcaucgccuggagcagcagcagcugccacgacggcaaggccuggcugcacgugugcgugaccggccacgacgagaacgccaccgccagcuucaucuacgacggcagacugguggacagcaucggcagcuggagcaagaacauccugagaacccaggagagcgagugcgugugcaucaacggcaccugcaccguggugaugaccgacggcagcgccagcgagagagccgacaccaagauccuguucaucgaggagggcaagaucgugcacaucagcccccugagcggcagcgcccagcacguggaggagugcagcugcuaccccagauaccccggcgugagaugcgugugcagagacaacuggaagggcagcaacagacccaucaucgacaucaacgugaaggacuacagcaucgugagcagcuacgugugcagcggccuggugggcgacacccccagaaagaacgacagcagcagcagcagcuacugcagaaaccccaacaacgagaagggcagccacggcgugaagggcugggccuucgacgacggcaacgacguguggaugggcagaaccaucagcgaggagcugagaagcggcuacgagaccuucaaggugaucggcggcuggagcaagcccaacagcaagcugcagaucaacagacaggugaucguggacagaggcaacagaagcggcuacagcggcaucuucagcguggagggcaagagcugcaucaacagaugcuucuacguggagcugaucagaggcagaaagcaggagaccgaggugugguggaccagcaacagcaucgugguguucugcggcaccagcggcaccuacggcaccggcagcuggcccgacggcgccgacaucaaccugaugcccaucuga

SEQ ID NO: 182142 - RNA, 1410 nt, Artificial Sequence
  derived and/or modified CDS sequence (opt4) from neuraminidase__InfluenzaA__AFH00167
augaaccccaaccagaagaucaucaccaucggcagcgugagccugaccaucgccaccaugugcuuccugaugcagaucgccauccuggugaccaccgugacccugcacuucaagcaguacgagugcaacagcccccccaacaaccaggugaugcugugcgagcccaccaucaucgagagaaacaucaccgagaucguguaccugaccaacaccaccaucgagaaggagaucugccccaagcuggccgaguacagaaacuggagcaagccccagugcaagaucaccggcuucgcccccuucagcaaggacaacagcaucagacugagcgccggcggcgacaucugggugaccagagagcccuacgugagcugcgaccccggcaagugcuaccaguucgcccugggccagggcaccacccugaacaacagacacagcaacgacaccgugcacgacagaacccccuacagaacccugcugaugaacgagcugggcgugcccuuccaccugggcaccaagcaggugugcaucgccuggagcagcagcagcugccacgacggcaaggccuggcugcacgugugcgugaccggccacgacgagaacgccaccgccagcuucaucuacgacggcagacugguggacagcaucggcagcuggagcaagaacauccugagaacccaggagagcgagugcgugugcaucaacggcaccugcaccguggugaugaccgacggcagcgccagcgagagagccgacaccaagauccuguucaucgaggagggcaagaucgugcacaucagcccccugagcggcagcgcccagcacguggaggagugcagcugcuaccccagauaccccggcgugagaugcgugugcagagacaacuggaagggcagcaacagacccaucguggacaucaacgugaaggacuacagcaucgugagcagcuacgugugcagcggccuggugggcgacacccccagaaagaacgacagcagcagcagcagcuacugcagaaaccccaacaacgagaagggcagccacggcgugaagggcugggccuucgacgacggcaacgacguguggaugggcagaaccaucagcgaggagcugagaagcggcuacgagaccuucaaggugaucggcggcuggagcaagcccaacagcaagcugcagaucaacagacaggugaucguggacagaggcaacagaagcggcuacagcggcaucuucagcguggagggcaagagcugcaucaacagaugcuucuacguggagcugaucagaggcagaaagcaggagaccgaggugugguggaccagcaacagcaucgugguguucugcggcaccagcggcaccuacggcaccggcagcuggcccgacggcgccgacaucaaccugaugcccaucuga

SEQ ID NO: 182143 - RNA, 1410 nt, Artificial Sequence; identical to SEQ ID NO: 182141
  derived and/or modified CDS sequence (opt4) from neuraminidase__InfluenzaA__AFH00178

SEQ ID NO: 182144 - RNA, 1410 nt, Artificial Sequence
  derived and/or modified CDS sequence (opt4) from neuraminidase__InfluenzaA__AFH00189
augaaccccaaccagaagaucaucaccaucggcagcgugagccugaccaucgccaccaucugcuuccugaugcagaucgccauccuggugaccaccgugacccugcacuucaagcaguacgaguacaacagcccccccaacaaccaggugaugcugugcgagcccaagaucaucgagagaaacaucaccgagaucguguaccugaccaacaccaccaucgagaaggagaucugccccaagcuggccgaguacagaaacuggagcaagccccagugcaagaucaccggcuucgcccccuucagcaaggacaacagcaucagacugagcgccggcggcgacaucugggugaccagagagcccuacgugagcugcgaccccggcaagugcuaccaguucgcccugggccagggcaccacccugaacaacagacacagcaacgacaccgugcacgacagaacccccuacagaacccugcugaugaacgagcugggcgugcccuuccaccugggcaccaagcaggugugcaucgccuggagcagcagcagcugccacgacggcaaggccuggcugcacgugugcgugaccggccacgacgagaacgccaccgccagcuucaucuacgacggcagacugguggacagcaucggcagcuggagcaagaacauccugagaacccaggagagcgagugcgugugcaucaacggcaccugcaccguggugaugaccgacggcagcgccagcgagagagccgacaccaagauccuguucaucgaggagggcaagaucgugcacaucagcccccugagcggcagcgcccagcacguggaggagugcagcugcuaccccagauaccccggcgugagaugcgugugcagagacaacuggaagggcagcaacagacccaucguggacaucaacgugaaggacuacagcaucgugagcagcuacgugugcagcggccuggugggcgacacccccagaaagaacgacagcagcagcagcagcuacugcagaaaccccaacaacgagaagggcagccacggcgugaagggcugggccuucgacgacggcaacgacguguggaugggcagaaccaucagcgaggagcugagaagcggcuacgagaccuucaaggugaucggcggcuggagcaagcccaacagcaagcugcagaucaacagacaggugaucguggacagaggcaacagaagcggcuacagcggcaucuucagcguggagggcaagagcugcaucaacagaugcuucuacguggagcugaucagaggcagaaagcaggagaccgaggugugguggaccagcaacagcaucgugguguucugcggcaccagcggcaccuacggcaccggcagcuggcccgacggcgccgacaucaaccugaugcccaucuga

SEQ ID NO: 182145 - RNA, 1410 nt, Artificial Sequence; identical to SEQ ID NO: 175245
  derived and/or modified CDS sequence (opt4) from neuraminidase__InfluenzaA__AFH00200

SEQ ID NO: 182146 - RNA, 1410 nt, Artificial Sequence; identical to SEQ ID NO: 182142
  derived and/or modified CDS sequence (opt4) from neuraminidase__InfluenzaA__AFH00211

SEQ ID NO: 182147 - RNA, 1410 nt, Artificial Sequence
  derived and/or modified CDS sequence (opt4) from neuraminidase__InfluenzaA__AFH00222
augaaccccaaccagaagaucaucaccaucggcagcgugagccugaccaucgccaccaucugcuuccugaugcagaucgccauccuggugaccaccgugacccugcacuucaagcaguacgagugcaacagcccccccaacaaccaggugaugcugugcgagcccaccaucaucgagagaaacaucaccgagaucguguaccugaccaacaccaccaucgagaaggagaucugccccaagcuggccgaguacagaaacuggagcaagccccagugcaagaucaccggcuucgcccccuucagcaaggacaacagcaucagacugagcgccggcggcgacaucugggugaccagagagcccuacgugagcugcgaccccggcaagugcuaccaguucgcccugggccagggcaccacccugaacaacagacacagcaacaacaccgugcacgacagaacccccuacagaacccugcugaugaacgagcugggcgugcccuuccaccugggcaccaagcaggugugcaucgccuggagcagcagcagcugccacgacggcaaggccuggcugcacgugugcgugaccggccacgacgagaacgccaccgccagcuucaucuacgacggcagacugguggacagcaucggcagcuggagcaagaacauccugagaacccaggagagcgagugcgugugcaucaacggcaccugcaccguggugaugaccgacggcagcgccagcgagagagccgacaccaagauccuguucaucgaggagggcaagaucgugcacaucagcccccugagcggcagcgcccagcacguggaggagugcagcugcuaccccagauaccccggcgugagaugcgugugcagagacaacuggaagggcagcaacagacccaucguggacaucaacgugaaggacuacagcaucgugagcagcuacgugugcagcggccuggugggcgacacccccagaaagaacgacagcagcagcagcagcuacugcagaaaccccaacaacgagaagggcagccacggcgugaagggcugggccuucgacgacggcaacgacguguggaugggcagaaccaucagcgaggagcugagaagcggcuacgagaccuucaaggugaucggcggcuggagcaagcccaacagcaagcugcagaucaacagacaggugaucguggacagaggcaacagaagcggcuacagcggcaucuucagcguggagggcaagagcugcaucaacagaugcuucuacguggagcugaucagaggcagaaagcaggagaccgaggugugguggaccagcaacagcaucgugguguucugcggcaccagcggcaccuacggcaccggcagcuggcccgacggcgccgacaucaaccugaugcccaucuga

SEQ ID NO: 182148 - RNA, 1410 nt, Artificial Sequence; identical to SEQ ID NO: 175161
  derived and/or modified CDS sequence (opt4) from neuraminidase__InfluenzaA__AFH00233

SEQ ID NO: 182149 - RNA, 1410 nt, Artificial Sequence
  derived and/or modified CDS sequence (opt4) from neuraminidase__InfluenzaA__AFH00244
augaaccccaaccagaagaucaucaccaucggcagcgugagccugaccaucgccaccaucugcuuccugaugcagaucgccauccuggugaccaccgugacccuguacuucaagcaguacgagugcaacagcccccccagcaaccaggugaugcugugcgagcccaccaucguggagagaaacaucaccgagaucguguaccugaccaacaccaccaucgagaaggagaucugccccaagcuggccgaguacagaaacuggagcaagccccagugcaagaucaccggcuucgcccccuucagcaaggacaacagcaucagacugagcgccggcggcgacaucugggugaccagagagcccuacgugagcugcgaccccggcaagugcuaccaguucgcccugggccagggcaccacccugaacaacagacacagcaacgacaccgugcacgacagaacccccuacagaacccugcugaugaacgagcugggcgugcccuuccaccugggcaccaagcaggugugcaucgccuggagcagcagcagcugccacgacggcaaggccuggcugcacgugugcgugaccggccacgacgagaacgccaccgccagcuucaucuacgacggcagacugguggacagcaucggcagcuggagcaagaacauccugagaacccaggagagcgagugcgugugcaucaacggcaccugcaccguggugaugaccgacggcagcgccagcgagagagccgacaccaagauccuguucaucgaggagggcaagaucgugcacaucagcccccugagcggcagcgccaagcacguggaggagugcagcugcuaccccagauaccccggcgugagaugcgugugcagagacaacuggaagggcagcaacagacccaucguggacaucaacgugaaggacuacagcaucgugagcagcuacgugugcagcggccuggugggcgacacccccagaaagaacgacagcagcagcagcagcuacugcagaaaccccaacaacgagaagggcagccacggcgugaagggcugggccuucgacgacggcaacgacguguggaugggcagaaccaucagcgaggagcugagaagcggcuacgagaccuucaaggugaucggcggcuggagcaagcccaacagcaagcugcagaucaacagacaggugaucguggacagaggcaacagaagcggcuacagcggcaucuucagcguggagggcaagagcugcaucaacagaugcuucuacguggagcugaucagaggcagaaagcaggagaccgaggugugguggaccagcaacagcaucgugguguucugcggcaccagcggcaccuacggcaccggcagcuggcccgacggcgccgacaucaaccugaugcccaucuga

SEQ ID NO: 182150 - RNA, 1410 nt, Artificial Sequence; identical to SEQ ID NO: 175245
  derived and/or modified CDS sequence (opt4) from neuraminidase__InfluenzaA__AFH00255

SEQ ID NO: 182151 - RNA, 1410 nt, Artificial Sequence; identical to SEQ ID NO: 175245
  derived and/or modified CDS sequence (opt4) from neuraminidase__InfluenzaA__AFH00266

SEQ ID NO: 182152 - RNA, 1410 nt, Artificial Sequence
  derived and/or modified CDS sequence (opt4) from neuraminidase__InfluenzaA__AFH00277
augaaccccaaccagaagaucaucaccaucggcagcgugagccugaccaucgccaccaucugcuuccugaugcagaucgccauccuggugaccaccgugacccugcacuucaagcaguacgagugcaacagcccccccagcaaccaggugaugcugugcgagcccaccaucaucgagagaaacaucaccgagaucguguaccugaccaacaccaccaucgagaaggagaucugccccaagcuggccgaguacagaaacuggagcaagccccagugcaagaucaccggcuucgcccccuucagcaaggacaacagcaucagacugagcgccggcggcgacaucugggugaccagagagcccuacgugagcugcgaccccggcaagugcuaccaguucgcccugggccagggcaccacccugaacaacagacacagcaacgacaccgugcacgacagaacccccuacagaacccugcugaugaacgagcugggcgugcccuuccaccugggcaccaagcaggugugcaucgccuggagcagcagcagcugccacgacggcaaggccuggcugcacgugugcgugaccggccacgacgagaacgccaccgccagcuucaucuacgacggcagacugguggacagcaucggcagcuggagcaagaacauccugagaacccaggagagcgagugcgugugcaucaacggcaccugcaccguggugaugaccgacggcagcgccagcgagagagccgacaccaagauccuguucaucgaggagggcaagaucgugcacaucagcccccugagcggcagcgcccagcacguggaggagugcagcugcuaccccagauaccccggcgugagaugcgugugcagagacaacuggaagggcagcaacagacccaucguggacaucaacgugaaggacuacagcaucgugagcagcuacgugugcagcggccuggugggcgacacccccagaaagaacgacagcagcagcagcagcuacugcagaaagcccaacaacgagaagggcagccacggccugaagggcugggccuucgacgacggcaacgacguguggaugggcagaaccaucagcgaggagcugagaagcggcuacgagaccuucaaggugaucggcggcuggagcaagcccaacagcaagcugcagaucaacagacaggugaucguggacagaggcaacagaagcggcuacagcggcaucuucagcguggagggcaagagcugcaucaacagaugcuucuacguggagcugaucagaggcagaaagcaggagaccgaggugugguggaccagcaacagcaucgugguguucugcggcaccagcggcaccuacggcaccggcagcuggcccgacggcgccgacaucaaccugaugcccaucuga

SEQ ID NO: 182153 - RNA, 1410 nt, Artificial Sequence; identical to SEQ ID NO: 175245
  derived and/or modified CDS sequence (opt4) from neuraminidase__InfluenzaA__AFH00288

SEQ ID NO: 182154 - RNA, 1410 nt, Artificial Sequence; identical to SEQ ID NO: 182077
  derived and/or modified CDS sequence (opt4) from neuraminidase__InfluenzaA__AFH00299

SEQ ID NO: 182155 - RNA, 1410 nt, Artificial Sequence
  derived and/or modified CDS sequence (opt4) from neuraminidase__InfluenzaA__AFH00310
augaaccccaaccagaagaucaucaccaucggcagcgugagccugaccaucgccaccaucugcuuccugaugcagaucgccauccuggugaccaccgugacccugcacuucaagcaguacgagugcagcagcagccccaacaaccaggugauccccugccagcccaccaucaucgagagaaacaucaccgagaucguguaccugaccaacaccaccaucgagaaggagaucugccccaagcugguggaguacagaaacuggagcaagccccagugcaagaucaccggcuucgcccccuucagcaaggacaacagcaucagacugagcgccggcggcgacaucugggugaccagagagcccuacgugagcugcgaccccggcaagugcuaccaguucgcccugggccagggcaccacccugaacaacagacacagcaacgacaccgugcacgacagaacccccuacagaacccugcugaugaacgagcugggcgugcccuuccaccugggcaccaagcaggugugcaucgccuggagcagcagcagcugccacgacggcaaggccuggcugcacgugugcgugaccggccacgacgagaacgccaccgccagcuucaucuacgacggcagacugguggacagcaucggcagcuggagcaagaacauccugagaacccaggagagcgagugcgugugcaucaacggcaccugcaccguggugaugaccgacggcagcgccagcgagaaggccgacaccaagauccuguucaucgaggagggcaagguggugcacaucagcccccugagcggcagcgcccagcacguggaggagugcagcugcuaccccagauaccccggcgugagaugcgugugcagagacaacuggaagggcagcaacagacccaucguggacaucaacgugaagaacuacagcaucgugagcagcuacgugugcagcggccuggugggcgacacccccagaaagaacgacagcagcagcagcagcuacugcagaaaccccaacaacgagaagggcagccacggcgugaagggcugggccuucgacgacggcaacgacguguggaugggcagaaccaucagcgaggagcugagaagcggcuacgagaccuucaaggugaucggcggcuggagcacccccaacagcaagcugcagaucaacagacaggugaucguggacagcggcaacagaagcggcuacagcggcaucuucagcguggagggcaagagcugcaucaacagaugcuucuacguggagcugaucagaggcagaaagcaggagaccaaggugugguggaccagcaacagccuggugguguucugcggcaccagcggcaccuacggcaccggcagcuggcccgacggcgccgacaucaaccugaugcccaucuga

SEQ ID NO: 182156 - RNA, 1410 nt, Artificial Sequence; identical to SEQ ID NO: 182155
  derived and/or modified CDS sequence (opt4) from neuraminidase__InfluenzaA__AFH00321

SEQ ID NO: 182157 - RNA, 1410 nt, Artificial Sequence
  derived and/or modified CDS sequence (opt4) from neuraminidase__InfluenzaA__AFH00332
augaaccccaaccagaagaucaucaccaucggcagcgugagccugaccaucgccaccaucugcuuccugaugcagaucgccauccuggugaccaccgugacccugcacuucaagcaguacgagugcaacagcccccccaacaaccaggugaugcugugcgagcccaccaucaucgagagaaacaucaccgagaucguguaccugaccaacaccaccaucgagaaggagaucugccccaagcuggccgaguacagaaacuggagcaagccccagugcaagaucaccggcuucgcccccuucagcaaggacaacagcaucagacugagcgccggcggcgacaucugggugaccagagagcccuacgugagcugcgaccccggcaagugcuaccaguucgcccugggccagggcaccacccugaacaacagacacagcaacgacaccgugcacgacagaacccccuacagaacccugcugaugaacgagcugggcgugcccuuccaccugggcaccaagcaggugugcaucgccuggagcagcagcagcugccacgacggcaaggccuggcugcacgugugcgugaccggccacgacgagaacgccaccgccagcuucaucuacgacggcagacugguggacagcaucggcagcuggagcaagaacauccugagaacccaggagagcgagugcgugugcaucaacggcaccugcaccguggugaugaccgacggcagcgccagcgagagagccgacaccaagauccuguucaucgaggagggcaagaucgugcacaucagcccccugagcggcagcgcccagcacguggaggagugcagcugcuaccccagauaccccggcgugagaugcgugugcagagacaacuggaagggcagcaacagacccaucguggacaucaacgugaaggacuacagcaucgugagcagcuacgugugcagcggccuggugggcgacacccccagaaagaacgacagcagcagcagcagccacugccugaaccccaacaacgaggagggcggccacggcgugaagggcugggccuucgacgacggcaacgacguguggaugggcagaaccaucagcgagaagcugagaagcggcuacgagaccuucaaggugaucggcggcuggagcaagcccaacagcaagcugcagaucaacagacaggugaucguggacagaggcaacagaagcggcuacagcggcaucuucagcguggagggcaagggcugcaucaacagaugcuucuacguggagcugaucagaggcagaaagcaggagaccgaggugugguggaccagcaacagcaucgugguguucugcggcaccagcggcaccuacggcaccggcagcuggcccgacggcgccgacaucaaccugaugcccaucuga

SEQ ID NO: 182158 - RNA, 1410 nt, Artificial Sequence
  derived and/or modified CDS sequence (opt4) from neuraminidase__InfluenzaA__AFH00343
augaaccccaaccagaagaucaucaccaucggcagcgugagccugaccaucgccaccaucugcuuccugaugcagaucgccauccuggugaccaccgugacccugcacuucaagcaguacgagugcaacagcccccccagcaaccaggccaugcugugcgagcccaccaucaucgagagaaacaucaccgagaucguguaccugaccaacaccaccaucgagaaggagaucugccccaagcuggccgaguacagaaacuggagcaagccccagugcaagaucaccggcuucgcccccuucagcaaggacaacagcaucagacugagcgccggcggcgacaucugggugaccagagagcccuacgugagcugcgaccccggcaagugcuaccaguucgcccugggccagggcaccacccugaacaacagacacagcaacgacaccgugcacgacagaacccccuacagaacccugcugaugaacgagcugggcgugcccuuccaccugggcaccaagcaggugugcaucgccuggagcagcagcagcugccacgacggcaaggccuggcugcacgugugcgugaccggccacgacgagaacgccaccgccagcuucaucuacgacggcagacugguggacagcaucggcagcuggagcaagaacauccugagaacccaggagagcgagugcgugugcaucaacggcaccugcaccguggugaugaccgacggcagcgccagcgagagagccgacaccaagauccuguucaucgaggagggcaagaucgugcacaucagcccccugagcggcagcgcccagcacguggaggagugcagcugcuaccccagauaccccggcgugagaugcgugugcagagacaacuggaagggcagcaacagacccaucguggacaucaacgugaaggacuacagcaucgugagcagcuacgugugcagcggccuggugggcgacacccccagaaagaacgacagcagcagcagcagcuacugcagaaaccccaacaacgagaagggcagccacggcgugaagggcugggccuucgacgacggcaacgacguguggaugggcagaaccaucagcgaggagcugagaagcggcuacgagaccuucaaggugaucggcggcuggagcaagcccaacagcaagcugcagaucaacagacaggugaucguggacagaggcaacagaagcggcuacagcggcaucuucagcguggagggcaagagcugcaucaacagaugcuucuacguggagcugaucagaggcagaaagcaggagaccgaggugugguggaccagcaacagcaucgugguguucugcggcaccagcggcaccuacggcaccggcagcuggcccgacggcgccgacaucaaccugaugcccaucuga

SEQ ID NO: 182159 - RNA, 1410 nt, Artificial Sequence
  derived and/or modified CDS sequence (opt4) from neuraminidase__InfluenzaA__AFH00354
augaaccccaaccagaagaucaucaccaucggcagcgugagccugaccaucgccaccaucugcuuccugaugcagaucgccauccuggugaccaccgugacccugcacuucaagcaguacgagugcaacagcccccccaacaaccaggugaugcugugcgagcccaccaucaucgagagaaacaucaccaagaucguguaccugaccaacaccaccaucgagaaggagaucugccccaagcuggccgaguacagaaacuggagcaagccccagugcaagaucaccggcuucgcccccuucagcaaggacaacagcaucagacugagcgccggcggcgacaucugggugaccagagagcccuacgugagcugcgaccccggcaagugcuaccaguucgcccugggccagggcaccacccugaacaacagacacagcaacgacaccgugcacgacagaacccccuacagaacccugcugaugaacgagcugggcgugcccuuccaccugggcaccaagcaggugugcaucgccuggagcagcagcagcugccacgacggcaaggccuggcugcacgugugcgugaccggccacgacgagaacgccaccgccagcuucaucuacgacggcagacugguggacagcaucggcagcuggagcaagaacauccugagaacccaggagagcgagugcgugugcaucaacggcaccugcaccguggugaugaccgacggcagcgccagcgagagagccgacaccaagauccuguucaucgaggagggcaagaucgugcacaucagcccccugagcggcagcgcccagcacguggaggagugcagcugcuaccccagauaccccggcgugagaugcgugugcagagacaacuggaagggcagcaacagacccaucguggacaucaacgugaaggacuacagcaucgugagcagcuacgugugcagcggccuggugggcgacacccccagaaagaacgacagcagcagcagcagcuacugccugaaccccaacaacgaggagggcggccacggcgugaagggcugggccuucgacgacggcaacgacguguggaugggcagaaccaucagcgagaagcugagaagcggcuacgagaccuucaaggugaucggcggcuggagcaagcccaacagcaagcugcagaucaacagacaggugaucguggacagaggcaacagaagcggcuacagcggcaucuucagcguggagggcaagagcugcgugaacagaugcuucuacguggagcugaucagaggcagaaagcaggagaccgaggugugguggaccagcaacagcaucgugguguucugcggcaccagcggcaccuacggcaccggcagcuggcccgacggcgccgacaucaaccugaugcccaucuga

SEQ ID NO: 182160 - RNA, 1410 nt, Artificial Sequence; identical to SEQ ID NO: 175040
  derived and/or modified CDS sequence (opt4) from neuraminidase__InfluenzaA__AFH00365

SEQ ID NO: 182161 - RNA, 1410 nt, Artificial Sequence
  derived and/or modified CDS sequence (opt4) from neuraminidase__InfluenzaA__AFH00376
augaaccccaaccagaagaucaucaccaucggcagcgugagccugaccaucgccaccaucugcuuccugaugcagaucgccauccuggugaccaccgugacccugcacuucaagcagugcgagugcaacagcccccccaacaaccaggugaugcugugcgagcccaccaucaucgagagaaacaucaccgagaucguguaccugaccaacaccaccaucgagaaggagaucugccccaagcuggccgaguacagaaacuggagcaagccccagugcaagaucaccggcuucgcccccuucagcaaggacaacagcaucagacugagcgccggcggcgacaucugggugaccagagagcccuacgugagcugcgaccccggcaagugcuaccaguucgcccugggccagggcaccacccugaacaacagacacagcaacgacaccgugcacgacagaacccccuacagaacccugcugaugaacgagcugggcgugcccuuccaccugggcaccaagcaggugugcaucgccuggagcagcagcagcugccacgacggcaaggccuggcugcacgugugcgugaccggccacgacgagaacgccaccgccagcuucaucuacgacggcagacugguggacagcaucggcagcuggagcaagaacauccugagaacccaggagagcgagugcgugugcaucaacggcaccugcaccguggugaugaccgacggcagcgccagcggcagagccgacaccaagauccuguucaucgaggagggcaagaucgugcacaucagcccccugagcggcagcgcccagcacguggaggagugcagcugcuaccccagauaccccggcgugagaugcgugugcagagacaacuggaagggcagcaacagacccaucguggacaucaacgugaaggacuacagcaucgugagcagcuacgugugcagcggccuggugggcgacacccccagaaagaacgacagcagcagcagcagcuacugccugaaccccaacaacgaggagggcggccacggcgugaagggcugggccuucgacgacggcaacgacguguggaugggcagaaccaucagcgagaagcugagaagcggcuacgagaccuucaaggugaucggcggcuggagcaagcccaacagcaagcugcagaucaacagacaggugaucguggacagaggcaacagaagcggcuacagcggcaucuucagcguggagggcaagagcugcaucaacagaugcuucuacguggagcugaucagaggcagaaagcaggagaccgaggugugguggaccagcaacagcaucgugguguucugcggcaccagcggcaccuacggcaccggcagcuggcccgacggcgccgacaucaaccugaugcccaucuga

SEQ ID NO: 182162 - RNA, 1410 nt, Artificial Sequence
  derived and/or modified CDS sequence (opt4) from neuraminidase__InfluenzaA__AFH00387
augaaccccaaccagaagaucaucaccaucggcagcgugagccugaccaucgccaccaucugcuuccugaugcagaucgccauccuggugaccaccgugacccugcacuucaagcaguacgagugcaacagcccccccaacaaccaggugaugcugugcgagcccaccaucaucgagagaaacaucaccgagaucguguaccugaccaacaccaccaucgagaaggagaucugccccaagcuggccgaguacagaaacuggagcaagccccagugcaagaucaccggcuucgcccccuucagcaaggacaacagcaucagacugagcgccggcggcgacaucugggugaccagagagcccuacgugagcugcgaccccgacaagugcuaccaguucgcccugggccagggcaccacccugaacaacagacacagcaacgacaccgugcacgacagaacccccuacagaacccugcugaugaacgagcugggcgugcccuuccaccugggcaccaagcaggugugcaucgccuggagcagcagcagcugccacgacggcaaggccuggcugcacgugugcgugaccggccacgacgagaacgccaccgccagcuucaucuacgacggcagacugguggacagcaucagcagcuggagcaagaacauccugagaacccaggagagcgagugcgugugcaucaacggcaccugcaccguggugaugaccgacggcagcgccagcgagagagccgacaccaagauccuguucaucgaggagggcaagaucgugcacaucagcccccugagcggcagcgcccagcacguggaggagugcagcugcuaccccagauaccccggcgugagaugcgugugcagagacaacuggaagggcagcaacagacccaucguggacaucaacgugaaggacuacagcaucgugagcagcuacgugugcagcggccuggugggcgacacccccagaaagaacgacagcagcagcagcagcuacugccugaaccccaacaacgaggagggcggccacggcgugaagggcugggccuucgacgacggcaacgacguguggaugggcagaaccaucagcgagaagcugagaagcggcuacgagaccuucaaggugaucggcggcuggagcaagcccaacagcaagcugcagaucaacagacaggugaucguggacagaggcaacagaagcggcuacagcggcaucuucagcguggagggcaagagcugcgugaacagaugcuucuacguggagcugaucagaggcagaaagcaggagaccgaggugugguggaccagcaacagcaucgugguguucugcggcaccagcggcaccuacggcaccggcagcuggcccgacggcgccgacaucaaccugaugcccaucuga

SEQ ID NO: 182163 - RNA, 1410 nt, Artificial Sequence
  derived and/or modified CDS sequence (opt4) from neuraminidase__InfluenzaA__AFH00398
augaaccccaaccagaagaucaucaccaucggcagcgugagccugaccaucgccaccaucugcuuccugaugcagaucgccauccuggugaccaccgugacccugcacuucaagcaguacgagugcaacagcccccccaacaaccaggugaugcugugcgagcccaccaucaucgagagaaacaucaccgagaucguguaccugaccaacaccaccaucgagaaggagaucugccccaagcuggccgaguacagaaacuggagcaagccccagugcaagaucaccggcuucgcccccuucagcaaggacaacagcaucagacugagcgccggcggcgacaucugggugaccagagagcccuacgugagcugcgaccccggcaagugcuaccaguucgcccugggccagggcaccacccugaacaacagacacagcaacgacaccgugcacgacagaacccccuacagaacccugcugaugaacgagcugggcgugcccuuccaccugggcaccaagcaggugugcaucgccuggagcagcagcagcugccacgacggcaaggccuggcugcacgugugcgugaccggccacgacgagaacgccaccgccagcuucaucuacgacggcagacugguggacagcaucggcagcuggagcaagaacauccugagaacccaggagagcgagugcgugugcaucaacggcaccugcaccguggugaugaccgacggcagcgccagcgagagagccgacaccaagauccuguucaucgaggagggcaagaucgugcacaucagcccccugagcggcagcgcccagcacguggaggagugcagcugcuaccccagauaccccggcgugagaugcgugugcagagacaacuggaagggcagcaacagacccaucguggacaucaacgugaaggacuacagcaucgugagcagcuacgugugcagcggccuggugggcgacacccccagaaagaacgacagcagcagcagcagcuacugccugaaccccaacaacgaggagggcggccacggcgugaagggcugggccuucgacgacggcaacgacguguggaugggcagaaccaucagcgagaagcugagaagcggcuacgagaccuucaaggugaucggcggcuggagcaagcccaacagcaagcugcagaucaacagacaggugaucguggacagaggcaacagaagcggcuacagcggcaucuucagcguggagggcaagagcugcgugaacagaugcuucuacguggagcugaucagaggcagaaagcaggagaccgaggugugguggaccagcaacagcaucgugguguucugcggcaccagcggcaccuacggcgccggcagcuggcccgacggcgccgacaucaaccugaugcccaucuga

SEQ ID NO: 182164 - RNA, 1410 nt, Artificial Sequence
  derived and/or modified CDS sequence (opt4) from neuraminidase__InfluenzaA__AFH00409
augaaccccaaccagaagaucaucaccaucggcagcgugagccugaccaucgccaccaucugcuuccugaugcagaucgccauccuggugaccaccgugacccugcacuucaagcaguacgagugcaacagcccccccaacaaccaggugaugcugugcgagcccaccaucaucgagagaaacaucaccgagaucguguaccugaccaacaccaccaucgagaaggagaucugccccaagcuggccgaguacagaaacuggagcaagccccagugcaagaucaccggcuucgcccccuucagcaaggacaacagcaucagacugagcgccggcggcgacaucugggugaccagagagcccuacgugagcugcgaccccggcaagugcuaccaguucgcccugggccagggcaccacccugaacaacagacacagcaacgacaccgugcacgacagaacccccuacagaacccugcugaugaacgagcugggcgugcccuuccaccugggcaccaagcaggugugcaucgccuggagcagcagcagcugccacgacggcaaggccuggcugcacgugugcgugaccggccacaacgagaacgccaccgccagcuucaucuacgacggcagacugguggacagcaucggcagcuggagcaagaacauccugagaacccaggagagcgagugcgugugcaucaacggcaccugcaccguggugaugaccgacggcagcgccagcggcagagccgacaccaagauccuguucaucgaggagggcaagaucgugcacaucagcccccugagcggcagcgcccagcacguggaggagugcagcugcuaccccagauaccccggcgugagaugcgugugcagagacaacuggaagggcagcaacagacccaucguggacaucaacgugaaggacuacagcaucgugagcagcuacgugugcagcggccuggugggcgacacccccagaaagaacgacagcagcagcagcagcuacugccugaaccccaacaacgaggagggcggccacggcgugaagggcugggccuucgacgacggcaacgacguguggaugggcagaaccaucagcgagaagcugagaagcggcuacgagaccuucaaggugaucggcggcuggagcaagcccaacagcaagcugcagaucaacagacaggugaucguggacagaggcaacagaagcggcuacagcggcaucuucagcguggagggcaagagcugcaucaacagaugcuucuacguggagcugaucagaggcagaaagcaggagaccgaggugugguggaccagcaacagcaucgugguguucugcggcaccagcggcaccuacggcaccggcagcuggcccgacggcgccgacaucaaccugaugcccaucuga

SEQ ID NO: 182165 - RNA, 1410 nt, Artificial Sequence; identical to SEQ ID NO: 175040
  derived and/or modified CDS sequence (opt4) from neuraminidase__InfluenzaA__AFH00420

SEQ ID NO: 182166 - RNA, 1410 nt, Artificial Sequence; identical to SEQ ID NO: 175173
  derived and/or modified CDS sequence (opt4) from neuraminidase__InfluenzaA__AFH00431

SEQ ID NO: 182167 - RNA, 1410 nt, Artificial Sequence
  derived and/or modified CDS sequence (opt4) from neuraminidase__InfluenzaA__AFH00442
augaaccccaaccagaagaucaucaccaucggcagcgugagccugaccaucgccaccaucugcuuccugaugcagaucgccauccuggugaucaccgugacccugcacuucaagcaguacgagugcaacagcccccccaacaaccaggugaugcugugcgagcccaccaucaucgagagaaacaucaccgagaucguguaccugaccaacaccaccaucgagaaggagaucugccccaagcuggccgaguacagaaacuggagcaagccccagugcaagaucaccggcuucgcccccuucagcaaggacaacagcaucagacugagcgccggcggcgacaucugggugaccagagagcccuacgugagcugcgaccccggcaagugcuaccaguucgcccugggccagggcaccacccugaacaacagacacagcaacgacaccgugcacgacagaacccccuacagaacccugcugaugaacgagcugggcgugcccuuccaccugggcaccaagcaggugugcaucgccuggagcagcagcagcugccacgacggcaaggccuggcugcacgugugcgugaccggccacaacgagaacgccaccgccagcuucaucuacgacggcagacugguggacagcaucggcagcuggagcaagaacauccugagaacccaggagagcgagugcgugugcaucaacggcaccugcaccguggugaugaccgacggcagcgccagcggcagagccgacaccaagauccuguucaucgaggagggcaagaucgugcacaucagcccccugagcggcagcgcccagcacguggaggagugcagcugcuaccccagauaccccggcgugagaugcgugugcagagacaacuggaagggcagcaacagacccaucguggacaucaacgugaaggacuacagcaucgugagcagcuacgugugcagcggccuggugggcgacacccccagaaagaacgacagcagcagcagcagccacugccugaaccccaacaacgaggagggcggccacggcgugaagggcugggccuucgacgacggcaacgacguguggaugggcagaaccaucagcgagaagcugagaagcggcuacgagaccuucaaggugaucggcggcuggagcaagcccaacagcaagcugcagaucaacagacaggugaucguggacagaggcaacagaagcggcuacagcggcaucuucagcguggagggcaagagcugcaucaacagaugcuucuacguggagcugaucagaggcagaaagcaggagaccgaggugugguggaccagcaacagcaucgugguguucugcggcaccagcggcaccuacggcaccggcagcuggcccgacggcgccgacaucaaccugaugcccaucuga

SEQ ID NO: 182168 - RNA, 1410 nt, Artificial Sequence
  derived and/or modified CDS sequence (opt4) from neuraminidase__InfluenzaA__AFH00453
augaaccccaaccagaagaucaucaccaucggcagcgugagccugaccaucgccaccaucugcuuccugaugcagaucgccauccuggugaccaccgugacccugcacuucaagcaguacgagugcaacagcccccccaacaaccaggugaugcugugcgagcccaccaucaucgagagaaacaucaccgaggugguguaccugaccaacaccaccaucgagaaggagaucugccccaagcuggccgaguacagaaacuggagcaagccccagugcaagaucaccggcuucgcccccuucagcaaggacaacagcaucagacugagcgccggcggcgacaucugggugaccagagagcccuacgugagcugcgaccccgacaagugcuaccaguucgcccugggccagggcaccacccugaacaacagacacagcaacgacaucgugcacgacagaacccccuacagaacccugcugaugaacgagcugggcgugcccuuccaccugggcaccaagcaggugugcaucgccuggagcagcagcagcugccacgacggcaaggccuggcugcacgugugcgugaccggccacgacgagaacgccaccgccagcuucaucuacgacggcagacugguggacagcaucggcagcuggagcaagaagauccugagaacccaggagagcgagugcgugugcaucaacggcaccugcaccguggugaugaccgacggcagcgccagcggcagagccgacaccaagauccuguucaucgaggagggcaagaucgugcacaucagcccccugagcggcagcgcccagcacguggaggagugcagcugcuaccccagauaccccggcgugagaugcgugugcagagacaacuggaagggcagcaacagacccaucguggacaucaacgugaaggacuacagcaucgugagcagcuacgugugcagcggccuggugggcgacacccccagaaagaacgacagcagcagcagcagccacugccugaaccccaacaacgaggagggcggccacggcgugaagggcugggccuucgacgacggcaacgacguguggaugggcagaaccaucagcgagaagcugagaagcggcuacgagaccuucaaggugaucggcggcuggagcaagcccaacagcaagcugcagaucaacagacaggugaucguggacagaggcaacagaagcggcuacagcggcaucuucagcguggagggcaagagcugcaucaacagaugcuucuacguggagcugaucagaggcagaaagcaggagaccgaggugugguggaccagcaacagcaucgugguguucugcggcaccagcggcaccuacggcaccggcagcuggcccgacggcgccgacaucaaccugaugcccaucuga

SEQ ID NO: 182169 - RNA, 1410 nt, Artificial Sequence
  derived and/or modified CDS sequence (opt4) from neuraminidase__InfluenzaA__AFH00464
augaaccccaaccagaagaucaucaccaucggcagcgugagccugaccaucgccaccaucugcuuccugaugcagaucgccauccuggugaccaccgugacccugcacuucaagcaguacgagugcaacagcccccccaacaaccaggugaugcugugcgagcccaccaucaucgagagaaacaucaccgagaucguguaccugaccaacaccaccaucgagaaggagaucugccccaagcuggccgaguacagaaacuggagcaagccccagugcaagaucaccggcuucgcccccuucagcaaggacaacagcaucagacugagcgccggcggcgacaucugggugaccagagagcccuacgugagcugcgaccccggcaagugcuaccaguucgcccugggccagggcaccacccugaagaacagacacagcaacgacaccgugcacgacagaacccccuacagaacccugcugaugaacgagcugggcgugcccuuccaccugggcaccaagcaggugugcaucgccuggagcagcagcagcugccacgacggcaaggccuggcugcacgugugcgugaccggccacgacgagaacgccaccgccagcuucaucuacggcggcagacugguggacagcaucggcagcuggagcaagaagauccugagaacccaggagagcgagugcgugugcaucaacggcaccugcaccguggugaugaccgacggcagcgccagcggcagagccgacaccaagauccuguucaucgaggagggcaagaucgugcacaucagcccccugagcggcagcgcccagcacguggaggagugcagcugcuaccccagauaccccggcgugagaugcgugugcagagacaacuggaagggcagcaacagacccaucguggacaucaacgugaaggacuacagcaucgugagcagcuacgugugcagcggccuggugggcgacacccccagaaagaacgacagcagcagcagcagcuacugccugaaccccaacaacgaggagggcggccacggcgugaagggcugggccuucgacgacggcaacgacguguggaugggcagaaccaucagcgagaagcugagaagcggcuacgagaccuucaaggugaucggcggcuggagcaagcccaacagcaagcugcagaucaacagacaggugaucguggacagaggcaacagaagcggcuacagcggcaucuucagcguggagggcaagagcugcaucaacagaugcuucuacguggagcugaucagaggcagaaagcaggagaccgaggugugguggaccagcaacagcaucgugguguucugcggcaccagcggcaccuacggcaccggcagcuggcccgacggcgccgacaucaaccugaugcccaucuga

SEQ ID NO: 182170 - RNA, 1410 nt, Artificial Sequence
  derived and/or modified CDS sequence (opt4) from neuraminidase__InfluenzaA__AFH00475
augaaccccaaccagaagaucaucaccaucggcagcgugagccugaccaucgccaccaucugcuuccugaugcagaucgccauccuggugaccaccgugacccugcacuucaagcaguacgagugcaacagcccccccaacaaccaggugaugcugugcgagcccaccaucaucgagagaaacaucaccgagaucguguaccugaccaacaccaccaucgagaaggagaucugccccaagcuggccgaguacagaaacuggagcaagccccagugcaagaucaccggcuucgcccccuucagcaaggacaacagcaucagacugagcgccggcggcgacaucugggugaccagagagcccuacgugagcugcaaccccgacaagugcuaccaguucgcccugggccagggcaccacccugaacaacagacacagcaacgacaccgugcacgacagaacccccuacagaacccugcugaugaacgagcugggcgugcccuuccaccugggcaccaagcaggugugcaucgccuggagcagcagcagcugccacgacggcaaggccuggcugcacgugugcgugaccggccacgacgagaacgccaccgccagcuucaucuacgacggcagacugguggacagcaucggcagcuggagcaagaagauccugagaacccaggagagcgagugcgugugcaucaacggcaccugcaccguggugaugaccgacggcagcgccagcggcagagccgacaccaagauccuguucaucgaggagggcaagaucgugcacaucagcccccugagcggcagcgcccagcacguggaggagugcagcugcuaccccagauaccccggcgugagaugcgugugcagagacaacuggaagggcagcaacagacccaucguggacaucaacgugaaggacuacagcaucgugagcagcuacgugugcagcggccuggugggcgacacccccagaaagaacgacagcagcagcagcagccacugccugaaccccaacaacgaggagggcggccacggcgugaagggcugggccuucgacgacggcaacgacguguggaugggcagaaccaucagcgagaagcugagaagcggcuacgagaccuucaaggugaucgagggcuggagcaagcccaacagcaagcugcagaucaacagacaggugaucguggacagaggcaacagaagcggcuacagcggcaucuucagcguggagggcaagagcugcaucaacagaugcuucuacguggagcugaucagaggcagaaagcaggagaccgaggugugguggaccagcaacagcaucgugguguucugcggcaccagcggcaccuacggcaccggcagcuggcccgacggcgccgacaucaaccugaugcccaucuga

SEQ ID NO: 182171 - RNA, 1410 nt, Artificial Sequence
  derived and/or modified CDS sequence (opt4) from neuraminidase__InfluenzaA__AFH00486
augaaccccaaccagaagaucaucaccaucggcagcgugagccugaccaucgccaccaucugcuuccugaugcagaucgccauccuggugaccaccgugacccugcacuucaagcaguacgagugcaacagcccccccaacaaccaggugaugcugugcgagcccaccaucaucgagagaaacaucaccgagaucguguaccugaccaacaccaccaucgagaaggagaucugccccaagcuggccgaguacagaaacuggagcaagccccagugcaagaucaccggcuucgcccccuucagcaaggacaacagcaucagacugagcgccggcggcgacaucugggugaccagagagcccuacgugagcugcgaccccgacaagugcuaccaguucgcccugggccagggcaccacccugaacaacagacacagcaacgacaccgugcacgacagaacccccuacagaacccugcugaugaacgagcugggcgugcccuuccaccugggcaccaagcaggugugcaucgccuggagcagcagcagcugccacgacggcaaggccuggcugcacgugugcgugaccggccacgacgagaacgccaccgccagcuucaucuacgacggcagacugguggacagcaucggcagcuggagcaagaagauccugagaacccaggagagcgagugcgugugcaucaacggcaccugcaccguggugaugaccgacggcagcgccagcggcagagccgacaccaagauccuguucaucgaggagggcaagaucgugcacaucagcccccugcugggcagcgcccagcacguggaggagugcagcugcuaccccagauaccccggcgugagaugcgugugcagagacaacuggaagggcagcaacagacccaucguggacaucaacgugaaggacuacagcaucgugagcagcuacgugugcagcggccuggugggcgacacccccagaaagaacgacagcagcagcagcagccacugccugaaccccaacaacgaggagggcggccacggcgugaagggcugggccuucgacgacggcaacgacguguggaugggcagaaccaucagcgagaagcugagaagcggcuacgagaccuucaaggugaucgagggcuggagcaagcccaacagcaagcugcagaucaacagacaggugaucguggacagaggcaacagaagcggcuacagcggcaucuucagcguggagggcaagagcugcaucaacagaugcuucuacguggagcugaucagaggcagaaagcaggagaccgaggugugguggaccagcaacagcaucgugguguucugcggcaccagcggcaccuacggcaccggcagcuggcccgacggcgccgacaucaaccugaugcccaucuga

SEQ ID NO: 182172 - RNA, 1410 nt, Artificial Sequence
  derived and/or modified CDS sequence (opt4) from neuraminidase__InfluenzaA__AFH00497
augaaccccaaccagaagaucaucaccaucggcagcgugagccugaccaucgccaccaucugcuuccugaugcagaucgccauccuggugaccaccgugacccugcacuucaagcaguacgagugcaacagcccccccaacaaccaggugaugcugugcgagcccaccaucaucgagagaaacaucaccgagaucguguaccugaccaacaccaccaucaagaaggagaucugccccaagcuggccgaguacagaaacuggagcaagccccagugcaagaucaccggcuucgcccccuucagcaaggacaacagcaucagacugagcgccggcggcgacaucugggugaccagagagcccuacgugagcugcgaccccggcaagugcuaccaguucgcccugggccagggcaccacccugaacaacagacacagcaacgacaccgugcacgacagaacccccuacagaacccugcugaugaacgagcugggcgugcccuuccaccugggcaccaagcaggugugcaucgccuggagcagcagcagcugccacgacggcaaggccuggcugcacgugugcgugaccggccacgacgagaacgccaccgccagcuucaucuacgacggcagacugguggacagcaucggcagcuggagcaagaacauccugagaacccaggagagcgagugcgugugcaucaacggcaccugcaccguggugaugaccgacggcagcgccagcgagagagccgacaccaagauccuguucaucgaggagggcaagaucgugcacaucagcccccugagcggcagcgcccagcacguggaggagugcagcugcuaccccagauaccccggcgugagaugcgugugcagagacaacuggaagggcagcaacagacccaucguggacaucaacgugaaggacuacagcaucgugagcagcuacgugugcagcggccuggugggcgacacccccagaaagaacgacagcagcagcagcagcuacugcuggaaccccaacaacgagaagggcggccacggcgugaagggcugggccuucgacgacggcaacgacguguggaugggcagaaccaucagcgaggagcugagaagcggcuacgagaccuucaaggugaucggcggcuggagcaagcccaacagcaagcugcagaucaacagacaggugaucguggacagaggcaacagaagcggcuacagcggcaucuucagcguggagggcaagagcugcaucaacagaugcuucuacguggagcugaucagaggcagaaagcaggagaccgaggugugguggaccagcaacagcaucgugguguucugcggcaccagcggcaccuacggcaccggcagcuggcccgacggcgccgacaucaaccugaugcccaucuga

SEQ ID NO: 182173 - RNA, 1410 nt, Artificial Sequence
  derived and/or modified CDS sequence (opt4) from neuraminidase__InfluenzaA__AFH00508
augaaccccaaccagaagaucaucaccaucggcagcgugagccugaccaucgccaccaucugcuuccugaugcagaucgccauccuggugaucaccgugacccugcacuucaagcaguacgagugcaacagcccccccaacaaccaggugaugcugugcgagcccaccaucaucgagagaaacaucaccgagaucguguaccugaccaacaccaccaucgagaaggagaucugccccaagcuggccgaguacagaaacuggagcaagccccagugcaagaucaccggcuucgcccccuucagcaaggacaacagcaucagacugagcgccggcggcgacaucugggugaccagagagcccuacgugagcugcgaccccggcaagugcuaccaguucgcccugggccagggcaccacccugaacaacagacacagcaacgacaccgugcacgacagaacccccuacagaacccugcugaugaacgagcugggcgugcccuuccaccugggcaccaagcaggugugcaucgccuggagcagcagcagcugccacgacggcaaggccuggcugcacgugugcgugaccggccacaacgagaacgccaccgccagcuucaucuacgacggcagacugguggacagcaucggcagcuggagcaagaacauccugagaacccaggagagcgagugcgugugcaucaacggcaccugcaccguggugaugaccgacggcagcgccagcggcagagccgacaccaagauccuguucaucgaggagggcaagaucgugcacaucagcccccugagcggcagcgcccagcacguggaggagugcagcugcuaccccagauaccccggcgugagaugcgugugcagagacaacuggaagggcagcaacagacccaucguggacaucaacgugaaggacuacagcaucgugagcagcuacgugugcagcggccuggugggcgacacccccagaaagaacgacagcagcagcagcagccacugccugaaccccaacaacgaggagggcggccacggcgugaagggcugggccuucgacgacggcaacgacguguggaugggcagaaccaucagcgagaagcugagaagcggcuacgagaccuucagagugaucggcggcuggagcaagcccaacagcaagcugcagaucaacagacaggugaucguggacagaggcaacagaagcggcuacagcggcaucuucagcguggagggcaagagcugcaucaacagaugcuucuacguggagcugaucagaggcagaaagcaggagaccgaggugugguggaccagcaacagcaucgugguguucugcggcaccagcggcaccuacggcaccggcagcuggcccgacggcgccgacaucaaccugaugcccaucuga

SEQ ID NO: 182174 - RNA, 1410 nt, Artificial Sequence
  derived and/or modified CDS sequence (opt4) from neuraminidase__InfluenzaA__AFH00519
augaaccccaaccagaagaucaucaccaucggcagcgugagccugaccaucgccaccaugugcuuccugaugcagaucgccauccuggugaccaccgugacccugcacuucaagcaguacgagugcaacagcccccccaacaaccaggugaugcugugcgagcccaccaucaucgagagaaacaucaccgagaucguguaccugaccaacaccaccaucgagaaggagaucugccccaagcuggccgaguacagaaacuggagcaagccccagugcaagaucaccggcuucgcccccuucagcaaggacaacagcaucagacugagcgccggcggcgacaucugggugaccagagagcccuacgugagcugcgaccccggcaagugcuaccaguucgcccugggccagggcaccacccugaacaacggccacagcaacgacaccgugcacgacagaacccccuacagaacccugcugaugaacgagcugggcgugcccuuccaccugggcaccaagcaggugugcaucgccuggagcagcagcagcugccacgacggcaaggccuggcugcacgugugcgugaccggccacgacgagaacgccaccgccagcuucaucuacgacggcagacugguggacagcaucggcagcuggagcaagaacauccugagaacccaggagagcgagugcgugugcaucaacggcaccugcaccguggugaugaccgacggcagcgccagcggcagagccgacaccaagauccuguucaucgaggagggcaagaucgugcacaucagcccccugagcggcagcgcccagcacguggaggagugcagcugcuaccccagauaccccggcgugagaugcgugugcagagacaacuggaagggcagcaacagacccaucguggacaucaacgugaaggacuacagcaucgugagcagcuacgugugcagcggccuggugggcgacacccccagaaagaacgacagcagcagcagcagccacugccugaaccccaacaacgaggagggcggccacggcgugaagggcugggccuucgacgacggcaacgacguguggaugggcagaaccaucagcgagaagcugagaagcggcuacgagaccuucaaggugaucggcggcuggagcaagcccaacagcaagcugcagaucaacagacaggugaucguggacagaggcaacagaagcggcuacagcggcaucuucagcguggagggcaagagcugcaucaacagaugcuucuacguggagcugaucagaggcagaaagcaggagaccgaggugugguggaccagcaacagcaucgugguguucugcggcaccagcggcaccuacggcaccggcagcuggcccgacggcgccgacaucaaccugaugcccaucuga

SEQ ID NO: 182175 - RNA, 1410 nt, Artificial Sequence; identical to SEQ ID NO: 174633
  derived and/or modified CDS sequence (opt4) from neuraminidase__InfluenzaA__AFH00530

SEQ ID NO: 182176 - RNA, 1410 nt, Artificial Sequence; identical to SEQ ID NO: 174633
  derived and/or modified CDS sequence (opt4) from neuraminidase__InfluenzaA__AFH00541

SEQ ID NO: 182177 - RNA, 1410 nt, Artificial Sequence
  derived and/or modified CDS sequence (opt4) from neuraminidase__InfluenzaA__AFH00552
augaaccccaaccagaagaucaucaccaucggcagcgugagccugaccaucgccaccaucugcuuccugaugcagaucgccauccuggugaccaccgugacccugcacuucaagcaguacgagugcaacagccugcccaacaaccaggugaugcugugcgagcccaccaucaucgagagaaacaucaccgagaucguguaccugaccaacaccaccaucgagaaggagaucugccccaagcuggccgaguacagaaacuggagcaagccccagugcaagaucaccggcuucgcccccuucagcaaggacaacagcaucagacugagcgccggcggcgacaucugggugaccagagagcccuacgugagcugcgaccccgacaagugcuaccaguucgcccugggccagggcaccacccugaacaacagacacagcaacgacaccgugcacgacagaacccccuacagaacccugcugaugaacgagcugggcgugcccuuccaccugggcaccaagcaggugugcaucgccuggagcagcagcagcugccacgacggcaaggccuggcugcacgugugcgugaccggccacgacgagaacgccaccgccagcuucaucuacgacggcagacugguggacagcaucggcagcuggagcaagaagauccugagaacccaggagagcgagugcgugugcaucaacggcaccugcaccguggugaugaccgacggcagcgccagcggcagagccgacaccaagauccuguucaucgaggagggcaagaucauccacaucagccagcugagcggcagcacccagcacguggaggagugcagcugcuaccccagauaccccggcgugagaugcgugugcagagacaacuggaagggcagcaacagacccaucguggacaucaacgugaaggacuacagcaucgugagcagcuacgugugcagcggccuggugggcgacacccccagaaagaacgacagcagcagcagcagccacugccugaaccccaacaacgaggagggcggccacggcgugaagggcugggccuucgacgacggcaacgacguguggaugggcagaaccaucagcgagaaguucagaagcggcuacgagaccuucaaggugaucgagggcuggagcaagcccaacagcaagcugcagaucaacagacaggugaucguggacagagacaacagaagcggcuacagcggcaucuucagcguggagggcaagagcugcaucaacagaugcuucuacguggagcugaucagaggcagaaagcaggagaccgaggugugguggaccagcaacagcaucgugguguucugcggcaccagcggcaccuacggcaccggcagcuggcccgacggcgccgacaucaaccugaugcccaucuga

SEQ ID NO: 182178 - RNA, 1410 nt, Artificial Sequence
  derived and/or modified CDS sequence (opt4) from neuraminidase__InfluenzaA__AFH00563
augaaccccaaccagaagaucaucaccaucggcagcgugagccugaccaucgccaccaucugcuuccugaugcagaucgccauccuggugaccaccgugacccugcacuucaagcaguacgagugcaacagcccccccaacaaccaggugaugcugugcgagcccaccaucaucgagagaaacaucaccgagaucguguaccugaccaacaccaccaucgagaaggagaucugccccaagcuggccgaguacagaaacuggagcaagccccagugcaacaucaccggcuucgcccccuucagcaaggacaacagcaucagacugagcgccggcggcgacaucugggugaccagagagcccuacgugagcugcgaccccgacaagugcuaccaguucgcccugggccagggcaccacccugaacaacggccacagcaacgacaccgugcacgagagaacccccuacagaacccugcugaugaacgagcugggcgugcccuuccaccugggcaccaagcaggugugcaucgccuggagcagcagcagcugccacgacggcaaggccuggcugcacgugugcgugaccggcgacgacgagaacgccaccgccagcuucaucuacaacggcagacugguggacagcaucggcagcuggagcaagaagauccugagaacccaggagagcgagugcgugugcaucaacggcaccugcaccguggugaugaccgacggcagcgccagcggcaaggccgacaccaagauccuguucaucgaggagggcaagaucgugcacaccagcccccugagcggcagcgcccagcacguggaggagugcagcugcuaccccagauaccccggcgugagaugcgugugcagagacaacuggaagggcagcaacagacccaucguggacaucaacgugaaggacuacagcaucgugagcagcuacgugugcagcggccuggugggcgacacccccagaaagaacgacagcagcagcagcagccacugccuggaccccaacaacgaggagggcggccacggcgugaagggcugggccuucgacgacggcaacgacguguggaugggcagaaccaucagcgagaagcugagaagcggcuacgagaccuucaaggugaucgagggcuggagcaagcccaacagcaagcugcagaucaacagacaggugaucguggacagaggcaacagaagcggcuacagcggcaucuucagcguggagggcaagagcugcaucaacagaugcuucuacguggagcugaucagaggcagaaagcaggagaccgaggugcuguggaccagcaacagcaucgugguguucugcggcaccagcggcaccuacggcaccggcagcuggcccgacggcgccgacaucaaccugaugcccaucuga

SEQ ID NO: 182179 - RNA, 1410 nt, Artificial Sequence
  derived and/or modified CDS sequence (opt4) from neuraminidase__InfluenzaA__AFH00574
augaaccccaaccagaagaucaucaccaucggcagcgugagccugaccaucgccaccaucugcuuccugaugcagaucgccauccuggugaccaccgugacccugcacuucaagcaguacgagugcaacagcccccccaacaaccaggugaugcugugcgagcccaagaucaucgagagaaacaucaccgagaucguguaccugaacaacaccaccaucgagaaggagaucugccccaagcuggccgaguacagaaacuggagcaagccccagugcaacaucaccggcuucgcccccuucagcaaggacaacagcaucagacugagcgccggcggcgacaucugggugaccagagagcccuacgugagcugcgaccccgacaagugcuaccaguucgcccugggccagggcaccacccugaacaacggccacagcaacgacaccgugcacgacagaacccccuacagaacccugcugaugaacgagcugggcgugcccuuccaccugggcaccaagcaggugugcaucgccuggagcagcagcagcugccacgacggcaaggccuggcugcacgugugcgugaccggcgacgacgagaacgccaccgccagcuucaucuacaacggcagacugguggacagcaucggcagcuggagcaagaagauccugagaacccaggagagcgagugcgugugcaucaacggcaccugcaccguggugaugaccgacggcagcgccagcggcaaggccgacaccaagauccuguucaucgaggagggcaagaucgugcacaccagccugcugagcggcagcgcccagcacguggaggagugcagcugcuaccccagauaccccggcgugagaugcgugugcagagacaacuggaagggcagcaacagacccaucguggacaucaacgugaaggacuacagcaucgugagcagcuacgugugcagcggccuggugggcgacacccccagaaagaacgacagcagcagcagcagccacugccuggaccccaacaacgaggagggcggccacggcgugaagggcugggccuucgacgacggcaacgacguguggaugggcagaaccaucagcgagaagcugagaagcggcuacgagaccuucaaggugaucgagggcuggagcaagcccaacagcaagcugcagaucaacagacaggugaucguggacagaggcaacagaagcggcuacagcggcaucuucagcguggagggcaagagcugcaucaacagaugcuucuacguggagcugaucagaggcagaaagcaggagaccgaggugcuguggaccagcaacagcaucgugguguucugcggcaccagcggcaccuacggcaccggcagcuggcccgacggcgccgacaucaaccugaugcccaucuga

SEQ ID NO: 182180 - RNA, 1410 nt, Artificial Sequence
  derived and/or modified CDS sequence (opt4) from neuraminidase__InfluenzaA__AFH00585
augaaccccaaccagaagaucaucaccaucggcagcgugagccugaccaucgccaccaucugcuuccugaugcagaucgccauccuggugaccaccgugacccugcacuucaagcaguacgagugcaacagcccccccaacaaccaggugaugcugugcgagcccaccaucaucgagagaaacaucaccgagaucguguaccugaccaacaccaccaucaagaaggagaucugccccaagcuggccgaguacagaaacuggagcaagccccagugcaacaucaccggcuucgcccccuucagcaaggacaacagcaucagacugagcgccggcggcgacaucugggugaccagagagcccuacgugagcugcgaccccgacaagugcuaccaguucgcccugggccagggcaccacccugaacaacagacacagcaacgacaaggugcacgacagaacccccuacagaacccugcugaugaacgagcugggcgugcccuuccaccugggcaccaagcaggugugcaucgccuggagcagcagcagcugccacgacggcaaggccuggcugcacgugugcgugaccggcgacgacgagaacgccaccgccagcuucaucuacaacggcagacugguggacagcaucggcagcuggagcaagaagauccugagaacccaggagagcgagugcgugugcaucaacggcaccugcaccguggugaugaccgacggcagcgccagcggcaaggccgacaccaagauccuguucaucaaggagggcaagaucgugcacaccagcagccugagcggcagcgcccagcacguggaggagugcagcugcuaccccagauaccccggcgugagaugcgugugcagagacaacuggaagggcagcaacagacccaucguggacaucaacgugaaggacuacagcaucgugagcagcuacgugugcagcggccuggugggcgacacccccagaaagaacgacagcagcagcagcagccacugccuggaccccaacaacgaggagggcggccacggcgugaagggcugggccuucgacgacggcaacgacguguggaugggcagaaccaucagcgagaagcugagaagcggcuacgagaccuucaaggugaucgagggcuggagcaaggccaacagcaagcugcagaucaacagacaggugaucguggacagaggcaacagaagcggcuacagcggcaucuucagcguggagagcaagagcugcaucaacagaugcuucuacguggagcugaucagaggcagaaagcaggagaccgaggugcuguggaccagcaacagcaucgugguguucugcggcaccagcggcaccuacggcaccggcagcuggcccgacggcgccgacaucaaccugaugcccaucuga

SEQ ID NO: 182181 - RNA, 1410 nt, Artificial Sequence; identical to SEQ ID NO: 174768
  derived and/or modified CDS sequence (opt4) from neuraminidase__InfluenzaA__AFH00596

SEQ ID NO: 182182 - RNA, 1410 nt, Artificial Sequence
  derived and/or modified CDS sequence (opt4) from neuraminidase__InfluenzaA__AFH00607
augaaccccaaccagaagaucaucaccaucggcuucguguucuucaccaucgccaccaucugcuuccugaugcagaucgccauccuggugaccaccgugacccugcacuucaagcaguacgagugcaaccccccccccaacaaccaggugaugcugugcgagcccaccaucaucgagagaaacaucaccgagaucguguaccugaccaacaccaccaucgagaaggagaucugccccaagcuggccgaguacagaaacuggagcaagccccagugcaacaucaccggcuucgcccccuucagcaaggacaacagcaucagacugagcgccggcggcgacaucugggugaccagagagcccuacgugagcugcgaccccgacaagugcuaccaguucgcccugggccagggcaccacccugaacaacggccacagcaacgacaccgugcacgacagaacccccuacagaacccugcugaugaacgagcugggcgugcccuuccaccugggcaccagacaggugugcaucgccuggagcagcagcagcugccacgacggcaaggccuggcugcacgugugcgugaccggcgacgacgagaacgccaccgccagcuucaucuacaacggcagacugguggacagcaucggcagcuggagcaagaagauccugagaacccaggagagcgagugcgugugcaucaacggcaccugcaccguggugaugaccgacggcagcgccagcggcaaggccgacaccaagauccuguucaucgaggagggcaagaucgugcacaucagcacccugagcggcagcgcccagcacguggaggagugcagcugcuaccccagauaccccggcgugagaugcgugugcagagacaacuggaagggcagcaacagacccaucguggacaucaacgugaaggacuacagcaucgugagcagcuacgugugcagcggccuggugggcgacacccccagaaagaacgacagcuucagcagcagccacugccuggaccccaacaacgaggagggcggccacggcgugaagggcugggccuucgacgacggcaacgacguguggaugggcagaaccaucagcgagaagcugagaagcggcuacgagaccuucaaggugaucgagggcuggagcaagcccaacagcaagcugcagaccaacagacaggugaucguggagagaggcaacagaagcggcuacagcggcaucuucagcguggagggcaagagcugcaucaacagaugcuucuacguggagcugaucagaggcagaaaggaggagaccgaggugugguggaccagcaacagcaucgugguguucugcggcaccagcggcaccuacggcaccggcagcuggcccgacggcgccgacaucaaccugaugcccaucuga

SEQ ID NO: 182183 - RNA, 1410 nt, Artificial Sequence; identical to SEQ ID NO: 175989
  derived and/or modified CDS sequence (opt4) from neuraminidase__InfluenzaA__AFH00618

SEQ ID NO: 182184 - RNA, 1410 nt, Artificial Sequence
  derived and/or modified CDS sequence (opt4) from neuraminidase__InfluenzaA__AFH00629
augaaccccaaccagaagaucaucaccaucggcagcgugagccugaccaucgccaccaucugcuuccugaugcagaucaccauccuggugaccaccgugacccugcacuucaagcaguacgagugcaacagcccccccaacaaccaggugaugcugugcgagcccaccaucaucgagagaaacaucaccgagaucguguaccugaccaacaccaccaucgagaagggcaucugccccaagcuggccgaguacagaaacuggagcaagccccagugcaacaucaccggcuucgcccccuucagcaaggacaacagcaucagacugagcgccggcggcgacaucugggugaccagagagcccuacgugagcugcgaccccgacaagugcuaccaguucgcccugggccagggcaccacccugaacaacggccacagcaacgacaccgugcacgacagaacccccuacagaacccugcugaugaacgagcugggcgugcccuuccaccugggcaccagacaggugugcaucgccuggagcagcagcagcugccacgacggcaaggccuggcugcacgugugcgugaccggcgacgacaagaacgccaccgccagcuucaucuacaacggcagacugguggacagcaucggcagcuggagcaagaagauccugagaacccaggagagcgagugcgugugcaucaacggcaccugcaccguggugaugaccgacggcagcgccagcggcaaggccgacaccaagauccuguucaucgaggagggcaagaucauccacaucagcacccugcugggcagcgcccagcacguggaggagugcagcugcuaccccagauaccccggcgugagaugcgugugcagagacaacuggaagggcagcaacagacccaucguggacaucaacgugaaggacuacagcaucgugagcagcuacgugugcagcggccuggugggcgacacccccagaaagaacgacagcagcagcagcagccacugccuggaccccaacaacgaggagggcggccacggcgugaagggcugggccuucgacgacggcaacgacguguggaugggcagaaccaucagcgagaagcugagaagcggcuacgagaccuucaaggugaucgagggcuggagcaagcccaacagcaagcugcagaucaacagacaggugaucguggagagaggcaacagaagcggcuacagcggcaucuucagcguggagggcaagagcugcaucaacagaugcuucuacguggagcugaucagaggcagaaaggaggagaccgaggugugguggaccagcaacagcaucgugguguucugcggcaccagcggcaccuacggcaccggcagcuggcccgacggcgccgacaucaaccugaugcccaucuga

SEQ ID NO: 182185 - RNA, 1410 nt, Artificial Sequence; identical to SEQ ID NO: 174387
  derived and/or modified CDS sequence (opt4) from neuraminidase__InfluenzaA__AFH00640

SEQ ID NO: 182186 - RNA, 1410 nt, Artificial Sequence; identical to SEQ ID NO: 176516
  derived and/or modified CDS sequence (opt4) from neuraminidase__InfluenzaA__AFH00651

SEQ ID NO: 182187 - RNA, 1410 nt, Artificial Sequence; identical to SEQ ID NO: 174387
  derived and/or modified CDS sequence (opt4) from neuraminidase__InfluenzaA__AFH00662

SEQ ID NO: 182188 - RNA, 1410 nt, Artificial Sequence
  derived and/or modified CDS sequence (opt4) from neuraminidase__InfluenzaA__AFH00673
augaaccccaaccagaagaucaucaccaucggcagcgugagccugaccaucagcaccaucugcuucuucaugcagaucgccauccugaucaccaccgugacccugcacuucaagcaguacgaguucagcagcccccccaacaaccaggugaugcugugcgagcccaccaucaucgagagaaacaucaccgagaucguguaccugaccaacaccaccaucgagaaggagaccugccccaagcuggccgaguacagaaacuggagcaagccccagugcgacaucaccggcuucgcccccuucagcaaggacaacagcaucagacugagcgccggcggcgacaucugggugaccagagagcccuacgugagcugcgaccccgacaagugcuaccaguucgcccugggccagggcaccacccugaacaacgugcacagcaacgacaccgugcacgacagaacccccuacagaacccugcugaugaacgagcugggcgugcccuuccaccugggcaccaagcaggugugcaucgccuggagcagcagcagcugccacgacggcaaggccuggcugcacgugugcgugaccggcgacgacaagaacgccaccgccagcuucaucuacaacggcagacugguggacagcaucgugagcuggagcaaggagauccugagaacccaggagagcgagugcgugugcaucaacggcaccugcaccguggugaugaccgacggcagcgccagcggcaaggccgacaccaagauccuguucaucgaggagggcaagaucgugcacaccagcacccugagcggcagcgcccagcacguggaggagugcagcugcuaccccagauaccccggcgugagaugcgugugcagagacaacuggaagggcagcaacagacccaucguggacaucaacaucaaggacuacagcaucgugagcagauacgugugcagcggccuggugggcgacacccccagaaagaacgacagcagcagcagcagccacugccuggaccccaacaacgaggagggcggccacggcgugaagggcugggccuucgacgacggcaacgacguguggaugggcagaaccaucagcgugaagagcagaagcggcuacgagaccuucaaggugaucgagggcuggagcaaccccaacagcaagcugcagaucaacagacaggugaucguggacagaggcaacagaagcggcuacagcggcaucuucagcguggagggcaagagcugcaucaacagaugcuucuacguggagcugaucagaggcagaaaggaggagaccgaggugcuguggaccagcaacagcaucgugguguucugcggcaccagcggcaccuacggcaccggcagcuggcccgacggcgccgacaucaaccugaugcccaucuga

SEQ ID NO: 182189 - RNA, 1410 nt, Artificial Sequence
  derived and/or modified CDS sequence (opt4) from neuraminidase__InfluenzaA__AFH00684
augaaccccaaccagaagaucaucaccaucggcagcgugagccugaccaucagcaccaucugcuucuucaugcagaucgccauccugaucaccaccgugacccugcacuucaagcaguacgaguucaacagcccccccaacaaccaggugaugcugugcgagcccaccaucaucgagagaaacaucaccgagaucguguaccugaccaacaccaccaucgagaaggagaucugccccaagcuggccgaguacagaaacuggagcaagccccagugcgacaucaccggcuucgcccccuucagcaaggacaacagcaucagacugagcgccggcggcgacaucugggugaccagagagcccuacgugagcugcgaccccgacaagugcuaccaguucgcccugggccagggcaccacccugaacaacgugcacagcaacaacaccgugagagagagaacccccuacagaacccugcugaugaacgagcugggcgugcccuuccaccugggcaccaagcaggugugcaucgccuggagcagcagcagcugccacgacggcaaggccuggcugcacgugugcaucaccggcgacgacaagaacgccaccgccagcuucaucuacaacggcagacugguggacagcaucgugagcuggagcaaggagauccugagaacccaggagagcgagugcgugugcaucaacggcaccugcaccguggugaugaccgacggcagcgccagcggcaaggccgacaccaagauccuguucaucgaggagggcaagaucgugcacaccagcacccugagcggcagcgcccagcacguggaggagugcagcugcuaccccagauaccccggcgugagaugcgugugcagagacaacuggaagggcagcaacagacccaucguggacaucaacaucaaggaccacagcaucgugagcagcuacgugugcagcggccuggugggcgacacccccagaaagaacgacagcagcagcagcagccacugccuggaccccaacaacgaggagggcggccacggcgugaagggcugggccuucgacgacggcaacgacguguggaugggcagaaccaucagcgagaagagcagacugggcuacgagaccuucaaggugaucgagggcuggagcaaccccaagagcaagcugcagaucaacagacaggugaucguggacagaggcaacagaagcggcuacagcggcaucuucagcguggagggcaagagcugcaucaacagaugcuucuacguggagcugaucagaggcagaaaggaggagaccgaggugcuguggaccagcaacagcaucgugguguucugcggcaccagcggcaccuacggcaccggcagcuggcccgacggcgccgacaucaaccugaugcccaucuga

SEQ ID NO: 182190 - RNA, 1410 nt, Artificial Sequence
  derived and/or modified CDS sequence (opt4) from neuraminidase__InfluenzaA__AFH00695
augaaccccaaccagaagaucaucaccaucggcagcgugagccugaccaucagcaccaucugcuucuucaugcagaucgccauccugaucaccaccgugacccugcacuucaagcaguacgaguucaacagcccccccaacaaccaggugaugcugugcgagcccaccaucaucgagagaaacaucaccgagaucguguaccugaccaacaccaccaucgagaaggagaucugccccaagcuggccgaguacagaaacuggagcaagccccagugcgacaucaccggcuucgcccccuucagcaaggacaacagcaucagacugagcgccggcggcgacaucugggugaccagagagcccuacgugagcugcgaccccgacaagugcuaccaguucgcccugggccagggcaccacccugaacaacgugcacagcaacgacaccgugagagagagaacccccuacagaacccugcugaugaacgagcugggcgugcccuuccaccugggcaccaagcaggugugcaucgccuggagcagcagcagcugccacgacggcaaggccuggcugcacgugugcaucaccggcgacgacaagaacgccaccgccagcuucaucuacaacggcagacugguggacagcaucgugagcuggagcaaggagauccugagaacccaggagagcgagugcgugugcaucaacggcaccugcaccguggugaugaccgacggcagcgccagcggcaaggccgacaccaagauccuguucaucgaggagggcaagaucgugcacaccagcacccugagcggcagcgcccagcacguggaggagugcagcugcuaccccagauaccccggcgugagaugcgugugcagagacaacuggaagggcagcaacagacccaucguggacaucaacaucaaggaccacagcaucgugagcagcuacgugugcagcggccuggugggcgacacccccagaaagaacgacagcagcagcagcagccacugccuggaccccaacaacgaggagggcggccacggcgugaagggcugggccuucgacgacggcaacgacguguggaugggcagaaccaucagcgagaagagcagacugggcuacgagaccuucaaggugaucgagggcuggagcaaccccaagagcaagcugcagaucaacagacaggugaucguggacagaggcaacagaagcggcuacagcggcaucuucagcguggagggcaagagcugcaucaacagaugcuucuacguggagcugaucagaggcagaaaggaggagaccgaggugcuguggaccagcaacagcaucgugguguucugcggcaccagcggcaccuacggcaccggcagcuggcccgacggcgccgacaucaaccugaugcccaucuga

SEQ ID NO: 182191 - RNA, 1410 nt, Artificial Sequence
  derived and/or modified CDS sequence (opt4) from neuraminidase__InfluenzaA__AFH00706
augaaccccaaccagaagaucaucaccaucggcagcgugagccugaccaucagcaccaucugcuucuucaugcagaucgccauccugaucaccaccgugacccugcacuucaagcaguacgaguucaacagcccccccaacaaccaggugaugcugugcgagcccaccaucaucgagagaaacaucaccgagaucguguaccugaccaacaccaccaucgagaaggagaucugccccaagcuggccgaguacagaaacuggagcaagccccagugcgacaucaccggcuucgcccccuucagcaaggacaacagcaucagacugagcgccggcggcgacaucugggugaccagagagcccuacgugagcugcgaccccaacaagugcuaccaguucgcccugggccagggcaccacccugaacaacgugcacagcaacaacaccgugagagacagaacccccuacagaacccugcugaugaacgagcugggcgugcccuuccaccugggcaccaagcaggugugcaucgccuggagcagcagcagcugccacgacggcaaggccuggcugcacgugugcaucaccggcgacgacaagaacgccaccgccagcuucaucuacaacggcagacugguggacagcguggugagcuggagcaaggagauccugagaacccaggagagcgagugcgugugcaucaacggcaccugcaccguggugaugaccgacggcagcgccagcggcaaggccgacaccaagauccuguucaucgaggagggcaagaucgugcacaccagcacccugagcggcagcgcccagcacguggaggagugcagcugcuaccccagauaccccggcgugagaugcgugugcagagacaacuggaagggcagcaacagacccaucguggacaucaacaugaaggaccacagcaucgugagcagcuacgugugcagcggccuggugggcgacacccccagaaagaacgacagcagcagcagcagccacugcuucgaccccaacaacgaggagggcggccacggcgugaagggcugggccuucgacgacggcaacgacguguggaugggcagaaccaucagcgagaagagcagacugggcuacgagaccuucaaggugaucgagggcuggagcaaccccaagagcaagcugcagaucaacagacaggugaucguggacagaggcgacagaagcggcuacagcggcaucuucagcguggagggcaagagcugcaucaacagaugcuucuacguggagcugaucagaggcagcaaggaggagaccgaggugcuguggaccagcaacagcaucgugguguucugcggcaccagcggcaccuacggcaccggcagcuggcccgacggcgccgacaucaaccugaugcccaucuga

SEQ ID NO: 182192 - RNA, 1410 nt, Artificial Sequence
  derived and/or modified CDS sequence (opt4) from neuraminidase__InfluenzaA__AFH00728
augaaccccaaccagaagaucaucaccaucggcagcgugagccugaccaucgccaccaucugcuuccugaugcagaucgccauccuggugaccaccgugacccugcacuucaagcaguacgagugcagcagcccccccaacaaccaggugaugcccugcgagcccaucaucaucgagagaaacaucaccgagaucguguaccugaccaacaccaccaucgagaaggagaucugccccaagcugguggaguacagaaacuggagcaagccccagugcaagaucaccggcuucgcccccuucagcaaggacaacagcaucagacugagcgccggcggcgacaucugggugaccagagagcccuacgugagcugcgaccccggcaagugcuaccaguucgcccugggccagggcaccacccugaacaacaagcacagcaacgacaccauccacgacagaacccccuacagaacccugcugaugaacgagcugggcgugcccuuccaccugggcaccagacaggugugcaucgccuggagcagcagcagcugccacgacggcaaggccuggcugcacgugugcgugaccggccacgacaagaacgccaccgccagcuucaucuacaacggcagacugguggacagcaucggcagcuggagcaagaacauccugagaacccaggagagcgagugcgugugcaucaacggcaccugcaccguggugaugaccgacggcagcgccagcgagagagccgacaccaagauccuguucaucgaggagggcaagaucgugcacaucagcccccugagcggcagcgcccagcacguggaggagugcagcugcuaccccagauaccccggcgugagaugcgugugcagagacaacuggaagggcagcaacagacccaucguggacaucaacgugaaggacuacagcaucgugagcagcuacgugugcagcggccuggugggcgacacccccagaaagaacgacagaagcagcagcagcuacugcagaaaccccaacaacgagaagggcaaccacggcgugaagggcugggccuucgacgacggcaacgacguguggaugggcagaaccaucggcgaggagcugagaagcggcuacgagaccuucaaggugaucggcggcuggagcacccccaacagcaagcugcagaucaacagacaggugaucguggacagcgacaacagaagcggcuacagcggcaucuucagcguggagggcaagagcugcaucaacagaugcuucuacguggagcugaucagaggcagagagcaggagaccagagugcuguggaccagcaacagcaucgugguguucugcggcaccagcggcaccuacggcaccggcagcuggcccgacggcgccgacaucaaccugaugcccaucuga

SEQ ID NO: 182193 - RNA, 1410 nt, Artificial Sequence
  derived and/or modified CDS sequence (opt4) from neuraminidase__InfluenzaA__AFH00739
augaaccccaaccagaagaucaucaccaucggcagcgugagccugaccaucgccaccaucugcuuccugaugcagaucgccauccuggugaccaccgugacccugcacuucaagcaguacgagugcagcagcccccccaacaaccaggugaugcccugcgagcccaccaucaucgagagaaacaucaccgagaucguguaccugaccaacaccaccaucgagaaggagaucugccccaagcugguggaguacagaaacuggagcaagccccagugcaagaucaccggcuucgcccccuucagcaaggacaacagcaucagacugagcgccggcggcgacaucugggugaccagagagcccuacgugagcugcgaccccggcaagugcuaccaguucgcccugggccagggcaccacccugaacaacagacacagcaacgacaccgugcacgacagaacccccuacagaacccugcugaugaacgagcugggcgugcccuuccaccugggcaccaagcaggugugcaucgccuggagcagcagcagcugccacgacggcaaggccuggcugcacgugugcgugaccggccacgacaagaacgccaccgccagcuucaucuacgacggcagacugguggacagcaucggcagcuggagcaagaacauccugagaacccaggagagcgagugcgugugcaucaacggcaccugcaccguggugaugaccgacggcagcgccagcgagagagccgacaccaagauccuguucaucgaggagggcaagaucgugcacaucagcccccugagcggcagcgcccagcacguggaggagugcagcugcuaccccagauaccccggcgugagaugcgugugcagagacaacuggaagggcagcaacagacccaucguggacaucaacgugaaggacuacagcaucgugagcagcuacgugugcagcggccuggugggcgacacccccagaaagaacgacagaagcagcagcagcuacugcagaaaccccaacaacgagaagggcagccacggcgugaagggcugggccuucgacgacggcaacgacguguggaugggcagaaccaucggcgaggagcugagaagcggcuacgagaccuucaaggugaucggcggcuggagcacccccaacagcaagcugcagaucaacagacaggugaucguggacagcggcaacagaagcggcuacagcggcaucuucagcguggagggcaagagcugcaucaacagaugcuucuacguggagcugaucagaggcagaggccaggagaccagagugugguggaccagcaacagcaucgugguguucugcggcaccagcggcaccuacggcaccggcagcuggcccgacggcgccgacaucaaccugaugcccaucuga

SEQ ID NO: 182194 - RNA, 1410 nt, Artificial Sequence
  derived and/or modified CDS sequence (opt4) from neuraminidase__InfluenzaA__AFH00750
augaaccccaaccagaagaucaucaccaucggcagcgugagccugaccaucgccaccaucugcuuccugaugcagaucgccauccuggugaccaccgugacccugcacuucaagcaguacgagugcagcagcccccccaacaaccaggugaugcccugcgagcccaccaucaucgagagaaacaucaccgagaucguguaccugaccaacaccaccaucgagaaggagaucugccccaagcugguggaguacagaaacuggagcaagccccagugcaagaucaccggcuucgcccccuucagcaaggacaacagcaucagacugagcgccggcggcgacaucugggugaccagagagcccuacgugagcugcgaccccggcaagugcuaccaguucgcccugggccagggcaccacccugaacaacagacacagcaacgacaccgugcacgacagaacccccuacagaacccugcugaugaacgagcugggcgugcccuuccaccugggcaccaagcaggugugcaucgccuggagcagcagcagcugccacgacggcaaggccuggcugcacgugugcgugaccggccacgacaagaacgccaccgccagcuucaucuacgacggcagacugguggacagcaucggcagcuggagcaagaacauccugagaacccaggagagcgagugcgugugcaucaacggcaccugcaccguggugaugaccgacggcagcgccagcgagagagccuacaccaagauccuguucaucaaggagggcaagaucgugcacaucagcccccugagcggcagcgcccagcacguggaggagugcagcugcuaccccagauaccccggcgugagaugcgugugcagagacaacuggaagggcagcaacagacccaucguggacaucaacgugaaggacuacagcaucgugagcagcuacgugugcagcggccuggugggcgacacccccagaaagaacgacagaagcagcagcagcuacugcagaaaccccaacaacgagaagggcagccacggcgugaagggcugggccuucgacgacggcaacgacguguggaugggcagaaccaucggcgaggagcugagaagcggcuacgagaccuucaaggugaucggcggcuggagcacccccaacagcaagcugcagaucaacagacaggugaucguggagagcggcaacagaagcggcuacagcggcaucuucagcguggagggcaagagcugcaucaacagaugcuucuacguggagcugaucagaggcagagagcaggagaccagagugugguggaccagcaacagcaucgugguguucugcggcaccagcggcaccuacggcaccggcagcuggcccgacggcgccgacaucaaccugaugcccaucuga

SEQ ID NO: 182195 - RNA, 1410 nt, Artificial Sequence
  derived and/or modified CDS sequence (opt4) from neuraminidase__InfluenzaA__AFH00761
augaaccccaaccagaagaucaucaccaucggcagcgugagccugaccaucgccaccaucugcuuccugaugcagaucgccauccuggugaccaccgugacccugcacuucaagcaguacgagugcaacagcccccccaacaaccaggugaugcccugcgagcccaccaucaucgagagaaacaucaccgagaucguguaccugaccaacaccaccaucgagaaggagaucugccccaagcugguggaguacagaaacuggagcaagccccagugcaagaucaccggcuucgcccccuucagcaaggacaacagcaucagacugagcgccggcggcgacaucugggugaccagagagcccuacgugagcugcgaccccggcaagugcuaccaguucgcccugggccagggcaccacccugaacaacagacacagcaacgacaccgugcacgacagaacccccuacagaacccugcugaugaacgagcugggcgugcccuuccaccugggcaccaagcaggugugcaucgccuggagcagcagcagcugccacgacggcaaggccuggcugcacgugugcgugaccggccacgacgagaacgccaccgccagcuucaucuacgacggcagacugguggacagcaucggcagcuggagcaagaacauccugagaacccaggagagcgagugcgugugcaucaacggcaccugcaccguggugaugaccgacggcagcgccagcgagagagccgacaccaagauccuguucaucgaggagggcaagaucgugcacaucagcccccugagcggcagcgcccagcacguggaggagugcagcugcuaccccagauaccccggcgugagaugcgugugcagagacaacuggaagggcagcaacagacccaucguggacaucaacgugaaggacuacagcaucgugagcagcuacgugugcagcggccuggugggcgacacccccagaaagaacgacagcagcagcagcagcuacugcagaaaccccaacaacgagaagggcagccacggcgugaagggcugggccuucgacgacggcgacgacguguggaugggcagaaccaucggcgaggagcugagaagcggcuacgagaccuucaaggugaucggcggcuggagcacccccaacagcaagcugcagaucaacagacaggugaucguggacagaggcaacagaagcggcuacagcggcaucuucagcguggagggcaagagcugcaucaacagaugcuucuacguggagcugaucagaggcagaaagcaggagaccaaggugugguggaccagcaacagcaucgugguguucugcggcaccagcggcaccuacggcaccggcagcuggcccgacggcgccgacaucaaccugaugcccaucuga

SEQ ID NO: 182196 - RNA, 1410 nt, Artificial Sequence
  derived and/or modified CDS sequence (opt4) from neuraminidase__InfluenzaA__AFH00783
augaaccccaaccagaagaucaucaccaucggcagcgugagccugaccaucgccaccaucugcuuccugaugcagaucgccauccuggugaccaccgugacccugcacuucaagcaguacgagugcaacagcccccccaacaaccaggugaugcugugcgagcccaccaucaucgagagaaacaucaccgagaucguguaccugaccaacaccaccaucgagaaggagaucugccccaagcuggccgaguacagaaacuggagcaagccccagugcaagaucaccggcuucgcccccuucagcaaggacaacagcaucagacugagcgccggcggcgacaucugggugaccagagagcccuacgugagcugcgaccccgacaagugcuaccaguucgcccugggcagaggcaccacccugaacaacagacacagcaacgacaccgugcacgacagaacccccuacagaacccugcugaugaacgagcugggcgugcccuuccaccugggcaccaagcaggugugcaucgccuggagcagcagcagcugccacgacggcaaggccuggcugcacgugugcgugaccggccacgacgagaacgccaccgccagcuucaucuacgacggcagacugguggacagcaucggcagcuggagcaagaagauccugagaacccaggagagcgagugcgugugcaucaacggcaccugcaccguggugaugaccgacggcagcgccagcggcagagccgacaccaagauccuguucaucgaggagggcaagaucgugcacaucagcccccugagcggcagcgcccagcacguggaggagugcagcugcuaccccagauacagcggcgugagaugcgugugcagagacaacuggaagggcagcaacagacccaucguggacaucaacgugaaggacuacagcaucgugagcagcuacgugugcagcggccuggugggcgacacccccagaaagaacgacagcagcagcagcagccacugccugaaccccaacaacgaggagggcggccacggcgugaagggcugggccuucgacgacggcaacgacguguggaugggcagaaccaucagcgagaaguucagaagcggcuacgagaccuucaaggugaucggcggcuggagcaagcccaacagcaagcugcagaucaacagacaggugaucguggacagaggcaacagaagcggcuacagcggcaucuucagcguggagggcaagagcugcaucaacagaugcuucuacguggagcugaucagaggcagaaagcaggagaccgaggugugguggaccagcaacagcaucgugguguucugcggcaccagcggcaccuacggcaccggcagcuggcccgacggcgccgacaucaaccugaugcccaucuga

SEQ ID NO: 182197 - RNA, 1410 nt, Artificial Sequence
  derived and/or modified CDS sequence (opt4) from neuraminidase__InfluenzaA__AFH00794
augaaccccaaccagaagaucaucaccaucggcagcgugagccugaccaucgccaccaucugcuuccugaugcagaucgccauccuggugaccaccgugacccugcacuucaagcaguacgagugcaacagcccccccaacaaccaggugaugcugugcgagcccaccaucaucgagagaaacaucaccgagaucguguaccugaccaacaccaccaucgagaaggagaucugccccaagcuggccgaguacagaaacuggagcaagccccagugcaagaucaccggcuucgcccccuucagcaaggacaacagcaucagacuggccgccggcggcgacaucugggugaccagagagcccuacgugagcugcgaccccgacaagugcuaccaguucgcccugggccagggcaccacccugaacaacagacacagcaacgacaccgugcacgacagaacccccuacagaacccugcugaugaacgagcugggcgugcccuuccaccugggcaccaagcaggugugcaucgccuggagcagcagcagcugccacgacggcaaggccuggcugcacgugugcgugaccggccacgacgagaacgccaccgccagcuucaucuacgacggcagacugguggacagcaucggcagcuggagcaagaagauccugagaacccaggagagcgagugcgugugcaucaacggcaccugcaccguggugaugaccgacggcagcgccagcgagagagccgacaccaagauccuguucaucgaggagggcaagaucgugcacaucagccagcugagcggcagcgcccagcacguggaggagugcagcugcuaccccagauaccccggcgugagaugcgugugcagagacaacuggaagggcagcaacagacccaucguggacaucaacgugaaggacuacagcaucgugagcagcuacgugugcagcggccuggugggcgacacccccagaaagaacgacagcagcagcagcagccacugccugaaccccaacaacgaggagggcggccacggcgugaagggcugggccuucgacgacggcgacgacguguggaugggcagaaccaucagcgagaagcugagaagcggcuacgagaccuucaaggugaucgagggcuggagcaagcccaacagcaagcugcagaccaacagacaggugaucguggacagaggcaacagaagcggcuacagcggcaucuucagcguggagggcaagagcugcaucaacagaugcuucuacguggagcugaucagaggcagaaagcaggagaccgaggugugguggaccagcaacagcaucgugguguucugcggcaccagcggcaccuacggcaccggcagcuggcccgacggcgccgacaucaaccugaugcccaucuga

SEQ ID NO: 182198 - RNA, 1410 nt, Artificial Sequence; identical to SEQ ID NO: 175548
  derived and/or modified CDS sequence (opt4) from neuraminidase__InfluenzaA__AFH00805

SEQ ID NO: 182199 - RNA, 1410 nt, Artificial Sequence; identical to SEQ ID NO: 179578
  derived and/or modified CDS sequence (opt4) from neuraminidase__InfluenzaA__AFH00816

SEQ ID NO: 182200 - RNA, 1410 nt, Artificial Sequence
  derived and/or modified CDS sequence (opt4) from neuraminidase__InfluenzaA__AFH00827
augaaccccaaccagaagaucaucaccaucggcagcgugagccugaccaucagcaccaccugcuucuucaugcagaucgccauccugaucaccaccgugacccugcacuucaagcaguacgaguucaacagcccccccaacaaccaggugaugcugugcgagcccaccaucaucgagagaaacaugaccgagaucguguaccugaccaacaccaccaucgagaaggagaucugccccaagcccgccgaguacagaaacuggagcaagccccagugcgacaucaccggcuucgcccccuucagcaaggacaacagcaucagacugagcgccggcggcgacaucugggugaccagagagcccuacgugagcugcgaccccgacaagugcuaccaguucgcccugggccagggcaccacccugaacaacgugcacagcaacaacaccgugagagacagaacccccuacagaacccugcugaugaacgagcugggcgugcccuuccaccugggcaccaagcaggugugcaucgccuggagcagcagcagcugccacgacggcaaggccuggcugcacgugugcaucaccggcgacgacaagaacgccaccgccagcuucaucuacaacggcagacugguggacagcguggugagcuggagcaaggagauccugagaacccaggagagcgagugcgugugcaucaacggcaccugcaccguggugaugaccgacggcagcgccagcggcaaggccgacaccaagauccuguucaucgaggagggcaagaucgugcacaccagcacccugagcggcagcgcccagcacguggaggagugcagcugcuaccccagauaccccggcgugagaugcgugugcagagacaacuggaagggcagcaacagacccaucguggacaucaacaucaaggaccacagcaucgugagcagcuacgugugcagcggccuggugggcgacacccccagaaagaacgacagcagcagcagcagccacugccuggaccccaacaacgaggagggcggccacggcgugaagggcugggccuucgacgacggcaacgacguguggaugggcagaaccaucaacgagaccagcagacugggcuacgagaccuucaaggugaucgagggcuggagcaaccccaagagcaagcugcagaucaacagacaggugaucguggacagaggcgacagaagcggcuacagcggcaucuucagcguggagggcaagagcugcaucaacagaugcuucuacguggagcugaucagaggcagaaaggaggagaccgaggugcuguggaccagcaacagcaucgugguguucugcggcaccagcggcaccuacggcaccggcagcuggcccgacggcgccgaccugaaccugaugccccuguga

SEQ ID NO: 182201 - RNA, 1410 nt, Artificial Sequence; identical to SEQ ID NO: 175989
  derived and/or modified CDS sequence (opt4) from neuraminidase__InfluenzaA__AFH01410

SEQ ID NO: 182202 - RNA, 1410 nt, Artificial Sequence
  derived and/or modified CDS sequence (opt4) from neuraminidase__InfluenzaA__AFH34942
augaaccccaaccagaagaucaucaccaucggcagcgugagccugaccaucagcaccaucugcuucuucaugcagaucgccauccugaucaccaccgugacccugcacuucaagcaguacgaguucaacagcccccccaacaaccaggugaugcugugcgagcccaagaucaucgagagaaacaucaccgagaucguguaccugaccaacaccaccaucgagaaggagaucugccccaagcccgccgaguacagaaacuggagcaagccccagugcgacaucaccggcuucgcccccuucagcaaggacaacagcaucagacugagcgccggcggcgacaucugggugaccagagagcccuacgugagcugcgaccccgacaagugcuaccaguucgcccugggccagggcaccacccugaacaacgugcacagcaacaacaccgugagaaacagaacccccuacagaacccugcugaugaacgagcugggcgugcccuuccaccugggcaccaagcaggugugcaucgccuggagcagcagcagcugccacgacggcaaggccuggcugcacgugugcaucaccggcgacgacaagaacgccaccgccagcuucaucuacaacggcaagcugguggacagcguggugagcuggagcaaggagauccugagaacccaggagagcgagugcgugugcaucaacggcaccugcaccguggugaugaccgacggcagcgccagcggcaaggccgacaccaagauccuguucaucgaggagggcaagaucgugcacaccagcacccugagcggcagcgcccagcacguggaggagugcagcugcuaccccagauaccccggcgugagaugcgugugcagagacaacuggaagggcagcaacagacccaucguggacaucaacaucaaggaccacagcaucgugagcagcuacgugugcagcggccuggugggcgacacccccagaaagaacgacagcagcagcagcagccacugccuggaccccaacaacgaggagggcggccacggcgugaagggcugggccuucgacgacggcaacgacguguggaugggcagaaccaucaacgagaccagcagacugggcuacgagaccuucaaggugaucgagggcuggagcaaccccaagagcaagcugcagaucaacagacaggugaucguggacagaggcgacagaagcggcuacagcggcaucuucagcguggagggcaagagcugcaucaacagaugcuucuacguggagcugaucagaggcagaaaggaggagaccgaggugcuguggaccagcaacagcaucgugguguucugcggcaccagcggcaccuacggcaccggcagcuggcccgacggcgccgaccugaaccugaugcccaucuga

SEQ ID NO: 182203 - RNA, 1410 nt, Artificial Sequence
  derived and/or modified CDS sequence (opt4) from neuraminidase__InfluenzaA__AFH34956
augaaccccaaccagaagaucaucaccaucggcagcgugagccugaccaucagcaccaucugcuucuucaugcagaucgccauccugaucaccaccgugacccugcacuucaagcaguacgaguucaacagcccccccaacaaccaggugaugcugugcgagcccaccaucaucgagagaaacaucaccgagaucguguaccugaccaacaccaccaucgagaaggagaucugccccaagcccgccgaguacagaaacuggagcaagccccagugcgacaucaccggcuucgcccccuucagcaaggacaacagcaucagacugagcgccggcggcgacaucugggugaccagagagcccuacgugagcugcgaccccgacaagugcuaccaguucgcccugggccagggcaccacccugaacaacgugcacagcaacaacaccgugagaggcagaacccccuacagaacccugcugaugaacgagcugggcgugcccuuccaccugggcaccaagcaggugugcaucgccuggagcagcagcagcugccacgacggcaaggccuggcugcacgugugcaucaccggcgacgacaagaacgccaccgccagcuucaucuacaacggcagacugguggacagcguggugagcuggagcaaggagauccugagaacccaggagagcgagugcgugugcaucaacggcaccugcaccguggugaugaccgacggcagcgccagcggcaaggccgacaccaagauccuguucaucgaggagggcaagaucgugcacaccagcacccugagcggcagcgcccagcacguggaggagugcagcugcuaccccagauaccccggcgugagaugcgugugcagagacaacuggaagggcagcaacagacccaucguggacaucaacaucaaggaccacagcaucgugagcagcuacgugugcagcggccuggugggcgacacccccagaaagaacgacagcagcagcagcagccacugccuggaccccaacaacgaggagggcggccacggcgugaagggcugggccuucgacgacggcaacgacguguggaugggcagaaccaucaacgagaccagcagacugggcuacgagaccuucaaggugaucgagggcuggagcaaccccaagagcaagcugcagaucaacagacaggugaucguggacagaggcgacagaagcggcuacagcggcaucuucagcguggagggcaagagcugcaucaacagaugcuucuacguggagcugaucagaggcagaaaggaggagaacgaggugcuguggaccagcaacagcaucgugguguucugcggcaccagcggcaccuacggcaccggcagcuggcccgacggcgccgaccugaaccugaugcccaucuga

SEQ ID NO: 182204 - RNA, 1410 nt, Artificial Sequence
  derived and/or modified CDS sequence (opt4) from neuraminidase__InfluenzaA__AFH34963
augaaccccaaccagaagaucaucaccaucggcagcgugagccugaccaucagcaccaucugcuucuucaugcagaucgccauccugaucaccaccgugacccugcacuucaagcaguacgaguucaacagcccccccaacaaccaggugaugcugugcgagcccaccaucaucgagagaaacaucaccgagaucguguaccugaccaacaccaccaucgagaaggagaucugccccaagcccgccgaguacagaaacuggagcaagccccagugcgacaucaccggcuucgcccccuucagcaaggacaacagcaucagacugagcgccggcggcgacaucugggugaccagagagcccuacgugagcugcgaccccgacaagugcuaccaguucgcccugggccagggcaccacccugaacaacgugcacagcaacaacaucgugagagacagaacccccuacagaacccugcugaugaacgagcugggcgugcccuuccaccugggcaccaagcaggugugcaucgccuggagcagcagcagcugccacgacggcaaggccuggcugcacgugugcaucaccggcgacgacaagaacgccaccgccagcuucaucuacaacggcagacugguggacagcguggugagcuggagcaaggagauccugagaacccaggagagcgagugcgugugcaucaacggcaccugcaccguggugaugaccgacggcagcgccagcggcaaggccgacaccaagauccuguucaucgaggagggcaagaucgugcacaccagcacccugagcggcagcgcccagcacguggaggagugcagcugcuaccccagauaccccggcgugagaugcgugugcagagacaacuggaagggcagcaacagacccaucguggacaucaacaucaaggaccacagcaucgugagcagcuacgugugcagcggccuggugggcgacacccccagaaagaacgacagcagcagcagcagccacugccuggaccccaacaacgaggagggcggccacggcgugaagggcugggccuucgacgacggcaacgacguguggaugggcagaaccaucaacgagaccagcagacugggcuacgagaccuucaaggugaucgagggcuggagcaaccccaagagcaagcugcagaucaacagacaggugaucguggacagaggcgacagaagcggcuacagcggcaucuucagcguggagggcaagagcugcaucaacagaugcuucuacguggagcugaucagaggcagaaaggaggagaacgaggugcuguggaccagcaacagcaucgugguguucugcggcaccagcggcaccuacggcaccggcagcuggcccgacggcgccgaccugaaccugaugcccaucuga

SEQ ID NO: 182205 - RNA, 1410 nt, Artificial Sequence
  derived and/or modified CDS sequence (opt4) from neuraminidase__InfluenzaA__AFH34970
augaaccccaaccagaagaucaucaccaucggcagcgugagccugaccaucagcaccaucugcuucuucaugcagaucgccauccugaucaccaccgugacccugcacuucaagcaguacgaguucaacagcccccccaacaaccaggugaugcuguacgagcccaccaucaucgagagaaacaucaccgagaucguguaccugaccaacaccaccaucgagaaggagaucugccccaagcccgccgaguacagaaacuggagcaagccccagugcgacaucaccggcuucgcccccuucagcaaggacaacagcaucagacugagcgccggcggcgacaucugggugaccagagagcccuacgugagcugcgaccccgacaagugcuaccaguucgcccugggccagggcaccacccugaacaacgugcacagcaacaacaccgugagagacagaacccccuacagaacccugcugaugaacgagcugggcgugcccuuccaccugggcaccaagcaggugugcaucgccuggagcagcagcagcugccacgacggcaaggccuggcugcacgugugcaucaccggcgacgacaagaacgccaccgccagcuucaucuacaacggcagacugguggacagcguggugagcuggagcaaggagauccugagaacccaggagagcgagugcgugugcaucaacggcaccugcaccguggugaugaccgacggcagcgccagcggcaaggccgacaccaagauccuguucaucgaggagggcaagaucgugcacaccagcacccugagcggcagcgcccagcacguggaggagugcagcugcuaccccagauaccccggcgugagaugcgugugcagagacaacuggaagggcagcaacagacccaucguggacaucaacaucaaggaccacagcaucgugagcagcuacgugugcagcggccuggugggcgacacccccagaaagaacgacagcagcagcagcagccacugccuggaccccaacaacgaggagggcggccacggcgugaagggcugggccuucgacgacggcaacgacguguggaugggcagaaccaucaacgagaccagcagacugggcuacgagaccuucaaggugaucgagggcuggagcaaccccaagagcaagcugcagaucaacagacaggugaucguggacagaggcgacagaagcggcuacagcggcaucuucagcguggagggcaagagcugcaucaacagaugcuucuacguggagcugaucagaggcagaaaggaggagaacgaggugcuguggaccagcaacagcaucgugguguucugcggcaccagcggcaccuacggcaccggcagcuggcccgacggcgccgaccugaaccugaugcccaucuga

SEQ ID NO: 182206 - RNA, 1410 nt, Artificial Sequence
  derived and/or modified CDS sequence (opt4) from neuraminidase__InfluenzaA__AFH34977
augaaccccaaccagaagaucaucaccaucggcagcgugagccugaccaucagcaccaucugcuucuucaugcagaucgccauccugaucaccaccgugacccugcacuucaagcaguacgaguucaacagcccccccaacaaccaggugaugcugugcgagcccaccaucaucgagagaaacaucaccgagaucguguaccugaccaacaccaccaucgagaaggagaucugccccaagcccgccgaguacagaaacuggagcaagccccagugcggcaucaccggcuucgcccccuucagcaaggacaacagcaucagacugagcgccggcggcgacaucugggugaccagagagcccuacgugagcugcgaccccgacaagugcuaccaguucgcccugggccagggcaccacccugaacaacgugcacagcaacaacaccgugagagacagaacccccuacagaacccugcugaugaacgagcugggcgugcccuuccaccugggcaccaagcaggugugcaucgccuggagcagcagcagcugccacgacggcaaggccuggcugcacgugugcaucaccggcgacgacaagaacgccaccgccagcuucaucuacaacggcagacugguggacagcguggugagcuggagcaaggagauccugagaacccaggagagcgagugcgugugcaucaacggcaccugcaccguggugaugaccgacggcagcgccagcggcaaggccgacaccaagauccuguucaucgaggagggcaagaucgugcacaccagcacccugagcggcagcgcccagcacguggaggagugcagcugcuaccccagauaccccggcgugagaugcgugugcagagacaacuggaagggcagcaacagacccaucguggacaucaacaucaaggaccacagcaucgugagcagcuacgugugcagcggccuggugggcgacacccccagaaagaacgacagcagcagcagcagccacugccuggaccccaacaacgaggagggcggccacggcgugaagggcugggccuucgacgacggcaacgacguguggaugggcagaaccaucaacgagaccagcagacugggcuacgagaccuucaaggugaucgagggcuggagcaaccccaagagcaagcugcagaucaacagacaggugaucguggacagaggcgacagaagcggcuacagcggcaucuucagcguggagggcaagagcugcaucaacagaugcuucuacguggagcugaucagaggcagaaaggaggagaccgaggugcuguggaccagcaacagcaucgugguguucugcggcaccagcggcaccuacggcaccggcagcuggcccgacggcgccgaccugaaccugaugcccaucuga

SEQ ID NO: 182207 - RNA, 1410 nt, Artificial Sequence
  derived and/or modified CDS sequence (opt4) from neuraminidase__InfluenzaA__AFH74468
augaaccccaaccagaagaucaucaccaucggcagcgugagccugaccaucagcaccaucugcuucuucaugcagaccgccauccugaucaccaccgugacccugcacuucaagcagugcgaguucaacagcccccccaacaaccaggugaugcugugcgagcccaccaucaucgagagaaacaucaccgagaucguguaccugaccaacaccaccaucgagaaggagaucugccccaagcuggccgaguacagaaacuggagcaagccccagugcgacaucaccggcuucgcccccuucagcaaggacaacagcaucagacugagcgccggcggcgacaucugggugaccagagagcccuacgugagcugcgaccccgacaagugcuaccaguucgcccugggccagggcaccacccugaacaacgugcacagcaacaacaccgugagagacagaacccccuacagaacccugcugaugaacgagcugggcgugcccuuccaccugggcaccaagcaggugugcaucgccuggagcagcagcagcugccacgacggcaaggccuggcugcacgugugcaucaccggcgacgacaagaacgccaccgccagcuucaucuacaacggcagacugguggacagcguggugagcuggagcaaggagauccugagaacccaggagagcgagugcgugugcaucaacggcaccugcaccguggugaugaccgacggcagcgccagcggcaaggccgacaccaagauccuguucaucgaggagggcagaaucgugcacaccagcacccugagcggcagcgcccagcacguggaggagugcagcugcuaccccagauaccccggcgugagaugcgugugcagagacaacuggaagggcagcaacagacccaucguggacaucaacaucaaggaccacagcaucgugagcagcuacgugugcagcggccuggugggcgacacccccagaaagaacgacagcagcagcagcagccacugccuggaccccaacaacgaggagggcgacaacggcgugaagggcugggccuucgacgacggcaacgacguguggaugggcagaaccaucagcgagaagagcagacugggcuacgagaccuucaaggugaucgagggcuggagcaaccccaagagcaagcugcagaucaacagacaggugaucguggacagaggcaacagaagcggcuacagcggcaucuucagcguggagggcaagagcugcaucaacagaugcuucuacguggagcugaucagaggcagaaaggaggagaccgaggugcuguggaccagcaacagcaucgugguguucugcggcaccagcggcaccuacggcaccggcagcuggcccgacggcgccgacaucaaccugaugcccaucuga

SEQ ID NO: 182208 - RNA, 1410 nt, Artificial Sequence; identical to SEQ ID NO: 178711
  derived and/or modified CDS sequence (opt4) from neuraminidase__InfluenzaA__AFH74469

SEQ ID NO: 182209 - RNA, 1410 nt, Artificial Sequence; identical to SEQ ID NO: 176659
  derived and/or modified CDS sequence (opt4) from neuraminidase__InfluenzaA__AFH74480

SEQ ID NO: 182210 - RNA, 1410 nt, Artificial Sequence; identical to SEQ ID NO: 176659
  derived and/or modified CDS sequence (opt4) from neuraminidase__InfluenzaA__AFH74491

SEQ ID NO: 182211 - RNA, 1410 nt, Artificial Sequence; identical to SEQ ID NO: 181702
  derived and/or modified CDS sequence (opt4) from neuraminidase__InfluenzaA__AFH74502

SEQ ID NO: 182212 - RNA, 1410 nt, Artificial Sequence
  derived and/or modified CDS sequence (opt4) from neuraminidase__InfluenzaA__AFH74513
augaaccccaaccagaagaucaucaccaucggcagcgugagccugaccaucagcaccaucugcuucuucaugcagaucgccauccugaucaccaccgugacccugcacuucaagcaguacgaguucaacagcccccccaacaaccaggugaugcugugcgagcccaccaucaucgagagaaacaucaccgagaucguguaccugaccaacaccaccaucgagaaggagaccugccccaagcuggccgaguacagaaacuggagcaagccccagugcgacaucaccggcuucgcccccuucagcaaggacaacagcaucagacugagcgccggcggcgacaucugggugaccagagagcccuacgugagcugcgaccccgacaagugcuaccaguucgcccugggccagggcaccacccugaacaacgugcacagcaacaacaccgugagagacagaacccccuacagaacccugcugaugaacgagcugggcgugcccuuccaccugggcaccaagcaggugugcaucgccuggagcagcagcagcugccacgacggcaaggccuggcugcacgugugcaucaccggcgacgacaagaacgccaccgccagcuucaucuacaacggcagacugguggacagcguggugagcuggagcaaggagauccugagaacccaggagagcgagugcgugugcaucaacggcaccugcaccguggugaugaccgacggcagcgccagcggcaaggccgacaccaagauccuguucaucgaggagggcaagaucgugcacaccagcacccugagcggcagcgcccagcacguggaggagugcagcugcuaccccagauaccccggcgugagaugcgugugcagagacaacuggaagggcagcaacagacccaucguggacaucaacaucaaggaccacagcaucgugagcagcuacgugugcagcggccuggugggcgacacccccagaaagaacgacagcagcagcagcagccacugccuggaccccaacaacgaggagggcggccacggcgugaagggcugggccuucgacgacggcaacgacguguggaugggcagaaccaucagcgagaagagcagacugggcuacgagaccuucaaggugaucgagggcuggagcaaccccaagagcaagcugcagaucaacagacaggugaucguggacagaggcaacagaagcggcuacagcggcaucuucagcguggagggcaagagcugcaucaacagaugcuucuacguggagcugaucagaggcagaaaggaggagaccgaggugcuguggaccagcaacagcaucgugguguucugcggcaccagcggcaccuacggcaccggcagcuggcccgacggcgccgacaucaaccugaugcccguguga

SEQ ID NO: 182213 - RNA, 1410 nt, Artificial Sequence
  derived and/or modified CDS sequence (opt4) from neuraminidase__InfluenzaA__AFH74524
augaaccccaaccagaagaucaucaccaucggcagcgugagccugaccaucagcaccaucugcuucuucaugcagaucgccauccugaucaccaccgugacccugcacuucaagcaguacgaguucaacagcccccccaacaaccaggugaugcugugcgagcccaccaucaucgagagaaacaucaccgagaucguguaccugaccaacaccaccaucgagaaggagaucugccccaagcuggccgaguacagaaacuggagcaagccccagugcgacaucaccggcuucgcccccuucagcaaggacaacagcaucagacugagcgccggcggcgacaucugggugaccagagagcccuacgugagcugcgaccccgacaagugcuaccaguucgcccugggccagggcaccaccaucaacaacgugcacagcaacaacaccgugagagacagaacccccuacagaacccugcugaugaacgagcugggcgugcccuuccaccugggcaccaagcaggugugcaucgccuggagcagcagcagcugccacgacggcaaggccuggcugcacgugugcaucaccggcgacgacaagaacgccaccgccagcuucaucuacaacggcagacugguggacagcguggugagcuggagcaaggagauccugagaacccaggagagcgagugcgugugcaucaacggcaccugcaccguggugaugaccgacggcagcgccagcggcaaggccgacaccaagauccuguucaucgaggagggcaagaucgugcacaccagcacccugagcggcagcgcccagcacguggaggagugcagcugcuaccccagauaccccggcgugagaugcgugugcagagacaacuggaagggcagcaacagacccaucguggacaucaacaugaaggaccacagcaucgugagcagcuacgugugcagcggccuggugggcgacacccccagaaagaacgacagcagcagcagcagccacugccuggaccccaacaacgaggagggcggccacggcgugaagggcugggccuucgacgacggcaacgacguguggaugggcagaaccaucagcgagaagagcagacugggcuacgagaccuucaaggugaucgagggcuggagcaaccccaagagcaagcugcagaucaacagacaggugaucguggacagaggcaacagaagcggcuacagcggcaucuucagcguggagggcaagagcugcaucaacagaugcuucuacguggagcugaucagaggcagaaaggaggagaccgaggugcuguggaccagcaacagcguggugguguucugcggcaccagcggcaccuacggcaccggcagcuggcccgacggcgccgacaucaaccugaugcccaucuga

SEQ ID NO: 182214 - RNA, 1410 nt, Artificial Sequence; identical to SEQ ID NO: 176659
  derived and/or modified CDS sequence (opt4) from neuraminidase__InfluenzaA__AFH74535

SEQ ID NO: 182215 - RNA, 1410 nt, Artificial Sequence; identical to SEQ ID NO: 181695
  derived and/or modified CDS sequence (opt4) from neuraminidase__InfluenzaA__AFH74546

SEQ ID NO: 182216 - RNA, 1410 nt, Artificial Sequence; identical to SEQ ID NO: 181695
  derived and/or modified CDS sequence (opt4) from neuraminidase__InfluenzaA__AFH74557

SEQ ID NO: 182217 - RNA, 1410 nt, Artificial Sequence; identical to SEQ ID NO: 181695
  derived and/or modified CDS sequence (opt4) from neuraminidase__InfluenzaA__AFH74568

SEQ ID NO: 182218 - RNA, 1410 nt, Artificial Sequence; identical to SEQ ID NO: 181698
  derived and/or modified CDS sequence (opt4) from neuraminidase__InfluenzaA__AFH74579

SEQ ID NO: 182219 - RNA, 1410 nt, Artificial Sequence
  derived and/or modified CDS sequence (opt4) from neuraminidase__InfluenzaA__AFH74590
augaaccccaaccagaagaucaucaccaucggcagcgugagccugaccaucagcaccaucugcuucuucaugcagaucgccauccugaucaccaccgugacccugcacuucaagcaguacgaguucaacagcccccccaacaaccaggugaugcugugcgagcccaccaucaucgagagaaacaucaccgagaucguguaccugaccaacaccaccaucgagaaggagaucugccccaagcuggccgaguacagaaacuggagcaagccccagugcgacaucaccggcuucgcccccuucagcaaggacaacagcaucagacugagcgccggcggcgacaucugggugaccagagagcccuacgugagcugcgaccccgacaagugcuaccaguucgcccugggccagggcaccacccugaacaacgugcacagcaacaacaccgugagagacagaacccccuacagaacccugcugaugaacgagcugggcgugcccuuccaccugggcaccaagcaggugugcaucgccuggagcagcagcagcugccacgacggcaaggccuggcugcacgugugcaucaccggcgacgacaagaacgccaccgccagcuucaucuacaacggcagacugguggacagcguggugagcuggagcaaggagauccugagaacccaggagagcgagugcgugugcaucaacggcaccugcaccguggugaugaccgacggcagcgccagcggcaaggccgacaccaagauccuguucaucgaggagggcaagaucgugcacaccagcacccugagcggcagcgcccagcacguggaggagugcagcugcuaccccagauaccccggcgugagaugcgugugcagagacaacuggaagggcagcaacagacccaucguggacaucaacaucaaggaccacagcaucgugagcagcuacgugugcagcggccuggugggcgacacccccagaaagaacgacagcagcagcagcagccacugccuggaccccaacaacgaggagggcggccacggcgugaagggcugggccuucgacgacggcaacgacguguggaugggcagaaccaucagcgagaagagcagacugggcuacgagaccuucaaggugaucgagggcuggagcaaccccaagagcaagcugcagaucaacagacaggugaucguggacagaggcaacagaagcggcuacagcggcaucuucagcguggagggcaagagcugcaucaacagaugcuucuacguggagcugaucagaggcagaaaggaggagaccgaggugcuguggaccagcaacagcaucgugguguucugcggcaccagcggcaccuacggcaccggcagcuggcccgacggcgccgacaucaaccugaugagcguguga

SEQ ID NO: 182220 - RNA, 1410 nt, Artificial Sequence; identical to SEQ ID NO: 181695
  derived and/or modified CDS sequence (opt4) from neuraminidase__InfluenzaA__AFH74601

SEQ ID NO: 182221 - RNA, 1410 nt, Artificial Sequence
  derived and/or modified CDS sequence (opt4) from neuraminidase__InfluenzaA__AFH74612
augaaccccaaccagaagaucaucaccaucggcagcgugagccugaccaucagcaccaucugcuucuucaugcagaccgccauccugaucaccaccgugacccugcacuucaagcagugcgaguucaacagcccccccaacaaccaggugaugcugugcgagcccaccaucaucgagagaaacaucaccgagaucguguaccugaccaacaccaccaucgagaaggagaucugccccaagcuggccgaguacagaaacuggagcaagccccagugcgacaucaccggcuucgcccccuucagcaaggacaacagcaucagacugagcgccggcggcgacaucugggugaccagagagcccuacgugagcugcgaccccgacaagugcuaccaguucgcccugggccagggcaccacccugagcaacgugcacagcaacaacaccgugagagacagaacccccuacagaacccugcugaugaacgagcugggcgugcccuuccaccugggcaccaagcaggugugcaucgccuggagcagcagcagcugccacgacggcaaggccuggcugcacgugugcaucaccggcgacgacaagaacgccaccgccagcuucaucuacaacggcagacugguggacagcguggugagcuggagcaaggagauccugagaacccaggagagcgagugcgugugcaucaacggcaccugcaccguggugaugaccgacggcagcgccagcggcaaggccgacaccaagauccuguucaucgaggagggcaagaucgugcacaccagcacccugagcggcagcgcccagcacguggaggagugcagcugcuaccccagauaccccggcgugagaugcgugugcagagacaacuggaagggcagcaacagacccaucguggacaucaacaucaaggaccacagcaucgugagcagcuacgugugcagcggccuggugggcgacacccccagaaagaacgacagcagcagcagcagccacugccuggaccccaacaacgaggagggcggccacggcgugaagggcugggccuucgacgacggcaacgacguguggaugggcagaaccaucagcgagaagagcagacugggcuacgagaccuucaaggugaucgagggcuggagcaaccccaagagcaagcugcagaucaacagacaggugaucguggacagaggcaacagaagcggcuacagcggcaucuucagcguggagggcaagagcugcaucaacagaugcuucuacguggagcugaucagaggcagaaaggaggagaccgaggugcuguggaccagcaacagcaucgugguguucugcggcaccagcggcaccuacggcaccggcagcuggcccgacggcgccgacaucaaccugaugcccaucuga

SEQ ID NO: 182222 - RNA, 1410 nt, Artificial Sequence; identical to SEQ ID NO: 181695
  derived and/or modified CDS sequence (opt4) from neuraminidase__InfluenzaA__AFH74623

SEQ ID NO: 182223 - RNA, 1410 nt, Artificial Sequence; identical to SEQ ID NO: 181695
  derived and/or modified CDS sequence (opt4) from neuraminidase__InfluenzaA__AFH74634

SEQ ID NO: 182224 - RNA, 1410 nt, Artificial Sequence; identical to SEQ ID NO: 181702
  derived and/or modified CDS sequence (opt4) from neuraminidase__InfluenzaA__AFH74645

SEQ ID NO: 182225 - RNA, 1410 nt, Artificial Sequence; identical to SEQ ID NO: 181702
  derived and/or modified CDS sequence (opt4) from neuraminidase__InfluenzaA__AFH74656

SEQ ID NO: 182226 - RNA, 1410 nt, Artificial Sequence; identical to SEQ ID NO: 181702
  derived and/or modified CDS sequence (opt4) from neuraminidase__InfluenzaA__AFH74667

SEQ ID NO: 182227 - RNA, 1410 nt, Artificial Sequence; identical to SEQ ID NO: 181702
  derived and/or modified CDS sequence (opt4) from neuraminidase__InfluenzaA__AFH74678

SEQ ID NO: 182228 - RNA, 1410 nt, Artificial Sequence; identical to SEQ ID NO: 176659
  derived and/or modified CDS sequence (opt4) from neuraminidase__InfluenzaA__AFH74689

SEQ ID NO: 182229 - RNA, 1410 nt, Artificial Sequence; identical to SEQ ID NO: 176659
  derived and/or modified CDS sequence (opt4) from neuraminidase__InfluenzaA__AFH74700

SEQ ID NO: 182230 - RNA, 1410 nt, Artificial Sequence
  derived and/or modified CDS sequence (opt4) from neuraminidase__InfluenzaA__AFH74711
augaaccccaaccagaagaucaucaccaucggcagcgugagccugaccaucagcaccaucugcuucuucaugcagaucgccauccugaucaccaccgugacccugcacuucaagcaguacgaguucaacagcccccccaacaaccaggugaugcugugcgagcccaccaucaucgagagaaacaucaccgagaucguguaccugaccaacaccaccaucgagaaggagaucugccccaagcuggccgaguacagaaacuggagcaagccccagugcgacaucaccggcuucgcccccuucagcaaggacaacagcaucagacugagcgccggcggcgacaucugggugaccagagagcccuacgugagcugcgaccccgacaagugcuaccaguucgcccugggccagggcaccacccugaacaacgugcacagcaacaacaccgugagagacagaacccccuacagaacccugcugaugaacgagcugggcgugcccuuccaccugggcaccaagcaggugugcaucgccuggagcagcagcagcugccacgacggcaaggccuggcugcacgugugcaucaccggcgacgacaagaacgccaccgccagcuucaucuacaacggcagacugguggacagcguggugagcuggagcaaggagauccugagaacccaggagagcgagugcgugugcaucaacggcaccugcaccguggugaugaccgacggcagcgccagcggcaaggccgacaccaagauccuguucaucgaggagggcaagaucgugcacaccagcacccugagcggcagcgcccagcacguggaggagugcagcugcuaccccagauaccccugcgugagaugcgugugcagagacaacuggaagggcagcaacagacccaucguggacaucaacaucaaggaccacagcaucgugagcagcuacgugugcagcggccuggugggcgacacccccagaaagaacgacagcagcagcagcagccacugccuggaccccaacaacgaggagggcggccacggcgugaagggcugggccuucgacgacggcaacgacguguggaugggcagaaccaucagcgagaagagcagacugggcuacgagaccuucaaggugaucgagggcuggagcaaccccaagagcaagcugcagaucaacagacaggugaucguggacagaggcaacagaagcggcuacagcggcaucuucagcguggagggcaagagcugcaucaacagaugcuucuacguggagcugaucagaggcagaaaggaggagaccgaggugcuguggaccagcaacagcaucgugguguucugcggcaccagcggcaccuacggcaccggcagcuggcccgacggcgccgacaucaaccugaugcccguguga

SEQ ID NO: 182231 - RNA, 1410 nt, Artificial Sequence; identical to SEQ ID NO: 181695
  derived and/or modified CDS sequence (opt4) from neuraminidase__InfluenzaA__AFH74722

SEQ ID NO: 182232 - RNA, 1410 nt, Artificial Sequence; identical to SEQ ID NO: 181695
  derived and/or modified CDS sequence (opt4) from neuraminidase__InfluenzaA__AFH74733

SEQ ID NO: 182233 - RNA, 1410 nt, Artificial Sequence
  derived and/or modified CDS sequence (opt4) from neuraminidase__InfluenzaA__AFH74744
augaaccccaaccagaagaucaucaccaucggcagcgugagccugaccaucagcaccaucugcuucuucaugcagaucgccauccugaucaccaccgugacccugcacuucaagcaguacgaguucaacagcccccccaacaaccaggugaugcugugcgagcccaccaucaucgagagaaacaucaccgagaucguguaccugaccaacaccaccaucgagaaggagaucugccccaagcuggccgaguacagaaacuggagcaagccccagugcgacaucaccggcuucgcccccuucagcaaggacaacagcaucagacugagcgccggcggcgacaucugggugaccagagagcccuacgugagcugcgaccccgacaagugcuaccaguucgcccugggccagggcaccacccugaacaacgugcacagcaacaacaccgugagagacagaacccccuacagaacccugcugaugaacgagcugggcgugcccuuccaccugggcaccaagcaggugugcaucgccuggagcagcagcagcugccacgacggcaaggccuggcugcacgugugcaucaccggcgacgacaagaacgccaccgccagcuucaucuacaacggcagacugguggacagcguggugagcuggagcaaggagauccugagaacccaggagagcgagugcgugugcaucaacggcaccugcaccguggugaugaccgacggcagcgccagcggcaaggccgacaccaagauccuguucaucgaggagggcaagaucgugcacaccagcacccugagcggcagcgcccagcacguggaggagugcagcugcuaccccagauaccccggcgugagaugcgugugcagagacaacuggaagggcagcaacagacccaucguggacaucaacaucaaggaccacagcaucgugagcaacuacgugugcagcggccuggugggcgacacccccagaaagaacgacagcagcagcagcagccacugccuggaccccaacaacgaggagggcggccacggcgugaagggcugggccuucgacgacggcaacgacguguggaugggcagaaccaucagcgagaagagcagacugggcuacgagaccuucaaggugaucgagggcuggagcaaccccaagagcaagcugcagaucaacagacaggugaucguggacagaggcaacagaagcggcuacagcggcaucuucagcguggagggcaagagcugcaucaacagaugcuucuacguggagcugaucagaggcagaaaggaggagaccgaggugcuguggaccagcaacagcaucgugguguucugcggcaccagcggcaccuacggcaccggcagcuggcccgacggcgccgacaucaaccugaugcccguguga

SEQ ID NO: 182234 - RNA, 1410 nt, Artificial Sequence; identical to SEQ ID NO: 181695
  derived and/or modified CDS sequence (opt4) from neuraminidase__InfluenzaA__AFH74755

SEQ ID NO: 182235 - RNA, 1410 nt, Artificial Sequence; identical to SEQ ID NO: 181695
  derived and/or modified CDS sequence (opt4) from neuraminidase__InfluenzaA__AFH74766

SEQ ID NO: 182236 - RNA, 1410 nt, Artificial Sequence; identical to SEQ ID NO: 181695
  derived and/or modified CDS sequence (opt4) from neuraminidase__InfluenzaA__AFH74777

SEQ ID NO: 182237 - RNA, 1410 nt, Artificial Sequence; identical to SEQ ID NO: 176659
  derived and/or modified CDS sequence (opt4) from neuraminidase__InfluenzaA__AFH74788

SEQ ID NO: 182238 - RNA, 1410 nt, Artificial Sequence
  derived and/or modified CDS sequence (opt4) from neuraminidase__InfluenzaA__AFH74799
augaaccccaaccagaagaucaucaccaucggcagcgugagccugaccaucagcaccaucugcuucuucaugcagaucgccauccugaucaccaccgugacccugcacuucaagcaguacgaguucaacagcccccccaacaaccaggugaugcugugcgagcccaccaucaucgagagaaacaucaccgagaucguguaccugaccaacaccaccaucgagaaggagaucugccccaagcuggccgaguacagaaacuggagcaagccccagugcgacaucaccggcuucgcccccuucagcaaggacaacagcaucagacugagcgccggcggcgacaucugggugaccagagagcccuacgugagcugcggccccgacaagugcuaccaguucgcccugggccagggcaccacccugaacaacgugcacagcaacaacaccgugagagacagaacccccuacagaacccugcugaugaacgagcugggcgugcccuuccaccugggcaccaagcaggugugcaucgccuggagcagcagcagcugccacgacggcaaggccuggcugcacgugugcaucaccggcgacgacaagaacgccaccgccagcuucaucuacaacggcagacugguggacagcguggugagcuggagcaaggagauccugagaacccaggagagcgagugcgugugcaucaacggcaccugcaccguggugaugaccgacggcagcgccagcggcaaggccgacaccaagauccuguucaucgaggagggcaagaucgugcacaccagcacccugagcggcagcgcccagcacguggaggagugcagcugcuaccccagauaccccggcgugagaugcgugugcagagacaacuggaagggcagcaacagacccaucguggacaucaacaucaaggaccacagcaucgugagcagcuacgugugcagcggccuggugggcgacacccccagaaagaacgacagcagcagcagcagccacugccuggaccccaacaacgaggagggcggccacggcgugaagggcugggccuucgacgacggcaacgacguguggaugggcagaaccaucagcgagaagagcagacugggcuacgagaccuucaaggugaucgagggcuggagcaaccccaagagcaagcugcagaucaacagacaggugaucguggacagaggcaacagaagcggcuacagcggcaucuucagcguggagggcaagagcugcaucaacagaugcuucuacguggagcugaucagaggcagaaaggaggagaccgaggugcuguggaccagcaacagcaucgugguguucugcggcaccagcggcaccuacggcaccggcagcuggcccgacggcgccgacaucaaccugaugcccguguga

SEQ ID NO: 182239 - RNA, 1410 nt, Artificial Sequence; identical to SEQ ID NO: 181715
  derived and/or modified CDS sequence (opt4) from neuraminidase__InfluenzaA__AFH74810

SEQ ID NO: 182240 - RNA, 1410 nt, Artificial Sequence; identical to SEQ ID NO: 181715
  derived and/or modified CDS sequence (opt4) from neuraminidase__InfluenzaA__AFH74821

SEQ ID NO: 182241 - RNA, 1410 nt, Artificial Sequence; identical to SEQ ID NO: 181715
  derived and/or modified CDS sequence (opt4) from neuraminidase__InfluenzaA__AFH74832

SEQ ID NO: 182242 - RNA, 1410 nt, Artificial Sequence; identical to SEQ ID NO: 181715
  derived and/or modified CDS sequence (opt4) from neuraminidase__InfluenzaA__AFH74843

SEQ ID NO: 182243 - RNA, 1410 nt, Artificial Sequence; identical to SEQ ID NO: 181695
  derived and/or modified CDS sequence (opt4) from neuraminidase__InfluenzaA__AFH74854

SEQ ID NO: 182244 - RNA, 1410 nt, Artificial Sequence; identical to SEQ ID NO: 181695
  derived and/or modified CDS sequence (opt4) from neuraminidase__InfluenzaA__AFH74865

SEQ ID NO: 182245 - RNA, 1410 nt, Artificial Sequence; identical to SEQ ID NO: 181695
  derived and/or modified CDS sequence (opt4) from neuraminidase__InfluenzaA__AFH74876

SEQ ID NO: 182246 - RNA, 1410 nt, Artificial Sequence; identical to SEQ ID NO: 181695
  derived and/or modified CDS sequence (opt4) from neuraminidase__InfluenzaA__AFH74887

SEQ ID NO: 182247 - RNA, 1410 nt, Artificial Sequence; identical to SEQ ID NO: 181695
  derived and/or modified CDS sequence (opt4) from neuraminidase__InfluenzaA__AFH74898

SEQ ID NO: 182248 - RNA, 1410 nt, Artificial Sequence; identical to SEQ ID NO: 181695
  derived and/or modified CDS sequence (opt4) from neuraminidase__InfluenzaA__AFH74909

SEQ ID NO: 182249 - RNA, 1410 nt, Artificial Sequence
  derived and/or modified CDS sequence (opt4) from neuraminidase__InfluenzaA__AFH74920
augaaccccaaccagaagaucaucaccaucggcagcgugagccugaccaucagcaccaucugcuucuucaugcagaccgccauccugaucaccaccgugacccugcacuucaagcagugcgaguucaacagcccccccaacaaccaggugaugcugugcgagcccaccaucaucgagagaaacaucaccgagaucguguaccugaccaacaccaccaucgagaaggagaucugccccaagcuggccgaguacagaaacuggagcaagccccagugcgacaucaccggcuucgcccccuucagcaaggacaacagcaucagacugagcgccggcggcgacaucugggugaccagagagcccuacgugagcugcgaccccgacaagugcuaccaguucgcccugggccagggcaccacccugaacaacgugcacagcaacaacaccgugagagacagaacccccuacagaacccugcugaugaacgagcugggcgugcccuuccaccugggcaccaagcaggugugcaucgccuggagcagcagcagcugccacgacggcaaggccuggcugcacgugugcaucaccggcgacgacaagaacgccaccgccagcuucaucuacaacggcagacugguggacagcguggugagcuggagcaaggagauccugagaacccaggagagcgagugcgugugcaucaacggcaccugcaccguggugaugaccgacggcagcgccagcggcaaggccgacaccaagauccuguucaucgaggagggcaagaucgugcacaccagcacccugagcggcagcgcccagcacguggaggagugcagcugcuaccccagauaccccggcgugagaugcgugugcagagacaacuggaagggcagcaacagacccaucguggacaucaacaucaaggaccacagcaucgugagcagcuacgugugcagcggccuggugggcgacacccccagaaagaacgacagcagcagcagcagccacugccuggaccccaacaacgaggagggcgaccacggcgugaagggcugggccuucgacgacggcaacgacguguggaugggcagaaccaucagcgagaagagcagacugggcuacgagaccuucaaggugaucgagggcuggagcaaccccaagagcaagcugcagaucaacagacaggugaucguggacagaggcaacagaagcggcuacagcggcaucuucagcguggagggcaagagcugcaucaacagaugcuucuacguggagcugaucagaggcagaaaggaggagaccgaggugcuguggaccagcaacagcaucgugguguucugcggcaccagcggcaccuacggcaccggcagcuggcccgacggcgccgacaucaaccugaugcccaucuga

SEQ ID NO: 182250 - RNA, 1410 nt, Artificial Sequence; identical to SEQ ID NO: 176659
  derived and/or modified CDS sequence (opt4) from neuraminidase__InfluenzaA__AFH74931

SEQ ID NO: 182251 - RNA, 1410 nt, Artificial Sequence; identical to SEQ ID NO: 176659
  derived and/or modified CDS sequence (opt4) from neuraminidase__InfluenzaA__AFH74942

SEQ ID NO: 182252 - RNA, 1410 nt, Artificial Sequence; identical to SEQ ID NO: 181695
  derived and/or modified CDS sequence (opt4) from neuraminidase__InfluenzaA__AFH74953

SEQ ID NO: 182253 - RNA, 1410 nt, Artificial Sequence
  derived and/or modified CDS sequence (opt4) from neuraminidase__InfluenzaA__AFH74964
augaaccccaaccagaagaucaucaccaucggcagcgugagccugaccaucagcaccaucugcuucuucaugcagaucgccauccugaucaccaccgugacccugcacuucaagcaguacgaguucaacagcccccccaacaaccaggugaugcugugcgagcccaccaucaucgagagaaacaucaccgagaucguguaccugaccaacaccaccaucgagaaggagaucugccccaagcuggccgaguacagaaacuggagcaagccccagugcgacaucaccggcuucgcccccuucagcaaggacaacagcaucagacugagcgccggcggcgacaucugggugaccagagagcccuacgugagcugcgaccccgacaagugcuaccaguucgcccugggccagggcaccacccugaacaacgugcacagcaacaacaccgugagagacagaacccccuacagaacccugcugaugaacgagcugggcgugcccuuccaccugggcaccaagcaggugugcaucgccuggagcagcagcagcugccacgacggcaaggccuggcugcacgugugcaucaccggcgacgacaagaacgccaccgccagcuucaucuacaacggcagacugguggacagcguggugagcuggagcaaggagauccugagaacccaggagagcgagugcgugugcaucaacggcaccugcaccguggugaugaccgacggcagcgccagcggcaaggccgacaccaagauccuguucaucgaggagggcaagaucgugcacaccagcauccugagcggcagcgcccagcacguggaggagugcagcugcuaccccagauaccccggcgugagaugcgugugcagagacaacuggaagggcagcaacagacccaucguggacaucaacaucaaggaccacagcaucgugagcagcuacgugugcagcggccuggugggcgacacccccagaaagaacgacagcagcagcagcagccacugccuggaccccaacaacgaggagggcggccacggcgugaagggcugggccuucgacgacggcaacgacguguggaugggcagaaccaucagcgagaagagcagacugggcuacgagaccuucaaggugaucgagggcuggagcaaccccaagagcaagcugcagaucaacagacaggugaucguggacagaggcaacagaagcggcuacagcggcaucuucagcguggagggcaagagcugcaucaacagaugcuucuacguggagcugaucagaggcagaaaggaggagaccgaggugcuguggaccagcaacagcaucgugguguucugcggcaccagcggcaccuacggcaccggcagcuggcccgacggcgccgacaucaaccugaugcccguguga

SEQ ID NO: 182254 - RNA, 1410 nt, Artificial Sequence; identical to SEQ ID NO: 181695
  derived and/or modified CDS sequence (opt4) from neuraminidase__InfluenzaA__AFH75391

SEQ ID NO: 182255 - RNA, 1410 nt, Artificial Sequence; identical to SEQ ID NO: 176798
  derived and/or modified CDS sequence (opt4) from neuraminidase__InfluenzaA__AFH97143

SEQ ID NO: 182256 - RNA, 1410 nt, Artificial Sequence
  derived and/or modified CDS sequence (opt4) from neuraminidase__InfluenzaA__AFI56407
augaaccccaaccagaagaucaucaccaucggcagcgugugcaugaccaucggcauggccaaccugauccugcagaucggcaacaucaucagcaucuggaucagccacagcauccagcugggcaaccagaaccagaucgagaccugcaaccagagcgugaucaccuacgagaacaacaccugggugaaccagaccuacgugaacaucagcaacaccaacuucgccgccggccagagcguggugagcgugaagcuggccggcaacagcagccugugccccgugagcggcugggccaucuacagcaaggacaacagcaucagaaucggcagcaagggcaacguguucgugaucagagagcccuucaucagcugcagcccccuggagugcagaaccuucuuccugacccagggcgcccugcugaacgacaagcacagcaacggcaccaucaaggacagaagccccuacagaacccugaugagcugccccaucggcgaggugcccagccccuacaacagcagauucgagagcguggccuggagcgccagcgccugccacgacggcaucaacuggcugaccaucggcaucagcggccccgacaacggcgccguggccgugcugaaguacaacggcaucaucaccgacaccaucaagagcuggagaaacaacauccugagaacccaggagagcgagugcgccugcgugaacggcagcugcuucaccaucaugaccgacggccccagcgacggccaggccagcuacaagaucuucagaaucgagaagggcaagaucgugaagagcguggagaugaacgcccccaacuaccacuacgaggagugcagcugcuaccccgacagcagcgagaucaccugcgugugcagagacaacuggcacggcagcaacagacccugggugagcuucaaccagaaccuggaguaccagaucggcuacaucugcagcggcaucuucggcgacaaccccagacccaacgacaagaccggcagcugcggccccgugagcagcaacggcgccaacggcgugaagggcuucagcuucaaguacggcaacggcguguggaucggcagaaccaagagcaucagcagcagaaagggcuucgagaugaucugggaccccaacggcuggaccggcaccgacaacagcuucagcaucaagcaggacaucgugggcaucaacgaguggagcggcuacagcggcagcuucgugcagcaccccgagcugaccggccuggacugcaucagacccugcuucuggguggagcugaucagaggcagacccaaggagaacaccaucuggaccagcggcagcagcaucagcuucugcggcgugaacagcggcaccgugggcuggagcuggcccgacggcgccgagcugcccuucaccaucgacaaguga

SEQ ID NO: 182257 - RNA, 1410 nt, Artificial Sequence
  derived and/or modified CDS sequence (opt4) from neuraminidase__InfluenzaA__AFJ05141
augaaccccaaccagaagaucaucaccaucggcagcgugagccugaccaucagcaccaucugcuucuucaugcagaucgccauccugaucaccaccgugacccugcacuucaagcaguacgaguucaacagcccccccaacaaccaggugaugcugugcgagcccaccaucaucgagagaaacaucaccgagaucguguaccugaccaacaccaccaucgagaaggagaucugccccaagcccgccgaguacagaaacuggagcaagccccagugcgacaucaccggcuucgcccccuucagcaaggacaacagcaucagacugagcgccggcggcgacaucugggugaccagagagcccuacgugagcugcgaccccgacaagugcuaccaguucgcccugggccagggcaccacccugaacaacgugcacagcaacaacaccgugagagacagaacccccuacagaagccugcugaugaacgagcugggcgugcccuuccaccugggcaccaagcaggugugcaucgccuggagcagcagcagcugccacgacggcaaggccuggcugcacgugugcaucaccggcgacgacaagaacgccaccgccagcuucaucuacaacggcagacugguggacagcguggugagcuggagcaaggagauccugagaacccaggagagcgagugcgugugcaucaacggcaccugcaccguggugaugaccgacggcagcgccagcggcaaggccgacaccaagauccuguucaucgaggagggcaagaucgugcacaccagcacccugagcggcagcgcccagcacguggaggagugcagcugcuaccccagauaccccggcgugagaugcgugugcagagacaacuggaagggcagcaacagacccaucguggacaucaacaucaaggaccacagcaucgugagcagcuacgugugcagcggccuggugggcgacacccccagaaagaacgacagcagcagcagcagccacugccuggaccccaacaacgaggagggcggccacggcgugaagggcugggccuucgacgacggcaacgacguguggaugggcagaaccaucaacgagaccagcagacugggcuacgagaccuucaaggugaucgagggcuggagcaaccccaagagcaagcugcagaucaacagacaggugaucguggacagaggcgacagaagcggcuacagcggcaucuucagcguggagggcaagagcugcaucaacagaugcuucuacguggagcugaucagaggcagaaaggaggagaccgaggugcuguggaccagcaacagcaucgugguguucugcggcaccagcggcaccuacggcaccggcagcuggcccgacggcgccgaccugaaccugaugcccaucuga

SEQ ID NO: 182258 - RNA, 1410 nt, Artificial Sequence
  derived and/or modified CDS sequence (opt4) from neuraminidase__InfluenzaA__AFJ05145
augaaccccaaccagaagaucaucaccaucggcagcgugagccugaccaugagcaccaucugcuucuucaugcagaucgccauccugaucaccaccgugacccugcacuucaagcaguacgaguucaacagcccccccaacaaccaggugaugcugugcgagcccaccaucaucgagagaaacaucaccgagaucguguaccugaccaacaccaccaucgagaaggagaucugccccaagcccgccgaguacagaaacuggagcaagccccagugcgacaucaccggcuucgcccccuucagcaaggacaacagcaucagacugagcgccggcggcgacaucugggugaccagagagcccuacgugagcugcgaccccgacaagugcuaccaguucgcccugggccagggcaccacccugaacaacgugcacagcaacaacaccgugagagacagaacccccuacagaacccugcugaugaacgagcugggcgugcccuuccaccugggcaccaagcaggugugcaucgccuggagcagcagcagcugccacgacggcaaggccuggcugcacgugugcaucaccggcgacgacaagaacgccaccgccagcuucaucuacaacggcagacugguggacagcguggugagcuggagcaaggagauccugagaacccaggagagcgagugcgugugcaucaacggcaccugcaccguggugaugaccgacggcagcgccagcggcaaggccgacaccaagauccuguucaucgaggagggcaagaucgugcacaccagcacccugagcggcagcgcccagcacguggaggagugcagcugcuaccccagauaccccggcgugagaugcgugugcagagacaacuggaagggcagcaacagacccaucguggacaucaacaucaaggaccacagcaucgugagcagcuacgugugcagcggccuggugggcgacacccccagaaagaacgacagcagcagcagcagccacugccuggaccccaacaacgaggagggcggccacggcgugaagggcugggccuucgacgacggcaacgacguguggaugggcagaaccaucaacgagaccagcagacugggcuacgagaccuucaaggugaucgagggcuggagcaaccccaagagcaagcugcagaucaacagacaggugaucguggacagaggcgacagaagcggcuacagcggcaucuucagcguggagggcaagagcugcaucaacagaugcuucuacguggagcugaucagaggcagaaaggaggagaccgaggugcuguggaccagcaacagcaucgugguguucugcggcaccagcggcaccuacggcaccggcagcuggcccgacggcgccgaccugaaccugaugcccaucuga

SEQ ID NO: 182259 - RNA, 1410 nt, Artificial Sequence
  derived and/or modified CDS sequence (opt4) from neuraminidase__InfluenzaA__AFJ05635
augaaccccaaccagaagaucaucaccaucggcagcgugugcaugaccaucggcauggccaaccugauccugcagaucggcaacaucaucagcaucuggaucagccacagcauccagcugagaaaccagagccagaucgagaccugcaaccagagcgugaucaccuacgagaacaacaccugggugaaccagaccuacgugaacaucagcaacaccaacuucgccgccggccagagcguggugagcaugaagcuggccggcaacagcagccugugccccgugagcggcugggccaucuacagcaaggacaacagcaucagaaucggcagcaagggcgacguguucgugaucagagagcccuucaucagcugcagcccccuggagugcagaaccuucuuccugacccagggcgcccugcugaacgacaagcacagcaacggcaccaucaaggacagaagccccuacagaacccugaugagcugccccaucggcgaggugcccagccccuacaacagcagauucgagagcguggccuggagcgccagcgccugccacgacggcaucaacuggcugaccaucggcaucagcggccccgacaacggcgccguggccgugcugaaguacaacggcaucaucaccgacaccaucaagagcuggagaaacaacauccugagaacccaggagagcgagugcgccugcgugaacggcagcugcuucaccaucaugaccgacggccccagcgacggccaggccagcuacaagaucuucagaaucgagaagggcaagaucgugaagagcguggagaugaacgcccccaacuaccacuacgaggagugcagcugcuaccccgacagcagcgagaucaccugcgugugcagagacaacuggcacggcagcaacagacccugggugagcuucaaccagaaccuggaguaccagaucggcuacaucugcagcggcaucuucggcgacaaccccagacccaacgacaagaccggcagcugcggccccgugagcagcaacggcgccaacggcgugaagggcuucagcuucaaguacggcaacggcguguggaucggcagaaccaagagcaucagcagcagaaagggcuucgagaugaucugggaccccaacggcuggaccggcaccgacaacaacuucagcaucaagcaggacaucgugggcaucaacgaguggagcggcuacagcggcagcuucgugcagcaccccgagcugaccggccuggacugcaucagacccugcuucuggguggagcugaucagaggcagacccaaggagaacaccaucuggaccagcggcagcagcaucagcuucugcggcgugaacagcgacaccgugggcuggagcuggcccgacggcgccgagcugcccuucaccaucgacaaguga

SEQ ID NO: 182260 - RNA, 1410 nt, Artificial Sequence
  derived and/or modified CDS sequence (opt4) from neuraminidase__InfluenzaA__AFJ11709
augaaccccaaccagaagaucaucaccaucggcagcgugagccugaccaucagcaccaucugcuucuucaugcagaucgccauccugaucaccaccgugacccugcacuucaagcaguacgaguucaacagcccccccaacaaccaggugaugcugugcgagcccaccaucaucgagagaaacaucaccgagaucguguaccugaccaacaccaccaucgagaaggagaucugccccaagcuggccgaguacagaaacuggagcaagccccagugcgacaucaccggcuucgcccccuucagcaaggacaacagcaucagacugagcgccggcggcgacaucugggugaccagagagcccuacgugagcugcgaccccgacaagugcuaccaguucgcccugggccagggcaccacccugaacaacgugcacagcaacaacaccgugagagacagaacccccuacagaacccugcugaugaacgagcugggcgugcccuuccaccugggcaccaagcaggugugcaucgccuggagcagcagcagcugccacgacggcaaggccuggcugcacgugugcaucaccggcgacgacaagaacgccaccgccagcuucaucuacaacggcagacugguggacagcguggugagcuggagcaaggagauccugagaacccaggagagcgagugcgugugcaucaacggcaccugcaccguggugaugaccgacggcagcgccagcggcaaggccgacaccaagauccuguucaucgaggagggcaagaucgugcacaccagcacccugagcggcagcgcccagcacguggaggagugcagcugcuaccccagauaccccggcgugagaugcgugugcagagacaacuggaagggcagcaacagacccaucguggacaucaacaucaaggaccacagcaucgugagcagcuacgugugcagcggccuggugggcgacacccccagaaagaacgacagcagcagcagcagccacugccuggaccccaacaacgaggagggcggccacggcgugaagggcugggccuucgacgacggcaacgacguguggaugggcagaaccaucaacgagaccagcagacugggcuacgagaccuucaaggugaucgagggcuggagcaaccccaagagcaagcugcagaucaacagacaggugaucguggacagaggcaacagaagcggcuacagcggcaucuucagcguggagggcaagagcugcaucaacagaugcuucuacguggagcugaucagaggcagaaaggaggagaccgaggugcuguggaccagcaacagcaucgugguguucugcggcaccagcggcaccuacggcaccggcagcuggcccgacggcgccgaccugaaccugaugcugaucuga

SEQ ID NO: 182261 - RNA, 1410 nt, Artificial Sequence
  derived and/or modified CDS sequence (opt4) from neuraminidase__InfluenzaA__AFJ11720
augaaccccaaccagaagaucaucaccaucggcagcgugagccugaccaucagcaccaucugcuucuucaugcagaucgccauccugaucaccaccgugacccugcacuucaagcaguacgaguucaacagcccccccaacaaccaggugaugcugugcgagcccaccaucaucgagagaaacaucaccgagaucguguaccugaccaacaccaccaucgagaaggagaucugccccaagcuggccgaguacagaaacuggagcaagccccagugcgacaucaccggcuucgcccccuucagcaaggacaacagcaucagacugagcgccggcggcgacaucugggugaccagagagcccuacgugagcugcgaccccgacaagugcuaccaguucgcccugggccagggcaccacccugaacaacgugcacagcaacaacaccgugagagacagaacccccuacagaacccugcugaugaacgagcugggcgugcccuuccaccugggcaccaagcaggugugcaucgccuggagcagcagcagcugccacgacggcaaggccuggcugcacgugugcaucaccggcgacgacaagaacgccaccgccagcuucaucuacaacggcagacugaucgacagcguggugagcuggagcaaggagauccugagaacccaggagagcgagugcgugugcaucaacggcaccugcaccguggugaugaccgacggcagcgccagcggcaaggccgacaccaagauccuguucaucgaggagggcaagaucgugcacaccagcacccugagcggcagcgcccagcacguggaggagugcagcugcuaccccagauaccccggcgugagaugcgugugcagagacaacuggaagggcagcaacagacccaucguggacaucaacaucaaggaccacagcaucgugagcagcuacgugugcagcggccuggugggcgacacccccagaaagaacgacagcagcagcagcagccacugccuggaccccaacaacgaggagggcggccacggcgugaagggcugggccuucgacgacggcaacgacguguggaugggcagaaccaucaacgagaccagcagacugggcuacgagaccuucaaggugaucgagggcuggagcaaccccaagagcaagcugcagaucaacagacaggugaucguggacaagggcaacagaagcggcuacagcggcaucuucagcguggagggcaagagcugcaucaacagaugcuucuacguggagcugaucagaggcagaaaggaggagaccgaggugcuguggaccagcaacagcaucgugguguucugcggcaccagcggcaccuacggcaccggcagcuggcccgacggcgccgaccugaaccugaugcccaucuga

SEQ ID NO: 182262 - RNA, 1410 nt, Artificial Sequence; identical to SEQ ID NO: 181203
  derived and/or modified CDS sequence (opt4) from neuraminidase__InfluenzaA__AFJ11731

SEQ ID NO: 182263 - RNA, 1410 nt, Artificial Sequence
  derived and/or modified CDS sequence (opt4) from neuraminidase__InfluenzaA__AFJ19845
augaaccccaaccagaagaucaucaccaucggcagcgugagccugaccaucagcaccaucugcuucuucaugcagaucgccauccugaucaccaccgugacccugcacuucaagcaguacgaguucaacagcccccccaacaaccaggugaugcugugcgagcccaccaucaucgagagaaacaucaccgagaucguguaccugaccaacaccaccaucgagaaggagaucugccccaagcuggccgaguacagaaacuggagcaagccccagugcgacaucaccggcuucgcccccuucagcaaggacaacagcaucagacugagcgccggcggcgacaucugggugaccagagagcccuacgugagcugcgaccccgacaagugcuaccaguucgcccugggccagggcaccacccugaacaacgugcacagcaacaacaccgugagagacagaacccccuacagaacccugcugaugaacgagcugggcgugcccuuccaccugggcaccaagcaggugugcaucgccuggagcagcagcagcugccacgacggcaaggccuggcugcacgugugcaucaccggcgacgacaagaacgccaccgccagcuucaucuacaacggcagacugguggacagcguggugagcuggagcaaggagauccugagaacccaggagagcgagugcgugugcaucaacggcaccugcaccguggugaugaccgacggcagcgccagcggcaaggccgacaccaagauccuguucaucgaggagggcaagaucgugcacaccagcacccugagcggcagcgcccagcacguggaggagugcagcugcuaccccagauaccccgacgugagaugcgugugcagagacaacuggaagggcagcaacagacccaucguggacaucaacaucaaggaccacagcaucgugagcagcuacgugugcagcggccuggugggcgacacccccagaaagaacgacagcagcagcagcagccacugccuggaccccaacaacgaggagggcggccacggcgugaagggcugggccuucgacgacggcaacgacguguggaugggcagaaccaucaacgagaccagcagacugggcuacgagaccuucaaggugaucgagggcuggagcaaccccaagagcaagcugcagaucaacagacaggugaucguggacaagggcaacagaagcggcuacagcggcaucuucagcguggagggcaagagcugcaucaacagaugcuucuacguggagcugaucagaggcagaaaggaggagaccgaggugcuguggaccagcaacagcaucgugguguucugcggcaccagcggcaccuacggcaccggcagcuggcccgacggcgccgaccugaaccugaugcccaucuga

SEQ ID NO: 182264 - RNA, 1410 nt, Artificial Sequence; identical to SEQ ID NO: 176798
  derived and/or modified CDS sequence (opt4) from neuraminidase__InfluenzaA__AFJ44697

SEQ ID NO: 182265 - RNA, 1410 nt, Artificial Sequence; identical to SEQ ID NO: 180317
  derived and/or modified CDS sequence (opt4) from neuraminidase__InfluenzaA__AFJ69989

SEQ ID NO: 182266 - RNA, 1410 nt, Artificial Sequence
  derived and/or modified CDS sequence (opt4) from neuraminidase__InfluenzaA__AFJ69990
augaaccccaaccagaagaucaucaccaucggcagcgugugcaugaccaucggcauggccaaccugauccugcagaucggcaacaucaccagcaucuggaucagccacagcauccagcugggcaaccagaaccagaucgagaccugcaaccagagcgugaucaccuacgagaacaacaccugggugaaccagaccuacgugaacaucagcaacaccaacuucgccgccggccagagcguggugagcgugaagcuggccggcaacagcagccugugccccgugagcggcugggccaucuacagcaaggacaacagcaucagaaucggcagcaagggcgacguguucgugaucagagagcccuucaucagcugcagcccccuggagugcagaaccuucuuccugacccagggcgcccugcugaacgacaagcacagcaacggcaccaucaaggacagaagccccuacagaacccugaugagcugccccaucggcgaggugcccagccccuacaacagcagauucgagagcguggccuggagcgccagcgccugccacgacggcaucaacuggcugaccaucggcaucagcggccccgacaacggcgccguggccgugcugaaguacaacggcaucaucaccgacaccaucaagagcuggagaaacaacauccugagaacccaggagagcgagugcgccugcgugaacggcagcugcuucaccgugaugaccgacggccccagcgacggccaggccagcuacaagaucuucagaaucgagaagggcaagaucgugaagagcguggagaugaacgcccccaacuaccacuacgaggagugcagcugcuaccccgacagcagcgagaucaccugcgugugcagagacaacuggcacggcagcaacagacccugggugagcuucaaccagaaccuggaguacagaaucggcuacaucugcagcggcaucuucggcgacaaccccagacccaacgacaagaccggcagcugcggccccgugagcagcaacggcgccaacggcgugaagggcuucagcuucaaguacggcaacggcguguggaucggcagaaccaagagcaucagcagcagaaacggcuucgagaugaucugggaccccaacggcuggaccggcaccgacaacaacuucagcaucaagcaggacaucaucggcaucaacgaguggagcggcuacagcggcagcuucgugcagcaccccgagcugaccggccuggacugcaucagacccugcuucuggguggagcugaucagaggcagacccaaggagaacaccaucuggaccagcggcagcagcaucagcuucugcggcgugaacagcgacaccgugggcuggagcuggcccgacggcgccgagcugcccuucaccaucgacaaguga

SEQ ID NO: 182267 - RNA, 1410 nt, Artificial Sequence
  derived and/or modified CDS sequence (opt4) from neuraminidase__InfluenzaA__AFJ69991
augaaccccaaccagaagaucaucaccaucggcagcgugugcaugaccaucggcauggccaaccugauccugcagaucggcaacaucaucagcaucuggaucagccacagcauccagcugggcaaccagagccagaucgagaccugcaaccagagcgugaucaccuacgagaacaacaccugggugaaccagaccuacgugaacaucagcaacaccaacuucgccgccggccagagcguggugagcgugaagcuggccggcaacagcagccugugccccgugagcggcugggccaucuacagcaaggacaacagcaucagaaucggcagcaagggcgacguguucgugaucagagagcccuucaucagcugcagcccccuggagugcagaaccuucuuccugacccagggcgcccugcugaacgacaagcacagcaacggcaccaucaaggacagaagccccuacagaacccugaugagcugccccaucggcgaggugcccagccccuacaaccaggaccugagccacagcgccuggagcgccagcgccugccacgacggcaucaacuggcugaccaucggcaucagcggccccgacaacggcgccguggccgugcugaaguacaacggcaucaucaccgacaccaucaagagcuggagaaacaacauccugagaacccaggagagcgagugcgccugcgugaacggcagcugcuucaccaucaugaccgacggccccagcgacggccaggccagcuacaagaucuucagaaucgagaagggcaagaucgugaagagcguggagaugaacgcccccaacuaccacuacgaggagugcagcugcuaccccgacagcagcgagaucaccugcgugugcagagacaacuggcacggcagcaacagacccugggugagcuucaaccagaaccuggaguaccagaucggcuacaucugcagcggcaucuucggcgacaaccccagacccaacgacaagaccggcagcugcggccccgugagcagcaacggcgccaacggcgugaagggcuucagcuucaaguacggcaacggcguguggaucggcagaaccaagagcaucagcagcagaaagggcuucgagaugaucugggaccccaacggcuggaccggcaccgacaacaacuucagcaucaagcaggacaucgugggcaucaacgaguggagcggcuacagcggcagcuucgugcagcaccccgagcugaccggccuggacugcaucagacccugcuucuggguggagcugaucagaggcagacccaaggagaacaccaucuggaccagcggcagcagcaucagcuucugcggcgugaacagcgacaccgugggcuggagcuggcccgacggcgccgagcugcccuucaccaucgacaaguga

SEQ ID NO: 182268 - RNA, 1410 nt, Artificial Sequence; identical to SEQ ID NO: 177624
  derived and/or modified CDS sequence (opt4) from neuraminidase__InfluenzaA__AFJ69992

SEQ ID NO: 182269 - RNA, 1410 nt, Artificial Sequence
  derived and/or modified CDS sequence (opt4) from neuraminidase__InfluenzaA__AFJ69993
augaaccccaaccagaagaucaucaccaucggcagcgugagccugaccaucagcaccaucugcuucuucaugcagaucgccauccugaucaccaccgugacccugcacuucaagcaguacgaguucaacagcccccccaacaaccaggugaugcugugcgagcccaccaucaucgagagaaacaucaccgagaucguguaccugaccaacaccaccaucgagaaggagaucugccccaagcuggccgaguacagaaacuggagcaagccccagugcgacaucaccggcuucgcccccuucagcaaggacaacagcaucagacugagcgccggcggcgacaucugggugaccagagagcccuacgugagcugcgaccccgacaagugcuaccaguucgcccugggccagggcaccacccugaacaacgugcacagcaacaacaccgugagagacagaacccccuacagaacccugcugaugaacgagcugggcgugcccuuccaccugggcaccaagcaggugugcaucgccuggagcagcagcagcugccacgacggcaaggccuggcugcacgugugcaucaccggcgacgacaagaacgccaccgccagcuucaucuacaacggcagacugguggacagcguggugagcuggagcaaggagauccugagaacccaggagagcgagugcgugugcaucaacggcaccugcaccguggugaugaccgacggcagcgccagcggcaaggccgacaccaagauccuguucaucgaggagggcaagaucgugcacaccagcacccugagcggcagcgcccagcacguggaggagugcagcugcuaccccagauaccccggcgugagaugcgugugcagagacaacuggaagggcagcaacagacccaucguggacaucaacaucaaggaccacagcaucgugagcagcuacgugugcagcggccuggugggcgacacccccagaaagaacgacagcagcagcagcagccacugccuggaccccaacaacgaggagggcggccacggcgugaagggcugggccuucgacgacggcaacgacguguggaugggcagaaccaucaacgagaccagcagacugggcuacgagaccuucaaggugaucgagggcuggagcaaccccaagagcaagcugcagaucaacagacaggugaucgugggcagaggcaacagaagcggcuacagcggcaucuucagcguggagggcaagagcugcaucaacagaugcuucuacguggagcugaucagaggcagaaaggaggagaccgaggugcuguggaccagcaacagcaucgugguguucugcggcaccagcggcaccuacggcaccggcagcuggcccgacggcgccaaccugaaccugaugcccaucuga

SEQ ID NO: 182270 - RNA, 1410 nt, Artificial Sequence; identical to SEQ ID NO: 179578
  derived and/or modified CDS sequence (opt4) from neuraminidase__InfluenzaA__AFJ69994

SEQ ID NO: 182271 - RNA, 1413 nt, Artificial Sequence
  derived and/or modified CDS sequence (opt4) from neuraminidase__InfluenzaA__AFJ74389
augaaccccaaccagaagaucaucaccaucggcagcaucagcaucgccaucggcaucaucagccugauccugcagaucggcaacaucaucagcaucugggccagccacagcauccagaccggcagccagaaccacaccggcgugugcaaccagagaaucaucaccuacgagaacagcaccugggugaaccagaccuacgugaacaucaacaacaccaacgugguggccggcaaggacaagaccagcaugacccuggccggcaacagcagccugugccccaucagaggcugggccaucuacaccaaggacaacagcaucagaaucggcagcaagggcgacguguucgugaucagagagcccuucaucagcugcagccaccuggagugcagaaccuucuuccugacccagggcgcccugcugaacgacaagcacagcaacggcaccgugaaggacagaagccccuacagagcccugaugagcugcccccugggcgaggcccccagccccuacaacagcagauucgagagcguggccuggagcgccagcgccugccacgacggccugggcuggcugaccaucggcaucagcggccccgacaacggcgccguggccgugcugaaguacaacggcaucaucaccgagaccaucaagagcuggaagaagagaauccugagaacccaggagagcgagugcgugugcaugaacggcagcugcuucaccaucaugaccgacggccccagcaacggcgccgccagcuacagaaucuucaagaucgagaagggcagagugaccaagagcaucgagcuggacgcccccaacuaccacuacgaggagugcagcugcuaccccgacaccggcaccgugaugugcgugugcagagacaacuggcacggcagcaacagacccugggugagcuucaaccagaaccuggacuaccagaucggcuacaucugcagcggcguguucggcgacaaccccagacccaaggacggcgagggcagcugcaaccccgugaccguggacggcgccgacggcgugaagggcuucagcuacagauacggcaacggcguguggaucggcagaaccaagagcaacagacugagaaagggcuucgagaugaucugggaccccaacggcuggaccgacaccgacagcgacuucagcaugaagcaggacaucguggccaugaccgacuggagcggcuacagcggcagcuucgugcagcaccccgagcugaccggccuggacugcaugagacccugcuucuggguggagcuggugagaggccugcccagagagaacaccaccaucuggaccagcggcagcagcaucagcuucugcggcgugaacagcgacaccgccaacuggagcuggcccgacggcgccgagcugcccuucaccaucgacaaguga

SEQ ID NO: 182272 - RNA, 1410 nt, Artificial Sequence
  derived and/or modified CDS sequence (opt4) from neuraminidase__InfluenzaA__AFJ74399
augaaccccaaccagaagaucaucaccaucggcagcgugagccugaccaucgccaccaucugcuuccugaugcagaucgccauccuggugaucacccugacccugcacuucaagcaguacgagugcaacagcccccccaacaaccaggugaugcugugcgagcccaccaucaucgagagaaacaucaccgagaucguguaccugaccaacaccaccaucgagaaggagaucugccccaagcuggccgaguacagaaacuggagcaagccccagugcaagaucaccggcuucgcccccuucagcaaggacaacagcaucagacugagcgccggcggcgacaucugggugaccagagagcccuacgugagcugcgaccccggcaagugcuaccaguucgcccugggccagggcaccacccugaacaacagacacagcaacgacaccgugcacgacagaacccccuacagaacccugcugaugaacgagcugggcgugcccuuccaccugggcaccaagcaggugugcaucgccuggagcagcagcagcugccacgacggcaaggccuggcugcacgugugcgugaccggccacaacgagaacgccaccgccagcuucaucuacgacggcagacugguggacagcaucggcagcuggagcaagaacauccugagaacccaggagagcgagugcgugugcaucaacggcaccugcaccguggugaugaccgacggcagcgccagcggcagagccgacaccaagauccuguucaucgaggagggcaagaucgugcacaucagcccccugagcggcagcgcccagcacguggaggagugcagcugcuaccccagauaccccggcgugagaugcgugugcagagacaacuggaagggcagcaacagacccaucguggacaucaacgugaaggacuucagcaucgugagcagcuacgugugcagcggccuggugggcgacacccccagaaagaacgacagcagcagcagcagccacugccugaaccccaacaacgaggagggcggccacggcgugaagggcugggccuucgacgacggcaacgacguguggaugggcagaaccaucagcgagaagcugagaagcggcuacgagaccuucaaggugaucggcggcuggagcaagcccaacagcaagcugcagaucaacagacaggugaucguggacagaggcaacagaagcggcuacagcggcaucuucagcguggagggcaagagcugcaucaacagaugcuucuacguggagcugaucagaggcagaaagcaggagaccgaggugugguggaccagcaacagcaucgugguguucugcggcaccagcggcaccuacggcaccggcagcuggcccgacggcgccgacaucaaccugaugcccaucuga

SEQ ID NO: 182273 - RNA, 1410 nt, Artificial Sequence
  derived and/or modified CDS sequence (opt4) from neuraminidase__InfluenzaA__AFJ74410
augaaccccaaccagaagaucaucaccaucggcagcgugagccugaccaucgccaccaucugcuuccugaugcagaucgccauccuggugaugaccgugacccugcacuucaagcaguacgagugcaacagcccccccaacaaccaggugaugcugugcgagcccaccaucaucgagagaaacaucaccgagaucguguaccugaccaacaccaccaucgagaaggagaucugccccaagcuggccgaguacagaaacuggagcaagccccagugcaagaucaccggcuucgcccccuucagcaaggacaacagcaucagacugagcgccggcggcgacaucugggugaccagagagcccuacgugagcugcgaccccggcaagugcuaccaguucgcccugggccagggcaccacccugaacaacagacacagcaacgacaccgugcacgacagaacccccuacagaacccugcugaugaacgagcugggcgugcccuuccaccugggcaccaagcaggugugcaucgccuggagcagcagcagcugccacgacggcaaggccuggcugcacgugugcgugaccggccacaacgagaacgccaccgccagcuucaucuacgacggcagacugguggacagcaucggcagcuggagcaagaacauccugagaacccaggagagcgagugcgugugcaucaacggcaccugcaccguggugaugaccgacggcagcgccagcggcagagccgacaccaagauccuguucaucgaggagggcaagaucgugcacaucagcccccugagcggcagcgcccagcacguggaggagugcagcugcuaccccagauaccccggcgugagaugcgugugcagagacaacuggaagggcagcaacagacccaucguggacaucaacgugaaggacuacagcaucaucagcagcuacgugugcagcggccuggugggcgacacccccagaaagaacgacagcagcagcagcagccacugccugaaccccaacaacgaggagggcggccacggcgugaagggcugggccuucgacgacggcaacgacguguggaugggcagaaccaucagcgagaagcugagaagcggcuacgagaccuucaaggugaucggcggcuggagcaagcccaacagcaagcugcagaucaacagacaggugaucguggacagaggcaacagaagcggcuacagcggcaucuucagcguggagggcaagagcugcaucaacagaugcuucuacguggagcugaucagaggcagaaagcaggagaccgaggugugguggaccagcaacagcaucgugguguucugcggcaccagcggcaccuacggcaccggcagcuggcccgacggcgccgacaucaaccugaugcccaucuga

SEQ ID NO: 182274 - RNA, 1410 nt, Artificial Sequence; identical to SEQ ID NO: 174375
  derived and/or modified CDS sequence (opt4) from neuraminidase__InfluenzaA__AFJ74451

SEQ ID NO: 182275 - RNA, 1413 nt, Artificial Sequence
  derived and/or modified CDS sequence (opt4) from neuraminidase__InfluenzaA__AFJ74462
augaaccccaaccagaagaucaucaccaucggcagcaucagcguggccaucggcaucaucagccugauccugcagaucggcaacaucaucagcaucugggccagccacagcauccagaccggcagccagaacuacaccggcaucugcaaccagagaaucaucaccuacgagaacagcaccugggugaaccagaccuacgugaacaucaacaacaccaacgugguggccggcaaggacaagaccagcaugacccuggccggcaacagcagccugugccccaucagaggcugggccaucuacaccaaggacaacagcaucagaaucggcagcaagggcgacguguucgugaucagagagcccuucaucagcugcagccaccuggagugcagaaccuucuuccugacccagggcgcccugcugaacgacaagcacagcaacggcaccgugaaggacagaagccccuacagagcccugaugagcugcccccugggcgaggcccccagccccuacaacagcagauucgagagcguggccuggagcgccagcgccugccacgacggccugggcuggcugaccaucggcaucagcggccccgacaacggcgccguggccgugcugaaguacaacggcaucaucaccgagaccaucaagagcuggaagaagcagauccugagaacccaggagagcgagugcgugugcgugaacggcagcugcuucaccaucaugaccgacggccccagcaacagagccgccagcuacagaaucuucaagaucgagaagggcagagugaccaagagcaucgagcuggacgcccccaacuaccacuacgaggagugcagcugcuaccccgacaccggcaccgugaugugcgugugcagagacaacuggcacggcagcaacagacccugggugagcuucaaccagaaccuggacuaccagaucggcuacaucugcagcggcguguucggcgacaaccccagacccaaggacggcgagggcagcugcaaccccgugaccguggacggcgccgacggcgugaagggcuucagcuacagauacggcaacggcguguggaucggcagaaccaagagcaacagacugagaaagggcuucgagaugaucugggaccccaacggcuggaccgacaccgacagcgacuucagcaugaagcaggacgugguggccaugaccgacuggagcggcuacagcggcagcuucgugcagcaccccgagcugaccggccuggacugcaugagacccugcuucuggguggagcuggugagaggccugcccagagagaacaccaccaucuggaccagcggcagcagcaucagcuucugcggcgugaacagcgagaccgccaacuggagcuggcccgacggcgccgagcugcccuucaccaucgacaaguga

SEQ ID NO: 182276 - RNA, 1410 nt, Artificial Sequence
  derived and/or modified CDS sequence (opt4) from neuraminidase__InfluenzaA__AFJ74517
augaaccccaaccagaagaucaucaccaucggcagcgugagccugaccaucgccaccaucugcuuccugaugcagaucgccauccuggugaccaccgugacccugcacuucaagcaguacgagugcaacagcccccccaacaaccaggugaugcugugcgagcccaccaucaucgagagaaacaucaccgagaucguguacaugaccaacaccaccaucgagaaggagaucugccccaagcuggccgaguacagaaacuggagcaagccccagugcaagaucaccggcuucgcccccuucagcaaggacaacagcaucagacugagcgccggcggcgacaucugggugaccagagagcccuacgugagcugcgaccccgacaagugcuaccaguucgcccugggccagggcaccacccugaacaacagacacagcaacgacaccgugcacgacagaacccccuacagaacccugcugaugaacgagcugggcgugcccuuccaccugggcaccaagcaggugugcaucgccuggagcagcagcagcugccacgacggcaaggccuggcugcacgugugcgugaccggccacgacgagaacgccaccgccagcuucaucuacgacggcagacugguggacagcaucggcagcuggagcaagaagauccugagaacccaggagagcgagugcgugugcaucaacggcaccugcaccguggugaugaccgacggcagcgccagcggcagagccgacaccaagauccuguucaucgaggagggcaagaucgugcacaucagccagcugagcggcagcgcccagcacguggaggagugcagcugcuaccccagauaccccggcgugagaugcgugugcagagacaacuggaagggcagcaacagacccaucguggacaucaacgugaaggacuacagcaucgugagcagcuacgugugcagcggccuggugggcgacacccccagaaagaacgacagcagcagcagcagccacugccugaaccccaacaacgaggagggcggccacggcgugaagggcugggccuucgacgacggcaacgacguguggaugggcagaaccaucagcgagaagcugagaagcggcuacgagaccuucaaggugaucgagggcuggagcaagcccaacagcaagcugcagaucaacagacaggugaucguggacagaggcaacagaagcggcuacagcggcaucuucagcguggagggcaagagcugcaucaacagaugcuucuacguggagcugaucagaggcagaaagcaggagaacgaggugugguggaccagcaacagcaucgugguguucugcggcaccagcggcaccuacggcaccggcagcuggcccgacggcgccgacaucaaccugaugcccaucuga

SEQ ID NO: 182277 - RNA, 1410 nt, Artificial Sequence
  derived and/or modified CDS sequence (opt4) from neuraminidase__InfluenzaA__AFJ74564
augaaccccaaccagaagaucaucaccaucggcagcgugagccugaccaucgccaccaucugcuuccugaugcagaucgccauccuggugaccaccgugacccugcacuucaagcaguacgagugcaacagcccccccaacaaccaggugaugcugugcgagcccaccaucaucgagagaaacaucaccgagaucguguaccugaccaacaccaccaccgagaaggagaucugccccaagcuggccgaguacagaaacuggagcaagccccagugcaacaucaccggcuucgcccccuucagcaaggacaacagcaucagacugagcgccggcggcgacaucugggugaccagagagcccuacgugagcugcgaccccgacaagugcuaccaguucgcccugggccagggcaccacccugaacaacggccacagcaacgacaccgugcacgacagaacccccuacagaacccugcugaugaacgagcugggcgugcccuuccaccugggcaccagacaggugugcaucgccuggagcagcagcagcugccacgacggcaaggccuggcugcacgugugcgugaccggcgacgacgagaacgccaccgccagcuucaucuacaacggcagacugguggacagcaucggcagcuggagcaagaagauccugagaacccaggagagcgagugcgugugcaucaacggcaccugcaccguggugaugaccgacggcagcgccagcggcaaggccgacaccaagauccuguucaucgaggagggcaagaucgugcacaucagcacccugagcggcagcgcccagcacguggaggagugcagcugcuaccccagauaccccggcgugagaugcgugugcagagacaacuggaagggcagcaacagacccaucguggacaucaacgugaaggacuacagcaucgugagcagcuacgugugcagcggccuggugggcgacacccccagaaagaacgacagcuucagcagcagccacugccuggaccccaacaacgaggagggcggccacggcgugaagggcugggccuucgacgacggcaacgacguguggaugggcagaaccaucagcgagacccugagaagcggcuacgagaccuucaaggugaucgagggcuggagcaagcccaacagcaagcugcagaucaacagacaggugaucguggagagaggcaacagaagcggcuacagcggcaucuucagcguggagggcaagagcugcaucaacagaugcuucuacguggagcugaucagaggcagaaaggaggagaccgaggugugguggaccagcaacagcaucgugguguucugcggcaccagcggcaccuacggcaccggcagcuggcccgacggcgccgacaucaaccugaugcccaucuga

SEQ ID NO: 182278 - RNA, 1413 nt, Artificial Sequence
  derived and/or modified CDS sequence (opt4) from neuraminidase__InfluenzaA__AFJ74639
augaaccccaaccagaagaucaucaccaucggcagcaucagcaucgccaucggcaucaucagccugaugcugcagaucggcaacaucaucagcaucugggccagccacagcauccagaccggcagccagaaccacaccggcaucugcaaccagagaaucaucaccuacgagaacaacaccugggugaaccacaccuacgugaacaucaacaacaccaacgugguggccggcaaggacaagaccagcgugacccuggccggcaacagcagccugugcagcaucagcggcugggccaucuacaccaaggacaacagcaucagaaucggcagcaagggcgacguguucgugaucagagagcccuucaucagcugcagccaccuggagugcagaaccuucuuccugacccagggcgcccugcugaacgacaagcacagcaacggcaccgugaaggacagaagccccuacagagcccugaugagcugcccccugggcgaggcccccagccccuacaacagcaaguucgagagcguggccuggagcgccagcgccugccacgacggcaugggcuggcugaccaucggcaucagcggccccgacaacggcgccguggccgugcugaaguacaacggcaucaucaccgagaccaucaagagcuggaagaagagaauccugagaacccaggagagcgagugcgugugcaugaacggcagcugcuucaccaucaugaccgacggccccagcaacggcgccgccagcuacaagaucuucaagaucgagaagggcaaggugaccaagagcaucgagcugaacgcccccagcuuccacuacgaggagugcagcugcuaccccgacaccggcaccgugaugugcgugugcagagacaacuggcacggcagcaacagacccugggugagcuucaaccagaaccuggacuaccagaucggcuacaucugcagcggcguguucggcgacaaccccagacccaaggacggcgagggcagcugcaaccccgugaccguggacggcgccgacggcgugaagggcuucagcuacaaguacggcaacggcguguggaucggcagaaccaagagcaacagacugagaaagggcuucgagaugaucugggaccccaacggcuggaccaacaccgacagcgacuucagcgugaagcaggacgugguggccaucaccgacuggagcggcuacagcggcagcuucgugcagcaccccgagcugaccggccuggacugcaucagacccugcuucuggguggagcuggugagaggccugcccagagagaacaccaccaucuggaccagcggcagcagcaucagcuucugcggcgugaacagcgacaccgccaacuggagcuggcccgacggcgccgagcugcccuucaccaucgacaaguga

SEQ ID NO: 182279 - RNA, 1410 nt, Artificial Sequence
  derived and/or modified CDS sequence (opt4) from neuraminidase__InfluenzaA__AFJ74640
augaaccccaaccagaagaucaucaccaucggcagcgugagccugaccaucagcaccaucugcuucuucaugcagaucgccauccugaucaccaccgugacccugcacuucaagcaguacgaguucaacagcccccccaacaaccaggugaugcugugcgagcccaccaucaucgagagaaacaucaccgagaucguguaccugaccaacaccaccaucgagaaggagaucugccccaagcuggccggcuacagaaacuggagcaagccccagugcaacaucaccggcuucgcccccuucagcaaggacaacagcaucagacugagcgccggcggcgacaucugggugaccagagagcccuacgugagcugcgaccccgacaagugcuaccaguucgcccugggccagggcaccacccugaacaacgugcacagcaacgacaccgugcacgacagaacccccuacagaacccugcugaugaacgagcugggcgugcccuuccaccugggcaccaagcaggugugcaucgccuggagcagcagcagcugccacgacggcaaggccuggcugcacgugugcgugaccggcgacgacgagaacgccaccgccagcuucaucuacaacggcagacugguggacagcaucgugagcuggagcaagaagauccugagaacccaggagagcgagugcgugugcaucaacggcaccugcaccguggugaugaccgacggcagcgccagcggcaaggccgacaccaagauccuguucaucgaggagggcaagaucgugcacaccagcacccugagcggcagcgcccagcacguggaggagugcagcugcuaccccagauaccccggcgugagaugcgugugcagagacaacuggaagggcagcaacagacccaucguggacaucaacaucaaggacuacagcaucgugagcagcuacgugugcagcggccuggugggcgacacccccagaaagaacgacagcagcagcagcagccacugccuggaccccaacaacgaggagggcggccacggcgugaagggcugggccuucgacgacggcaacgacguguggaugggcagaaccaucagcgagaagcugagaagcggcuacgagaccuucaaggugaucgagggcuggagcaaccccaacagcaagcugcagaucaacagacaggugaucguggacaagggcaacagaagcggcuacagcggcaucuucagcguggagggcaagagcugcaucaacagaugcuucuacguggagcugaucagaggcagaaagcaggagaccgaggugcuguggaccagcaacagcaucgugguguucugcggcaccagcggcaccuacggcaccggcagcuggcccgacggcgccgacaucaaccugaugcccaucuga

SEQ ID NO: 182280 - RNA, 1413 nt, Artificial Sequence; identical to SEQ ID NO: 182278
  derived and/or modified CDS sequence (opt4) from neuraminidase__InfluenzaA__AFJ74659

SEQ ID NO: 182281 - RNA, 1413 nt, Artificial Sequence
  derived and/or modified CDS sequence (opt4) from neuraminidase__InfluenzaA__AFJ74679
augaaccccaaccagaagaucaucaccaucggcagcaucagcaucgccaucggcaucaucagccugaugcugcagaucggcaacaucaucagcaucugggccagccacagcauccagaccggcagccagaaccacaccggcaucugcaaccagagaaucaucaccuacgagaacaacaccugggugaaccacaccuacgugaacaucaacaacaccaacgugguggccggcaaggacaagaccagcgugacccuggccggcaacagcagccugugcagcaucagcggcugggccaucuacaccaaggacaacagcaucagaaucggcagcaagggcgacguguucgugaucagagagcccuucaucagcugcagccaccuggagugcagaaccuucuuccugacccagggcgcccugcugaacgacaagcacagcaacggcaccgugaaggacagaagccccuacagagcccugaugagcugcccccugggcgaggcccccagccccuacaacagcaaguucgagagcguggccuggagcgccagcgccugccacgacggcaugggcuggcugaccaucggcaucagcggccccgacaacggcgccguggccgugcugaaguacaacggcaucaucaccgagaccaucaagagcuggaagaagagaauccugagaacccaggagagcgagugcgugugcaugaacggcagcugcuucaccaucaugaccgacggccccagcaacggcgccgccagcuacaagaucuucaagaucgagaagggcaaggugaccaagagcaucgagcugaacgcccccagcuuccacuacgaggagugcagcugcuaccccgacaccggcaccgugaugugcgugugcagagacaacuggcacggcagcaacagacccugggugagcuucaaccagaaccuggacuaccagaucggcuacaucugcagcggcguguucggcgacaaccccagacccaaggacggcgagggcagcugcaaccccgugaccguggacggcgccgacggcgugaagggcuucagcuacaaguacgacaacggcguguggaucggcagaaccaagagcaacagacugagaaagggcuucgagaugaucugggaccccaacggcuggaccaacaccgacagcgacuucagcgugaagcaggacgugguggccaucaccgacuggagcggcuacagcggcagcuucgugcagcaccccgagcugaccggccuggacugcaucagacccugcuucuggguggagcuggugagaggccugcccagagagaacaccaccaucuggaccagcggcagcagcaucagcuucugcggcgugaacagcgacaccgccaacuggagcuggcccgacggcgccgagcugcccuucaccaucgacaaguga

SEQ ID NO: 182282 - RNA, 1410 nt, Artificial Sequence
  derived and/or modified CDS sequence (opt4) from neuraminidase__InfluenzaA__AFJ74680
augaaccccaaccagaagaucaucaccaucggcagcgugagccugaccaucagcaccaucugcuucuucaugcagaucgccauccugaucaccaccgugacccugcacuucaagcaguacgaguucaacagcccccccaacaaccaggugauccugugcgagcccaccaucaucgagagaaacaucaccgagaucguguaccugaccaacaccaccaucgagaaggagaucugccccaagcuggccgaguacagaaacuggagcaagccccagugcaacaucaccggcuucgcccccuucagcaaggacaacagcaucagacugagcgccggcggcgacaucugggugaccagagagcccuacgugagcugcgaccccgacaagugcuaccaguucgcccugggccagggcaccacccugaacaacgugcacagcaacgacaccgugcacgacagaacccccuacagaacccugcugaugaacgagcugggcgugcccuuccaccugggcaccaagcaggugugcaucgccuggagcagcagcagcugccacgacggcaaggccuggcugcacgugugcgugaccggcgacgacgagaacgccaccgccagcuucaucuacaacggcagacugguggacagcaucgugagcuggagcaagaagauccugagaacccaggagagcgagugcgugugcaucaacggcaccugcaccguggugaugaccgacggcagcgccagcggcaaggccgacaccaagauccuguucaucaaggagggcaagaucgugcacaccagcacccugagcggcagcgcccagcacguggaggagugcagcugcuaccccagauaccccggcgugagaugcgugugcagagacaacuggaagggcagcaacagacccaucguggacaucaacaucaaggacuacagcaucgugagcagcuacgugugcagcggccuggugggcgacacccccagaaagaacgacagcagcagcagcagccacugccuggaccccaacaacgaggagggcggccacggcgugaagggcugggccuucgacgacggcaacgacguguggaugggcagaaccaucagcgagaagcugagaagcggcuacgagaccuucaaggugaucgagggcuggagcaaccccaacagcaagcugcagaucaacagacaggugaucguggacagaggcaacagaagcggcuacagcggcaucuucagcguggagggcaagagcugcaucaacagaugcuucuacguggagcugaucagaggcagaaagcaggagaccgaggugcuguggaccagcaacagcaucgugguguucugcggcaccagcggcaccuacggcaccggcagcuggcccgacggcgccgacaucaaccugaugcccaucuga

SEQ ID NO: 182283 - RNA, 1410 nt, Artificial Sequence
  derived and/or modified CDS sequence (opt4) from neuraminidase__InfluenzaA__AFJ74701
augaaccccaaccagaagaucaucaccaucggcagcgugagccugaccaucgccaccaucugcuuccugaugcagaucgccauccuggugaccaccgugacccugcacuucaaccaguacgagugcaacagcccccccaacaaccaggugaugcugugcgagcccaccaucaucgagagaaacaucaccgagaucguguaccugaccaacaccaccaucgagaaggagaucugccccaagcuggccgaguacagaaucuggagcaagccccagugcaacaucaccggcuucgcccccuucagcaaggacaacagcaucagacugagcgccggcggcgacaucugggugaccagagagcccuacgugagcugcgaccccgacaagugcuaccaguucgcccugggccagggcaccacccugaacaacggccacagcaacgacaccgugcacgacagaacccccuacagaacccugcugaugaacgagcugggcgugcccuuccaccugggcaccagacaggugugcauggccuggagcagcagcagcugccacgacggcaaggccuggcugcacgugugcgugaccggcgacgacgagaacgccaccgccagcuucaucuacaacggcagacugguggacagcaucggcagcuggagcaagaagauccugagaacccaggagagcgagugcgugugcaucaacggcaccugcaccguggugaugaccgacggcagcgccagcggcaaggccgacaccaagauccuguucaucgaggagggcaagaucgugcacaucagcacccugagcggcagcgcccagcacguggaggagugcagcugcuaccccagauaccccggcgugagaugcgugugcagagacaacuggaagggcagcaacagacccaucguggacaucaacgugaaggacuacagcaucgugagcagcuacgugugcagcggccuggugggcgacacccccagaaagaacgacagcuucagcagcagccacugccuggaccccaacaacgaggagggcggccacggcgugaagggcugggccuucgacgacggcaacgacguguggaugggcagaaccaucagcgagaagcugagaagcggcuacgagaccuucaaggugaucgagggcuggagcaagcccaacagcaagcugcaggugaacagacaggugaucguggagagaggcaacagaagcggcuacagcggcaucuucagcguggagggcaagagcugcaucaacagaugcuucuacguggagcugaucagaggcagaaaggaggagaccgaggugugguggaccagcaacagcaucgugguguucugcggcaccagcggcaccuacggcaccggcagcuggcccgacggcgccgacaucaaccugaugcccaucuga

SEQ ID NO: 182284 - RNA, 1410 nt, Artificial Sequence
  derived and/or modified CDS sequence (opt4) from neuraminidase__InfluenzaA__AFJ74731
augaaccccaaccagaagaucaucaccaucggcagcgugagccugaccaucagcaccaucugcuucuucaugcagaucgccauccugaucaccaccgugacccugcacuucaagcaguacgaguucaacagcccccccaacaaccaggugaugcugugcgagcccaccaucaucgagagaaacaucaccgagaucguguaccugaccaacaccaccaucgagaaggagaucugccccaagcuggccgaguacagaaacuggagcaagccccagugcaacaucaccggcuucgcccccuucagcaaggacaacagcaucagacugagcgccggcggcgacaucugggugaccagagagcccuacgugagcugcgaccccgacaagugcuaccaguucgcccugggccagggcaccacccugaacaacgugcacagcaacgacaccgugcacgacagaacccccuacagaacccugcugaugaacgagcugggcgugcccuuccaccugggcaccaagcaggugugcaucgccuggagcagcagcagcugccacgacggcaaggccuggcugcacgugugcgugaccggcgacgacgagaacgccaccgccagcuucaucuacaacggcagacugguggacagcaucgugagcuggagcaagaagauccugagaacccaggagagcgagugcgugugcaucaacggcaccugcaccguggugaugaccgacggcagcgccagcggcaaggccgacaccaagauccuguucaucgaggagggcaagaucgugcacaccagcacccugagcggcagcgcccagcacguggaggagugcagcugcuaccccagauaccccggcgugagaugcgugugcagagacaacuggaagggcagcaacagacccaucguggacaucaacaucaaggacuacagcaucgugagcagcuacgugugcagcggccuggugggcgacacccccagaaagaccgacagcagcagcagcagccacugccuggaccccaacaacgaggagggcggccacggcgugaagggcugggccuucgacgacggcaacgacguguggaugggcagaaccaucagcgagaagcugagaagcggcuacgagaccuucaaggugaucgagggcuggagcaaccccaacagcaagcugcagaucaacagacaggugaucguggacagaggcaacagaagcggcuacagcggcaucuucagcguggagggcaagagcugcaucaacagaugcuucuacguggagcugaucagaggcagaaaccaggagaccgaggugcuguggaccagcaacagcaucgugguguucugcggcaccagcggcaccuacggcaccggcagcuggcccgacggcgccgagaucaaccugaugcccaucuga

SEQ ID NO: 182285 - RNA, 1413 nt, Artificial Sequence; identical to SEQ ID NO: 182278
  derived and/or modified CDS sequence (opt4) from neuraminidase__InfluenzaA__AFJ74766

SEQ ID NO: 182286 - RNA, 1410 nt, Artificial Sequence
  derived and/or modified CDS sequence (opt4) from neuraminidase__InfluenzaA__AFJ74767
augaaccccaaccagaagaucaucaccaucggcagcgugagccugaccaucagcaccaucugcuucuucaugcagaucgccauccugaucaccaccgugacccugcacuucaagcaguacgaguucaacagcccccccaacaaccaggugaugcugugcgagcccaccaucaucgagagaaacaucaccgagaucguguaccugaccaacaccaccaucgagaaggagaucugccccaagcuggccgaguacagaaacuggagcaagccccagugcaacaucaccggcuucgcccccuucagcaaggacaacagcaucagacugagcgccggcggcgacaucugggugaccagagagcccuacgugagcugcgaccccgacaagugcuaccaguucgcccugggccagggcaccacccugaacaacgugcacagcaacgacaccgugcacgacagaacccccuacagaacccugcugaugaacgagcugggcgugcccuuccaccugggcaccaagcaggugugcaucgccuggagcagcagcagcugccacgacggcaaggccuggcugcacgugugcgugaccggcgacgacgagaacgccaccgccagcuucaucuacaacggcagacugguggacagcaucgugagcuggagcaagaagauccugagaacccaggagagcgagugcgugugcaucaacggcaccugcaccguggugaugaccgacggcagcgccagcggcaaggccgacaccaagauccuguucaucgaggagggcaagaucgugcacaccagcacccugagcggcagcgcccagcacguggaggagugcagcugcuaccccagauaccccggcgugagaugcgugugcagagacaacuggaagggcagcaacagacccaucguggacaucaacaucaaggacuacagcaucgugagcagcuacgugugcagcggccuggugggcgacacccccagaaagaacgacagcagcagcagcagccacugccuggaccccaacaacgaggagggcggccacggcgugaagggcugggccuucgacgacggcaacgacguguggaugggcagaaccaucagcgagaagcugagaagcggcuacgagaccuucaaggugaucgagggcuggagcaaccccaacagcaagcugcagaucaacagacaggugaucguggacagaggcaacagaagcggcuacagcggcaucuucagcguggagggcaagagcugcaucaacagaugcuucuacguggagcugaucagaggcagaaaccaggagaccgaggugcuguggaccagcaacagcaucgugguguucugcggcaccagcggcaccuacggcaccggcagcuggcccgacggcgccgacaucaaccugaugcccaucuga

SEQ ID NO: 182287 - RNA, 1410 nt, Artificial Sequence; identical to SEQ ID NO: 182286
  derived and/or modified CDS sequence (opt4) from neuraminidase__InfluenzaA__AFJ74783

SEQ ID NO: 182288 - RNA, 1410 nt, Artificial Sequence; identical to SEQ ID NO: 174205
  derived and/or modified CDS sequence (opt4) from neuraminidase__InfluenzaA__AFJ74807

SEQ ID NO: 182289 - RNA, 1410 nt, Artificial Sequence; identical to SEQ ID NO: 174205
  derived and/or modified CDS sequence (opt4) from neuraminidase__InfluenzaA__AFJ74822

SEQ ID NO: 182290 - RNA, 1410 nt, Artificial Sequence; identical to SEQ ID NO: 174774
  derived and/or modified CDS sequence (opt4) from neuraminidase__InfluenzaA__AFJ74834

SEQ ID NO: 182291 - RNA, 1410 nt, Artificial Sequence; identical to SEQ ID NO: 174205
  derived and/or modified CDS sequence (opt4) from neuraminidase__InfluenzaA__AFJ74845

SEQ ID NO: 182292 - RNA, 1413 nt, Artificial Sequence
  derived and/or modified CDS sequence (opt4) from neuraminidase__InfluenzaA__AFJ75039
augaaccccaaccagaagaucaucaccaucggcagcaucagcaucgccaucggcaucaucagccugaugcugcagaucggcaacaucaucagcaucugggccagccacagcauccagaccggcagccagaaccacaccggcaucugcaaccagagaaucaucaccuacgagaacagcaccugggugaacaacaccuacgugaacaucaacaacaccagcgugguggccgagaaggacaagaccagcgugacccuggccggcaacagcagccugugcagcaucagcggcugggccaucuacaccaaggacaacagcaucagaaucggcagcaagggcgacguguucgugaucagagagcccuucaucagcugcagccaccuggagugcagaaccuucuuccugacccagggcgcccugcugaacgacaagcacagcaacggcaccgugaaggacagaagccccuacagagcccugaugagcugcccccugggcgaggcccccagccccuacaacagcaaguucgagagcguggccuggagcgccagcgccugccacgacggcaugggcuggcugaccaucggcaucagcggccccgacaacggcgccguggccgugcugaaguacaacggcaucaucaccgagaccaucaagagcuggaagaagagaauccugagaacccaggagagcgagugcgugugcaugaacggcagcugcuucaccaucaugaccgacggccccagcaacggcggcgccagcuacaagaucuucaagaucgagaagggcaaggugaccaagagcaucgagcugaacgcccccaacuuccacuacgaggagugcagcugcuaccccgacaccggcaccgugaugugcgugugcagagacaacuggcacggcagcaacagacccugggugagcuucaaccagaaccuggacuaccagaucggcuacaucugcagcggcguguucggcgacaaccccagacccaaggacggcgagggcagcugcaaccccgugaccaucgacggcgccgacggcgugaagggcuucagcuacaaguacggcaacggcguguggaucggcagaaccaagagcaacagacugagaaagggcuucgagaugaucugggaccccaacggcuggaccaacaccgacagcgacuucagcgugaagcaggacgugguggccaucaccgacuggagcggcuacagcggcagcuucgugcagcaccccgagcugaccggccuggacugcaucagacccugcuucuggguggagcuggugagaggccugcccagagagaacaccaccaucuggaccagcggcagcagcaucagcuucugcggcgugaacagcgacaccgccaacuggagcuggcccgacggcgccgagcugcccuucaccaucgacaaguga

SEQ ID NO: 182293 - RNA, 1410 nt, Artificial Sequence
  derived and/or modified CDS sequence (opt4) from neuraminidase__InfluenzaA__AFJ75050
augaaccccaaccagaagaucaucaccaucggcagcgugagccugaccaucagcaccaucugcuucuucaugcagaucgccauccugaucaccaccgugacccugcacuucaagcaguacgaguucaacagcccccccaacaaccaggugaugcugugcgagcccaccaucaucgagagaaacaucaccgagaucguguaccugaccaacaccaccaucgagaaggagaucugccccaagcuggccgaguacagaaacuggagcaagccccagugcaacaucaccggcuucgcccccuucagcaaggacaacagcgugagacugagcgccggcggcgacaucugggugaccagagagcccuacgugagcugcgaccccgacaagugcuaccaguucgcccugggccagggcaccacccugaacaacgugcacagcaacgacaccgugcacgacagaacccccuacagaacccugcugaugaacgagcugggcgugcccuuccaccugggcaccaagcaggugugcaucgccuggagcagcagcagcugccacgacggcaaggccuggcugcacgugugcgugaccggcgacgacaagaacgccaccgccagcuucaucuacaacggcagacugguggacagcaucgugagcuggagcaaggagauccugagaacccaggagagcgagugcgugugcaucaacggcaccugcaccguggugaugaccgacggcagcgccagcggcaaggccgacaccaagauccuguucaucguggagggcaagaucgugcacaccagcgcccugagcggcagcgcccagcacguggaggagugcagcugcuaccccagauaccccggcgugagaugcgugugcagagacaacuggaagggcagcaacagacccaucguggacaucaacaucaaggacuacagcaucgugagcagcuacgugugcagcggccuggugggcgacacccccagaaagaacgacagcagcagcagcagccacugccuggaccccaacaacgaggagggcggccacggcgugaagggcugggccuucgacgacggcaacgacguguggaugggcagaaccaucagcgagaagcugagaagcggcuacgagaccuucaaggugaucgagggcuggagcaaccccaacagcaagcugcagaucaacagacaggugaucguggacagaggcaacagaagcggcuacagcggcaucuucagcguggagggcaagagcugcaucaacagaugcuucuacguggagcugaucagaggcagaaaggaggagaccgaggugcuguggaccagcaacagcaucgugguguucugcggcaccagcggcaccuacggcaccggcagcuggcccgacggcgccgacaucaaccugaugcccaucuga

SEQ ID NO: 182294 - RNA, 1410 nt, Artificial Sequence
  derived and/or modified CDS sequence (opt4) from neuraminidase__InfluenzaA__AFJ75094
augaaccccaaccagaagaucaucaccaucggcagcgugagccugaccaucagcaccaucugcuucuucaugcagaucgccauccugaucaccaccgugacccugcacuucaagcaguacgaguucaacagcccccccaacaaccaggugaugcugugcgagcccaccaucaucgagaagaacaucaccgagaucguguaccugaccaacaccaccaucgagaaggagaucugccccaagcuggccgaguacagaaacuggagcaagccccagugcgacaucaccggcuucgcccccuucagcaaggacaacagcaucagacugagcgccggcggcgacaucugggugaccagagagcccuacgugagcugcgaccccgacaagugcuaccaguucgcccugggccagggcaccacccugaacaacgugcacagcaacgacaccgugagagacagaacccccuacagaacccugcugaugaacgagcugggcgugcccuuccaccugggcaccaagcaggugugcaucgccuggagcagcagcagcugccacgacggcaaggccuggcugcacgugugcaucaccggcgacgacaagaacgccaccgccagcuucaucuacaacggcagacugguggacagcaucgugagcuggagcaaggagauccugagaacccaggagagcgagugcgugugcaucaacggcaccugcaccguggugaugaccgacggcagcgccagcggcaaggccgacaccaagauccuguucaucgaggagggcaagaucgugcacaccagcacccugagcggcagcgcccagcacguggaggagugcagcugcuaccccagauaccccggcgugagaugcgugugcagagacaacuggaagggcagcaacagacccaucguggacaucaacaucaaggaccacagcaucgugagcagcuacgugugcagcggccuggugggcgacacccccagaaagaacgacagcagcagcagcagcaacugccuggaccccaacaacgaggagggcggccacggcgugaagggcugggccuucgacgacggcaacgacguguggaugggcagaaccaucagcgagaagagcagacugggcuacgagaccuucaaggugaucgagggcuggagcaaccccaacagcaagcugcagaucaacagacaggugaucguggacagaggcaacagaagcggcuacagcggcaucuucagcguggagggcaagagcugcaucaacagaugcuucuacguggagcugaucagaggcagaaaggaggagaucgaggugcuguggaccagcaacagcaucgugguguucugcggcaccagcggcaccuacggcaccggcagcuggcccgacggcgccgacaucaacaucaugcccaucuga

SEQ ID NO: 182295 - RNA, 1413 nt, Artificial Sequence
  derived and/or modified CDS sequence (opt4) from neuraminidase__InfluenzaA__AFJ75104
augaaccccaaccagaagaucaucaccaucggcagcaucagcaucgccaucggcaucaucagccugaugcugcagaucggcaacaucaucagcaucugggccagccacagcauccagaccggcagccagaaccacaccggcaucugcaaccagagaaucaucaccuacgagaacagcaccugggugaaccacaccuacgugaacaucaacaacaccaacgugguggccggcaaggacaagacccccgugacccuggccggcaacagcagccugugcagcaucagcggcugggccauccacaccaaggacaacagcaucagaaucggcagcaagggcgacguguucgugaucagagagcccuucaucagcugcagccaccuggagugcaagaccuucuuccugacccagggcgcccugcugaacgacaagcacagcaacggcaccgugaaggacagaagccccuacagagcccugaugagcugcccccugggcgaggcccccagccccuacaacagcaaguucgagagcguggccuggagcgccagcgccugccacgacggcaucggcuggcugaccaucggcaucagcggccccgacaacggcgccguggccgugcugaaguacaacggcaucaucaccggcaccaucaagagcuggaagaagcagauccugagaacccaggagagcgagugcgugugcaugaacggcagcugcuucaccaucaugaccgacggccccagcaacggcgccgccagcuacaagaucuucaagaucgagaagggcaaggugaccaagagcauggagcugaacgcccccaacuuccacuacgaggagugcagcugcuaccccgacaccggcaccgugaugugcgugugcagagacaacuggcacggcagcaacagacccugggugagcuucaaccagaaccuggacuaccagaucggcuacaucugcagcggcguguucggcgacaaccccagacccgaggacggcgagggcagcugcaaccccgugaccguggacggcgccaacggcgugaagggcuucagcuacaaguacggcaacggcguguggaucggcagaaccaagagcaacagaaucagaaagggcuucgagaugaucugggaccccaacggcuggaccaacaccgacagcgacuucagcgugaagcaggacaucguggccaucaccgacuggagcggcuacagcggcagcuucgugcagcaccccgagcugaccggccuggacugcaucagacccugcuucuggguggagcuggugagaggccugcccagagagaacaccaccaucuggaccagcggcagcagcaucagcuucugcggcgugaacagcgacaucgccaacuggagcuggcccgacggcgccgagcugcccuucaccaucgacaaguga

SEQ ID NO: 182296 - RNA, 1410 nt, Artificial Sequence; identical to SEQ ID NO: 175944
  derived and/or modified CDS sequence (opt4) from neuraminidase__InfluenzaA__AFJ75114

SEQ ID NO: 182297 - RNA, 1410 nt, Artificial Sequence; identical to SEQ ID NO: 175944
  derived and/or modified CDS sequence (opt4) from neuraminidase__InfluenzaA__AFJ75452

SEQ ID NO: 182298 - RNA, 1410 nt, Artificial Sequence; identical to SEQ ID NO: 175944
  derived and/or modified CDS sequence (opt4) from neuraminidase__InfluenzaA__AFJ75463

SEQ ID NO: 182299 - RNA, 1413 nt, Artificial Sequence; identical to SEQ ID NO: 182295
  derived and/or modified CDS sequence (opt4) from neuraminidase__InfluenzaA__AFJ75552

SEQ ID NO: 182300 - RNA, 1413 nt, Artificial Sequence
  derived and/or modified CDS sequence (opt4) from neuraminidase__InfluenzaA__AFJ75574
augaaccccaaccagaagaucaucaccaucggcagcaucagcaucgccaucggcaucaucagccugaugcugcagaucggcaacaucaucagcaucugggccagccacagcauccagaccggcagccagaaccacaccggcaucugcaaccagagaaucaucaccuacgagaacagcaccugggugaaccacaccuacgugaacaucaacaacaccaacgugguggccggcaaggacaagacccccgugacccuggccggcaacagcagccugugcagcaucagcggcugggccauccacaccaaggacaacagcaucagaaucggcagcaagggcgacguguucgugaucagagagcccuucaucagcugcagccaccuggagugcaagaccuucuuccugacccagggcgcccugcugaacgacaagcacagcaacggcaccgugaaggacagaagccccuacagagcccugaugagcugcccccugggcgaggcccccagccccuacaacagcaaguucgagagcguggccuggagcgccagcgccugccacgacggcaucggcuggcugaccaucggcaucagcggccccgacaacggcgccguggccgugcugaaguacaacggcaucaucaccggcaccaucaagagcuggaagggccagauccugagaacccaggagagcgagugcgugugcaugaacggcagcugcuucaccaucaugaccgacggccccagcaacggcgccgccagcuacaagaucuucaagaucgagaagggcaaggugaccaagagcauggagcugaacgcccccaacuuccacuacgaggagugcagcugcuaccccgacaccggcaccgugaugugcgugugcagagacaacuggcacggcagcaacagacccugggugagcuucaaccagaaccuggacuaccagaucggcuacaucugcagcggcguguucggcgacaaccccagacccgaggacggcgagggcagcugcaaccccgugaccguggacggcgccaacggcgugaagggcuucagcuacaaguacggcaacggcguguggaucggcagaaccaagagcaacagaaucagaaagggcuucgagaugaucugggaccccaacggcuggaccaacaccgacagcgacuucagcgugaagcaggacaucguggccaucaccgacuggagcggcuacagcggcagcuucgugcagcaccccgagcugaccggccuggacugcaucagacccugcuucuggguggagcuggugagaggccugcccagagagaacaccaccaucuggaccagcggcagcagcaucagcuucugcggcgugaacagcgacaucgccaacuggagcuggcccgacggcgccgagcugcccuucaccaucgacaaguga

SEQ ID NO: 182301 - RNA, 1410 nt, Artificial Sequence; identical to SEQ ID NO: 175944
  derived and/or modified CDS sequence (opt4) from neuraminidase__InfluenzaA__AFJ75585

SEQ ID NO: 182302 - RNA, 1410 nt, Artificial Sequence
  derived and/or modified CDS sequence (opt4) from neuraminidase__InfluenzaA__AFJ75596
augaaccccaaccagaagaucaucaccaucggcagcgugagccugaccaucagcaccaucugcuucuucaugcagaccgccauccugaucaccaccgugacccugcacuucaagcaguacgaguucaacagcccccccaacaaccaggugaugcugugcgagcccaccaucaucgagagaaacaucaccgagaucguguaccugaccaacaccaccaucgagaaggagaucugccccaagcuggccgaguacagaaacuggagcaagccccagugcggcaucaccggcuucgcccccuucagcaaggacaacagcaucagacugagcgccggcggcgacaucugggugaccagagagcccuacgugagcugcgaccccgacaagugcuaccaguucgcccugggccagggcaccacccugaacaacgugcacagcaacaacaccgugagagacagaacccccuacagaacccugcugaugaacgagcugggcgugcccuuccaccugggcaccaagcaggugugcaucgccuggagcagcagcagcugccacgacggcaaggccuggcugcacgugugcaucaccggcgacgacaagaacgccaccgccagcuucaucuacaacggcagacugguggacagcaucgugagcuggagcaaggagauccugagaacccaggagagcgagugcgugugcaucaacggcaccugcaccguggugaugaccgacggcagcgccagcggcaaggccgacaccaagauccuguucaucgaggagggcaagaucgugcacaccagcacccugagcggcagcgcccagcacguggaggagugcagcugcuaccccagauaccccggcgugagaugcgugugcagagacaacuggaagggcagcaacagacccaucguggacaucaacaucaaggaccacagcaucgugagcagcuacgugugcagcggccuggugggcgacacccccagaaagaacgacagcagcagcagcagccacugccuggaccccaacaacgaggagggcggccacggcgugaagggcugggccuucgacgacggcaacgacguguggaugggcagaaccaucagcgagaagagcagacugggcuacgagaccuucaaggugaucgagggcuggagcaaccccaagagcaagcugcagaucaacagacaggugaucguggacagaggcaacagaagcggcuacagcggcaucuucagcguggagggcaagagcugcaucaacagaugcuucuacguggagcugaucagaggcagaaaggaggagaccgaggugcuguggaccagcaacagcaucgugguguucugcggcaccagcggcaccuacggcaccggcagcuggcccgacggcgccgacaucaaccugaugcccaucuga

SEQ ID NO: 182303 - RNA, 1410 nt, Artificial Sequence
  derived and/or modified CDS sequence (opt4) from neuraminidase__InfluenzaA__AFJ75607
augaaccccacccagaagaucaucaccaucggcagcgugagccugaccaucagcaccaucugcuucuucaugcagaccgccauccugaucaccaccgugacccugcacuucaagcaguacgaguucaacagcccccccaacaaccaggugaugcugugcgagcccaccaucaucgagagaaacaucaccgagaucguguaccugaccaacaccaccaucgagaaggagaucugccccaagcuggccgaguacagaaacuggagcaagccccagugcgacaucaccggcuucgcccccuucagcaaggacaacagcaucagacugagcgccggcggcgacaucugggugaccagagagcccuacgugagcugcgaccccgagaagugcuaccaguucgcccugggccagggcaccacccugaacaacgugcacagcaacaacaccgugagagacagaacccccuacagaacccugcugaugaacgagcugggcgugcccuuccaccugggcaccaagcaggugugcaucgccuggagcagcagcagcugccacgacggcaaggccuggcugcacgugugcaucaccggcgacgacaagaacgccaccgccagcuucaucuacaacggcagacugguggacagcaucgugagcuggagcaaggagauccugagaacccaggagagcgagugcgugugcaucaacggcaccugcaccguggugaugaccgacggcagcgccagcggcaaggccgacaccaagauccuguucaucgaggagggcaagaucgugcacaccagcaagcugagcggcagcgcccagcacguggaggagugcagcugcuaccccagauaccccggcgugagaugcgugugcagagacaacuggaagggcagcaacagacccaucguggacaucaacaucaaggaccacagcaucgugagcagcuacgugugcagcggccuggugggcgacacccccagaaagaacgacagcagcggcagcagccacugccuggaccccaacaacgaggagggcggccacggcgugaagggcugggccuucgacgacggcaacgacguguggaugggcagaaccaucagcgagaagagcagacugggcuacgagaccuucaaggugaucgagggcuggagcaaccccaagagcaagcugcagaucaacagacaggugaucguggacagaggcaacagaagcggcuacagcggcaucuucagcguggagggcaagagcugcaucaacagaugcuucuacguggagcugaucagaggcagaaaggaggagaccgaggugcuguggaccagcaacagcaucgugguguucugcggcaccagcggcaccuacggcaccggcagcuggcccgacggcgccgacaucaaccugaugcccaucuga

SEQ ID NO: 182304 - RNA, 1410 nt, Artificial Sequence
  derived and/or modified CDS sequence (opt4) from neuraminidase__InfluenzaA__AFJ75633
augaaccccaaccagaagaucaucaccaucggcagcgugagccugaccaucagcaccaucugcuucuucaugcagaucgccauccugaucaccaccgugacccugcacuucaagcaguacgaguucaacagcccccccaacaaccaggugaugcugugcgagcccaccaucaucgagagaaacaucaccgagaucguguaccugaccaacaccaccaucgagaaggagaucugccccaagcuggccgaguacagaaacuggagcaagccccagugcgacaucaccggcuucgcccccuucagcaaggacaacagcaucagacugagcgccggcggcgacaucugggugaccagagagcccuacgugagcugcgaccccgacaagugcuaccaguucgcccugggccagggcaccacccugaacaacgugcacagcaacgacaccgugagagacagaacccccuacagaacccugcugaugaacgagcugggcgugcccuuccaccugggcaccaagcaggugugcaucgccuggagcagcagcagcugccacgacggcaaggccuggcugcacgugugcaucaccggcgacgacaagaacgccaccgccagcuucaucuacaacggcagacugguggacagcguggugagcuggagcaaggacauccugagaacccaggagagcgagugcgugugcaucaacggcaccugcaccguggugaugaccgacggcagcgccagcggcaaggccgacaccaagauccuguucaucgaggagggcaagaucgugcacaccagcacccugagcggcagcgcccagcacguggaggagugcagcugcuaccccagauaccccggcgugagaugcgugugcagagacaacuggaagggcagcaacagacccaucguggacaucaacaucaagaaccacagcaucgugagcagcuacgugugcagcggccuggugggcgacacccccagaaagaacgacagcagcagcagcagccacugccuggaccccaacaacgaggagggcggccacggcgugaagggcugggccuucgacgacggcaacgacguguggaugggcagaaccaucagcgagaagagcagacugggcuacgagaccuucaaggugaucgagggcuggagcaaccccaagagcaagcugcagaucaacagacaggugaucguggacagaggcaacagaagcggcuacagcggcaucuucagcguggagggcaagagcugcaucaacagaugcuucuacguggagcugaucagaggcagaaaggaggagaccgaggugcuguggaccagcaacagcaucgugguguucugcggcaccagcggcaccuacggcaccggcagcuggcccgacggcgccgacaucaaccugaugcccaucuga

SEQ ID NO: 182305 - RNA, 1413 nt, Artificial Sequence; identical to SEQ ID NO: 177521
  derived and/or modified CDS sequence (opt4) from neuraminidase__InfluenzaA__AFJ75654

SEQ ID NO: 182306 - RNA, 1410 nt, Artificial Sequence; identical to SEQ ID NO: 175944
  derived and/or modified CDS sequence (opt4) from neuraminidase__InfluenzaA__AFJ75665

SEQ ID NO: 182307 - RNA, 1413 nt, Artificial Sequence
  derived and/or modified CDS sequence (opt4) from neuraminidase__InfluenzaA__AFJ75676
augaaccccaaccagaagaucaucaccaucggcagcaucagcaucgccaucggcaucaucagccugaugcugcagaucggcaacaucaucagcaucugggccagccacagcauccagaccggcagccagaaccacaccggcaucugcaaccagagaaucaucaccuacgagaacagcaccugggugaaccacaccuacgugaacaucaacaacaccaacgugguggccggcaaggacaagacccccgugacccuggccggcaacagcagccugugcagcaucagcggcugggccauccacaccaaggacaacagcaucagaaucggcagcaagggcgacguguucgugaucagagagcccuucaucagcugcagccaccuggagugcaagaccuucuuccugacccagggcgcccugcugaacgacaagcacagcaacggcaccgugaaggacagaagccccuacagagcccugaugagcugcccccugggcgaggcccccagccccuacaacagcaaguucgagagcguggccuggagcgccagcgccugccacgacggcaucggcuggcugaccaucggcaucagcggccccgacaacggcgccguggccgugcugaaguacaacggcaucaucaccggcaccaucaagagcuggaagaagcagauccugagaacccaggagagcgagugcgugugcaugaacggcagcugcuucaccaucaugaccgacggccccagcaacggcgccgccagcuacaagaucuucaagaucgagaagggcaaggugaccaagagcauggagcugaacgcccccaacuuccacuacgaggagugcagcugcuaccccgacaccggcaccgugaugugcgugugcagagacaacuggcacggcagcaacagacccugggugagcuucaaccagaaccuggacuaccagaucggcuacaucugcagcggcguguucggcgacaaccccagacccaaggacggcgagggcagcugcaaccccgugaccguggacggcgccaacggcgugaagggcuucagcuacaaguacggcaacggcguguggaucggcagaaccaagagcaacagaaucagaaagggcuucgagaugaucugggaccccaacggcuggaccaacaccgacagcgacuucagcgugaagcaggacaucguggccaucaccgacuggagcggcuacagcggcagcuucgugcagcaccccgagcugaccggccuggacugcaucagacccugcuucuggguggagcuggugagaggccugcccagagagaacaccaccaucuggaccagcggcagcagcaucagcuucugcggcgugaacagcgacaucgccaacuggagcuggcccgacggcgccgagcugcccuucaccaucgacaaguga

SEQ ID NO: 182308 - RNA, 1413 nt, Artificial Sequence; identical to SEQ ID NO: 177521
  derived and/or modified CDS sequence (opt4) from neuraminidase__InfluenzaA__AFJ75687

SEQ ID NO: 182309 - RNA, 1410 nt, Artificial Sequence; identical to SEQ ID NO: 176798
  derived and/or modified CDS sequence (opt4) from neuraminidase__InfluenzaA__AFJ76122

SEQ ID NO: 182310 - RNA, 1410 nt, Artificial Sequence; identical to SEQ ID NO: 181376
  derived and/or modified CDS sequence (opt4) from neuraminidase__InfluenzaA__AFJ76134

SEQ ID NO: 182311 - RNA, 1410 nt, Artificial Sequence; identical to SEQ ID NO: 176798
  derived and/or modified CDS sequence (opt4) from neuraminidase__InfluenzaA__AFJ76146

SEQ ID NO: 182312 - RNA, 1410 nt, Artificial Sequence; identical to SEQ ID NO: 176798
  derived and/or modified CDS sequence (opt4) from neuraminidase__InfluenzaA__AFJ76159

SEQ ID NO: 182313 - RNA, 1410 nt, Artificial Sequence; identical to SEQ ID NO: 176798
  derived and/or modified CDS sequence (opt4) from neuraminidase__InfluenzaA__AFJ76173

SEQ ID NO: 182314 - RNA, 1410 nt, Artificial Sequence; identical to SEQ ID NO: 176798
  derived and/or modified CDS sequence (opt4) from neuraminidase__InfluenzaA__AFJ76191

SEQ ID NO: 182315 - RNA, 1413 nt, Artificial Sequence
  derived and/or modified CDS sequence (opt4) from neuraminidase__InfluenzaA__AFJ76192
augaaccccaaccagaagaucaucaccaucggcagcaucagcaucgccaucggcaucaucagccugauggugcagaucggcaacaucaucagcaucugggccagccacagcauccagaccggcauccagaacaacaccggcaucugcaaccagagaaucaucaccuacgagaacagcaccugggugaaccacaccuacgugaacaucaacaacaccaacgugguggccggcgaggacaagaccagcgugacccuggccggcaacagcagccugugcagcaucagcggcugggccaucuacaccaaggacaacagcaucagaaucggcagcaagggcgacguguucgugaucagagagcccuucaucagcugcagccaccuggagugcagaaccuucuuccugacccagggcgcccugcugaacgacaagcacagcaacggcaccgugaaggacagaagccccuacagagcccugaugagcugcccccugggcgaggcccccagccccuacaacagcaaguucgagagcguggccuggagcgccagcgccugccacgacggcaugggcuggcugaccaucggcaucagcggccccgacaacggcgccguggccgugcugaaguacaacggcaucaucaccggcaccaucaagagcuggaagaagcagauccugagaacccaggagagcgagugcgugugcaugaacggcagcugcuucaccaucaugaccgacggccccagcaacaaggccgccagcuacaagaucuucaagaucgagaagggcaaggugaccaagagcaucgagcugaacgcccccaacuucuacuacgaggagugcagcugcuaccccgacaccggcaucgugaugugcgugugcagagacaacuggcacggcagcaacagacccugggugagcuucaaccagaaccuggacuaccagaucggcuacaucugcagcggcguguucggcgacaaccccagacccgaggacggcgagggcagcugcaaccccgugaccguggacggcgccaacggcgugaagggcuucagcuacaaguacggcaacggcguguggaucggcagaaccaagagcaacagacugagaaagggcuucgagaugaucugggaccccaacggcuggaccaacaccgacagcgacuucagcgugaagcaggacgugguggccaucaccgacuggagcggcuacagcggcagcuucgugcagcaccccgagcugaccggccuggacugcaucagacccugcuucuggguggagcuggugagaggccugcccagagagaacaccaccaucuggaccagcggcagcagcaucagcuucugcggcgugaacagcgacaccgccaacuggagcuggcccgacggcgccgagcugcccuucaccaucgacaaguga

SEQ ID NO: 182316 - RNA, 1410 nt, Artificial Sequence; identical to SEQ ID NO: 176798
  derived and/or modified CDS sequence (opt4) from neuraminidase__InfluenzaA__AFJ76206

SEQ ID NO: 182317 - RNA, 1410 nt, Artificial Sequence
  derived and/or modified CDS sequence (opt4) from neuraminidase__InfluenzaA__AFJ76216
augaaccccaaccagaagaucaucaccaucggcagcgugagccugaccaucgccaccaucugcuuccugaugcagaucgccauccuggugaccaccgugacccugcacuucaagcagcacgagugcaacagcccccccaacaaccaggugaugcugugcgagcccaccaucaucaagagaaacaucaccgagaucguguaccugaccaacaccaccaucgagaaggagaucugccccaagcuggccgaguacagaaacuggagcaagccccagugcaacaucaccggcuucgcccccuucagcaaggacaacagcaucagacugagcgccggcggcgacaucugggugaccagagagcccuacgugagcugcgaccccgacaagugcuaccaguucgcccugggccagggcaccacccugaacaacggccacagcaacgacaccgugcacgacagaacccccuacagaacccugcugaugaacgagcugggcgugcccuuccaccugggcaccagacaggugugcaucgccuggagcagcagcagcugccacgacggcaaggccuggcugcacgugugcgugaccggcgacgacaagaacgccaccgccagcuucaucuacaacggcagacugguggacagcaucggcagcuggagcaagaagauccugagaacccaggagagcgagugcgugugcaucaacggcaccugcaccguggugaugaccgacggcagcgccagcggcaaggccgacaccaagauccuguucaucgaggagggcaagaucgugcacaucagcacccugagcggcagcgcccagcacguggaggagugcagcugcuaccccagauaccccggcgugagaugcgugugcagagacaacuggaagggcagcaacagacccaucguggacaucaacgugaaggacuacagcaucgugagcagcuacgugugcagcggccuggugggcgacacccccagaaagaacgacagcuucagcagcagccacugccuggaccccaacaacgaggagggcggccacggcgugaagggcugggccuucgacgacggcaacgacguguggaugggcagaaccaucagcgagaagcugagaagcggcuacgagaccuucaaggugaucgagggcuggagcaagcccaacagcaagcugcagaucaacagacaggugaucguggagagaggcaacagaagcggcuacagcggcaucuucagcguggagggcaagagcugcaucaacagaugcuucuacguggagcugaucagaggcagaaaggaggagaccgaggugugguggaccagcaacagcaucgugguguucugcggcaccagcggcaccuacggcaccggcagcuggcccgacggcgccgacaucaaccugaugcccaucuga

SEQ ID NO: 182318 - RNA, 1410 nt, Artificial Sequence
  derived and/or modified CDS sequence (opt4) from neuraminidase__InfluenzaA__AFJ77411
augaaccccaaccagaagaucaucaccaucggcagcgugagccugaccaucgccaccaucugcuuccugaugcagaucgugauccuggugaccaccgugacccugcacuucaagcaguacgagugcaacagcccccccaacaaccaggugaugcugugcgagcccaccaucaucgagagaaacaucaccgagaucguguaccugaccaacaccaccaucgagaaggagaucugccccaagcuggccgaguacagaaacuggagcaagccccagugcaagaucaccggcuucgcccccuucagcaaggacaacagcaucagacugagcgccggcggcgacaucugggugaccagagagcccuacgugagcugcgaccccggcaagugcuaccaguucgcccugggccagggcaccacccugaacaacagacacagcaacgacaccgugcacgacagaacccccuacagaacccugcugaugaacgagcugggcgugcccuuccaccugggcaccaagcaggugugcaucgccuggagcagcagcagcugccacgacggcaaggccuggcugcacgugugcgugaccggccacgacgagaacgccaccgccagcuucaucuacgacggcagacugguggacagcaucggcagcuggagcaagaacauccugagaacccaggagagcgagugcgugugcaucaacggcaccugcaccguggugaugaccgacggcagcgccagcgagagagccgacaccaagauccuguucaucgaggagggcaagaucgugcacaucagcccccugagcggcagcgcccagcacguggaggagugcagcugcuaccccagauaccccggcgugagaugcgugugcagagacaacuggaagggcagcaacagacccaucguggacaucaacgugaaggacuacagcaucgugagcagcuacgugugcagcggccuggugggcgacacccccagaaagaacgacagcagcagcagcagcuacugccugaaccccaacaacgaggagggcggccacggcgugaagggcugggccuucgacgacggcaacgacguguggaugggcagaaccaucagcgagaagcugagaagcggcuacgagaccuucaaggugaucggcggcuggagcaagcccaacagcaagcugcagaucaacagacaggugaucguggacagaggcaacagaagcggcuacagcggcaucuucagcguggagggcaagagcugcgugaacagaugcuucuacguggagcugaucagaggcagaaagcaggagaccgaggugugguggaccagcaacagcaucgugguguucugcggcaccagcggcaccuacggcaccggcagcuggcccgacggcgccgacaucaaccugaugcccaucuga

SEQ ID NO: 182319 - RNA, 1410 nt, Artificial Sequence
  derived and/or modified CDS sequence (opt4) from neuraminidase__InfluenzaA__AFJ77422
augaaccccaaccagaagaucaucaccaucggcagcgugagccugaccaucgccaccaucugcuuccugaugcagaucgccauccuggugaucaccgugacccugcacuucaagcaguacgagugcaacagcccccccaacaaccaggugaugcugugcgagcccaccaucaucgagagaaacaucaccgagaucguguaccugaccaacaccaccaucgagaaggagaucugccccaagcuggccgaguacagaaacuggagcaagccccagugcaagaucaccggcuucgcccccuucagcaaggacaacagcaucagacugagcgccggcggcgacaucugggugaccagagagcccuacgugagcugcgaccccgacaagugcuaccaguucgcccugggccagggcaccacccugaacaacagacacagcaacgacaccgugcacgacagaacccccuacagaacccugcugaugaacgagcugggcgugcccuuccaccugggcaccaagcaggugugcaucgccuggagcagcagcagcugccacgacggcaaggccuggcugcacgugugcgugaccggccacgacgagaacgccaccgccagcuucaucuacgacggcagacugguggacagcaucggcagcuggagcaagaagauccugagaacccaggagagcgagugcgugugcaucaacggcaccugcaccguggugaugaccgacggcagcgccagcggcagagccgacaccaagauccuguucaucgaggagggcaagaucgugcacaucagcccccugagcggcagcgcccagcacguggaggagugcagcugcuaccccagauacagcggcgugagaugcgugugcagagacaacuggaagggcagcaacagacccaucguggacaucaacgugaaggacuacagcaucgugagcagcuucgugugcagcggccuggugggcgacacccccagaaagaacgacagcagcagcagcagccacugccugaaccccaacaacgaggagggcggccacggcgugaagggcugggccuucgacgacggcaacgacguguggaugggcagaaccaucagcgagaagcugagaagcggcuacgagaccuucaaggugaucggcggcuggagcaagcccaacagcaagcugcagaucaacagacaggugaucguggacagaggcaacagaagcggcuacagcggcaucuucagcguggagggcaagagcugcaucaacagaugcuucuacguggagcugaucagaggcagaaagcaggagaccgaggugugguggaccagcaacagcaucgugguguucugcggcaccagcggcaccuacggcaccggcagcuggcccgacggcgccgacaucaaccugaugcccaucuga

SEQ ID NO: 182320 - RNA, 1410 nt, Artificial Sequence
  derived and/or modified CDS sequence (opt4) from neuraminidase__InfluenzaA__AFJ77433
augaaccccaaccagaagaucaucaccaucggcagcgugagccugaccaucgccaccaucugcuuccugaugcagaucgugauccuggugaccaccgugacccugcacuucaagcaguacgagugcaacagcccccccaacaaccaggugaugcugugcgagcccaccaucaucgagagaaacaucaccgagaucguguaccugaccaacaccaccaucgagaaggagaucugccccaagcuggccgaguacagaaacuggagcaagccccagugcaagaucaccggcuucgcccccuucagcaaggacaacagcaucagacugagcgccggcggcgacaucugggugaccagagagcccuacgugagcugcgaccccggcaagugcuaccaguucgcccugggccagggcaccacccugaacaacagacacagcaacgacaccgugcacgacagaacccccuacagaacccugcugaugaacgagcugggcgugcccuuccaccugggcaccaagcaggugugcaucgccuggagcagcagcagcugccacgacggcaaggccuggcugcacgugugcgugaccggccacgacgagaacgccaccgccagcuucaucuacgacggcagacugguggacagcaucggcagcuggagcaagaacauccugagaacccaggagagcgagugcgugugcaucaacggcaccugcaccguggugaugaccgacggcagcgccagcgagagagccgacaccaagauccuguucaucgaggagggcaagaucgugcacaucagcccccugagcggcagcgcccagcacguggaggagugcagcugcuaccccagauaccccggcgugagaugcgugugcagagacaacuggaagggcagcaacagacccaucguggacaucaacgugaaggacuacagcaucgugagcagcuacgugugcagcggccuggugggcgacacccccagaaagaccgacagcagcagcagcagcgacugccugaaccccaacaacgaggagggcggccacggcgugaagggcugggccuucgacgacggcaacgacguguggaugggcagaaccaucagcgagaagcugagaagcggcuacgagaccuucaaggugaucggcggcuggagcaagcccaacagcaagcugcagaucaacagacaggugaucguggacagaggcaacagaagcggcuacagcggcaucuucagcguggagggcaagagcugcgugaacagaugcuucuacguggagcugaucagaggcagaaagcaggagaccgaggugugguggaccagcaacagcaucgugguguucugcggcaccagcggcaccuacggcaccggcagcuggcccgacggcgccgacaucaaccugaugcccaucuga

SEQ ID NO: 182321 - RNA, 1410 nt, Artificial Sequence
  derived and/or modified CDS sequence (opt4) from neuraminidase__InfluenzaA__AFJ77443
augaaccccaaccagaagaucaucaccaucggcagcgugagccugaccaucgccaccaucugcuuccugaugcagaucgccauccuggugaucacccugacccugcacuucaagcaguacgagugcaacagcccccccaacaaccaggugaugcugugcgagcccaccaucaucgagagaaacaucaccgagaucguguaccugaccaacaccaccaucgagaaggagaucugccccaagcuggccgaguacagaaacuggagcaagccccagugcaagaucaccggcuucgcccccuucagcaaggacaacagcaucagacugagcgccggcggcgacaucugggugaccagagagcccuacgugagcugcgaccccggcaagugcuaccaguucgcccugggccagggcaccacccugaacaacagacacagcaacgacaccgugcacgacagaacccccuacagaacccugcugaugaacgagcugggcgugcccuuccaccugggcaccaagcaggugugcaucgccuggagcagcagcagcugccacgacggcaaggccuggcugcacgugugcgugaccggccacaacgagaacgccaccgccagcuucaucuacgacggcagacugguggacagcaucggcagcuggagcaagaacauccugagaacccaggagagcgagugcgugugcaucaacggcaccugcaccguggugaugaccgacggcagcgccagcggcagagccgacaccaagauccuguucaucgaggagggcaagaucgugcacaucagcccccugagcggcagcgcccagcacguggaggagugcagcugcuaccccagauaccccggcgugagaugcgugugcagagacaacuggaagggcagcaacagacccaucguggacaucaacgugaaggacuucagcaucgugagcagcuacgugugcagcggccuggugggcgacacccccagaaagaacgacagcagcagcagcagccacugccugaaccccaacaacgaggagggcggcaacggcgugaagggcugggccuucgacgacggcaacgacguguggaugggcagaaccaucagcgagaagcugagaagcggcuacgagaccuucaaggugaucggcggcuggagcaagcccaacagcaagcugcagaucaacagacaggugaucguggacagaggcaacagaagcggcuacagcggcaucuucagcguggagggcaagagcugcaucaacagaugcuucuacguggagcugaucagaggcagaaagcaggagaccgaggugugguggaccagcaacagcaucgugguguucugcggcaccagcggcaccuacggcaccggcagcuggcccgacggcgccgacaucaaccugaugcccaucuga

SEQ ID NO: 182322 - RNA, 1410 nt, Artificial Sequence
  derived and/or modified CDS sequence (opt4) from neuraminidase__InfluenzaA__AFJ77465
augaaccccaaccagaagaucaucaccaucggcagcgugagccugaccaucgccaccaucugcuuccugaugcagaucgccauccuggugaccaccgugacccugcacuucaagcaguacgagugcaaccccccccccaacaaccaggugaugcugugcgagcccaccaucaucgagagaaacaucaccgagaucguguaccugaccaacaccaccaucgagaaggagaucugccccaagcuggccgaguacagaaacuggagcaagccccagugcaagaucaccggcuucgcccccuucagcaaggacaacagcaucagacugagcgccggcggcgacaucugggugaccagagagcccuacgugagcugcgaccccgacaagugcuaccaguucgcccugggccagggcaccacccugaacaacagacacagcaacgacaccgugcacgacagaacccccuacagaacccugcugaugaacgagcugggcgugcccuuccaccugggcaccaagcaggugugcaucgccuggagcagcagcagcugccacgacggcaaggccuggcugcacgugugcgugaccggccacgacgagaacgccaccgccagcuucaucuacgacggcagacugguggacagcaucggcagcuggagcaagaagauccugagaacccaggagagcgagugcgugugcaucaacggcaccugcaccguggugaugaccgacggcagcgccagcggcagagccgacaccaagauccuguucaucgaggagggcaagaucgugcacaucagcccccugagcggcagcgcccagcacguggaggagugcagcugcuaccccagauaccccggcgugagaugcgugugcagagacaacuggaagggcagcaacagacccaucguggacaucaacgugaagaacuacagcaucgugagcagcuacgugugcagcggccuggugggcgacacccccagaaagaacgacagcagcagcagcagccacugccugaaccccaacaacgaggagggcggccacggcgugaagggcugggccuucgacgacggcaacgacguguggaugggcagaaccaucagcgagaagcugagaagcggcuacgagaccuucaaggugaucgagggcuggagcaagcccaacagcaagcugcagaucaacagacaggugaucguggacagaggcaacagaagcggcuacagcggcaucuucagcguggagggcaagagcugcaucaacagaugcuucuacguggagcugaucagaggcagaaagcaggagaccgaggugugguggaccagcaacagcaucgugguguucugcggcaccagcggcaccuacggcaccggcagcuggcccgacggcgccgacaucaaccugaugcccaucuga

SEQ ID NO: 182323 - RNA, 1410 nt, Artificial Sequence
  derived and/or modified CDS sequence (opt4) from neuraminidase__InfluenzaA__AFJ77476
augaaccccaaccagaagaucaucaccaucggcagcgugagccugaccaucgccaccaucugcuuccugaugcagaucgccauccuggugaccaccgugacccugcacuucaagcaguacgagugcaacagccugcccaacaaccaggugaugcugugcgagcccaccaucaucgagagaaacaucaccgagaucguguaccugaccaacaccaccaucgagaaggagaucugccccaagcuggccgaguacagaaacuggagcaagccccagugcaagaucaccggcuucgcccccuucagcaaggacaacagcaucagacugagcgccggcggcgacaucugggugaccagagagcccuacgugagcugcgaccccgacaagugcuaccaguucgcccugggccagggcaccacccugaacaacagacacagcaacgacaccgugcacgacagaacccccuacagaacccugcugaugaacgagcugggcgugcccuuccaccugggcaccaagcaggugugcaucgccuggagcagcagcagcugccacgacggcaaggccuggcugcacgugugcgugaccggccacgacgagaacgccaccgccagcuucaucuacggcggcagacugguggacagcaucggcagcuggagcaagaagauccugagaacccaggagagcgagugcgugugcaucaacggcaccugcaccguggugaugaccgacggcagcgccagcggcagagccgacaccaagauccuguucaucgaggagggcaagaucauccacaucagccagcugagcggcagcgcccagcacguggaggagugcagcugcuaccccagauaccccggcgugagaugcgugugcagagacaacuggaagggcagcaacagacccaucguggacaucaacgugaaggacuacagcaucgugagcagcuacgugugcagcggccuggugggcgacacccccagaaagaacgacagcagcagcagcagccacugccuggaccccaacaacgaggagggcggccacggcgugaagggcugggccuucgacgacggcaacgacguguggaugggcagaaccaucagcgagaaguucagaagcggcuacgagaccuucaaggugaucgagggcuggagcaagcccaacagcaagcugcagaucaacagacagaucaucguggacagagacaacagaagcggcuacagcggcaucuucagcguggagggcaagagcugcaucaacagaugcuucuacguggagcugaucagaggcagaaagcaggagaccgaggugugguggaccagcaacagcaucgugguguucugcggcaccagcggcaccuacggcaccggcagcuggcccgacggcgccgacaucaaccugaugcccaucuga

SEQ ID NO: 182324 - RNA, 1410 nt, Artificial Sequence; identical to SEQ ID NO: 174375
  derived and/or modified CDS sequence (opt4) from neuraminidase__InfluenzaA__AFJ77487

SEQ ID NO: 182325 - RNA, 1410 nt, Artificial Sequence
  derived and/or modified CDS sequence (opt4) from neuraminidase__InfluenzaA__AFJ77498
augaaccccaaccagaagaucaucaccaucggcagcgugagccugaccaucgccaccaucugcuuccugaugcagaucgccauccuggugaccaccgugacccugcacuucaagcaguacgagugcaacagcccccccaacaaccaggugaugcugugcgagcccaccaucaucgagagaaacaucaccgagaucguguaccugaccaacaccaccaucgagaaggagaucugccccaagcuggccgaguacagaaacuggagcaagccccagugcaagaucaccggcuucgcccccuucagcaaggacaacagcaucagacugagcgccggcggcgacaucugggugaccagagagcccuacgugagcugcgaccccgacaagugcuaccaguucgcccugggccagggcaccacccugaacaacagacacagcaacgacaccgugcacgacagaacccccuacagaacccugcugaugaacgagcugggcgugcccuuccaccugggcaccaagcaggugugcaucgccuggagcagcagcagcugccacgacggcaaggccuggcugcacgugugcgugaccggccacgacgagaacgccaccgccagcuucaucuacgacggcagacugguggacagcaucggcagcuggagcaagaagauccugagaacccaggagagcgagugcgugugcaucaacggcaccugcaccguggugaugaccgacggcagcgccagcggcagagccgacaccaagauccuguucaucgaggagggcaagaucgugcacaccagcaagcugagcggcagcgcccagcacguggaggagugcagcugcuaccccagauaccccggcgugagaugcgugugcagagacaacuggaagggcagcaacagacccaucguggacaucaacgugaaggacuacagcaucaucagcagcuacgugugcagcggccuggugggcgacacccccagaaagaacgacagcagcagcagcagccacugccuggaccccaacaacgaggagggcggccacggcgugaagggcugggccuucgacgacggcaacgacguguggaugggcagaaccaucagcgagaagagcagaagcggcuacgagaccuucaaggugaucgagggcuggagcaagcccaacagcaagcugcagaucaacagacaggugaucguggagagaggcaacaugagcggcuacagcggcaucuucagcguggagggcaagagcugcaucaacagaugcuucuacguggagcugaucagaggcagaaagcaggagaccgaggugugguggaccagcaacagcaucgugguguucugcggcaccagcggcaccuacggcaccggcagcuggcccgacggcgccgacaucaaccugaugcccaucuga

SEQ ID NO: 182326 - RNA, 1410 nt, Artificial Sequence; identical to SEQ ID NO: 174375
  derived and/or modified CDS sequence (opt4) from neuraminidase__InfluenzaA__AFJ77509

SEQ ID NO: 182327 - RNA, 1410 nt, Artificial Sequence
  derived and/or modified CDS sequence (opt4) from neuraminidase__InfluenzaA__AFJ77520
augaaccccaaccagaagaucaucaccaucggcagcgugagccugaccaucgccaccaucugcuuccugaugcagaucgccauccuggugaccaccgugacccugcacuucaagcaguacgagugcaacagcccccccaacaaccaggugaugcugugcgagcccaccaucaucgagagaaacaucaccgagaucguguaccugaccaacaccaccaucgagaaggagaucugccccaagcuggccgaguacagaaacuggagcaagccccagugcaacaucaccggcuucgcccccuucagcaaggacaacagcaucagacugagcgccggcggcgacaucugggugaccagagagcccuacgugagcugcgaccccgacaagugcuaccaguucgcccugggccagggcaccacccugaacaacggccacagcaacgacaccgugcacgacagaacccccuacagaacccugcugaugaacgagcugggcgugcccuuccaccugggcaccaagcaggugugcaucgccuggagcagcagcagcugccacgacggcaaggccuggcugcacgugugcgugaccggcgacgacgagaacgccaccgccagcuucaucuacaacggcagacugguggacagcaucggcagcuggagcaagaagauccugagaacccaggagagcgagugcgugugcaucaacggcaccugcaccguggugaugaccgacggcagcgccagcggcaaggccgacaccaagauccuguucaucgaggagggcaagaucgugcacaccagcagccugagcggcagcgcccagcacguggaggagugcagcugcuaccccagauaccccggcgugagaugcgugugcagagacaacuggaagggcagcaacagacccaucguggacaucaacgugaaggacuacagcaucgugagcagcuacgugugcagcggccuggugggcgacacccccagaaagaacgacagcagcagcagcagccacugccuggaccccaacaacgaggagggcggccacggcgugaagggcugggccuucgacgacggcaacgacguguggaugggcagaaccaucagcgagaagcugagaagcggcuacgagaccuucaaggugaucgagggcuggagcaagcccaacagcaagcugcagaucaacagacaggugaucguggacagaggcaacagaagcggcuacagcggcaucuucagcguggagggcaagagcugcaucaacagaugcuucuacguggagcugaucagaggcagaaagcaggagaucgaggugcuguggaccagcaacagcaucgugguguucugcggcaccagcggcaccuacggcaccggcagcuggcccgacggcgccgacaucaaccugaugcccaucuga

SEQ ID NO: 182328 - RNA, 1410 nt, Artificial Sequence
  derived and/or modified CDS sequence (opt4) from neuraminidase__InfluenzaA__AFJ77531
augaaccccaaccagaagaucaucaccaucggcagcgugagccugaccaucaccaccaucugcuuccugaugcagaucgccauccuggugaucaccgugacccugcacuucaagcagugcgagugcaacagcccccccaacaaccaggugaugcugugcgagcccaccaucaucgagagaaacaucaccgagaucguguaccugaccaacaccaccaucgagaaggagaucugccccaagcuggccgaguacagaaacuggagcaagccccagugcaaggugaccggcuucgcccccuucagcaaggacaacagcaucagacugagcgccggcggcgacaucugggugaccagagagcccuacgugagcugcgaccccggcaagugcuaccaguucgcccugggccagggcaccacccugaacaacagacacagcaacgacaccgugcacgacagaacccccuacagaacccugcugaugaacgagcugggcgugcccuuccaccugggcaccaagcaggugugcaucgccuggagcagcagcagcugccacgacggcaaggccuggcugcacgugugcgugaccggccacaacgagaacgccaccgccagcuucaucuacgacggcagacugguggacagcaucggcagcuggagcaagaacauccugagaacccaggagagcgagugcgugugcaucaacggcaccugcaccguggugaugaccgacggcagcgccagcggcagagccgacaccaagauccuguucaucgaggagggcaagaucgugcacaucagcccccugagcggcagcgcccagcacguggaggagugcagcugcuaccccagauaccccggcgugagaugcgugugcagagacaacuggaagggcagcaacagacccaucguggacaucaacgugaaggacuacagcaucgugagcagcuacgugugcagcggccuggugggcgacacccccagaaagaacgacagcagcagcagcagcuacugccuggaccccaacaacgaggagggcggccacggcgugaagggcugggccuucgacgacggcaacgacguguggaugggcagaaccaucagcgagaagcugagaagcggcuacgagaccuucaaggugaucggcggcuggagcaagcccaacagcaagcugcagaucaacagacaggugaucguggacagaggcaacagaagcggcuacagcggcaucuucagcguggagggcaagagcugcaucaacagaugcuucuacguggagcugaucagaggcagaaagcaggagaccgaggugugguggaccagcaacagcaucgugguguucugcggcaccagcggcaccuacggcaccggcagcuggcccgacggcgccgacaucaaccugaugcccaucuga

SEQ ID NO: 182329 - RNA, 1410 nt, Artificial Sequence
  derived and/or modified CDS sequence (opt4) from neuraminidase__InfluenzaA__AFJ77542
augaaccccaaccagaagaucaucaccaucggcagcgugagccugaccaucagcaccaucugcuuccugaugcagaucgccauccuggugaccaccgugacccugcacuucaagcaguacgagugcaacagcccccccaacaaccaggugaugcugugcgagcccaccaucaucgagagaaacaucaccgagaucguguaccugaccaacaccaccaucgagaaggagaucugccccaagcuggccgaguacagaaacuggagcaagccccagugcaacaucaccggcuucgcccccuucagcaaggacaacagcaucagacugagcgccggcggcgacaucugggugaccagagagcccuacgugagcugcgaccccgacaagugcuaccaguucgcccugggccagggcaccacccugaacaacggccacagcaacgacaccgugcacgacagaacccccuacagaacccugcugaugaacgagcugggcgugcccuuccaccugggcaccaagcaggugugcaucgccuggagcagcagcagcugccacgacggcaaggccuggcugcacgugugcgugaccggcgacgacgagaacgccaccgccagcuucaucuacaacggcagacugguggacagcaucggcagcuggagcaagaagauccugagaacccaggagagcgagugcgugugcaucaacggcaccugcaccguggugaugaccgacggcagcgccagcggcaaggccgacaccaagauccuguucaucgaggagggcaagaucgugcacaccagcacccugagcggcagcgcccagcacguggaggagugcagcugcuaccccagauaccccggcgugagaugcgugugcagagacaacuggaagggcagcaacagacccaucguggacaucaacaucaaggacuacagcaucgugagcagcuacgugugcagcggccuggugggcgacacccccagaaagaacgacagcagcagcagcagccacugccuggaccccaacaacgaggagggcggccacggcgugaagggcugggccuucgacgacggcaacgacguguggaugggcagaaccaucagcgagaagcugagaagcggcuacgagaccuucaaggugaucgagggcuggagcaagcccaacagcaagcugcagaucaacagacaggugaucguggacagaggcaacagaagcggcuacagcggcaucuucagcguggagggcaagagcugcaucaacagaugcuucuacguggagcugaucagaggcagaaagcaggagaccgaggugcuguggaccagcaacagcaucgugguguucugcggcaccagcggcaccuacggcaccggcagcuggcccgacggcgccgacaucaaccugaugcccaucuga

SEQ ID NO: 182330 - RNA, 1410 nt, Artificial Sequence; identical to SEQ ID NO: 174313
  derived and/or modified CDS sequence (opt4) from neuraminidase__InfluenzaA__AFJ77553

SEQ ID NO: 182331 - RNA, 1410 nt, Artificial Sequence
  derived and/or modified CDS sequence (opt4) from neuraminidase__InfluenzaA__AFJ77564
augaaccccaaccagaagaucaucaccaucggcagcgugagccugaccaucgccaccaucugcuuccugaugcagaucgccauccuggugaccaccgugacccugcacuucaagcaguacgagugcaacagcccccccaacaaccaggugaugcugugcgagcccaccaucaucgagagaaacaucaccgagaucguguaccugaccaacaccaccaucgagaaggagaucugccccaagcuggccgaguacagaaacuggagcaagccccagugcaagaucaccggcuucgcccccuucagcaaggacaacagcaucagacugagcgccggcggcgacaucugggugaccagagagcccuacgugagcugcgaccccgacaagugcuaccaguucgcccugggccagggcaccacccugaacaacagacacagcaacgacaccgugcacgacagaacccccuacagaacccugcugaugaacgagcugggcgugcccuuccaccugggcaccaagcaggugugcaucgccuggagcagcagcagcugccacgacggcaaggccuggcugcacgugugcgugaccggccacgacgagaacgccaccgccagcuucaucuacgacggcagacugguggacagcaucggcagcuggagcaagaagauccugagaacccaggagagcgagugcgugugcaucaacggcaccugcaccguggugaugaccgacggcagcgccagcggcagagccgacaccaagauccuguucaucgaggagggcaagaucgugcacaucagccagcugagcggcagcgcccagcacguggaggagugcagcugcuaccccagauaccccggcgugagaugcgugugcagagacaacuggaagggcagcaacagacccaucguggacaucaacgugaaggacuacagcaucgugagcagcuacgugugcagcggccuggugggcgacacccccagaaagaacgacagcagcagcagcagccacugccugaaccccaacaacgaggagggcggccacggcgugaagggcugggccuucgacgacggcaacgacguguggaugggcagaaccaucagcgagaagcugagaagcggcuacgagaccuucaaggugaucgagggcuggagcaagcccaacagcaagcugcagaucaacagacaggugaucguggacagaggcaacagaagcggcuacagcggcaucuucagcguggagggcaagagcugcaucaacagaugcuucuacguggagcugaucagaggcagaaagcaggagaacgaggugugguggaccagcaacagcaucgugguguucugcggcaccagcggcaccuacggcaccggcagcuggcccgacggcgccgacaucaaccugaugcccaucuga

SEQ ID NO: 182332 - RNA, 1329 nt, Artificial Sequence
  derived and/or modified CDS sequence (opt4) from neuraminidase__InfluenzaA__AFJ77575
augaaccccaaccagaagaucaucaccaucggcagcgugagccugaccaucgccaccaucugcuuccugaugcagaucgccauccuggugaucgagagaaacaucaccgagaucguguaccugaccaacaccaccaucgagaaggagaucugccccaagcuggccgaguacagaaacuggagcaagccccagugcaacaucaccggcuucgcccccuucagcaaggacaacagcaucagacugagcgccggcggcgacaucugggugaccagagagcccuacgugagcugcgaccccgacaagugcuaccaguucgcccugggccagggcaccacccugaacaacggccacagcaacgacaccgugcacgacagaacccccuacagaacccugcugaugaacgagcugggcgugcccuuccaccugggcaccaagcaggugugcaucgccuggagcagcagcagcugccacgacggcaaggccuggcugcacgugugcgugaccggcgacgacgagaacgccaccgccagcuucaucuacaacggcagacugguggacagcaucggcagcuggagcaagaagauccugagaacccaggagagcgagugcgugugcaucaacggcaccugcaccguggugaugaccgacggcagcgccagcggcaaggccgacaccaagauccuguucaucgaggagggcaagaucgugcacaccagcagccugagcggcagcgcccagcacguggaggagugcagcugcuaccccagauaccccggcgugagaugcgugugcagagacaacuggaagggcagcaacagacccaucguggacaucaacgugaaggacuacagcaucgugagcagcuacgugugcagcggccuggugggcgacacccccagaaagaacgacagcagcagcagcagccacugccuggaccccaacaacgaggagggcggccacggcgugaagggcugggccuucgacgacggcaacgacguguggaugggcagaaccaucagcgagaagcugagaagcggcuacgagaccuucaaggugaucgagggcuggagcaagcccaacagcaagcugcagaucaacagacaggugaucguggacagaggcaacagaagcggcuacagcggcaucuucagcguggagggcaagagcugcaucaacagaugcuucuacguggagcugaucagaggcagaaagcaggagaccgaggugcuguggaccagcaacagcaucgugguguucugcggcaccagcggcaccuacggcaccggcagcuggcccgacggcgccgacaucaaccugaugcccaucuga

SEQ ID NO: 182333 - RNA, 1410 nt, Artificial Sequence
  derived and/or modified CDS sequence (opt4) from neuraminidase__InfluenzaA__AFJ77597
augaaccccaaccagaagaucaucaccaucggcagcgugagccugaccaucgccaccaucugcuuccugaugcagaucgccauccuggugaccaccgugacccugcacuucaagcaguacgagugcaacagcccccccaacaaccaggugaugcugugcgagcccaccaucaucgagagaaacaucaccgagaucguguaccugaccaacaccaccaucgagaaggagaucugccccaagcuggccgaguacagaaacuggagcaagccccagugcaacaucaccggcuucgcccccuucagcaaggacaacagcaucagacugagcgccggcggcgacaucugggugaccagagagcccuacgugagcugcgaccccgacaagugcuaccaguucgcccugggccagggcaccacccugaacaacggccacagcaacgacaccgugcacgacagaacccccuacagaacccugcugaugaacgagcugggcgugcccuuccaccugggcaccaagcaggugugcaucgccuggagcagcagcagcugccacgacggcaaggccuggcugcacgugugcgugaccggcgacgacgagaacgccaccgccagcuucaucuacaacggcagacugguggacagcaucggcagcuggagcaagaagauccugagaacccaggagagcgagugcgugugcaucaacggcaccugcaccguggugaugaccgacggcagcgccagcggcaaggccgacaccaagauccuguucaucgaggagggcaagaucgugcacaccagaccccugagcggcagcgcccagcacguggaggagugcagcugcuaccccagauaccccggcgugagaugcgugugcagagacaacuggaagggcagcaacagacccaucguggacaucaacgugaaggacuacagcaucgugagcagcuacgugugcagcggccuggugggcgacacccccagaaagaacgacagcagcagcagcagccacugccuggaccccaacaacgaggagggcggccacggcgugaagggcugggccuucgacgacggcaacgacguguggaugggcagaaccaucagcgagaagcugagaagcggcuacgagaccuucaaggugaucgagggcuggagcaagcccaacagcaagcugcagaucaacagacaggugaucguggacagaggcaacagaagcggcuacagcggcaucuucagcguggagggcaagagcugcaucaacagaugcuucuacguggagcugaucagaggcagaaagcaggagaccgaggugcuguggaccagcaacagcaucgugguguucugcggcaccagcggcaccuacggcaccggcagcuggcccgacggcgccgacaucaaccugaugcccaucuga

SEQ ID NO: 182334 - RNA, 1410 nt, Artificial Sequence
  derived and/or modified CDS sequence (opt4) from neuraminidase__InfluenzaA__AFJ77608
augaaccccaaccagaagaucaucaccaucggcagcgugagccugaccaucgccaccaucugcuuccugaugcagaccgccauccuggugaccaccgugacccugcacuucaagcaguacgagugcaacagcccccccaacaaccaggugaugcugugcgagcccaccaucaucgagagaaacaugaccgagaucguguaccugaccaacaccaccaucgagaaggagaucugccccaagcuggccgaguacagaaacuggagcaagccccagugcaacaucaccggcuucgcccccuucagcaaggacaacagcaucagacugagcgccggcggcgaccugugggugaccagagagcccuacgugagcugcgaccccgacaagugcuaccaguucgcccugggccagggcaccacccugaacaacggccacagcaacgacaccgugcacgacagaacccccuacagaacccugcugaugaacgagcugggcgugcccuuccaccugggcaccaagcaggugugcaucgccuggagcagcagcagcugccacgacggcaaggccuggcugcacgugugcgugaccggcgacgacgagaacgccaccgccagcuucaucuacaacggcagacugguggacagcaucggcagcuggagcaagaagauccugagaacccaggagagcgagugcgugugcaucaacggcaccugcaccguggugaugaccgacggcagcgccagcggcaaggccgacaccaagauccuguucaucgaggagggcaagaucgugcacaccagcagccugagcggcagcgcccagcacguggaggagugcagcugcuaccccagauaccccggcgugagaugcgugugcagagacaacuggaagggcagcaacagacccaucguggacaucaacgugaaggacuacagcaucgugagcagcuacgugugcagcggccuggugggcgacacccccagaaagaacgacagcagcagcagcagccacugccuggaccccaacaacgaggagggcggccacggcgugaagggcugggccuucgacgacggcaacgacguguggaugggcagaaccaucagcgagaagcugagaagcggcuacgagaccuucaaggugaucgagggcuggagcaagcccaacagcaagcugcagaucaacagacaggugaucguggacagaggcaacagaagcggcuacagcggcaucuucagcguggagggcaagagcugcaucaacagaugcuucuacguggagcugaucagaggcagaaagcaggagaccgaggugcuguggaccagcaacagcaucgugguguucugcggcaccagcggcaccuacggcaccggcagcuggcccgacggcgccgacaucaaccugaugcccaucuga

SEQ ID NO: 182335 - RNA, 1410 nt, Artificial Sequence; identical to SEQ ID NO: 182333
  derived and/or modified CDS sequence (opt4) from neuraminidase__InfluenzaA__AFJ77619

SEQ ID NO: 182336 - RNA, 1410 nt, Artificial Sequence; identical to SEQ ID NO: 182333
  derived and/or modified CDS sequence (opt4) from neuraminidase__InfluenzaA__AFJ77630

SEQ ID NO: 182337 - RNA, 1410 nt, Artificial Sequence; identical to SEQ ID NO: 182329
  derived and/or modified CDS sequence (opt4) from neuraminidase__InfluenzaA__AFJ77641

SEQ ID NO: 182338 - RNA, 1410 nt, Artificial Sequence; identical to SEQ ID NO: 182329
  derived and/or modified CDS sequence (opt4) from neuraminidase__InfluenzaA__AFJ77652

SEQ ID NO: 182339 - RNA, 1410 nt, Artificial Sequence; identical to SEQ ID NO: 174100
  derived and/or modified CDS sequence (opt4) from neuraminidase__InfluenzaA__AFJ77663

SEQ ID NO: 182340 - RNA, 1410 nt, Artificial Sequence; identical to SEQ ID NO: 174100
  derived and/or modified CDS sequence (opt4) from neuraminidase__InfluenzaA__AFJ77674

SEQ ID NO: 182341 - RNA, 1410 nt, Artificial Sequence; identical to SEQ ID NO: 174100
  derived and/or modified CDS sequence (opt4) from neuraminidase__InfluenzaA__AFJ77685

SEQ ID NO: 182342 - RNA, 1410 nt, Artificial Sequence
  derived and/or modified CDS sequence (opt4) from neuraminidase__InfluenzaA__AFJ77696
augaaccccaaccagaagaucaucaccaucggcagcgugagccugaccaucgccaccaucugcuuccugaugcagaucgccauccuggugaccaccgugacccugcacuucaagcaguacgagugcaacagcccccccaacaaccaggugaugcugugcgagcccaccaucaucgagagaaacaucaccgagaucguguaccugaccaacaccaccaucgagaaggagaucugccccaagcuggccgaguacagaaacuggagcaagccccagugcaacaucaccggcuucgcccccuucagcaaggacaacagcaucagacugagcgccggcggcgacaucugggugaccagagagcccuacgugagcugcgaccccgacaagugcuaccaguucgcccugggccagggcaccacccugaacaacggccacagcaacgacaccgugcacgacagaacccccuacagaacccugcugaugaacgagcugggcgugcccuuccaccugggcaccaagcaggugugcaucgccuggagcagcagcagcugccacgacggcaaggccuggcugcacgugugcgugaccggcgacgacgagaacgccaccgccagcuucaucuacaacggcagacugguggacagcaucggcagcuggagcaagaagauccugagaacccaggagagcgagugcgugugcaucaacggcaccugcaccguggugaugaccgacggcagcgccagcgagaaggccgacaccaagauccuguucaucgaggagggcaagaucgugcacaccagccugcugagcggcagcgcccagcacguggaggagugcagcugcuaccccagauaccccggcgugagaugcgugugcagagacaacuggaagggcagcaacagacccaucguggacaucaacgugaaggacuacagcaucgugagcagcuacgugugcagcggccuggugggcgacacccccagaaagaacgacagcagcagcagcagccacugccuggaccccaacaacgaggagggcggccacggcgugaagggcugggccuucgacgacggcaacgacguguggaugggcagaaccaucagcgagaagcugagaagcggcuacgagaccuucaaggugaucgagggcuggagcaagcccaacagcaagcugcagaucaacagacaggugaucguggacagaggcaacagaagcggcuacagcggcaucuucagcguggagggcaagagcugcaucaacagaugcuucuacguggagcugaucagaggcagaaagcaggagaccgaggugcuguggaccagcaacagcaucgugguguucugcggcaccagcggcaccuacggcaccggcagcuggcccgacggcgccgacaucaaccugaugcccaucuga

SEQ ID NO: 182343 - RNA, 1410 nt, Artificial Sequence; identical to SEQ ID NO: 174100
  derived and/or modified CDS sequence (opt4) from neuraminidase__InfluenzaA__AFJ77707

SEQ ID NO: 182344 - RNA, 1410 nt, Artificial Sequence; identical to SEQ ID NO: 174121
  derived and/or modified CDS sequence (opt4) from neuraminidase__InfluenzaA__AFJ77718

SEQ ID NO: 182345 - RNA, 1410 nt, Artificial Sequence; identical to SEQ ID NO: 174121
  derived and/or modified CDS sequence (opt4) from neuraminidase__InfluenzaA__AFJ77729

SEQ ID NO: 182346 - RNA, 1410 nt, Artificial Sequence
  derived and/or modified CDS sequence (opt4) from neuraminidase__InfluenzaA__AFJ77740
augaaccccaaccagaagaucaucaccaucggcagcgugagccugaccaucagcaccaucugcuucuucaugcagaucgccauccugaucaccaccgugacccugcacuucaagcaguacgaguucaacagcccccccaacaaccaggugaugcugugcgagcccaccaucaucgagagaaacaucaccgagaucguguaccugaccaacaccaccaucgagaaggagaucugccccaagcuggccgaguacagaaacuggagcaagccccagugcaacaucaccggcuucgcccccuucagcaaggacaacagcaucagacugagcgccggcggcgacaucugggugaccagagagcccuacgugagcugcgaccccgacaagugcuaccaguucgcccugggccagggcaccacccugaacaacgugcacagcaacgacaccgugcacgacagaacccccuacagaacccugcugaugaacgagcugggcgugcccuuccaccugggcaccaagcaggugugcaucgccuggagcagcagcagcugccacgacggcaaggccuggcugcacgugugcgugaccggcgacgacgagaacgccaccgccagcuucaucuacaacggcagacugguggacagcaucgugagcuggagcaagaagauccugagaacccaggagagcgagugcgugugcaucaacggcaccugcaucguggugaugaccgacggcagcgccagcggcaaggccgacaccaagauccuguucaucgaggagggcaagaucgugcacaccagcacccugagcggcagcgcccagcacguggaggagugcagcugcuaccccagauaccccggcgugagaugcgugugcagagacaacuggaagggcagcaacagacccaucguggacaucaacaucaaggacuacagcaucgugagcagcuacgugugcagcggccuggugggcgacacccccagaaagaacgacagcagcagcagcagccacugccuggaccccaacaacgaggagggcggccacggcgugaagggcugggccuucgacgacggcaacgacguguggaugggcagaaccaucagcgagaagcugagaagcggcuacgagaccuucaaggugaucgagggcuggagcaaccccaacagcaagcugcagaucaacagacaggugaucguggacagaggcaacagaagcggcuacagcggcaucuucagcguggagggcaagagcugcaucaacagaugcuucuacguggagcugaucagaggcagaaagcaggagaccgaggugcuguggaccagcaacagcaucgugguguucugcggcaccagcggcaccuacggcaccggcagcuggcccgacggcgccgacaucaaccugaugcccaucuga

SEQ ID NO: 182347 - RNA, 1410 nt, Artificial Sequence
  derived and/or modified CDS sequence (opt4) from neuraminidase__InfluenzaA__AFJ77751
augaaccccaaccagaagaucaucaccaucggcagcgugagccugaccaucgccaccaucugcuuccugaugcagaucgccauccuggugaccaccgugacccugcacuucaagcagcacgagugcaacagcccccccaacaaccaggugaugcugugcgagcccaccaucaucgagagaaacaucaccgagaucguguaccugaccaacaccaccaucgagaaggagaucugccccaagcuggccgaguacagaaacuggagcaagccccagugcaacaucaccggcuucgcccccuucagcaaggacaacagcaucagacugagcgccggcggcgacaucugggugaccagagagcccuacgugagcugcgaccccgacaagugcuaccaguucgcccugggccagggcaccacccugaacaacggccacagcaacgacaccgugagagacagaacccccuacagaacccugcugaugaacgagcugggcgugcccuuccaccugggcaccagacaggugugcaucgccuggagcagcagcagcugccacgacggcaaggccuggcugcacgugugcgugaccggcgacgacaagaacgccaccgccagcuucaucuacaacggcagacugguggacagcaucggcagcuggagcaagaagauccugagaacccaggagagcgagugcgugugcaucaacggcaccugcaccguggugaugaccgacggcagcgccagcggcaaggccgacaccaagauccuguucaucgaggagggcaagaucgugcacaucagcacccugagcggcagcgcccagcacguggaggagugcagcugcuaccccagauaccccggcgugagaugcgugugcagagacaacuggaagggcagcaacagacccaucguggacaucaacgugaaggacuacagcaucuucagcagcuacgugugcagcggccuggugggcgacacccccagaaagaacgacagcuucagcagcagccacugccuggaccccaacaacgaggagggcggccacggcgugaagggcugggccuucgacgacggcaacgacguguggaugggcagaaccaucagcgagaagcugagaagcggcuacgagaccuucaaggugaucgagggcuggagcaagcccaacagcaagcugcagaucaacagacaggugaucguggagagaggcaacagaagcggcuacagcggcaucuucagcguggagggcaagagcugcaucaacagaugcuucuacguggagcugaucagaggcagaaaggaggagaccgaggugugguggaccagcaacagcaucgugguguucugcggcaccagcggcaccuacggcaccggcagcuggcccgacggcgccgacaucaaccugaugcccaucuga

SEQ ID NO: 182348 - RNA, 1410 nt, Artificial Sequence; identical to SEQ ID NO: 174205
  derived and/or modified CDS sequence (opt4) from neuraminidase__InfluenzaA__AFJ77762

SEQ ID NO: 182349 - RNA, 1410 nt, Artificial Sequence; identical to SEQ ID NO: 174205
  derived and/or modified CDS sequence (opt4) from neuraminidase__InfluenzaA__AFJ77773

SEQ ID NO: 182350 - RNA, 1410 nt, Artificial Sequence; identical to SEQ ID NO: 174205
  derived and/or modified CDS sequence (opt4) from neuraminidase__InfluenzaA__AFJ77784

SEQ ID NO: 182351 - RNA, 1410 nt, Artificial Sequence; identical to SEQ ID NO: 174774
  derived and/or modified CDS sequence (opt4) from neuraminidase__InfluenzaA__AFJ77795

SEQ ID NO: 182352 - RNA, 1410 nt, Artificial Sequence; identical to SEQ ID NO: 174774
  derived and/or modified CDS sequence (opt4) from neuraminidase__InfluenzaA__AFJ77806

SEQ ID NO: 182353 - RNA, 1410 nt, Artificial Sequence; identical to SEQ ID NO: 174774
  derived and/or modified CDS sequence (opt4) from neuraminidase__InfluenzaA__AFJ77817

SEQ ID NO: 182354 - RNA, 1410 nt, Artificial Sequence; identical to SEQ ID NO: 174774
  derived and/or modified CDS sequence (opt4) from neuraminidase__InfluenzaA__AFJ77828

SEQ ID NO: 182355 - RNA, 1410 nt, Artificial Sequence
  derived and/or modified CDS sequence (opt4) from neuraminidase__InfluenzaA__AFJ77839
augaaccccaaccagaagaucaucaccaucggcagcgugagccugaccaucagcaccaucugcuucuucaugcagaucgccauccugaucaccaccgugacccugcacuucaagcaguacgaguucaacagcccccccaacaaccaggugaugcugugcgagcccaccaucaucgagagaaacaucaccgagaucguguaccugaccaacaccaccaucgagaaggagaucugccccaagcuggccgaguacagaaacuggagcaagccccagugcgacaucaccggcuucgcccccuucagcaaggacaacagcaucagacugagcgccggcggcgacaucugggugaccagagagcccuacgugagcugcgaccccgacaagugcuaccaguucgcccugggccagggcaccacccugaacaacgugcacagcaacgacaccgugcacgacagaacccccuacagaacccugcugaugaacgagcugggcgugcccuuccaccugggcaccaagcaggugugcaucgccuggagcagcagcagcugccacgacggcaaggccuggcugcacgugugcgugaccggcgacgacaagaacgccaccgccagcuucaucuacaacggcagacugguggacagcaucgugagcuggagcaagaagauccugagaacccaggagagcgagugcgugugcaucaacggcaccugcaccguggugaugaccgacggcagcgccagcggcaaggccgacaccaagauccuguucaucgaggagggcaagaucauccacaccagcacccugagcggcagcgcccagcacguggaggagugcagcugcuaccccagauaccccggcgugagaugcgugugcagagacaacuggaagggcagcaacagacccaucguggacaucaacaucaaggacuacagcaucgugagcagcuacgugugcagcggccuggugggcgacacccccagaaagaacgacagcagcagcagcagccacugccuggaccccaacaacgaggagggcggccacggcgugaagggcugggccuucgacgacggcaacgacguguggaugggcagaaccaucagcgagaagcugagaagcggcuacgagaccuucaaggugaucgagggcuggagcaaccccaacagcaagcugcagaucaacagacaggugaucguggacagaggcaacagaagcggcuacagcggcaucuucagcguggagggcaagagcugcaucaacagaugcuucuacguggagcugaucagaggcagaaaggaggagaccgaggugcuguggaccagcaacagcaucgugguguucugcggcaccagcggcaccuacggcaccggcagcuggcccgacggcgccgacaucaaccugaugcccaucuga

SEQ ID NO: 182356 - RNA, 1410 nt, Artificial Sequence
  derived and/or modified CDS sequence (opt4) from neuraminidase__InfluenzaA__AFJ77850
augaaccccaaccagaagaucaucaccaucggcagcgugagccugaccaucagcaccaucugcuucuucaugcagaucgccauccugaucaccaccgugacccugcacuucaagcaguacgaguucaacagcccccccaacaaccaggugaugcugugcgagcccaccaucaucgagagaaacaucaccgagaucguguaccugaccaacaccaccaucgagaaggagaucugccccaagcuggccaaguacagaaacuggagcaagccccagugcgacaucaccggcuucgcccccuucagcaaggacaacagcaucagacugagcgccggcggcgacaucugggugaccagagagcccuacgugagcugcgaccccgacaagugcuaccaguucgcccugggccagggcaccacccugaacaacgugcacagcaacgacaccgugcacgacagaacccccuacagaacccugcugaugaacgagcugggcgugcccuuccaccugggcaccaagcaggugugcaucgccuggagcagcagcagcugccacgacggcaaggccuggcugcacgugugcgugaccggcgacgacaagaacgccaccgccagcuucaucuacaacggcagacugguggacagcaucgugagcuggagcaagaagauccugagaacccaggagagcgagugcgugugcaucaacggcaccugcaccguggugaugaccgacggcagcgccagcggcaaggccgacaccaagauccuguucaucgaggagggcaagaucgugcacaccagcacccugagcggcagcgcccagcacguggaggagugcagcugcuaccccagauaccccggcgugagaugcgugugcagagacaacuggaagggcagcaacagacccaucguggacaucaacaucaaggacuacagcaucgugagcagcuacgugugcagcggccuggugggcgacacccccagaaagaacgacagcagcagcagcagccacugccuggaccccaacaacgaggagggcggccacggcgugaagggcugggccuucgacgacggcaacgacguguggaugggcagaaccaucagcgagaagcugagaagcggcuacgagaccuucaaggugaucgagggcuggagcaaccccaacagcaagcugcagaucaacagacaggugaucguggacagaggcaacagaagcggcuacagcggcaucuucagcguggagggcaagagcugcaucaacagaugcuucuacguggagcugaucagaggcagaaaggaggagaccgaggugcuguggaccagcaacagcaucgugguguucugcggcaccagcggcaccuacggcaccggcagcuggcccgacggcgccgacaucaaccugaugcccaucuga

SEQ ID NO: 182357 - RNA, 1410 nt, Artificial Sequence; identical to SEQ ID NO: 174774
  derived and/or modified CDS sequence (opt4) from neuraminidase__InfluenzaA__AFJ77861

SEQ ID NO: 182358 - RNA, 1410 nt, Artificial Sequence; identical to SEQ ID NO: 174774
  derived and/or modified CDS sequence (opt4) from neuraminidase__InfluenzaA__AFJ77872

SEQ ID NO: 182359 - RNA, 1410 nt, Artificial Sequence; identical to SEQ ID NO: 175240
  derived and/or modified CDS sequence (opt4) from neuraminidase__InfluenzaA__AFJ77883

SEQ ID NO: 182360 - RNA, 1410 nt, Artificial Sequence; identical to SEQ ID NO: 174774
  derived and/or modified CDS sequence (opt4) from neuraminidase__InfluenzaA__AFJ77894

SEQ ID NO: 182361 - RNA, 1410 nt, Artificial Sequence; identical to SEQ ID NO: 174774
  derived and/or modified CDS sequence (opt4) from neuraminidase__InfluenzaA__AFJ77905

SEQ ID NO: 182362 - RNA, 1410 nt, Artificial Sequence
  derived and/or modified CDS sequence (opt4) from neuraminidase__InfluenzaA__AFJ77916
augaaccccaaccagaagaucaucaccaucggcagcgugagccugaccaucagcaccaucugcuucuucaugcagaucgccauccugaucaccaccgugacccugcacuucaagcaguacgaguucaacagcccccccaacaaccaggugaugcugugcgagcccaccaucaucgagagaaacaucaccgagaucguguaccugaccaacaccaccaucgagaaggagaucugccccaagcuggccgaguacagaaacuggagcaagccccagugcgacaucaccggcuucgcccccuucagcaaggacaacagcaucagacugagcgccggcggcgacaucugggugaccagagagcccuacgugagcugcgaccccgacaagugcuaccaguucgcccugggccagggcaccacccugaacaacgugcacagcaacgacaccgugcacgacagaacccccuacagaacccugcugaugaacgagcugggcgugcccuuccaccugggcaccaagcaggugugcaucgccuggagcagcagcagcugccacgacggcaaggccuggcugcacgugugcgugaccggcgacgacaagaacgccaccgccagcuucaucuacaacggcagacugguggacagcaucgugagcuggagcaagaagauccugagaacccaggagagcgagugcgugugcaucaacggcaccugcaccguggugaugaccgacggcagcgccagcggcaaggccgacaccaagauccuguucaucgaggagggcaagaucgugcacaccagcacccugagcggcagcgcccagcacguggaggagugcagcugcuaccccagauaccccggcgugagaugcgugugcagagacaacuggaagggcagcaacagacccaucguggacaucaacaucaaggacuacagcaucgugagcagcuacgugugcagcggccuggugggcgacacccccagaaagaacgacagcagcagcagcagccacugccuggaccccaacaacgaggagggcggccacggcgugaagggcugggccuucgacgacggcaacgacguguggaugggcagaaccaucagcgagaagcugagaagcggcuacgagaccuucaaggugaucgagggcuggagcaaccccaacagcaagcugcagaucaacagacaggugaucguggacagaggcaacagaagcggcuacagcggcaucuucagcguggagggcaagagcugcaucaacagaugcuucuacguggagcugaucagaggcagaaaggaggagaccgaggugcuguggaccagcaacagcaucaucguguucugcggcaccagcggcaccuacggcaccggcagcuggcccgacggcgccgacaucaaccugaugcccaucuga

SEQ ID NO: 182363 - RNA, 1410 nt, Artificial Sequence; identical to SEQ ID NO: 174796
  derived and/or modified CDS sequence (opt4) from neuraminidase__InfluenzaA__AFJ77927

SEQ ID NO: 182364 - RNA, 1410 nt, Artificial Sequence; identical to SEQ ID NO: 174796
  derived and/or modified CDS sequence (opt4) from neuraminidase__InfluenzaA__AFJ77938

SEQ ID NO: 182365 - RNA, 1410 nt, Artificial Sequence; identical to SEQ ID NO: 174774
  derived and/or modified CDS sequence (opt4) from neuraminidase__InfluenzaA__AFJ77949

SEQ ID NO: 182366 - RNA, 1410 nt, Artificial Sequence; identical to SEQ ID NO: 174774
  derived and/or modified CDS sequence (opt4) from neuraminidase__InfluenzaA__AFJ77960

SEQ ID NO: 182367 - RNA, 1410 nt, Artificial Sequence
  derived and/or modified CDS sequence (opt4) from neuraminidase__InfluenzaA__AFJ77971
augaaccccaaccagaagaucaucaccaucggcagcgugagccugaccaucagcaccaucugcuucuucaugcagaucgccauccugaucaccaccgugacccugcacuucaagcaguacgaguucaacagcccccccaacaaccaggugaugcugugcgagcccaccaucaucgagagaaacaucaccgagaucguguaccugaccaacaccaccaucgagaaggagaucugccccaagcuggccgaguacagaaacuggagcaagccccagugcaacaucaccggcuucgcccccuucagcaaggacaacagcaucagacugagcgccggcggcgacaucugggugaccagagagcccuacgugagcugcgaccccgacaagugcuaccaguucgcccugggccagggcaccacccugaacaacgugcacagcaacgacaccgugcacgacagaacccccuacagaacccugcugaugaacgagcugggcgugcccuuccaccugggcaccaagcaggugugcaucgccuggagcagcagcagcugccacgacggcaaggccuggcugcacgugugcgugaccggcgacgacaagaacgccaccgccagcuucaucuacaacggcagacugguggacagcaucgugagcuggagcaaggagauccugagaacccaggagagcgagugcgugugcaucaacggcaccugcaccguggugaugaccgacggcagcgccagcggcaaggccgacaccaagauccuguucaucgaggagggcaagaucgugcacaccagcacccugagcggcagcgcccagcacguggaggagugcagcugcuaccccagauaccccggcgugagaugcgugugcagagacaacuggaagggcagcaacagacccaucguggacaucaacaucaaggacuacagcaucgugagcagcuacgugugcagcggccuggugggcgacacccccagaaagaacgacagcagcagcagcagccacugccuggaccccaacaacgaggagggcggccacggcgugaagggcugggccuucgacgacggcaacgacguguggaugggcagaaccaucagcgagaagcugagaagcggcuacgagaccuucaaggugaucgagggcuggagcaaccccaacagcaagcugcagaucaacagacaggugaucguggacagaggcaacagaagcggcuacagcggcaucuucagcguggagggcaagagcugcaucaacagaugcuucuacguggagcugaucagaggcagaaaggacgagaccgaggugcuguggaccagcaacagcaucgugguguucugcggcaccagcggcaccuacggcaccggcagcuggcccgacggcgccgacaucaaccugaugcccaucuga

SEQ ID NO: 182368 - RNA, 1410 nt, Artificial Sequence
  derived and/or modified CDS sequence (opt4) from neuraminidase__InfluenzaA__AFJ77982
augaaccccaaccagaagaucaucaccaucggcuucgugagccugaccaucagcaccaucugcuucuucaugcagaucgccauccugaucaccaccgugccccugcacuucaagcaguacgaguucaacagcccccccaacaaccaggugaugcugugcgagcccaccaucaucgagagaaacaucaccgagaucguguaccugaccaacaccaccaucgagaaggagaucugccccaagcuggccgaguacagaaacuggagcaagccccagugcaacaucaccggcuucgcccccuucagcaaggacaacagcaucagacugagcgccggcggcgacaucugggugaccagagagcccuacgugagcugcgaccccgacaagugcuaccaguucgcccugggccagggcaccacccugaacaacgugcacagcaacgacaccgugcacgacagaacccccuacagaacccugcugaugaacgagcugggcgugcccuuccaccugggcaccaagcaggugugcaucgccuggagcagcagcagcugccacgacggcaaggccuggcugcacgugugcgugaccggcgacgacaagaacgccaccgccagcuucaucuacaacggcagacugguggacagcaucgugagcuggagcaaggagauccugagaacccaggagagcgagugcgugugcaucaacggcaccugcaccguggugaugaccgacggcagcgccagcggcaaggccgacaccaagauccuguucaucgaggagggcaagaucgugcacaccagcacccugagcggcagcgcccagcacguggaggagugcagcugcuaccccagauaccccggcgugagaugcgugugcagagacaacuggaagggcagcaacagacccaucguggacaucaacaucaaggacuacagcaucgugagcagcuacgugugcagcggcaucgugggcgacacccccagaaagaacgacagcagcagcagcagccacugccuggaccccaacaacgaggagggcggccacggcgugaagggcugggccuucgacgacggcaacgacguguggaugggcagaaccaucagcgagaagcugagaagcggcuacgagaccuucaaggugaucgagggcuggagcaaccccaacagcaagcugcagaucaacagacaggugaucguggacagaggcaacagaagcggcuacagcggcaucuucagcguggagggcaagagcugcaucaacagaugcuucuacguggagcugaucagaggcagaaaggaggagaccgaggugcuguggaccagcaacagcaucgugguguucugcggcaccagcggcaccuacggcaccggcagcuggcccgacggcgccgacaucaaccugaugcccaucuga

SEQ ID NO: 182369 - RNA, 1410 nt, Artificial Sequence; identical to SEQ ID NO: 174772
  derived and/or modified CDS sequence (opt4) from neuraminidase__InfluenzaA__AFJ77993

SEQ ID NO: 182370 - RNA, 1410 nt, Artificial Sequence
  derived and/or modified CDS sequence (opt4) from neuraminidase__InfluenzaA__AFJ78004
augaaccccaaccagaagaucaucaccaucggcagcgugagccugaccaucagcaccaucugcuucuucaugcagaucgccauccugaucaccaccgugacccugcacuucaagcaguacgaguucaacagcccccccaacaaccaggugaugcugugcgagcccaccaucaucgagaagaacaucaccgagaucguguaccugaccaacaccaccaucgagaaggagaucugccccaagcuggccgaguacagaaacuggagcaagccccagugcaacaucaccggcuucgcccccuucagcaaggacaacagcaucagacugagcgccggcggcgacaucugggugaccagagagcccuacgugagcugcgaccccgacaagugcuaccaguucgcccugggccagggcaccacccugaacaacgugcacagcaacgacaccgugcacgacagaacccccuacagaacccugcugaugaacgagcugggcgugcccuuccaccugggcaccaagcaggugugcaucgccuggagcagcagcagcugccacgacggcaaggccuggcugcacgugugcgugaccggcgacgacaagaacgccaccgccagcuucaucuacaacggcagacugguggacagcaucgugagcuggagcaaggagauccugagaacccaggagagcgagugcgugugcaucaacggcaccugcaccguggugaugaccgacggcagcgccagcggcaaggccgacaccaagauccuguucaucgaggagggcaagaucgugcacaccagcacccugagcggcagcgcccagcacguggaggagugcagcugcuaccccagauaccccggcgugagaugcgugugcagagacaacuggaagggcagcaacagacccaucguggacaucaacaucaaggacuacagcaucgugagcagcuacgugugcagcggccuggugggcgacacccccagaaagaacgacagcagcagcagcagccacugccuggaccccaacaacgaggagggcggccacggcgugaagggcugggccuucgacgacggcaacgacguguggaugggcagaaccaucagcgagaagcugagaagcggcuacgagaccuucaaggugaucgagggcuggagcaaccccaacagcaagcugcagaucaacagacaggugaucguggacagaggcaacagaagcggcuacagcggcaucuucagcguggagggcaagagcugcaucaacagaugcuucuacguggagcugaucagaggcagaaaggaggagaccgaggugcuguggaccagcaacagcaucgugguguucugcggcaccagcggcaccuacggcaccggcagcuggcccgacggcgccgacaucaaccugaugcccaucuga

SEQ ID NO: 182371 - RNA, 1410 nt, Artificial Sequence; identical to SEQ ID NO: 174772
  derived and/or modified CDS sequence (opt4) from neuraminidase__InfluenzaA__AFJ78015

SEQ ID NO: 182372 - RNA, 1410 nt, Artificial Sequence; identical to SEQ ID NO: 181629
  derived and/or modified CDS sequence (opt4) from neuraminidase__InfluenzaA__AFJ78026

SEQ ID NO: 182373 - RNA, 1410 nt, Artificial Sequence; identical to SEQ ID NO: 181629
  derived and/or modified CDS sequence (opt4) from neuraminidase__InfluenzaA__AFJ78037

SEQ ID NO: 182374 - RNA, 1410 nt, Artificial Sequence
  derived and/or modified CDS sequence (opt4) from neuraminidase__InfluenzaA__AFJ78048
augaaccccaaccagaagaucaucaccaucggcagcgugagccugaccaucagcaccaucugcuucuucaugcagaucgccauccugaucaccaccgugacccugcacuucaagcaguacgaguucaacagcccccccaacaaccaggugaugcugugcgagcccaccaucaucgagagaaacaucaccgagaucguguaccugaccaacaccaccaucgagaaggagaucugccccaagcuggccgaguacagaaacuggagcaagccccagugcaacaucaccggcuucgcccccuucagcaaggacaacagcaucagacugagcgccggcggcgacaucugggugaccagagagcccuacgugagcugcgaccccgacaagugcuaccaguucgcccugggccagggcaccacccugaacaacgugcacagcaacgacaccgugcacgacagaacccccuacagaacccugcugaugaacgagcugggcgugcccuuccaccugggcaccaagcaggugugcaucgccuggagcagcagcagcugccacgacggcaaggccuggcugcacgugugcgugaccggcgacgacaagaacgccaccgccagcuucaucuacaacggcagacugguggacagcaucgugagcuggagcaaggagauccugagaacccaggagagcgagugcgugugcaucaacggcaccugcaccguggugaugaccgacggcaacgccagcggcaaggccgacaccaagauccuguucaucgaggagggcaagaucgugcacaccagcacccugagcggcagcgcccagcacguggaggagugcagcugcuaccccagauaccccggcgugagaugcgugugcagagacaacuggaagggcagcaacagacccaucguggacaucaacaucaaggacuacagcaucgugagcagcuacgugugcagcggccuggugggcgacacccccagaaagaacgacagcagcagcagcagccacugccuggaccccaacaacgaggagggcggccacggcgugaagggcugggccuucgacgacggcaacgacguguggaugggcagaaccaucagcgagaagcugagaagcggcuacgagaccuucaaggugaucgagggcuggagcaaccccaacagcaagcugcagaucaacagacaggugaucguggacagaggcaacagaagcggcuacagcggcaucuucagcguggagggcaagagcugcaucaacagaugcuucuacguggagcugaucagaggcagaaaggaggagaccgaggugcuguggaccagcaacagcaucgugguguucugcggcaccagcggcaccuacggcaccggcagcuggcccgacggcgccgacaucaaccugaugcccaucuga

SEQ ID NO: 182375 - RNA, 1410 nt, Artificial Sequence
  derived and/or modified CDS sequence (opt4) from neuraminidase__InfluenzaA__AFJ78059
augaaccccaaccagaagaucaucaccaucggcagcgugagccugaccaucagcaccaucugcuucuucaugcagaucgccauccugaucaccaccgugacccugcacuucaagcaguacgaguucaaccccccccccaacaaccaggugaugcugugcgagcccaccaucaucgagagaaacaucaccgagaucguguaccugaccaacaccaccaucgagaaggagaucugccccaagcuggccgaguacagaaacuggagcaagccccagugcaacaucaccggcuucgcccccuucagcaaggacaacagcaucagacugagcgccggcggcgacaucugggugaccagagagcccuacgugagcugcgaccccgacaagugcuaccaguucgcccugggccagggcaccacccugaacaacgugcacagcaacgacaccgugcacgacagaacccccuacagaacccugcugaugaacgagcugggcgugcccuuccaccugggcaccaagcaggugugcaucgccuggagcagcagcagcugccacgacggcaaggccuggcugcacgugugcgugaccggcgacgacaagaacgccaccgccagcuucaucuacaacggcagacugguggacagcaucgugagcuggagcaaggagauccugagaacccaggagagcgagugcgugugcaucaacggcaccugcaccguggugaugaccgacggcagcgccagcggcaaggccgacaccaagauccuguucaucgaggagggcaagaucgugcacaccagcacccugagcggcagcgcccagcacguggaggagugcagcugcuaccccagauaccccggcgugagaugcgugugcagagacaacuggaagggcagcaacagacccaucguggacaucaacaucaaggacuacagcaucgugagcagcuacgugugcagcggccuggugggcgacacccccagaaagaacgacagcagcagcagcagccacugccuggaccccaacaacgaggagggcggccacggcgugaagggcugggccuucgacgacggcaacgacguguggaugggcagaaccaucagcgagaagcugagaagcggcuacgagaccuucaaggugaucgagggcuggagcaaccccaacagcaagcugcagaucaacagacaggugaucguggacagaggcaacagaagcggcuacagcggcaucuucagcguggagggcaagagcugcaucaacagaugcuucuacguggagcugaucagaggcagaaaggacgagaccgaggugcuguggaccagcaacagcaucgugguguucugcggcaccagcggcaccuacggcaccggcagcuggcccgacggcgccgacaucaaccugaugcccaucuga

SEQ ID NO: 182376 - RNA, 1410 nt, Artificial Sequence
  derived and/or modified CDS sequence (opt4) from neuraminidase__InfluenzaA__AFJ78070
augaaccccaaccagaagaucaucaccaucggcagcgugagccugaccaucagcaccaucugcuucuucaugcagaucgccauccugaucaccaccgugacccugcacuucaagcaguacgaguucaacagcccccccaacaaccaggugaugcugugcgagcccaccaucaucgagagaaacaucaccgagaucguguaccugaccaacaccaccaucgagaaggagaucugccccaagcuggccgaguacagaaaguggagcaagccccagugcaacaucaccggcuucgcccccuucagcaaggacaacagcaucagacugagcgccggcggcgacaucugggugaccagagagcccuacgugagcugcgaccccgacaagugcuaccaguucgcccugggccagggcaccacccugaacaacgugcacagcaacgacaccgugagagacagaacccccuacagaacccugcugaugaacgagcugggcgugcccuuccaccugggcaccaagcaggugugcaucgccuggagcagcagcagcugccacgacggcaaggccuggcugcacgugugcgugaccggcgacgacaagaacgccaccgccagcuucaucuacaacggcagacugguggacagcaucgugagcuggagcaaggagauccugagaacccaggagagcgagugcgugugcaucaacggcaccugcaccguggugaugaccgacggcagcgccagcggcaaggccgacaccaagauccuguucaucgaggagggcaagaucgugcacaccagcacccugagcggcagcgcccagcacguggaggagugcagcugcuaccccagauaccccggcgugagaugcgugugcagagacaacuggaagggcagcaacagacccaucguggacaucaacaucaaggacuacagcaucgugagcagcuacgugugcagcggccuggugggcgacacccccagaaagaacgacagcagcagcagcggccacugccuggaccccaacaacgaggagggcggccacggcgugaagggcugggccuucgacgacggcaacgacguguggaugggcagaaccaucagcgagaagagcagaagcggcuacgagaccuucaaggugaucgagggcuggagcaaccccaacagcaagcugcagaucaacagacaggugaucguggacagaggcaacagaagcggcuacagcggcaucuucagcguggagggcaagagcugcaucaacagaugcuucuacguggagcugaucagaggcagaaaggaggagaccgaggugcuguggaccagcaacagcaucgugguguucugcggcaccagcggcaccuacggcaccggcagcuggcccgacggcgccgacaucaaccugaugcccaucuga

SEQ ID NO: 182377 - RNA, 1410 nt, Artificial Sequence
  derived and/or modified CDS sequence (opt4) from neuraminidase__InfluenzaA__AFJ78081
augaaccccaaccagaagaucaucaccaucggcagcgugagccugaccaucagcaccaucugcuucuucaugcagaucgccauccugaucaccaccgugacccugcacuucaagcaguacgaguucaacagcccccccaacaaccaggugaugcugugcgagcccaccaucaucgagagaaacaucaccgagaucguguaccugaccaacaccaccaucgagaaggagaucugccccaagcuggccgaguacagaaacuggagcaagccccagugcgacaucaccggcuucgcccccuucagcaaggacaacagcaucagacugagcgccggcggcgacaucugggugaccagagagcccuacgugagcugcgaccccgacaagugcuaccaguucgcccugggccagggcaccacccugaacaacgugcacagcaacgacaccgugagagacagaacccccuacagaacccugcugaugaacgagcugggcgugcccuuccaccugggcaccaagcaggugugcaucgccuggagcagcagcagcugccacgacggcaaggccuggcugcacgugugcaucaccggcgacgacaagaacgccaccgccagcuucaucuacaacggcagacugguggacagcaucgugagcuggagcaaggagauccugagaacccaggagagcgagugcgugugcaucaacggcaccugcaccguggugaugaccgacggcagcgccagcggcaaggccgacaccaagauccuguucaucgaggagggcaagaucgugcacaccagcacccugagcggcagcgcccagcacguggaggagugcagcugcuaccccagauaccccggcgugagaugcgugugcagagacaacuggaagggcagcaacagacccaucguggacaucaacaucaaggaccacagcaucgugagcagcuacgugugcagcggccuggugggcgacacccccagaaagaacgacaacagcagcagcagccacugccuggaccccaacaacgaggagggcggccacggcgugaagggcugggccuucgacgacggcaacgacguguggaugggcagaaccaucagcgagaagagcagacugggcuacgagaccuucaaggugaucgagggcuggagcaaccccaacagcaagcugcagaugaacagacaggugaucguggacagaggcaacagaagcggcuacagcggcaucuucagcguggagggcaagagcugcaucaacagaugcuucuacguggagcugaucagaggcagaaaggaggagaccgaggugcuguggaccagcaacagcaucgugguguucugcggcaccagcggcaccuacggcaccggcagcuggcccgacggcgccgacaucaaccugaugcccaucuga

SEQ ID NO: 182378 - RNA, 1410 nt, Artificial Sequence; identical to SEQ ID NO: 182294
  derived and/or modified CDS sequence (opt4) from neuraminidase__InfluenzaA__AFJ78092

SEQ ID NO: 182379 - RNA, 1410 nt, Artificial Sequence
  derived and/or modified CDS sequence (opt4) from neuraminidase__InfluenzaA__AFJ78103
augaaccccaaccagaagaucaucaccaucggcagcgugagccugaccaucagcaccaucugcuucuucaugcagaucgccauccugaucaccaccgugacccugcacuucaagcaguacgaguucaacagcccccccaacaaccaggugaugcugugcgagcccaccaucaucgagagaaacaucaccgagaucguguaccugaccaacaccaccaucgagaaggagaucugccccaagcuggccgaguacagaaacuggagcaagccccagugcgacaucaccggcuucgcccccuucagcaaggacaacagcaucagacugagcgccggcggcgacaucugggugaccagagagcccuacgugagcugcgaccccgacaagugcuaccaguucgcccugggccagggcaccacccugaacaacgugcacagcaacgacaccgugagagacagaacccccuacagaacccugcugaugaacgagcugggcgugcccuuccaccugggcaccaagcaggugugcaucgccuggagcagcagcagcugccacgacggcaaggccuggcugcacgugugcaucaccggcgacgacaagaacgccaccgccagcuucaucuacaacggcagacugguggacagcaucgugagcuggagcaaggagauccugagaacccaggagagcgagugcgugugcaucaacggcaccugcaccguggugaugaccgacggcagcgccagcggcaaggccgacaccaagauccuguucaucgaggagggcaagaucgugcacaccagcacccugcugggcagcgcccagcacguggaggagugcagcugcuaccccagauaccccggcgugagaugcgugugcagagacaacuggaagggcagcaacagacccaucguggacaucaacaucaaggaccacagcaucgugagcagcuacgugugcagcggccuggugggcgacacccccagaaagaacgacagcagcagcagcggccacugccuggaccccaacaacgaggagggcggccacggcgugaagggcugggccuucgacgacggcaacgacguguggaugggcagaaccaucagcgagaagagcagacugggcuacgagaccuucaaggugaucgagggcuggagcaaccccagcagcaagcugcagaucaacagacaggugaucguggacagaggcaacagaagcggcuacagcggcaucuucagcguggagggcaagagcugcaucaacagaugcuucuacguggagcugaucagaggcagaaaggaggagaccgaggugcuguggaccagcaacagcaucgugguguucugcggcaccagcggcaccuacggcaccggcagcuggcccgacggcgccgacaucaaccugaugcccaucuga

SEQ ID NO: 182380 - RNA, 1410 nt, Artificial Sequence
  derived and/or modified CDS sequence (opt4) from neuraminidase__InfluenzaA__AFJ78114
augaaccccaaccagaagaucaucaccaucggcagcgugagccugaccaucagcaccaucugcuucuucaugcagaucgccauccugaucaccaccgugacccugcacuucaagcaguacgagcugaacagcccccccaacaaccaggugaugcugugcgagcccaccaucaucgagagaaacaucaccgagaucguguaccugaccaacaccaccaucgagaaggagaucugccccaagcuggccgaguacagaaacuggagcaagccccagugcgacaucaccggcuucgcccccuucagcaaggacaacagcaucagacugagcgccggcggcgacaucugggugaccagagagcccuacgugagcugcgaccccgacaagugcuaccaguucgcccugggccagggcaccacccugaacaacgugcacagcaacgacaccgugagagacagaacccccuacagaacccugcugaugaacgagcugggcgugcccuuccaccugggcaccaagcaggugugcaucgccuggagcagcagcagcugccacgacggcaaggccuggcugcacgugugcaucaccggcgacgacaagaacgccaccgccagcuucaucuacaacggcagacugguggacagcaucgugagcuggagcaaggagauccugagaacccaggagagcgagugcgugugcaucaacggcaccugcaccguggugaugaccgacggcagcgccagcggcaaggccgacaccaagauccuguucaucgaggagggcaagaucgugcacaccagcacccugagcggcagcgcccagcacguggaggagugcagcugcuaccccagauaccccggcgugagaugcgugugcagagacaacuggaagggcagcaacagacccaucguggacaucaacaucaaggaccacagcaucgugagcagcuacgugugcagcggccuggugggcgacacccccagaaagaacgacagcagcagcagcagccacugccuggaccccaacaacgaggagggcggccacggcgugaagggcugggccuucgacgacggcaacgacguguggaugggcagaaccaucagcgagaagagcagacugggcuacgagaccuucaaggugaucgagggcuggagcaaccccaacagcaagcugcagaucaacagacaggugaucguggacagaagcaacagaagcggcuacagcggcaucuucagcguggagggcaagagcugcaucaacagaugcuucuacguggagcugaucagaggcagaaaggaggagaccgaggugcuguggaccagcaacagcaucgugguguucugcggcaccagcggcaccuacggcaccggcagcuggcccgacggcgccgacaucaaccugaugcccaucuga

SEQ ID NO: 182381 - RNA, 1410 nt, Artificial Sequence
  derived and/or modified CDS sequence (opt4) from neuraminidase__InfluenzaA__AFJ78125
augaaccccaaccagaagaucaucaccaucggcagcgugagccugaccaucagcaccaucugcuucuucaugcagaucgccauccugaucaccaccgugacccugcacuucaagcaguacgaguucaacagcccccccaacaaccaggugaugcugugcgagcccaccaucaucgagagaaacaucaccgagaucguguaccugaccaacaccaccaucgagaaggagaugugccccaagcuggccgaguacagaaacuggagcaagccccagugcgacaucaccggcuucgcccccuucagcaaggacaacagcaucagacugagcgccggcggcgacaucugggugaccagagagcccuacgugagcugcgaccccgacaagugcuaccaguucgcccugggccagggcaccacccugaacaacgugcacagcaacgacaccgugagagacagaacccccuacagaacccugcugaugaacgagcugggcgugcccuuccaccugggcaccaagcaggugugcaucgccuggagcagcagcagcugccacgacggcaaggccuggcugcacgugugcaucaccggcgacgacaagaacgccaccgccagcuucaucuacaacggcagacugguggacagcaucgugagcuggagcaaggagauccugagaacccaggagagcgagugcgugugcaucaacggcaccugcaccguggugaugaccgacggcagcgccagcggcaaggccgacaccaagauccuguucaucgaggagggcaagaucgugcacaccagcacccugagcggcagcgcccagcacguggaggagugcagcugcuaccccagauaccccggcgugagaugcgugugcagagacaacuggaagggcagcaacagacccaucguggacaucaacaucaaggaccacagcaucgugagcagcuacgugugcagcggccuggugggcgacacccccagaaagaacgacagcagcagcagcagccacugccuggaccccaacaacgaggagggcggccacggcgugaagggcugggccuucgacgacggcaacgacguguggaugggcagaaccaucagcgagaagagcagacugggcuacgagaccuucaaggugaucgagggcuggagcaaccccaacagcaagcugcagaugaacagacaggugaucguggacagaggcaacagaagcggcuacagcggcaucuucagcguggagggcaagagcugcaucaacagaugcuucuacguggagcugaucagaggcagaaaggaggagaccgaggugcuguggaccagcaacagcaucgugguguucugcggcaccagcggcaccuacggcaccggcagcuggcccgacggcgccgacaucaaccugaugcccaucuga

SEQ ID NO: 182382 - RNA, 1410 nt, Artificial Sequence
  derived and/or modified CDS sequence (opt4) from neuraminidase__InfluenzaA__AFJ78136
augaaccccaaccagaagaucaucaccaucggcagcgugagccugaccaucagcaccaucugcuucuucaugcagaccgccauccugaucaccaccgugacccugcacuucaagcaguacgaguucaacagcccccccaacaaccaggugaugcugugcgagcccaccaucaucgagagaaacaucaccgagaucguguaccugaccaacaccaccaucgagaaggagaucugccccaagcuggccgaguacagaaacuggagcaagccccagugcgacaucaccggcuucgcccccuucagcaaggacaacagcaucagacugagcgccggcggcgacaucugggugaccagagagcccuacgugagcugcgaccccgacaagugcuaccaguucgcccugggccagggcaccacccugaacaacgugcacagcaacaacaccgugagagacagaacccccuacagaacccugcugaugaacgagcugggcgugcccuuccaccugggcaccaagcaggugugcaucgccuggagcagcagcagcugccacgacggcaaggccuggcugcacgugugcaucaccggcgacgacaagaacgccaccgccagcuucaucuacaacggcagacugguggacagcaucgugagcuggagcaaggagauccugagaacccaggagagcgagugcgugugcaucaacggcaccugcaccguggugaugaccgacggcagcgccagcggcaaggccgacaccaagauccuguucaucgaggagggcaagaucgugcacaccagcacccugagcggcagcgcccagcacguggaggagugcagcugcuaccccagauaccccggcgugagaugcgugugcagagacaacuggaagggcagcaacagacccaucguggacaucaacaucaaggaccacagcaucgugagcagcuacgugugcagcggccuggugggcgacacccccagaaagaacgacagcagcagcagcagccacugccuggaccccaacaacgaggagggcggccacggcgugaagggcugggccuucgacgacggcaacgacguguggaugggcagaaccaucagcgagaagagcagacugggcuacgagaccuucaaggugaucgagggcuggagcaaccccaagagcaagcugcagaucaacagacaggugaucguggacagaggcaacagaagcggcuacagcggcaucuucagcguggagggcaagagcugcaucaacagaugcuucuacguggagcugaucagaggcagaaaggaggagaccgaggugcuguggaccagcaacagcaucgugguguucugcggcaccagcggcaccuacggcaccggcagcuggcccgacggcgccgacaucaaccugaugcccaucuga

SEQ ID NO: 182383 - RNA, 1410 nt, Artificial Sequence; identical to SEQ ID NO: 182382
  derived and/or modified CDS sequence (opt4) from neuraminidase__InfluenzaA__AFJ78147

SEQ ID NO: 182384 - RNA, 1410 nt, Artificial Sequence; identical to SEQ ID NO: 182382
  derived and/or modified CDS sequence (opt4) from neuraminidase__InfluenzaA__AFJ78158

SEQ ID NO: 182385 - RNA, 1410 nt, Artificial Sequence; identical to SEQ ID NO: 175944
  derived and/or modified CDS sequence (opt4) from neuraminidase__InfluenzaA__AFJ78169

SEQ ID NO: 182386 - RNA, 1410 nt, Artificial Sequence; identical to SEQ ID NO: 176462
  derived and/or modified CDS sequence (opt4) from neuraminidase__InfluenzaA__AFJ78180

SEQ ID NO: 182387 - RNA, 1410 nt, Artificial Sequence; identical to SEQ ID NO: 175944
  derived and/or modified CDS sequence (opt4) from neuraminidase__InfluenzaA__AFJ78191

SEQ ID NO: 182388 - RNA, 1410 nt, Artificial Sequence
  derived and/or modified CDS sequence (opt4) from neuraminidase__InfluenzaA__AFJ78202
augaaccccaaccagaagaucaucaccaucggcagcgugagccugaccaucagcaccaucugcuucuucaugcagaccgccauccugaucaccaccgugacccugcacuucaagcaguacgaguucaacagcccccccaacaaccaggugaugcugugcgagcccaccaucaucgagagaaacaucaccgagaucguguaccugaucaacaccaccaucgagaaggagaucugccccaagcuggccgaguacagaaacuggagcaagccccagugcgacaucaccggcuucgcccccuucagcaaggacaacagcaucagacugagcgccggcggcgacaucugggugaccagagagcccuacgugagcugcgaccccgacaagugcuaccaguucgcccugggccagggcaccacccugaacaacgugcacagcaacaacaccgugagagacagaacccccuacagaacccugcugaugaacgagcugggcgugcccuuccaccugggcaccaagcaggugugcaucgccuggagcagcagcagcugccacgacggcaaggccuggcugcacgugugcaucaccggcgacgacaagaacgccaccgccagcuucaucuacaacggcagacugguggacagcaucgugagcuggagcaaggagauccugagaacccaggagagcgagugcgugugcaucaacggcaccugcaccguggugaugaccgacggcagcgccagcggcaaggccgacaccaagauccuguucaucgaggagggcaagaucgugcacaccagcacccugagcggcggcgcccagcacguggaggagugcagcugcuaccccagauaccccggcgugagaugcgugugcagagacaacuggaagggcagcaacagacccaucguggacaucaacaucaaggaccacagcaucgugagcagcuacgugugcagcggccuggugggcgacacccccagaaagaacgacagcagcagcagcagccacugccuggaccccaacaacgaggagggcggccacggcgugaagggcugggccuucgacgacggcaacgacguguggaugggcagaaccaucagcgagaagagcagacugggcuacgagaccuucaaggugaucgagggcuggagcaaccccaagagcaagcugcagaucaacagacaggugaucguggacagaggcaacagaagcggcuacagcggcaucuucagcguggagggcaagagcugcaucaacagaugcuucuacguggagcugaucagaggcagaaaggaggagaccgaggugcuguggaccagcaacagcaucgugguguucugcggcaccagcggcaccuacggcaccggcagcuggcccgacggcgccgacaucagccugaugcccaucuga

SEQ ID NO: 182389 - RNA, 1410 nt, Artificial Sequence
  derived and/or modified CDS sequence (opt4) from neuraminidase__InfluenzaA__AFJ78213
augaaccccaaccagaagaucaucaccaucggcagcgugagccugaccaucagcaccaucugcuucuucaugcagaucgccauccugaucaccaccgugacccugcacuucaagcaguacgaguucaacagcccccccaacaaccaggugaugcugugcgagcccaccaucaucgagagaaacaucaccgagaucguguaccugaccaacaccaccaucgagaaggagaucugccccaagcuggccgaguacagaaacuggagcaagccccagugcgacaucaccggcuucgcccccuucagcaaggacaacagcaucagacugagcgccggcggcgacaucugggugaccagagagcccuacgugagcugcgaccccgacaagugcuaccaguucgcccugggccagggcaccacccugaacaacgugcacagcaacgacaccgugagagacagaacccccuacagaacccugcugaugaacgagcugggcgugcccuuccaccugggcaccaagcaggugugcaucgccuggagcagcagcagcugccacgacggcaaggccuggcugcacgugugcaucaccggcgacgacaagaacgccaccgccagcuucaucuacaacggcagacugguggacagcaucgugagcuggagcaaggagauccugagaacccaggagagcgagugcgugugcaucaacggcaccugcaccguggugaugaccgacggcagcgccagcggcaaggccgacaccaagauccuguucaucgaggagggcaagaucgugcacaccagcacccugagcggcagcgcccagcacguggaggagugcagcugcuaccccagauaccccggcgugagaugcgugugcagagacaacuggaagggcagcaacagacccaucguggacaucaacaucaaggaccacagcaucgugagcagcuacgugugcagcggccuggugggcgacacccccagaaagaacgacagcagcagcagcagccacugccuggaccccaacaacgaggagggcggccacggcgugaagggcugggccuucgacgacggcaacgacguguggaugggcagaaccaucagcgagaagagcagacugggcuacgagaccuucaaggugaucgagggcuggagcaaccccaagagcaagcugcagaucaacagacaggugaucguggacagaggcaacagaagcggcuacagcggcaucuucagcguggagggcaagagcugcaucaacagaugcuucuacguggagcugaucagaggcagaaaggaggagaccgaggugcuguggaccagcaacagcaucgugguguucugcggcaccagcggcaccuacggcaccggcagcuggcccgacggcgccgacaucaaccugaugcugaucuga

SEQ ID NO: 182390 - RNA, 1410 nt, Artificial Sequence; identical to SEQ ID NO: 175944
  derived and/or modified CDS sequence (opt4) from neuraminidase__InfluenzaA__AFJ78224

SEQ ID NO: 182391 - RNA, 1410 nt, Artificial Sequence; identical to SEQ ID NO: 175944
  derived and/or modified CDS sequence (opt4) from neuraminidase__InfluenzaA__AFJ78235

SEQ ID NO: 182392 - RNA, 1410 nt, Artificial Sequence
  derived and/or modified CDS sequence (opt4) from neuraminidase__InfluenzaA__AFJ78246
augaaccccaaccagaagaucaucaccaucggcagcgugagccugaccaucagcaccaucugcuucuucaugcagaucgccauccugaucaccaccgugacccugcacuucaagcaguacgaguucaacagcccccccaacaaccaggccaugcugugcgagcccaccaucaucgagagaaacaucaccgagaucguguaccugaccaacaccaccaucgagaaggagaucugccccaagcuggccgaguacagaaacuggagcaagccccagugcgacaucaccggcuucgcccccuucagcaaggacaacagcaucagacugagcgccggcggcgacaucugggugaccagagagcccuacgugagcugcgaccccgacaagugcuaccaguucgcccugggccagggcaccacccugaacaacgugcacagcaacgacaccgugagagacagaacccccuacagaacccugcugaugaacgagcugggcgugcccuuccaccugggcaccaagcaggugugcaucgccuggagcagcagcagcugccacgacggcaaggccuggcugcacgugugcaucaccggcgacgacaagaacgccaccgccagcuucaucuacaacggcagacugguggacagcaucgugagcuggagcaaggagauccugagaacccaggagagcgagugcgugugcaucaacggcaccugcaccguggugaugaccgacggcagcgccagcggcaaggccgacaccaagauccuguucaucgaggagggcaagaucgugcacaccagcacccugagcggcagcgcccagcacguggaggagugcagcugcuaccccagauaccccggcgugagaugcgugugcagagacaacuggaagggcagcaacagacccaucguggacaucaacaucaaggaccacagcaucgugagcagcuacgugugcagcggccuggugggcgacacccccagaaagaacgacagcagcagcagcagccacugccuggaccccaacaacgaggagggcggccacggcgugaagggcugggccuucgacgacggcaacgacguguggaugggcagaaccaucagcgagaagagcagacugggcuacgagaccuucaaggugaucgagggcuggagcaaccccaagagcaagcugcagaucaacagacaggugaucguggacagaggcaacagaagcggcuacagcggcaucuucagcguggagggcaagagcugcaucaacagaugcuucuacguggagcugaucagaggcagaaaggaggagaccgaggugcuguggaccagcaacagcaucgugguguucugcggcaccagcggcaccuacggcaccggcagcuggcccgacggcgccgacaucaaccugaugcccaucuga

SEQ ID NO: 182393 - RNA, 1410 nt, Artificial Sequence
  derived and/or modified CDS sequence (opt4) from neuraminidase__InfluenzaA__AFJ78268
augaaccccaaccagaagaucaucaccaucggcagcgugagccugaccaucagcaccaucugcuucuucaugcagaccgccauccugaucaccaccgugacccugcacuucaagcaguacgaguucaacagcccccccaacaaccaggugaugcugugcgagcccaccaucaucgagagaaacaucaccgagaucguguaccugaccaacaccaccaucgagaaggagaucugccccaagcuggccgaguacagaaacuggagcaagccccagugcgacaucaccggcuucgcccccuucagcaaggacaacagcaucagacugagcgccggcggcgacaucugggugaccagagagcccuacgugagcugcgaccccgacaagugcuaccaguucgcccugggccagggcaccacccugaacaacgugcacagcaacaacaccgugagagacagaacccccuacagaacccugcugaugaacgagcugggcgugcccuuccaccugggcaccaagcaggugugcaucgccuggagcagcagcagcugccacgacggcaaggccuggcugcacgugugcaucaccggcgacgacaagaacgccaccgccagcuucaucuacaacggcagacugguggacagcaucgugagcuggagcaaggagauccugagaacccaggagagcgagugcgugugcaucaacggcaccugcaccguggugaugaccgacggcagcgccagcggcaaggccgacaccaagauccuguucaucgaggagggcaagaucgugcacaccagcaagcugagcggcagcgcccagcacguggaggagugcagcugcuaccccagauaccccggcgugagaugcgugugcagagacaacuggaagggcagcaacagacccaucguggacaucaacaugaaggaccacagcaucgugagcagcuacgugugcagcggccuggugggcgacacccccagaaagaacgacagcagcagcagcagccacugccuggaccccaacaacgaggagggcggccacggcgugaagggcugggccuucgacgacggcaacgacguguggaugggcagaaccaucagcgagaagagcagacugggcuacgagaccuucaaggugaucgagggcuggagcaaccccaagagcaagcugcagaucaacagacaggugaucguggacagaggcaacagaagcggcuacagcggcaucuucagcguggagggcaagagcugcaucaacagaugcuucuacguggagcugaucagaggcagaaaggaggagaccgaggugcuguggaccagcaacagcaucgugguguucugcggcaccagcggcaccuacggcaccggcagcuggcccgacggcgccgacaucaaccugaugcccaucuga

SEQ ID NO: 182394 - RNA, 1410 nt, Artificial Sequence
  derived and/or modified CDS sequence (opt4) from neuraminidase__InfluenzaA__AFJ78279
augaaccccaaccagaagaucaucaccaucggcagcgugagccugaccaucagcaccaucugcuucuucaugcagaccgccauccugaucaccaccgugacccugcacuucaagcaguacgaguucaacagcccccccaacaaccaggugaugcugugcgagcccaccaucaucgagagaaacaucaccgagaucguguaccugaucaacaccaccaucgagaaggagaucugccccaagcuggccgaguacagaaacuggagcaagccccagugcgacaucaccggcuucgcccccuucagcaaggacaacagcaucagacugagcgccggcggcgacaucugggugaccagagagcccuacgugagcugcgaccccgacaagugcuaccaguucgcccugggccagggcaccacccugaacaacgugcacagcaacaacaccgugagagacagaacccccuacagaacccugcugaugaacgagcugggcgugcccuuccaccugggcaccaagcaggugugcaucgccuggagcagcagcagcugccacgacggcaaggccuggcugcacgugugcaucaccggcgacgacaagaacgccaccgccagcuucaucuacaacggcagacugguggacagcaucgugagcuggagcaaggagauccugagaacccaggagagcgagugcgugugcaucaacggcaccugcaccguggugaugaccgacggcagcgccagcggcaaggccgacaccaagauccuguucaucgaggagggcaagaucgugcacaccagcacccugagcggcggcgcccagcacguggaggagugcagcugcuaccccagauaccccggcgugagaugcgugugcagagacaacuggaagggcagcaacagacccaucguggacaucaacaucaaggaccacagcaucgugagcagcuacgugugcagcggccuggugggcgacacccccagaaagaacgacagcagcagcagcagccacugccuggaccccaacaacgaggagggcggccacggcgugaagggcugggccuucgacgacggcaacgacguguggaugggcagaaccaucagcgagaagagcagacugggcuacgagaccuucaaggugaucgagggcuggagcaaccccaagagcaagcugcagaucaacagacaggugaucguggacagaggcaacagaagcggcuacagcggcaucuucagcguggagggcaagagcugcaucaacagaugcuucuacguggagcugaucagaggcagaaaggaggagaccgaggugcuguggaccagcaacagcaucgugguguucugcggcaccagcggcaccuacggcaccggcagcuggcccgacggcgccgacaucaaccugaugcccaucuga

SEQ ID NO: 182395 - RNA, 1410 nt, Artificial Sequence
  derived and/or modified CDS sequence (opt4) from neuraminidase__InfluenzaA__AFJ78290
augaaccccaaccagaagaucaucaccaucggcagcgugagccugaccaucagcaccaucugcuucuucaugcagaucgccauccugaucaccaccgugacccugcacuucaagcaguacgaguucaacagcccccccaacaaccaggugaugcugugcgagcccaccaucaucgagagaaacaucaccgagaucguguaccugaccaacaccaccaucgagaaggagaucugccccaagcuggccgaguacagaaacuggagcaagccccagugcgacaucaccggcuucgcccccuucagcaaggacaacagcaucagacugagcgccggcggcgacaucugggugaccagagagcccuacgugagcugcgaccccgacaagugcuaccaguucgcccugggccagggcaccacccugaacaacgugcacagcaacaacaccgugagagacagaacccccuacagaacccugcugaugaacgagcugggcgugcccuuccaccugggcaccaagcaggugugcaucgccuggagcagcagcagcugccacgacggcaaggccuggcugcacgugugcaucaccggcgacgacaagaacgccaccgccagcuucaucuacaacggcagacugguggacagcguggugagcuggagcaaggagauccugagaacccaggagagcgagugcgugugcaucaacggcaccugcaccguggugaugaccgacggcagcgccagcggcaaggccgacaccaagauccuguucaucgaggagggcaagaucgugcacaccagcgcccugagcggcagcgcccagcacguggaggagugcagcugcuaccccagauaccccggcgugagaugcgugugcagagacaacuggaagggcagcaacagacccaucguggacaucaacaucaaggaccacagcaucgugagcagcuacgugugcagcggccuggugggcgacacccccagaaagaacgacagcagcagcagcagccacugccuggaccccaacaacgaggagggcggccacggcgugaagggcugggccuucgacgacggcaacgacguguggaugggcagaaccaucagcgagaagagcagacugggcuacgagaccuucaaggugaucgagggcuggagcaaccccaagagcaagcugcagaucaacagacaggugaucguggacagaggcaacagaagcggcuacagcggcaucuucagcguggagggcaagagcugcaucaacagaugcuucuacguggagcugaucagaggcagaaaggaggagaccgaggugcuguggaccagcaacagcaucgugguguucugcggcaccagcggcaccuacggcaccggcagcuggcccgacggcgccgacaucaaccugaugcccaucuga

SEQ ID NO: 182396 - RNA, 1413 nt, Artificial Sequence
  derived and/or modified CDS sequence (opt4) from neuraminidase__InfluenzaA__AFJ78312
augaaccccaaccagaagaucaucaccaucggcagcaucagcaucgccaucggcaucaucagccugaugcugcagaucggcaacaucaucagcaucugggccagccacagcauccagaccggcagccagaaccacaccggcaucugcaaccagagaaucaucaccuacgagaacagcaccugggugaaccacaccuacgugaacaucaacaacaccaacgugguggccggcaaggacaagaccagcgugacccuggccggcaacagcagccugugcagcaucagcggcugggccaucuacaccaaggacaacagcaucagaaucggcagcaagggcgacguguucgugaucagagagcccuucaucagcugcagccaccuggagugcagaaccuucuuccugacccagggcgcccugcugaacgacaagcacagcaacggcaccgugaaggacagaagccccuacagagcccugaugagcugcccccugggcgaggcccccagccccuacaacagcaaguucgagagcguggccuggagcgccagcgccugccacgacggcaugggcuggcugaccaucggcaucagcggccccgacaacggcgccguggccgugcugaaguacaacggcaucaucaccgagaccaucaagagcugggagaagagaauccugagaacccaggagagcgagugcgugugcgugaacggcagcugcuucaccaucaugaccgacggccccagcaacggcgccgccagcuacaagaucuucaagaucgagaagggcaaggugaccaagagcaucgagcugaacgcccccaacagccacuacgaggagugcagcugcuaccccgacaccggcaccgugaugugcgugugcagagacaacuggcacggcagcaacagacccugggugagcuucaaccagaaccuggacuaccagaucggcuacaucugcagcggcguguucggcgacaaccccagacccaaggacggcgagggcagcugcaaccccgugaccgccgacggcgccgacggcgugaagggcuucagcuacaaguacggcaacggcguguggaucggcagaaccaagagcaacagacugagaaagggcuucgagaugaucugggaccccaacggcuggaccgacaccgacagcgacuucagcgugaagcaggacgugguggccaucaccgacuggagcggcuacagcggcagcuucgugcagcaccccgagcugaccggccuggacugcaucagacccugcuucuggguggagcuggugagaggcagacccagagagaacaccaccaucuggaccagcggcagcagcaucagcuucugcggcgugaacagcgacaccgccaacuggagcuggcccgacggcgccgagcugcccuucaccaucgacaaguga

SEQ ID NO: 182397 - RNA, 1410 nt, Artificial Sequence; identical to SEQ ID NO: 182329
  derived and/or modified CDS sequence (opt4) from neuraminidase__InfluenzaA__AFJ78323

SEQ ID NO: 182398 - RNA, 1413 nt, Artificial Sequence
  derived and/or modified CDS sequence (opt4) from neuraminidase__InfluenzaA__AFJ78334
augaaccccaaccagaagaucaucaccaucggcagcaucagcaucgccaucggcaucaucagccugaugcugcagaucggcaacaucaucagcaucugggccagccacagcauccagaccggcagccagaaccacaccggcaucugcaaccagagaaucaucaccuacgagaacagcaccugggugaaccacaccuacgugaacaucaacaacaccaacgugguggccggcaaggacaagaccagcgugacccuggccggcaacagcagccugugcagcaucagcggcugggccaucuacaccaaggacaacagcaucagaaucggcagcaagggcgacguguucgugaucagagagcccuucaucagcugcagccaccuggagugcagaaccuucuuccugacccagggcgcccugcugaacgacaagcacagcaacggcaccgugaaggacagaagccccuacagagcccugaugagcugcccccugggcgaggcccccagccccuacaacagcaaguucgagagcguggccuggagcgccagcgccugccacgacggcaugggcuggcugaccaucggcaucagcggccccgacaacggcgccguggccgugcugaaguacaacggcaucaucaccgagaccaucaagagcuggaagaagcagauccugagaacccaggagagcgagugcgugugcgugaacggcagcugcuucaccaucaugaccgacggccccagcaacggcgccgccagcuacaagaucuucaagaucgagaagggcaaggugaccaagagcaucgagcugaacgcccccaacuuccacuacgaggagugcagcugcuaccccgacaccggcaccgugaugugcgugugcagagacaacuggcacggcagcaacagacccugggugagcuucaaccagaaccuggacuaccagaucggcuacaucugcagcggcguguucggcgacaaccccagacccaaggacggcgagggcagcugcaaccccgugaccguggacggcgccgacggcgugaagggcuucagcuacaaguacggcaacggcguguggaucggcagaaccaagagcaacagacugagaaagggcuucgagaugaucugggaccccaacggcuggaccgacaccgacagcgacuucagcgugaagcaggacgugguggccaucaccgacuggagcggcuacagcggcagcuucgugcagcaccccgagcugaccggccuggacugcaucagacccugcuucuggguggagcuggugagaggccugcccagagagaacaccaccaucuggaccagcggcagcagcaucagcuucugcggcgugaacagcgacaccgccaacuggagcuggcccgacggcgccgagcugcccuucaccaucgacaaguga

SEQ ID NO: 182399 - RNA, 1413 nt, Artificial Sequence; identical to SEQ ID NO: 182398
  derived and/or modified CDS sequence (opt4) from neuraminidase__InfluenzaA__AFJ78345

SEQ ID NO: 182400 - RNA, 1413 nt, Artificial Sequence
  derived and/or modified CDS sequence (opt4) from neuraminidase__InfluenzaA__AFJ78356
augaaccccaaccagaagaucaucaccaucggcagcaucagcaucgccaucggcaucaucagccugaugcugcagaucggcaacaucaucagcaucugggccagccacagcauccagaccggcagccagaaccacaccggcaucugcaaccagagaaucaucaccuacgagaacagcaccugggugaaccacaccuacgugaacaucaacaacaccaacgugguggugggcaaggacaagaccagcgugacccuggccggcaacagcagccugugcagcaucagcggcugggccaucuacaccaaggacaacagcaucagaaucggcagcaagggcgacguguucgugaucagagagcccuucaucagcugcagccaccuggagugcagaaccuucuuccugacccagggcgcccugcugaacgacaagcacagcaacggcaccgugaaggacagaagccccuacagagcccugaugagcugcccccugggcgaggcccccagccccuacaacagcaaguucgagagcguggccuggagcgccagcgccugccacgacggcaugggcuggcugaccaucggcaucagcggccccgacaacggcgccguggccgugcugaaguacaacggcaucaucaccgagaccaucaagagcuggaagaagcagauccugagaacccaggagagcgagugcgugugcgugaacggcagcugcuucaccaucaugaccgacggccccagcaacggcgccgccagcuacaagaucuucaagaucgagaagggcaaggugaccaagagcaucgagcugaacgcccccaacuuccacuacgaggagugcagcugcuaccccgacaccggcaccgugaugugcaucugcagagacaacuggcacggcagcaacagacccugggugagcuucaaccagaaccuggacuaccagaucggcuacaucugcagcggcguguucggcgacaaccccagacccaaggacggcgagggcagcugcaaccccgugaccguggacggcgccgacggcgugaagggcuucagcuacaaguacggcaacggcguguggaucggcagaaccaagagcaacagacugagaaagggcuucgagaugaucugggaccccaacggcuggaccgacaccgacagcgacuucagcgugaagcaggacgugguggccaucaccgacuggagcggcuacagcggcagcuucgugcagcaccccgagcugaccggccuggacugcaucagacccugcuucuggguggagcuggugagaggccugcccagagagaacaccaccaucuggaccagcggcagcagcaucagcuucugcggcgugaacagcgacaccgccaacuggagcuggcccgacggcgccgagcugcccuucaccaucgacaaguga

SEQ ID NO: 182401 - RNA, 1413 nt, Artificial Sequence
  derived and/or modified CDS sequence (opt4) from neuraminidase__InfluenzaA__AFJ78367
augaaccccaaccagaagaucaucaccaucggcagcaucagcaucgccaucggcaucaucagccugaugcugcagaucggcaacaucaucagcaucugggccagccacagcauccagaccggcagccagaaccacaccggcaucugcaaccagagaaucaucaccuacgagaacagcaccugggugaaccacaccuacgugaacaucaacaacaccaacgugguggccggcaaggacaagaccagcgugacccuggccggcaacagcagccugugcagcaucagcggcugggccaucuacaccaaggacaacagcaucagaaucggcagcaagggcgacguguucgugaucagagagcccuucaucagcugcagccaccuggagugcagaaccuucuuccugacccagggcgcccugcugaacgacaagcacagcaacggcaccgugaaggacagaagccccuacagagcccugaugagcugcccccugggcgaggcccccagccccuacaacagcaaguucgagagcguggccuggagcgccagcgccugccacgacggcaugggcuggcugaccaucggcaucagcggccccgacaacggcgccguggccgugcugaaguacaacggcaucaucaccgagaccaucaagagcuggaagaagagaauccugagaacccaggagagcgagugcgugugcgugaacggcagcugcuucaccaucaugaccgacggccccagcaacggcgccgccagcuacaagaucuucaagaucgagaagggcaaggugaccaagagcaucgagcugaacgcccccaacagccacuacgaggagugcagcugcuaccccgacaccggcaccgugaugugcgugugcagagacaacuggcacggcagcaacagacccugggugagcuucaaccagaaccuggacuaccagaucggcuacaucugcagcggcguguucggcgacaaccccagacccaaggacggcgagggcagcugcaaccccgugaccgccgacggcgccgacggcgugaagggcuucagcuacaaguacggcaacggcguguggaucggcagaaccaagagcaacagacugagaaagggcuucgagaugaucugggaccccaacggcuggaccgacaccgacagcgacuucagcgugaagcaggacgugguggccaucaccgacuggagcggcuacagcggcagcuucgugcagcaccccgagcugaccggccuggacugcaucagacccugcuucuggguggagcuggugagaggcagacccagagagaacaccaccaucuggaccagcggcagcagcaucagcuucugcggcgugaacggcgacaccgccaacuggagcuggcccgacggcgccgagcugcccuucaccaucgacaaguga

SEQ ID NO: 182402 - RNA, 1413 nt, Artificial Sequence
  derived and/or modified CDS sequence (opt4) from neuraminidase__InfluenzaA__AFJ78378
augaaccccaaccagaaggugaucaccaucggcagcaucagcaucgccaucggcaucaucagccugaugcugcagaucggcaacaucaucagcaucugggccagccacagcauccagaccggcagccagaaccacaccggcaucugcaaccagagaaucaucaccuacgagaacagcaccugggugaaccacaccuacgugaacaucaacaacaccaacgugguggccggcaaggacaagaccagcgugacccuggccggcaacagcagccugugcagcaucagcggcugggccaucuacaccaaggacaacagcaucagaaucggcagcaagggcgacguguucgugaucagagagcccuucaucagcugcagccacauggagugcagaaccuucuuccugacccagggcgcccugcugaacgacaagcacagcaacggcaccgugaaggacagaagccccuacagagcccugaugagcugcccccugggcgaggcccccagccccuacaacagcaaguucgagagcguggccuggagcgccagcgccugccacgacggcaugggcuggcugaccaucggcaucagcggccccgacaacggcgccguggccgugcugaaguacaacggcaucaucaccgagaccaucaagagcuggaagaagagaauccugagaacccaggagagcgagugcgugugcgugaacggcagcugcuucaccaucaugaccgacggccccagcaacggcgccgccagcuacaagaucuucaagaucgagaagggcaaggugaccaagagcaucgagcugaacgcccccaacagccacuacgaggagugcagcugcuaccccgacaccggcaccgugaugugcgugugcagagacaacuggcacggcagcaacagacccugggugagcuucaaccagaaccuggacuaccagaucggcuacaucugcagcggcguguucggcgacaaccccagacccagagacggcgagggcagcugcaaccccgugaccguggacggcgccgacggcgugaagggcuucagcuacaaguacggcaacggcguguggaucggcagaaccaagagcaacagacugagaaagggcuucgagaugaucugggaccccaacggcuggaccgacaccgacagcgacuucgccgugaagcaggacgugguggccaucaccgacuggagcggcuacagcggcagcuucgugcagcaccccgagcugaccggccuggacugcaucagacccugcuucuggguggagcuggugagaggccugcccagagagaacaccaccaucuggaccagcggcagcagcaucagcuucugcggcgugaacagcgacaccgccaacuggagcuggcccgacggcgccgagcugcccuucaccaucgacaaguga

SEQ ID NO: 182403 - RNA, 1413 nt, Artificial Sequence; identical to SEQ ID NO: 174446
  derived and/or modified CDS sequence (opt4) from neuraminidase__InfluenzaA__AFJ78389

SEQ ID NO: 182404 - RNA, 1413 nt, Artificial Sequence; identical to SEQ ID NO: 174446
  derived and/or modified CDS sequence (opt4) from neuraminidase__InfluenzaA__AFJ78400

SEQ ID NO: 182405 - RNA, 1413 nt, Artificial Sequence; identical to SEQ ID NO: 174446
  derived and/or modified CDS sequence (opt4) from neuraminidase__InfluenzaA__AFJ78411

SEQ ID NO: 182406 - RNA, 1413 nt, Artificial Sequence
  derived and/or modified CDS sequence (opt4) from neuraminidase__InfluenzaA__AFJ78422
augaaccccaaccagaagaucaucaccaucggcagcaucagcaucgccaucggcaucaucagccugaugcugcagaucggcaacaucaucagcaucugggccagccacagcauccagaccggcagccagaaccacaccggcaucugcaaccagagaaucaucaccuacgagaacagcaccugggugaaccacaccuacgugaacaucaacaacaccaacgugguggccggcaaggacaagaccagcgugacccuggccggcaacagcagccugugcagcaucagcggcugggccaucuacaccaaggacaacagcaucagaaucggcagcaagggcgacguguucgugaucagagagcccuucaucagcugcagccaccuggagugcagaaccuucuuccugacccagggcgcccugcugaacgacaagcacagcaacggcaccgugaaggacagaagccccuacagagcccugaugagcugcccccugggcgaggcccccagccccuacaacagcaaguucgagagcguggccuggagcgccagcgccugccacgacggcaccggcuggcugaccaucggcaucagcggccccgacaacggcgccguggccgugcugaaguacaacggcaucaucaccgagaccaucaagagcuggaagaagagaauccugagaacccaggagagcgagugcgugugcaugaacggcagcugcuucaccaucaugaccgacggccccagcaacggcgccgccagcuacaagaucuucaagaucgagaagggcaaggugaccaagagcaucgagcugaacgcccccagcuuccacuacgaggagugcagcugcuaccccgacaccggcaccgugaugugcgugugcagagacaacuggcacggcagcaacagacccugggugagcuucaaccagaaccuggacuaccagaucggcuacaucugcagcggcguguucggcgacaaccccagaccccaggacggcgagggcagcugcaaccccgugaccguggacggcgccgacggcgugaagggcuucagcuacaaguacggcaacggcguguggaucggcagaaccaagagcaacagacugagaaagggcuucgagaugaucugggaccccaacggcuggaccaacaccgacagcgacuucagcgugaagcaggacgugguggccaucaccgacuggagcggcuacagcggcagcuucgugcagcaccccgagcugaccggccuggacugcaucagacccugcuucuggguggagcuggugagaggccugcccagagagaacaccaccaucuggaccagcggcagcagcaucagcuucugcggcgugaacagcgacaccgccaacuggagcuggcccgacggcgccgagcugcccuucaccaucgacaaguga

SEQ ID NO: 182407 - RNA, 1413 nt, Artificial Sequence; identical to SEQ ID NO: 176553
  derived and/or modified CDS sequence (opt4) from neuraminidase__InfluenzaA__AFJ78433

SEQ ID NO: 182408 - RNA, 1413 nt, Artificial Sequence; identical to SEQ ID NO: 176553
  derived and/or modified CDS sequence (opt4) from neuraminidase__InfluenzaA__AFJ78444

SEQ ID NO: 182409 - RNA, 1413 nt, Artificial Sequence
  derived and/or modified CDS sequence (opt4) from neuraminidase__InfluenzaA__AFJ78466
augaaccccaaccagaagaucaucaccaucggcagcaucagcaucgccaucggcaucaucagccugaugcugcagaucggcaacaucaucagcaucugggccagccacagcauccagaccggcagccagaaccacaccggcaucugcaaccagagaaucaucaccuacgagaacagcaccugggugaaccacaccuacgugaacaucaacaacaccaacgugguggccggcaaggacaagaccagcgugacccuggccggcaacagcagccugugcagcaucagcggcugggccaucuacaccaaggacaacagcaucagaaucggcagcaagggcgacguguucgugaucagagagcccuucaucagcugcagccaccuggagugcagaaccuucuuccugacccagggcgcccugcugaacgacaagcacagcaacggcaccgugaaggacagaagccccuacagagcccugaugagcugcccccugggcgaggcccccagccccuacaacagcaaguucgagagcguggccuggagcgccagcgccugccacgacggcaucggcuggcugaccaucggcaucagcggccccgacaacggcgccguggccgugcugaaguacaacggcaucaucaccggcaccaucaagagcuggaagaagcagauccugagaacccaggagagcgagugcgugugcaucaacggcagcugcuucaccaucaugaccgacggccccagcaacggcgccgccagcuacaagaucuucaagaucgagaagggcaaggugaccaagagcaucgagcugaacgcccccaacuuccacuacgaggagugcagcugcuaccccgacaccggcaccgugaugugcgugugcagagacaacuggcacggcagcaacagacccugggugagcuucaaccagaaccuggacuaccagaucggcuacaucugcagcggcguguucggcgacaaccccagacccaaggacggcgagggcagaugcaaccccgugaccguggacggcgccgacggcgugaagggcuucagcuacaaguacggcaacggcguguggaucggcagaaccaagagcaacagacugagaaagggcuucgagaugaucugggaccccaacggcuggaccaacaccgacagcgacuucagcgugaagcaggacgugguggccaucaccgacuggagcggcuacagcggcagcuucgugcagcaccccgagcugaccggccuggacugcaucagacccugcuucuggguggagcuggugagaggccugcccagagagaacaccaccaucuggaccagcggcagcagcaucagcuucugcggcgugaacagcgacaccgccaacuggagcuggcccgacggcgccgagcugcccuucaccaucgacaaguga

SEQ ID NO: 182410 - RNA, 1413 nt, Artificial Sequence
  derived and/or modified CDS sequence (opt4) from neuraminidase__InfluenzaA__AFJ78477
augaaccccaaccagaagaucaucaccaucggcagcaucagcaucgccaucggcaucaucggccugaugcugcagaucggcaacaucaucagcaucugggccagccacagcauccagaccggcagccagaaccacaccggcaucugcagccagagaaucaucaccuacgagaacagcaccugggugaacaacaccuacgugaacaucaacaacaccaacgugguggccgagaaggacaagaccagcgugacccuggccggcaacagcagccugugcagcaucagcggcugggccaucuacaccaaggacaacagcaucagaaucggcagcaagggcgacguguucgugaucagagagcccuucaucagcugcagccaccuggagugcagaaccuucuuccugacccagggcgcccugcugaacgacaagcacagcaacggcaccgugaaggacagaagccccuacagagcccugaugagcugcccccugggcgaggcccccagccccuacaacagcagauucgagagcguggccuggagcgccagcgccugccacgacggcaugggcuggcugaccaucggcaucagcggccccgacaacggcgccguggccgugcugaaguacaacggcaucaucaccgagaccaucaagagcuggaagaagagaauccugagaacccaggagagcgagugcgugugcaugaacggcagcugcuucaccaucaugaccgacggccccagcaacggcgccgccagcuacaagaucuucaagaucgagaagggcaaggugaccaagagcaucgagcugaacgcccccaacuuccacuacgaggagugcagcugcuaccccgacaccggcaccgugaugugcgugugcagagacaacuggcacggcagcaacagacccugggugagcuucaaccagaaccuggacuaccagaucggcuacaucugcagcggcguguucggcgacaaccccagacccaaggacggcgagggcagcugcaaccccgugaccguggacggcgccgacggcgugaagggcuucagcuacaaguacggcaacggcguguggaucggcagaaccaagagcaacagacugagaaagggcuucgagaugaucugggaccccaacggcuggaccaacaccgacagcgacuucagcgugaagcaggacgugguggccaucaccgacuggagcggcuacagcggcagcuucgugcagcaccccgagcugaccggccuggacugcaucagacccugcuucuggguggagcuggugagaggccugcccagagagaacaccaccaucuggaccagcggcagcagcaucagcuucugcggcgugaacagcggcaccgccaacuggagcuggcccgacggcgccgagcugcccuucaccaucgacaaguga

SEQ ID NO: 182411 - RNA, 1413 nt, Artificial Sequence
  derived and/or modified CDS sequence (opt4) from neuraminidase__InfluenzaA__AFJ78488
augaaccccaaccagaagaucaucaccaucggcagcaucagcaucgccaucggcaucaucagccugauccugcagaucggcaacaucaucagcaucugggccagccacagcauccagaccggcagccagaaccacaccggcaucugcaaccagagaaucaucaccuacgagaacagcaccugggugaacaacaccuacgugaacaucaacaacaccaacgugguggccgagaaggacaagaccagcgugacccuggccggcaacagcagccugugcagcaucagcggcugggccaucuacaccaaggacaacagcaucagaaucggcagcaagggcgacguguucgugaucagagagcccuucaucagcugcagccaccuggagugcagaaccuucuuccugacccagggcgcccugcugaacgacaagcacagcaacggcaccgugaaggacagaagccccuacagagcccugaugagcugcccccugggcgaggcccccagccccuacaacagcagauucgagagcguggccuggagcgccagcgccugccacgacggcaugggcuggcugaccaucggcaucagcggccccgacaacggcgccguggccgugcugaaguacaacggcaucaucaccgagaccaucaagagcuggaagaagagaauccugagaacccaggagagcgagugcgugugcaugaacggcagcugcuucaccaucaugaccgacggccccagcaacggcgccgccagcuacaagaucuucaagaucgagaagggcaaggugaccaagaccaucgagcugaacgcccccaacuuccacuacgaggagugcagcugcuaccccgacaccggcaccgugaugugcgugugcagagacaacuggcacggcagcaacagacccugggugagcuucaaccagaaccuggacuaccagaucggcuacaucugcagcggcguguucggcgacaaccccagacccaaggacggcgagggcagcugcaaccccgugaccguggacggcgccgacggcgugaagggcuucagcuacaaguacggcaacggcguguggaucggcagaaccaagagcaacagacugagaaagggcuucgagaugaucugggaccccaacggcuggaccaacaccgacagcgacuucagcaugaagcaggacgugguggccaucaccgacuggagcggcuacagcggcagcuucgugcagcaccccgagcugaccggccuggacugcaucagacccugcuucuggguggagcuggugagaggccugcccagagagaacaccaccaucuggaccagcggcagcagcaucagcuucugcggcgugaacagcggcaccgccaacuggagcuggcccgacggcgccgagcugcccuucaccaucgacaaguga

SEQ ID NO: 182412 - RNA, 1413 nt, Artificial Sequence
  derived and/or modified CDS sequence (opt4) from neuraminidase__InfluenzaA__AFJ78510
augaaccccaaccagaagaucaucaccaucggcagcaucagcaucgccaucggcaucaucagccugaugcugcagaucggcaacaucaucagcaucugggccagccacagcauccagaccggcagccagaaccacaccggcaucugcaaccagagaaucaucaccuacgagaacagcaccugggugaaccacaccuacgugaacaucaacaacaccaacgugguggccggcaaggacaagaccagcgugacccuggccggcaacagcagccugugcagcaucagcggcugggccaucuacaccaaggacaacagcaucagaaucggcagcaagggcgacguguucgugaucagagagcccuucaucagcugcagccaccuggagugcagaaccuucuuccugacccagggcgcccugcugaacgacaagcacagcaacggcaccgugaaggacagaagccccuacagagcccugaugagcugcccccugggcgaggcccccagccccuacaacagcaaguucgagagcguggccuggagcgccagcgccugccacgacggcaugggcuggcugaccaucggcaucagcggccccgacaacggcgccguggccgugcugaaguacaacggcaucaucaccggcaccaucaagagcuggaagaagcagauccugagaacccaggagagcgagugcgugugcaugaacggcagcugcuucaccaucaugaccgacggccccagcaacggcgccgccagcuacaagaucuucaagaucgagaagggcaaggugaccaagagcaucgagcugaacgcccccaacuuccacuacgaggagugcagcugcuaccccgacaccggcaucgugaugugcgugugcagagacaacuggcacggcagcaacagacccugggugagcuucaaccagaaccuggacuaccagaucggcuacaucugcagcggcguguucggcgacaaccccagacccaaggacggcgagggcagcugcaaccccgugaccguggacggcgccgacggcgugaagggcuucagcuacaaguacgacaacggcguguggaucggcagaaccaagagcaacagacugagaaagggcuucgagaugaucugggaccccaacggcuggaccaacaccgacagcgacuucagcgugaagcaggacgugguggccaucaccgacuggagcggcuacagcggcagcuucgugcagcaccccgagcugaccggccuggacugcaucagacccugcuucuggguggagcuggugagaggccugcccagagagaacaccaccaucuggaccagcggcagcagcaucagcuucugcggcgugaacagcgacaccgccaacuggagcuggcccgacggcgccgagcugcccuucaccaucgacaaguga

SEQ ID NO: 182413 - RNA, 1413 nt, Artificial Sequence
  derived and/or modified CDS sequence (opt4) from neuraminidase__InfluenzaA__AFJ78521
augaaccccaaccagaagaucaucaccaucggcagcaucagcaucgccaucggcaucaucagccugauccugcagaucggcaacaucaucagcaucugggccagccacagcauccagaccggcagccagaaccacaccggcaucugcaaccagagaaucaucaccuacgagaacagcaccugggugaacaacaccuacgugaacaucaacaacaccaacgugguggccgagaaggacaagaccagcgugacccuggccggcaacagcagccugugcagcaucagcggcugggccaucuacaccaaggacaacagcaucagaaucggcagcaagggcgacguguucgugaucagagagcccuucaucagcugcagccaccuggagugcagaaccuucuuccugacccagggcgcccugcugaacgacaagcacagcaacggcaccgugaaggacagaagccccuacagagcccugaugagcugcccccugggcgaggcccccagccccuacaacagcagauucgagagcguggccuggagcgccagcgccugccacgacggcaugggcuggcugaccaucggcaucagcggccccgacaacggcgccguggccgugcugaaguacaacggcaucaucaccgagaccaucaagagcuggaagaagagaauccugagaacccaggagagcgagugcgugugcaugaacggcagcugcuucaccaucaugaccgacggccccagcaacggcgccgccagcuacaagaucuucaagaucgagaagggcaaggugaccaagaccaucgagcugaacgcccccaacuuccacuacgaggagugcagcugcuaccccgacaccggcaccgugaugugcgugugcagagacaacuggcacggcagcaacagacccugggugagcuucaaccagaaccuggacuaccagaucggcuacaucugcagcggcguguucggcgacaaccccagacccaaggacggcgagggcagcugcaaccccgugaccguggacggcgccgacggcgugaagggcuucagcuacaaguacggcaacggcguguggaucggcagaaccaagagcaacagacugagaaagggcuucgagaugaucugggaccccaacggcuggaccaacaccgacagcgacuucagcgugaagcaggacgugguggccaucaccgacuggagcggcuacagcggcagcuucgugcagcaccccgagcugaccggccuggacugcaucagacccugcuucuggguggagcuggugagaggccugcccagagagaacaccaccaucuggaccagcggcagcagcaucagcuucugcggcgugaacagcggcaccgccaacuggagcuggcccgacggcgccgagcugcccuucaccaucgacaaguga

SEQ ID NO: 182414 - RNA, 1413 nt, Artificial Sequence; identical to SEQ ID NO: 182307
  derived and/or modified CDS sequence (opt4) from neuraminidase__InfluenzaA__AFJ78532

SEQ ID NO: 182415 - RNA, 1413 nt, Artificial Sequence; identical to SEQ ID NO: 182307
  derived and/or modified CDS sequence (opt4) from neuraminidase__InfluenzaA__AFJ78543

SEQ ID NO: 182416 - RNA, 1413 nt, Artificial Sequence; identical to SEQ ID NO: 182307
  derived and/or modified CDS sequence (opt4) from neuraminidase__InfluenzaA__AFJ78554

SEQ ID NO: 182417 - RNA, 1413 nt, Artificial Sequence; identical to SEQ ID NO: 182295
  derived and/or modified CDS sequence (opt4) from neuraminidase__InfluenzaA__AFJ78565

SEQ ID NO: 182418 - RNA, 1413 nt, Artificial Sequence
  derived and/or modified CDS sequence (opt4) from neuraminidase__InfluenzaA__AFJ78576
augaaccccaaccagaagaucaucaccaucggcagcaucagcaucgccaucggcaucaucagccugaugcugcagaucggcaacaucaucagcaucugggccagccacagcauccagaccggcagccagaaccacaccggcaucugcaaccagagaaucaucaccuacgagaacagcaccugggugaaccacaccuacgugaacaucaacaacaccaacgugguggccggcaaggacaagacccccgugacccuggccggcaacagcagccugugcagcaucagcggcugggccauccacaccaaggacaacagcaucagaaucggcagcaagggcgacguguucgugaucagagagcccuucaucagcugcagccaccuggagugcaagaccuucuuccugacccagggcgcccugcugaacgacaagcacagcaacggcaccgugaaggacagaagccccuacagagcccugaugagcugcccccugggcgaggcccccagccccuacaacagcaaguucgagagcguggccuggagcgccagcgccugccacgacggcaucggcuggcugaccaucggcaucagcggccccgacaacggcgccguggccgugcugaaguacaacggcaucaucaccggcaccaucaagagcuggaagaagcagauccugagaacccaggagagcgagugcgugugcaugaacggcagcugcuucaccaucaugaccgacggccccagcaacggcgccgccagcuacaagaucuucaagaucgagaagggcaaggugaccaagagcauggagcugaacgcccccaacuuccacuacgaggagugcagcugcuaccccgacaccggcaccgugaugugcgugugcagagacaacuggcacggcagcaacagacccugggugagcuucaaccagaaccuggacuaccagaucggcuacaucugcaccggcguguucggcgacaaccccagacccgaggacggcgagggcagcugcaaccccgugaccguggacggcgccaacggcgugaagggcuucagcuacaaguacggcaacggcguguggaucggcagaaccaagagcaacagaaucagaaagggcuucgagaugaucugggaccccaacggcuggaccaacaccgacagcgacuucagcgugaagcaggacaucguggccaucaccgacuggagcggcuacagcggcagcuucgugcagcaccccgagcugaccggccuggacugcaucagacccugcuucuggguggagcuggugagaggccugcccagagagaacaccaccaucuggaccagcggcagcagcaucagcuucugcggcgugaacagcgacaucgccaacuggagcuggcccgacggcgccgagcugcccuucaccaucgacaaguga

SEQ ID NO: 182419 - RNA, 1413 nt, Artificial Sequence
  derived and/or modified CDS sequence (opt4) from neuraminidase__InfluenzaA__AFJ78598
augaaccccaaccagaagaucaucaccaucggcagcaucagcaucgccaucggcaucaucagccugaugcugcagaucggcaacaucaucagcaucugggccagccacagcauccagaccggcauccagaacaacaccggcaucugcaaccagagaaucaucaccuacgagaacagcaccugggugaaccacaccuacgugaacaucaacaacaccaacgugguggccggcgaggacaagaccagcgugacccuggccggcaacagcagccugugcagcaucagcggcugggccaucuacaccaaggacaacagcaucagaaucggcagcaagggcgacguguucgugaucagagagcccuucaucagcugcagccaccuggagugcagaaccuucuuccugacccagggcgcccugcugaacgacaagcacagcaacggcaccgugaaggacagaagccccuacagagcccugaugagcugcccccugggcgaggcccccagccccuacaacagcaaguucgagagcguggccuggagcgccagcgccugccacgacggcaugggcuggcugaccaucggcaucagcggccccgacaacggcgccguggccgugcugaaguacaacggcaucaucaccggcaccaucaagagcuggaagaagcagauccugagaacccaggagagcgagugcgugugcaugaacggcagcugcuucaccaucaugaccgacggccccagcaacaaggccgccagcuacaagaucuucaagaucgagaagggcaaggugaccaagagcaucgagcugaacgcccccaacuuccacuacgaggagugcagcugcuaccccgacaccggcaucgugaugugcgugugcagagacaacuggcacggcagcaacagacccugggugagcuucaaccagaaccuggacuaccagaucggcuacaucugcagcggcguguucggcgacaaccccagacccgaggacggcgagggcagcugcaaccccgugaccguggacggcgccaacggcgugaagggcuucagcuacaaguacgacaacggcguguggaucggcagaaccaagagcaacagacugagaaagggcuucgagaugaucugggaccccaacggcuggaccaacaccgacagcgacuucagcgugaagcaggacgugguggccaucaccgacuggagcggcuacagcggcagcuucgugcagcaccccgagcugaccggccuggacugcaucagacccugcuucuggguggagcuggugagaggccugcccagagagaacaccaccaucuggaccagcggcagcagcaucagcuucugcggcgugaacagcgacaccgccaacuggagcuggcccgacggcgccgagcugcccuucaccaucgacaaguga

SEQ ID NO: 182420 - RNA, 1413 nt, Artificial Sequence
  derived and/or modified CDS sequence (opt4) from neuraminidase__InfluenzaA__AFJ78609
augaaccccaaccagaagaucaucaccaucggcagcaucagcaucgccaucggcaucaucagccugaugcugcagaucggcaacaucaucagcaucugggccagccacagcauccagaccggcagccagaacaacaccggcaucugcaaccagagaaucaucaccuacgagaacagcaccugggugaaccacaccuacgugaacaucaacaacaccaacgugguggccggcgaggacaagaccagcgugauccuggccggcaacagcagccugugcagcaucagcggcugggccaucuacaccaaggacaacagcaucagaaucggcagcaagggcgacguguucgugaucagagagcccuucaucagcugcagccaccuggagugcagaaccuucuuccugacccagggcgcccugcugaacgacaagcacagcaacggcaccgugaaggacagaagccccuacagagcccugaugagcugcccccugggcgaggcccccagccccuacaacagcaaguucgagagcguggccuggagcgccagcgccugccacgacggcaugggcuggcugaccaucggcaucagcggccccgacaacggcgccguggccgugcugaaguacaacggcaucaucaccggcaccaucaagagcuggaagaagcagauccugagaacccaggagagcgagugcgugugcaugaacggcagcugcuucaccaucaugaccgacggccccagcaacaaggccgccagcuacaagaucuucaagaucgagaagggcaaggugaccaagagcaucgagcugaacgcccccaacuucuacuacgaggagugcagcugcuaccccgacaccggcaucgugaugugcgugugcagagacaacuggcacggcagcaacagacccugggugagcuucaaccagaaccuggacuaccagaucggcuacaucugcagcggcguguucggcgacaaccccagacccgaggacggcgagggcagcugcaaccccgugaccguggacggcgccaacggcgugaagggcuucagcuacaaguacggcaacggcguguggaucggcagaaccaagagcaacagacugagaaagggcuucgagaugaucugggaccccaacggcuggaccaacaccgacagcgacuucagcgugaagcaggacgugguggccaucaccgacuggagcggcuacagcggcagcuucgugcagcaccccgagcugaccggccuggacugcaucagacccugcuucuggguggagcuggugagaggccugcccagagagaacaccaccaucuggaccagcggcagcagcaucagcuucugcggcgugaacagcgacaccgccaacuggagcuggcccgacggcgccgagcugcccuucaccaucgacaaguga

SEQ ID NO: 182421 - RNA, 1413 nt, Artificial Sequence; identical to SEQ ID NO: 177521
  derived and/or modified CDS sequence (opt4) from neuraminidase__InfluenzaA__AFJ78620

SEQ ID NO: 182422 - RNA, 1413 nt, Artificial Sequence; identical to SEQ ID NO: 182295
  derived and/or modified CDS sequence (opt4) from neuraminidase__InfluenzaA__AFJ78631

SEQ ID NO: 182423 - RNA, 1413 nt, Artificial Sequence; identical to SEQ ID NO: 177521
  derived and/or modified CDS sequence (opt4) from neuraminidase__InfluenzaA__AFJ78642

SEQ ID NO: 182424 - RNA, 1413 nt, Artificial Sequence; identical to SEQ ID NO: 177521
  derived and/or modified CDS sequence (opt4) from neuraminidase__InfluenzaA__AFJ78653

SEQ ID NO: 182425 - RNA, 1410 nt, Artificial Sequence; identical to SEQ ID NO: 176798
  derived and/or modified CDS sequence (opt4) from neuraminidase__InfluenzaA__AFJ78664

SEQ ID NO: 182426 - RNA, 1410 nt, Artificial Sequence; identical to SEQ ID NO: 176798
  derived and/or modified CDS sequence (opt4) from neuraminidase__InfluenzaA__AFJ78674

SEQ ID NO: 182427 - RNA, 1410 nt, Artificial Sequence; identical to SEQ ID NO: 176798
  derived and/or modified CDS sequence (opt4) from neuraminidase__InfluenzaA__AFJ78684

SEQ ID NO: 182428 - RNA, 1410 nt, Artificial Sequence; identical to SEQ ID NO: 176798
  derived and/or modified CDS sequence (opt4) from neuraminidase__InfluenzaA__AFJ78694

SEQ ID NO: 182429 - RNA, 1410 nt, Artificial Sequence; identical to SEQ ID NO: 176798
  derived and/or modified CDS sequence (opt4) from neuraminidase__InfluenzaA__AFJ78704

SEQ ID NO: 182430 - RNA, 1410 nt, Artificial Sequence; identical to SEQ ID NO: 176798
  derived and/or modified CDS sequence (opt4) from neuraminidase__InfluenzaA__AFJ78714

SEQ ID NO: 182431 - RNA, 1410 nt, Artificial Sequence
  derived and/or modified CDS sequence (opt4) from neuraminidase__InfluenzaA__AFJ78724
augaaccccaaccagaagaucaucaccaucggcagcgugugcaugaccaucggcauggccaaccugauccugcagaucggcaacaucaucagcaucuggaucagccacagcauccagcugggcaaccagaaccagaucgagaccugcaaccagagcgugaucaccuacgagaacaacaccugggugaaccagaccuacgugaacaucagcaacaccaacuucgccgccggccagagcguggugagcgugaagcuggccggcaacagcagccugugccccgugagcggcugggccaucuacagcaaggacaacagcaucagaaucggcagcaagggcgacguguucgugaucagagagcccuucaucagcugcagcccccuggagugcagaaccuucuuccugacccagggcgcccugcugaacgacaagcacagcaacggcaccaucaaggacagaagccccuacagaacccugaugagcugccccaucggcgaggugcccagccccuacaacagcagauucgagagcguggccuggagcgccagcgccugccacgacggcaucaacuggcugaccaucggcaucagcggccccgacaacggcgccguggccgugcugaaguacaacggcaucaucaccgacaccaucaagagcuggagaaacaacauccugagaacccaggagagcgagugcgccugcgugaacggcagcugcuucacccugaugaccgacggccccagcgacggccaggccagcuacaagaucuucagaaucgagaagggcaagaucgugaagagcguggagaugaacgcccccaacuaccacuacgaggagugcagcugcuaccccgacagcagcgagaucaccugcgugugcagagacaacuggcacggcagcaacagacccugggugagcuucaaccagaaccuggaguaccagaucggcuacaucugcagcggcaucuucggcgacaaccccagacccaacgacaagaccggcagcugcggccccgugagcagcaacggcgccaacggcgugaagggcuucagcuucaaguacggcaacggcguguggaucggcagaaccaagagcaucagcagcagaaacggcuucgagaugaucugggaccccaacggcuggaccggcaccgacaacaacuucagcaucaagcaggacaucgugggcaucaacgaguggagcggcuacagcggcagcuucgugcagcaccccgagcugaccggccuggacugcaucagacccugcuucuggguggagcugaucagaggcagacccaaggagaacaccaucuggaccagcggcagcagcaucagcuucugcggcgugaacagcgacaccgugggcuggagcuggcccgacggcgccgagcugcccuucaccaucgacaaguga

SEQ ID NO: 182432 - RNA, 1410 nt, Artificial Sequence; identical to SEQ ID NO: 176798
  derived and/or modified CDS sequence (opt4) from neuraminidase__InfluenzaA__AFJ78734

SEQ ID NO: 182433 - RNA, 1410 nt, Artificial Sequence; identical to SEQ ID NO: 176798
  derived and/or modified CDS sequence (opt4) from neuraminidase__InfluenzaA__AFJ78744

SEQ ID NO: 182434 - RNA, 1410 nt, Artificial Sequence; identical to SEQ ID NO: 176798
  derived and/or modified CDS sequence (opt4) from neuraminidase__InfluenzaA__AFJ78754

SEQ ID NO: 182435 - RNA, 1410 nt, Artificial Sequence; identical to SEQ ID NO: 176798
  derived and/or modified CDS sequence (opt4) from neuraminidase__InfluenzaA__AFJ78764

SEQ ID NO: 182436 - RNA, 1410 nt, Artificial Sequence; identical to SEQ ID NO: 176798
  derived and/or modified CDS sequence (opt4) from neuraminidase__InfluenzaA__AFJ78774

SEQ ID NO: 182437 - RNA, 1410 nt, Artificial Sequence; identical to SEQ ID NO: 176798
  derived and/or modified CDS sequence (opt4) from neuraminidase__InfluenzaA__AFJ78784

SEQ ID NO: 182438 - RNA, 1410 nt, Artificial Sequence
  derived and/or modified CDS sequence (opt4) from neuraminidase__InfluenzaA__AFJ78794
augaaccccaaccagaagaucaucaccaucggcagcgugugcaugaccaucggcauggccaaccugauccugcagaucggcaacaucaucagcaucuggaucagccacagcauccagcugggcaaccagaaccagaucgagaccugcaaccagagcgugaucaccuacgagaacaacaccugggugaaccagaccuacgugaacaucagcaacaccaacuucgccgccggccagagcguggugagcgugaagcuggccggcaacagcagccugugccccgugagcggcugggccaucuacagcaaggacaacagcaucagaaucggcagcaagggcgacguguucgugaucagagagcccuucaucagcugcagcccccuggagugcagaaccuucuuccugacccagggcgcccugcugaacgacaagcacagcaacggcaccaucaaggacagaagccccuacagaacccugaugagcugccccaucggcgaggugcccagccccuacaacagcagauucgagagcguggccuggagcgccagcgccugccacgacggcaucaacuggcugaccaucggcaucagcggccccgacaacggcgccguggccgugcugaaguacaacggcaucaucaccgacaccaucaagagcuggagaaacaacauccugagaacccaggagagcgagugcgccugcgugaacggcagcugcuucaccgugaugaccgacggccccagcgacggccaggccagcuacaagaucuucagaaucgagaagggcaagaucgugaagagcguggagaugaacgcccccaacuaccacuacgaggagugcagcugcuaccccgacagcggcgagaucaccugcgugugcagagacaacuggcacggcagcaacagacccugggugagcuucaaccagaaccuggaguaccagaucggcuacaucugcagcggcaucuucggcgacaaccccagacccaacgacaagaccggcagcugcggccccgugagcagcaacggcgccaacggcgugaagggcuucagcuucaaguacggcaacggcguguggaucggcagaaccaagagcaucagcagcagaaacggcuucgagaugaucugggaccccaacggcuggaccggcaccgacaacaacuucagcaucaagcaggacaucgugggcaucaacgaguggagcggcuacagcggcagcuucgugcagcaccccgagcugaccggccuggacugcaucagacccugcuucuggguggagcugaucagaggcagacccaaggagaacaccaucuggaccagcggcagcagcaucagcuucugcggcgugaacagcgacaccgugggcuggagcuggcccgacggcgccgagcugcccuucaccaucgacaaguga

SEQ ID NO: 182439 - RNA, 1410 nt, Artificial Sequence; identical to SEQ ID NO: 176798
  derived and/or modified CDS sequence (opt4) from neuraminidase__InfluenzaA__AFJ78804

SEQ ID NO: 182440 - RNA, 1410 nt, Artificial Sequence; identical to SEQ ID NO: 176798
  derived and/or modified CDS sequence (opt4) from neuraminidase__InfluenzaA__AFJ78814

SEQ ID NO: 182441 - RNA, 1410 nt, Artificial Sequence; identical to SEQ ID NO: 176798
  derived and/or modified CDS sequence (opt4) from neuraminidase__InfluenzaA__AFJ78824

SEQ ID NO: 182442 - RNA, 1410 nt, Artificial Sequence; identical to SEQ ID NO: 176798
  derived and/or modified CDS sequence (opt4) from neuraminidase__InfluenzaA__AFJ78834

SEQ ID NO: 182443 - RNA, 1410 nt, Artificial Sequence; identical to SEQ ID NO: 176798
  derived and/or modified CDS sequence (opt4) from neuraminidase__InfluenzaA__AFJ78844

SEQ ID NO: 182444 - RNA, 1410 nt, Artificial Sequence; identical to SEQ ID NO: 179047
  derived and/or modified CDS sequence (opt4) from neuraminidase__InfluenzaA__AFJ78854

SEQ ID NO: 182445 - RNA, 1410 nt, Artificial Sequence; identical to SEQ ID NO: 176798
  derived and/or modified CDS sequence (opt4) from neuraminidase__InfluenzaA__AFJ78864

SEQ ID NO: 182446 - RNA, 1410 nt, Artificial Sequence; identical to SEQ ID NO: 176798
  derived and/or modified CDS sequence (opt4) from neuraminidase__InfluenzaA__AFJ78874

SEQ ID NO: 182447 - RNA, 1410 nt, Artificial Sequence; identical to SEQ ID NO: 176798
  derived and/or modified CDS sequence (opt4) from neuraminidase__InfluenzaA__AFJ78884

SEQ ID NO: 182448 - RNA, 1410 nt, Artificial Sequence; identical to SEQ ID NO: 176798
  derived and/or modified CDS sequence (opt4) from neuraminidase__InfluenzaA__AFJ78894

SEQ ID NO: 182449 - RNA, 1410 nt, Artificial Sequence; identical to SEQ ID NO: 176798
  derived and/or modified CDS sequence (opt4) from neuraminidase__InfluenzaA__AFJ78904

SEQ ID NO: 182450 - RNA, 1410 nt, Artificial Sequence; identical to SEQ ID NO: 176798
  derived and/or modified CDS sequence (opt4) from neuraminidase__InfluenzaA__AFJ78914

SEQ ID NO: 182451 - RNA, 1410 nt, Artificial Sequence
  derived and/or modified CDS sequence (opt4) from neuraminidase__InfluenzaA__AFJ78924
augaaccccaaccagaagaucaucaccaucggcagcgugugcaugaccaucggcauggccaaccugauccugcagaucggcaacaucaucagcaucuggaucagccacagcauccagcugggcaaccagaaccagaucgagaccugcaaccagagcgugaucaccuacgagaacaacaccugggugaaccagaccuacguggacaucagcaacaccaacuucgccgccggccagagcguggugagcgugaagcuggccggcaacagcagccugugccccgugagcggcugggccaucuacagcaaggacaacagcaucagaaucggcagcaagggcgacguguucgugaucagagagcccuucaucagcugcagcccccuggagugcagaaccuucuuccugacccagggcgcccugcugaacgacaagcacagcaacggcaccaucaaggacagaagccccuacagaacccugaugagcugccccaucggcgagauccccagccccuacaacagcagauucgagagcguggccuggagcgccagcgccugccacgacggcaucaacuggcugaccaucggcaucagcggccccgacaacggcgccguggccgugcugaaguacaacggcaucaucaccgacaccaucaagagcuggagaaacaacauccugagaacccaggagagcgagugcgccugcgugaacggcagcugcuucaccgugaugaccgacggccccagcgacggccaggccagcuacaagaucuucagaaucgagaagggcaagaucgugaagagcguggagaugaacgcccccaacuaccacuacgaggagugcagcugcuaccccgacagcagcgagaucaccugcgugugcagagacaacuggcacggcagcaacagacccugggugagcuucaaccagaaccuggaguaccagaucggcuacaucugcagcggcaucuucggcgacaaccccagacccaacgacaagaccggcagcugcggccccgugagcagcaacggcgccaacggcgugaagggcuucagcuucaaguacggcaacggcguguggaucggcagaaccaagagcaucagcagcagaaacggcuucgagaugaucugggaccccaacggcuggaccggcaccgacaacaacuucagcaucaagcaggacaucgugggcaucaacgaguggagcggcuacagcggcagcuucgugcagcaccccgagcugaccggccuggacugcaucagacccugcuucuggguggagcugaucagaggcagacccaaggagaacaccaucuggaccagcggcagcagcaucagcuucugcggcgugaacagcgacaccgugggcuggagcuggcccgacggcgccgagcugcccuucaccaucgacaaguga

SEQ ID NO: 182452 - RNA, 1410 nt, Artificial Sequence
  derived and/or modified CDS sequence (opt4) from neuraminidase__InfluenzaA__AFJ97569
augaaccccaaccagaagaucaucaccaucggcagcgugugcaugaccaucggcauggccaaccugauccugcagaucggcaacaucaucagcaucuggaucagccacagcauccagcugggcaaccagaaccagaucgagaccugcaaccagagcgugaucaccuacgagaacaacaccugggugaaccagaccuacgugaacaucagcaacaccaacuucgccgccggccagagcguggugagcgugaagcuggccggcaacagcagccugugccccgugagcggcugggccaucuacagcaaggacaacagcaucagaaucggcagcaagggcgacguguucgugaucagagagcccuucaucagcugcagcccccuggagugcagaaccuucuuccugacccagggcgcccugcugaacgacaagcacagcaacgagaccaucaaggacagaagccccuacagaacccugaugagcugccccaucggcgaggugcccagccccuacaacagcagauucgagagcguggccuggagcgccagcgccugccacgacggcaucaacuggcugaccaucggcaucagcggccccgacaacggcgccguggccgugcugaaguacaacggcaucaucaccgacaccaucaagagcuggagaaacaacauccugagaacccaggagagcgagugcgccugcgugaacggcagcugcuucaccgugaugaccgacggccccagcgacggccaggccagcuacaagaucuucagaaucgagaagggcaagaucgugaagagcguggagaugaacgcccccaacuaccacuacgaggagugcagcugcuaccccgacagcagcgagaucaccugcgugugcagagacaacuggcacggcagcaacagacccugggugagcuucaaccagaaccuggaguaccagaucggcuacaucugcagcggcaucuucggcgacaaccccagacccaacgacaagaccggcagcugcggccccgugagcagcaacggcgccaacggcgugaagggcuucagcuucaaguacggcaacggcguguggaucggcagaaccaagagcaucagcagcagaaacggcuucgagaugaucugggaccccaacggcuggaccggcaccgacaacaacuucagcaucaagcaggacaucgugggcaucaacgaguggagcggcuacagcggcagcuucgugcagcaccccgagcugaccggccuggacugcaucagacccugcuucuggguggagcugaucagaggcagacccaaggagaacaccaucuggaccagcggcagcagcaucagcuucugcggcgugaacagcgacaccgugagcuggagcuggcccgacggcgccgagcugcccuucaccaucgacaaguga

SEQ ID NO: 182453 - RNA, 1410 nt, Artificial Sequence; identical to SEQ ID NO: 176788
  derived and/or modified CDS sequence (opt4) from neuraminidase__InfluenzaA__AFK14107

SEQ ID NO: 182454 - RNA, 1410 nt, Artificial Sequence; identical to SEQ ID NO: 176798
  derived and/or modified CDS sequence (opt4) from neuraminidase__InfluenzaA__AFK14117

SEQ ID NO: 182455 - RNA, 1410 nt, Artificial Sequence; identical to SEQ ID NO: 177565
  derived and/or modified CDS sequence (opt4) from neuraminidase__InfluenzaA__AFK14141

SEQ ID NO: 182456 - RNA, 1410 nt, Artificial Sequence
  derived and/or modified CDS sequence (opt4) from neuraminidase__InfluenzaA__AFK14150
augaaccccaaccagaagaucaucaccaucggcagcgugugcaugaccaucggcauggccaaccugauccugcagaucggcaacaucaucagcaucuggaucagccacagcaucagacugggcaaccagaaccagaucgagaccugcaaccagagcgugaucaccuacgagaacaacaccugggugaaccagaccuacgugaacaucagcaacaccaacuucgccgccggccagagcguggugagcgugaagcuggccggcaacagcagccugugccccgugagcggcugggccaucuacagcaaggacaacagcaucagaaucggcagcaagggcgacguguucgugaucagagagcccuucaucagcugcagcccccuggagugcagaaccuucuuccugacccagggcgcccugcugaacgacaagcacagcaacggcaccaucaaggacagaagccccuacagaacccugaugagcugccccaucggcgaggugcccagccccuacaacagcagauucgagagcguggccuggagcgccagcgccugccacgacggcaucaacuggcugaccaucggcaucagcggccccgacaacggcgccguggccgugcugaaguacaacggcaucaucaccgacaccaucaagagcuggagaaacaacauccugagaacccaggagagcgagugcgccugcgugaacggcagcugcuucaccgugaugaccgacggccccagcgacgagcaggccagcuacaagaucuucagaaucgagaagggcaagaucgugaagagcguggagaugaacgcccccaacuaccacuacgaggagugcagcugcuaccccgacagcagcgagaucaccugcgugugcagagacaacuggcacggcagcaacagacccugggugagcuucaaccagaaccuggaguaccagaucggcuacaucugcagcggcaucuucggcgacaaccccagacccaacgacaagaccggcagcugcggccccgugagcagcaacggcgccaacggcgugaagggcuucagcuucaaguacggcaacggcguguggaucggcagaaccaagagcaucagcagcagaaacggcuucgagaugaucugggaccccaacggcuggaccggcaccgacaacaacuucagcaucaagcaggacaucgugggcaucaacgaguggagcggcuacagcggcagcuucgugcagcaccccgagcugaccggccuggacugcaucagacccugcuucuggguggagcugaucagaggcagacccaaggagaacaccaucuggaccagcggcagcagcaucagcuucugcggcgugaacagcgacaccgugggcuggagcuggcccgacggcgccgagcugcccuucaccaucgacaaguga

SEQ ID NO: 182457 - RNA, 1410 nt, Artificial Sequence; identical to SEQ ID NO: 177381
  derived and/or modified CDS sequence (opt4) from neuraminidase__InfluenzaA__AFK14159

SEQ ID NO: 182458 - RNA, 1410 nt, Artificial Sequence; identical to SEQ ID NO: 176798
  derived and/or modified CDS sequence (opt4) from neuraminidase__InfluenzaA__AFK14168

SEQ ID NO: 182459 - RNA, 1410 nt, Artificial Sequence; identical to SEQ ID NO: 176798
  derived and/or modified CDS sequence (opt4) from neuraminidase__InfluenzaA__AFK14177

SEQ ID NO: 182460 - RNA, 1410 nt, Artificial Sequence
  derived and/or modified CDS sequence (opt4) from neuraminidase__InfluenzaA__AFK14186
augaaccccaaccagaagaucaucaccaucggcagcgugugcaugaccaucggcauggccaaccugauccugcagaucggcaacaucaucagcaucuggaucagccacagcauccagcugggcaaccagaaccagaucgagaccugcaaccagagcgugaucaccuacgagaacaacaccugggugaaccagaccuacgugaacaucagcaacaccaacuucgccgccggccagagcguggugagcgugaagcuggccggcaacagcagccugugccccgugagcggcugggccaucuacagcaaggacaacagcaucagaaucggcagcaagggcgacguguucgugaucagagagcccuucaucagcugcagcccccuggagugcagaaccuucuuccugacccagggcgcccugcugaacgacaagcacagcaacggcaccaucaaggacagaagccccuacagaacccugaugagcugccccaucggcgaggugcccagccccuacaacagcagauucgagagcguggccuggagcgccagcgccugccacgacggcaucaacuggcugaccaucggcaucagcggccccgacaacggcgccguggccgugcugaaguacaacggcaucaucaccgacaccaucaagagcuggagaaacaacauccugagaacccaggagagcgagugcgccugcgugaacggcagcugcuucaccgugaugaccgacggccccagcgacggccaggccagcuacaagaucuucagaaucgagaagggcaagaucgugaagagcguggagaugaacgcccccaacuaccacuucgaggagugcagcugcuaccccgacagcagcgagaucaccugcgugugcagagacaacuggcacggcagcaacagacccugggugagcuucaaccagaaccuggaguaccagaucggcuacaucugcagcggcaucuucggcgacaaccccagacccaacgacaagaccggcagcugcggccccgugagcagcaacggcgccaacggcgugaagggcuucagcuucaaguacggcaacggcguguggaucggcagaaccaagagcaucagcagcagaaacggcuucgagaugaucugggaccccaacggcuggaccggcaccgacaacaacuucagcaucaagcaggacaucgugggcaucaacgaguggagcggcuacagcggcagcuucgugcagcaccccgagcugaccggccuggacugcaucagacccugcuucuggguggagcugaucagaggcagacccaaggagaacaccaucuggaccagcggcagcagcaucagcuucugcggcgugaacagcgacaccgugggcuggagcuggcccgacggcgccgagcugcccuucaccaucgacaaguga

SEQ ID NO: 182461 - RNA, 1410 nt, Artificial Sequence; identical to SEQ ID NO: 178779
  derived and/or modified CDS sequence (opt4) from neuraminidase__InfluenzaA__AFK14195

SEQ ID NO: 182462 - RNA, 1410 nt, Artificial Sequence; identical to SEQ ID NO: 176798
  derived and/or modified CDS sequence (opt4) from neuraminidase__InfluenzaA__AFK14204

SEQ ID NO: 182463 - RNA, 1410 nt, Artificial Sequence; identical to SEQ ID NO: 178779
  derived and/or modified CDS sequence (opt4) from neuraminidase__InfluenzaA__AFK14213

SEQ ID NO: 182464 - RNA, 1410 nt, Artificial Sequence
  derived and/or modified CDS sequence (opt4) from neuraminidase__InfluenzaA__AFK14222
augaaccccaaccagaagaucaucaccaucggcagcgugugcaugaccaucggcauggccaaccugauccugcagaucggcaacaucaucagcaucuggaucagccacagcaucagacugggcaaccagaaccagaucgagaccugcaaccagagcgugaucaccuacgagaacaacaccugggugaaccagaccuacgugaacaucagcaacaccaacuucgccgccggccagagcguggugagcgugaagcuggccggcaacagcagccugugccccgugagcggcugggccaucuacagcaaggacaacagcaucagaaucggcagcaagggcgacguguucgugaucagagagcccuucaucagcugcagcccccuggagugcagaaccuucuuccugacccagggcgcccugcugaacgacaagcacagcaacggcaccaucaaggacagaagccccuacagaacccugaugagcugccccaucggcgaggugcccagccccuacaacagcagauucgagagcguggccuggagcgccagcgccugccacgacggcaucaacuggcugaccaucggcaucagcggccccgacaacggcgccguggccgugcugaaguacaacggcaucaucaccgacaccaucaagagcuggagaaacaacauccugagaacccaggagagcgagugcgccugcgugaacggcagcugcuucaccgugaugaccgacggccccagcgacggccaggccagcuacaagaucuucagaaucgagaagggcaagaucgugaagagcguggagaugaacgcccccaacuaccacuacgaggagugcagcugcuaccccgacagcagcgagaucaccugcgugugcagagacaacuggcacggcagcaacagacccugggugagcuucaaccagaaccuggaguaccagaucggcuacaucugcagcggcaucuucggcgacaaccccagacccaacgacaagaccggcagcugcggccccgugagcagcaacggcgccaacggcgugaagggcuucagcuucaaguacggcaacggcguguggaucggcagaaccaagagcaucagcagcagaaacggcuucgagaugaucugggaccccaacggcuggaccggcaccgacaacaacuucagcaucaagcaggacaucgugggcaucaacgaguggagcggcuacagcggcagcuucgugcagcaccccgagcugaccggccuggacugcaucagacccugcuucuggguggagcugaucagaggcagacccaaggagaacaccaucuggaccagcggcagcagcaucagcuucugcggcgugaacagcgacaccgugggcuggagcuggcccgacggcgccgagcugcccuucaccaucgacaaguga

SEQ ID NO: 182465 - RNA, 1410 nt, Artificial Sequence; identical to SEQ ID NO: 177381
  derived and/or modified CDS sequence (opt4) from neuraminidase__InfluenzaA__AFK14231

SEQ ID NO: 182466 - RNA, 1410 nt, Artificial Sequence; identical to SEQ ID NO: 176798
  derived and/or modified CDS sequence (opt4) from neuraminidase__InfluenzaA__AFK14240

SEQ ID NO: 182467 - RNA, 1410 nt, Artificial Sequence; identical to SEQ ID NO: 177565
  derived and/or modified CDS sequence (opt4) from neuraminidase__InfluenzaA__AFK14249

SEQ ID NO: 182468 - RNA, 1410 nt, Artificial Sequence; identical to SEQ ID NO: 176798
  derived and/or modified CDS sequence (opt4) from neuraminidase__InfluenzaA__AFK14257

SEQ ID NO: 182469 - RNA, 1410 nt, Artificial Sequence; identical to SEQ ID NO: 176798
  derived and/or modified CDS sequence (opt4) from neuraminidase__InfluenzaA__AFK14266

SEQ ID NO: 182470 - RNA, 1410 nt, Artificial Sequence; identical to SEQ ID NO: 176798
  derived and/or modified CDS sequence (opt4) from neuraminidase__InfluenzaA__AFK14274

SEQ ID NO: 182471 - RNA, 1410 nt, Artificial Sequence
  derived and/or modified CDS sequence (opt4) from neuraminidase__InfluenzaA__AFK14281
augaaccccaaccagaagaucaucaccaucggcagcgugugcaugaccaucggcauggccaaccugauccugcagaucggcaacaucaucagcaucuggaucagccacagcauccagcugggcaaccagaaccagaucgagaccugcaaccagagcgugaucaccuacgagaacaacaccugggugaaccagaccgacgugaacaucagcaacaccaacuucgccgccggccagagcguggugagcgugaagcuggccggcaacagcagccugugccccgugagcggcugggccaucuacagcaaggacaacagcaucagaaucggcagcaagggcgacguguucgugaucagagagcccuucaucagcugcagcccccuggagugcagaaccuucuuccugacccagggcgcccugcugaacgacaagcacagcaacggcaccaucaaggacagaagccccuacagaacccugaugagcugccccaucggcgaggugcccagccccuacaacagcagauucgagagcguggccuggagcgccagcgccugccacgacggcaucaacuggcugaccaucggcaucagcggccccgacaacggcgccguggccgugcugaaguacaacggcaucaucaccgacaccaucaagagcuggagaaacaacauccugagaacccaggagagcgagugcgccugcgugaacggcagcugcuucaccgugaugaccgacggccccagcgacggccaggccagcuacaagaucuucagaaucgagaagggcaagaucgugaagagcguggagaugaacgcccccaacuaccacuacgaggagugcagcugcuaccccgacagcagcgagaucaccugcgugugcagagacaacuggcacggcagcaacagacccugggugagcuucaaccagaaccuggaguaccagaucggcuacaucugcagcggcaucuucggcgacaaccccagacccaacgacaagaccggcagcugcggccccgugagcagcaacggcgccaacggcgugaagggcuucagcuucaaguacggcaacggcguguggaucggcagaaccaagagcaucagcagcagaaacggcuucgagaugaucugggaccccaacggcuggaccggcaccgacaacaacuucagcaucaagcaggacaucgugggcaucaacgaguggagcggcuacagcggcagcuucgugcagcaccccgagcugaccggccuggacugcaucagacccugcuucuggguggagcugaucagaggcagacccaaggagaacaccaucuggaccagcggcagcagcaucagcuucugcggcgugaacagcgacaccgugggcuggagcuggcccgacggcgccgagcugcccuucaccaucgacaaguga

SEQ ID NO: 182472 - RNA, 1410 nt, Artificial Sequence; identical to SEQ ID NO: 176798
  derived and/or modified CDS sequence (opt4) from neuraminidase__InfluenzaA__AFK14289

SEQ ID NO: 182473 - RNA, 1410 nt, Artificial Sequence; identical to SEQ ID NO: 177381
  derived and/or modified CDS sequence (opt4) from neuraminidase__InfluenzaA__AFK14298

SEQ ID NO: 182474 - RNA, 1410 nt, Artificial Sequence; identical to SEQ ID NO: 176798
  derived and/or modified CDS sequence (opt4) from neuraminidase__InfluenzaA__AFK14307

SEQ ID NO: 182475 - RNA, 1410 nt, Artificial Sequence; identical to SEQ ID NO: 178779
  derived and/or modified CDS sequence (opt4) from neuraminidase__InfluenzaA__AFK14316

SEQ ID NO: 182476 - RNA, 1410 nt, Artificial Sequence
  derived and/or modified CDS sequence (opt4) from neuraminidase__InfluenzaA__AFK14325
augaaccccaaccagaagaucaucaccaucggcagcgugugcaugaccaucggcauggccaaccugauccugcagaucggcaacaucaucagcaucuggaucagccacagcauccagcugggcaaccagaaccagaucgagaccugcaaccagagcgugaucaccuacgagaacaacaccugggugaaccagaccuacgugaacaucagcaacaccaacuucgccgccggccagagcguggugagcgugaagcuggccggcaacagcagccugugccccgugagcggcugggccaucuacagcaaggacaacagcaucagaaucggcagcaagggcgacguguucgugaucagagagcccuucaucagcugcagcccccuggagugcagaaccuucuuccugacccagggcgcccugcugaacgacaagcacagcaacggcaccaucaaggacagaagccccuacagaacccugaugagcugccccaucggcgaggugcccagccccuacaacagcagauucgagagcguggccuggagcgccagcgccugccacgacggcaucaacuggcugaccaucggcaucagcggccccgacaacggcgccguggccgugcugaaguacaacggcaucaucaccgacaccaucaagagcuggagaaacaacauccugagaacccaggagagcgagugcgccugcgugaacggcagcugcuucaccgugaugaccgacggccccagcgacggccaggccagcuacaagaucuucagaaucgagagaggcaagaucgugaagagcguggagaugaacgcccccaacuaccacuacgaggagugcagcugcuaccccgacagcagcgagaucaccugcgugugcagagacaacuggcacggcagcaacagacccugggugagcuucaaccagaaccuggaguaccagaucggcuacaucugcagcggcaucuucggcgacaaccccagacccaacgacaagaccggcagcugcggccccgugagcagcaacggcgccaacggcgugaagggcuucagcuucaaguacggcaacggcguguggaucggcagaaccaagagcaucagcagcagaaacggcuucgagaugaucugggaccccaacggcuggaccggcaccgacaacaacuucagcaucaagcaggacaucgugggcaucaacgaguggagcggcuacagcggcagcuucgugcagcaccccgagcugaccggccuggacugcaucagacccugcuucuggguggagcugaucagaggcagacccaaggagaacaccaucuggaccagcggcagcagcaucagcuucugcggcgugaacagcgacaccgugggcuggagcuggcccgacggcgccgagcugcccuucaccaucgacaaguga

SEQ ID NO: 182477 - RNA, 1410 nt, Artificial Sequence; identical to SEQ ID NO: 176798
  derived and/or modified CDS sequence (opt4) from neuraminidase__InfluenzaA__AFK14334

SEQ ID NO: 182478 - RNA, 1410 nt, Artificial Sequence; identical to SEQ ID NO: 176798
  derived and/or modified CDS sequence (opt4) from neuraminidase__InfluenzaA__AFK14343

SEQ ID NO: 182479 - RNA, 1410 nt, Artificial Sequence; identical to SEQ ID NO: 176798
  derived and/or modified CDS sequence (opt4) from neuraminidase__InfluenzaA__AFK14352

SEQ ID NO: 182480 - RNA, 1410 nt, Artificial Sequence; identical to SEQ ID NO: 176798
  derived and/or modified CDS sequence (opt4) from neuraminidase__InfluenzaA__AFK14360

SEQ ID NO: 182481 - RNA, 1410 nt, Artificial Sequence; identical to SEQ ID NO: 176798
  derived and/or modified CDS sequence (opt4) from neuraminidase__InfluenzaA__AFK14369

SEQ ID NO: 182482 - RNA, 1410 nt, Artificial Sequence
  derived and/or modified CDS sequence (opt4) from neuraminidase__InfluenzaA__AFK14387
augaaccccaaccagaagaucaucaccaucggcagcgugugcaugaccaucggcauggccaaccugauccugcagaucggcaacaucaccagcaucuggaucagccacagcauccagcugggcaaccagaaccagaucgacaccugcaaccagagcgugaucaccuacgagaacaacaccugggugaaccagaccuacgugaacaucagcaacaccaacuucgccgccggccagagcguggugagcgugaagcuggccggcaacagcagccugugccccgugagcggcugggccaucuacagcaaggacaacagcaucagaaucggcagcaagggcgacguguucgugaucagagagcccuucaucagcugcagcccccuggagugcagaaccuucuuccugacccagggcgcccugcugaacgacaagcacagcaacggcaccaucaaggacagaagccccuacagaacccugaugagcugccccaucggcgaggugcccagccccuacaacagcagauucgagagcguggccuggagcgccagcgccugccacgacggcaucaacuggcugaccaucggcaucagcggccccgacaacggcgccguggccgugcugaaguacaacggcaucaucaccgacaccaucaagagcuggagaaacaacauccugagaacccaggagagcgagugcgccugcgugaacggcagcugcuucaccgugaugaccgacggccccagcgacggccaggccagcuacaagaucuucagaaucgagaagggcaagaucgugaagagcguggagaugaacgcccccaacuaccacuacgaggagugcagcugcuaccccgacagcagcgagaucaccugcgugugcagagacaacuggcacggcagcaacagacccugggugagcuucaaccagaaccuggaguaccagaucggcuacaucugcagcggcaucuucggcgacaaccccagacccaacgacaagaccggcagcugcggccccgugagcagcaacggcgccaacggcgugaagggcuucagcuucaaguacggcaacggcguguggaucggcagaaccaagagcaucagcagcagaaacggcuucgagaugaucugggaccccaacggcuggaccggcaccgacaacaacuucagcaucaagcaggacaucgugggcaucaacgaguggagcggcuacagcggcagcuucgugcagcaccccgagcugaccggccuggacugcaucagacccugcuucuggguggagcugaucagaggcagacccaaggagaacaccaucuggaccagcggcagcagcaucagcuucugcggcgugaacagcgacaccgugggcuggagcuggcccgacggcgccgagcugcccuucaccaucgacaaguga

SEQ ID NO: 182483 - RNA, 1410 nt, Artificial Sequence; identical to SEQ ID NO: 177381
  derived and/or modified CDS sequence (opt4) from neuraminidase__InfluenzaA__AFK14397

SEQ ID NO: 182484 - RNA, 1410 nt, Artificial Sequence; identical to SEQ ID NO: 176798
  derived and/or modified CDS sequence (opt4) from neuraminidase__InfluenzaA__AFK14406

SEQ ID NO: 182485 - RNA, 1410 nt, Artificial Sequence; identical to SEQ ID NO: 176798
  derived and/or modified CDS sequence (opt4) from neuraminidase__InfluenzaA__AFK14415

SEQ ID NO: 182486 - RNA, 1410 nt, Artificial Sequence; identical to SEQ ID NO: 176798
  derived and/or modified CDS sequence (opt4) from neuraminidase__InfluenzaA__AFK14424

SEQ ID NO: 182487 - RNA, 1410 nt, Artificial Sequence
  derived and/or modified CDS sequence (opt4) from neuraminidase__InfluenzaA__AFK14433
augaaccccaaccagaagaucaucaccaucggcagcgugugcaugaucaucggcauggccaaccugauccugcagaucggcaacaucaucagcaucuggaucagccacagcauccagcugggcaaccagaaccagaucgagaccugcaaccagagcgugaucaccuacgagaacaacaccugggugaaccagaccuacgugaacaucagcaacaccaacuucgccgccggccagagcguggugagcgugaagcuggccggcaacagcagccugugccccgugagcggcugggccaucuacagcaaggacaacagcaucagaaucggcagcaagggcgacguguucgugaucagagagcccuucaucagcugcagcccccuggagugcagaaccuucuuccugacccagggcgcccugcugaacgacaagcacagcaacggcaccaucaaggacagaagccccuacagaacccugaugagcugccccaucggcgaggugcccagccccuacaacagcagauucgagagcguggccuggagcgccagcgccugccacgacggcaucaacuggcugaccaucggcaucagcggccccgacaacggcgccguggccgugcugaaguacaacggcaucaucaccgacaccaucaagagcuggagaaacaacauccugagaacccaggagagcgagugcgccugcgugaacggcagcugcuucaccgugaugaccgacggccccagcgacggccaggccagcuacaagaucuucagaaucgagaagggcaagaucgugaagagcguggagaugaacgcccccaacuaccacuacgaggagugcagcugcuaccccgacagcagcgagaucaccugcgugugcagagacaacuggcacggcagcaacagacccugggugagcuucaaccagaaccuggaguaccagaucggcuacaucugcagcggcaucuucggcgacaaccccagacccaacgacaagaccggcagcugcggccccgugagcagcaacggcgccaacggcgugaagggcuucagcuucaaguacggcaacggcguguggaucggcagaaccaagagcaucagcagcagaaacggcuucgagaugaucugggaccccaacggcuggaccggcaccgacaacaacuucagcaucaagcaggacaucgugggcaucaacgaguggagcggcuacagcggcagcuucgugcagcaccccgagcugaccggccuggacugcaucagacccugcuucuggguggagcugaucagaggcagacccaaggagaacaccaucuggaccagcggcagcagcaucagcuucugcggcgugaacagcgacaccgugggcuggagcuggcccgacggcgccgagcugcccuucaccaucgacaaguga

SEQ ID NO: 182488 - RNA, 1410 nt, Artificial Sequence; identical to SEQ ID NO: 176798
  derived and/or modified CDS sequence (opt4) from neuraminidase__InfluenzaA__AFK14442

SEQ ID NO: 182489 - RNA, 1410 nt, Artificial Sequence
  derived and/or modified CDS sequence (opt4) from neuraminidase__InfluenzaA__AFK14451
augaaccccaaccagaagaucaucaccaucggcagcgugugcaugaccaucggcauggccaaccugauccugcagaucggcaacaucaucagcaucuggaucagccacagcauccagcugggcaaccagaaccagaucgagaccugcaaccagagcgugaucaccuacgagaacaacaccugggugaaccagaccuacgugaacaucagcaacaccaacuucgccgccggccagagcguggccagcgccaagcuggccggcaacagcagccugugccccgugagcggcugggccaucuacagcaaggacaacagcaucagaaucggcagcaagggcgacguguucgugaucagagagcccuucaucagcugcagcccccuggagugcagaaccuucuuccugacccagggcgcccugcugaacgacaagcacagcaacggcaccaucaaggacagaagccccuacagaacccugaugagcugccccaucggcgaggugcccagccccuacaacagcagauucgagagcguggccuggagcgccagcgccugccacgacggcaucaacuggcugaccaucggcaucagcggccccgacaacggcgccguggccgugcugaaguacaacggcaucaucaccgacaccaucaagagcuggagaaacaacauccugagaacccaggagagcgagugcgccugcgugaacggcagcugcuucaccgugaugaccgacggccccagcgacggccaggccagcuacaagaucuucagaaucgagaagggcaagaucgugaagagcguggagaugaacgcccccaacuaccacuacgaggagugcagcugcuaccccgacagcagcgagaucaccugcgugugcagagacaacuggcacggcagcaacagacccugggugagcuucaaccagaaccuggaguaccagaucggcuacaucugcagcggcaucuucggcgacaaccccagacccaacgacaagaccggcagcugcggccccgugagcagcaacggcgccaacggcgugaagggcuucagcuucaaguacggcaacggcguguggaucggcagaaccaagagcaucagcagcagaaacggcuucgagaugaucugggaccccaacggcuggaccggcaccgacaacaacuucagcaucaagcaggacaucgugggcaucaacgaguggagcggcuacagcggcagcuucgugcagcaccccgagcugaccggccuggacugcaucagacccugcuucuggguggagcugaucagaggcagacccaaggagaacaccaucuggaccagcggcagcaucaucagcuucugcggcgugaacagcgacaccgugggcuggagcuggcccgacggcgccgagcugcccuucaccaucgacaaguga

SEQ ID NO: 182490 - RNA, 1410 nt, Artificial Sequence; identical to SEQ ID NO: 176798
  derived and/or modified CDS sequence (opt4) from neuraminidase__InfluenzaA__AFK14458

SEQ ID NO: 182491 - RNA, 1410 nt, Artificial Sequence; identical to SEQ ID NO: 176798
  derived and/or modified CDS sequence (opt4) from neuraminidase__InfluenzaA__AFK14467

SEQ ID NO: 182492 - RNA, 1410 nt, Artificial Sequence; identical to SEQ ID NO: 176798
  derived and/or modified CDS sequence (opt4) from neuraminidase__InfluenzaA__AFK14476

SEQ ID NO: 182493 - RNA, 1410 nt, Artificial Sequence; identical to SEQ ID NO: 179857
  derived and/or modified CDS sequence (opt4) from neuraminidase__InfluenzaA__AFK14485

SEQ ID NO: 182494 - RNA, 1410 nt, Artificial Sequence; identical to SEQ ID NO: 176798
  derived and/or modified CDS sequence (opt4) from neuraminidase__InfluenzaA__AFK14504

SEQ ID NO: 182495 - RNA, 1410 nt, Artificial Sequence; identical to SEQ ID NO: 176798
  derived and/or modified CDS sequence (opt4) from neuraminidase__InfluenzaA__AFK14514

SEQ ID NO: 182496 - RNA, 1410 nt, Artificial Sequence; identical to SEQ ID NO: 176798
  derived and/or modified CDS sequence (opt4) from neuraminidase__InfluenzaA__AFK14522

SEQ ID NO: 182497 - RNA, 1410 nt, Artificial Sequence; identical to SEQ ID NO: 176798
  derived and/or modified CDS sequence (opt4) from neuraminidase__InfluenzaA__AFK14529

SEQ ID NO: 182498 - RNA, 1410 nt, Artificial Sequence; identical to SEQ ID NO: 176798
  derived and/or modified CDS sequence (opt4) from neuraminidase__InfluenzaA__AFK14538

SEQ ID NO: 182499 - RNA, 1410 nt, Artificial Sequence; identical to SEQ ID NO: 179173
  derived and/or modified CDS sequence (opt4) from neuraminidase__InfluenzaA__AFK14547

SEQ ID NO: 182500 - RNA, 1410 nt, Artificial Sequence
  derived and/or modified CDS sequence (opt4) from neuraminidase__InfluenzaA__AFK14555
augaaccccaaccagaagaucaucaccaucggcagcgugugcaugaccaucggcauggccaaccugauccugcagaucggcaacaucaucagcaucuggaucagccacagcauccagcugggcaaccagaaccagaucgagaccugcaaccagagcgugaucaccuacgagaacaacaccugggugaaccagaccuacgugaacaucagcaacaccaacuucgccgccggccagagcgugaucagcgugaagcuggccggcaacagcagccugugccccgugagcggcugggccaucuacagcaaggacaacagcaucagaaucggcagcaagggcgacguguucgugaucagagagcccuucaucagcugcagcccccuggagugcagaaccuucuuccugacccagggcgcccugcugaacgacaagcacagcaacggcaccaucaaggacagaagccccuacagaacccugaugagcugccccaucggcgaggugcccagccccuacaacagcagauucgagagcguggccuggagcgccagcgccugccacgacggcaucaacuggcugaccaucggcaucagcggccccgacaacggcgccguggccgugcugaaguacaacggcaucaucaccgacaccaucaagagcuggagaaacaacauccugagaacccaggagagcgagugcgccugcgugaacggcagcugcuucaccgugaugaccgacggccccagcgacggccaggccagcuacaagaucuucagaaucgagaagggcaagaucgugaagagcguggagaugaacgcccccaacuaccacuacgaggagugcagcugcuaccccgacagcagcgagaucaccugcgugugcagagacaacuggcacggcagcaacagacccugggugagcuucaaccagaaccuggaguaccagaucggcuacaucugcagcggcaucuucggcgacaaccccagacccaacgacaagaccggcagcugcggccccgugagcagcaacggcgccaacggcgugaagggcuucagcuucaaguacggcaacggcguguggaucggcagaaccaagagcaucagcagcagaaacggcuucgagaugaucugggaccccaacggcuggaccggcaccgacaacaacuucagcaucaagcaggacaucgugggcaucaacgaguggagcggcuacagcggcagcuucgugcagcaccccgagcugaccggccuggacugcaucagacccugcuucuggguggagcugaucagaggcagacccaaggagaacaccaucuggaccagcggcagcagcaucagcuucugcggcgugaacagcgacaccgugggcuggagcuggcccgacggcgccgagcugcccuucaccaucgacaaguga

SEQ ID NO: 182501 - RNA, 1410 nt, Artificial Sequence; identical to SEQ ID NO: 176798
  derived and/or modified CDS sequence (opt4) from neuraminidase__InfluenzaA__AFK14564

SEQ ID NO: 182502 - RNA, 1410 nt, Artificial Sequence; identical to SEQ ID NO: 176798
  derived and/or modified CDS sequence (opt4) from neuraminidase__InfluenzaA__AFK14573

SEQ ID NO: 182503 - RNA, 1410 nt, Artificial Sequence
  derived and/or modified CDS sequence (opt4) from neuraminidase__InfluenzaA__AFK14579
augaaccccaaccagaagaucaucaccaucggcagcgugugcaugaccaucggcauggccaaccugauccugcagaucggcaacaucaucagcaucuggaucagccacagcauccagcugggcaaccagaaccagaucgagaccugcaaccagagcgugaucaccuacgagaacaacaccugggugaaccagaccuacgugaacaucagcaacaccaacuucgccgccggccagagcguggugagcgugaagcuggccggcaacagcagccugugccccgugagcggcugggccaucuacagcaaggacaacagcaucagaaucggcagcaagggcgacguguucgugaucagagagcccuucaucagcugcagcccccuggagugcagaaccuucuuccugacccagggcgcccugcugaacgacaagcacagcaacggcaccaucaaggacagaagccccuacagaacccugaugagcugccccaucggcgaggugcccagccccuacaacagcagauucgagagcguggccuggagcgccagcgccugccacgacggcaucaacuggcugaccaucggcaucagcggccccgacaacggcgccguggccgugcugaaguacaacggcaucaucaccgacaccaucaagagcuggagaaacaacauccugagaacccaggagagcgagugcgccugcgugaacggcagcugcuucaccgugaugaccgacggccccagcgacggccaggccagcuacaagaucuucagaaucgagaagggcaagaucgugaagagcguggagaugaacgcccccaacuaccacuacgaggagugcagcugcuaccccgacagcagcgagaucaccugcgugugcagagacaacuggcacggcagcaacagacccugggugagcuucaaccagaaccuggaguaccagaucggcuacaugugcagcggcaucuucggcgacaaccccagacccaacgacaagaccggcagcugcggccccgugagcagcaacggcgccaacggcgugaagggcuucagcuucaaguacggcaacggcguguggaucggcagaaccaagagcaucagcagcagaaacggcuucgagaugaucugggaccccaacggcuggaccggcaccgacaacaacuucagcaucaagcaggacaucgugggcaucaacgaguggagcggcuacagcggcagcuucgugcagcaccccgagcugaccggccuggacugcaucagacccugcuucuggguggagcugaucagaggcagacccaaggagaacaccaucuggaccagcggcagcagcaucagcuucugcggcgugaacagcgacaccgugggcuggagcuggcccgacggcgccgagcugcccuucaccaucgacaaguga

SEQ ID NO: 182504 - RNA, 1410 nt, Artificial Sequence; identical to SEQ ID NO: 176798
  derived and/or modified CDS sequence (opt4) from neuraminidase__InfluenzaA__AFK14588

SEQ ID NO: 182505 - RNA, 1410 nt, Artificial Sequence; identical to SEQ ID NO: 176798
  derived and/or modified CDS sequence (opt4) from neuraminidase__InfluenzaA__AFK14597

SEQ ID NO: 182506 - RNA, 1410 nt, Artificial Sequence; identical to SEQ ID NO: 176798
  derived and/or modified CDS sequence (opt4) from neuraminidase__InfluenzaA__AFK14604

SEQ ID NO: 182507 - RNA, 1410 nt, Artificial Sequence; identical to SEQ ID NO: 176798
  derived and/or modified CDS sequence (opt4) from neuraminidase__InfluenzaA__AFK14632

SEQ ID NO: 182508 - RNA, 1410 nt, Artificial Sequence; identical to SEQ ID NO: 176788
  derived and/or modified CDS sequence (opt4) from neuraminidase__InfluenzaA__AFK14641

SEQ ID NO: 182509 - RNA, 1410 nt, Artificial Sequence; identical to SEQ ID NO: 176798
  derived and/or modified CDS sequence (opt4) from neuraminidase__InfluenzaA__AFK14651

SEQ ID NO: 182510 - RNA, 1410 nt, Artificial Sequence; identical to SEQ ID NO: 176798
  derived and/or modified CDS sequence (opt4) from neuraminidase__InfluenzaA__AFK14656

SEQ ID NO: 182511 - RNA, 1410 nt, Artificial Sequence; identical to SEQ ID NO: 176798
  derived and/or modified CDS sequence (opt4) from neuraminidase__InfluenzaA__AFK14663

SEQ ID NO: 182512 - RNA, 1410 nt, Artificial Sequence; identical to SEQ ID NO: 176798
  derived and/or modified CDS sequence (opt4) from neuraminidase__InfluenzaA__AFK14672

SEQ ID NO: 182513 - RNA, 1410 nt, Artificial Sequence; identical to SEQ ID NO: 176798
  derived and/or modified CDS sequence (opt4) from neuraminidase__InfluenzaA__AFK14680

SEQ ID NO: 182514 - RNA, 1410 nt, Artificial Sequence; identical to SEQ ID NO: 176798
  derived and/or modified CDS sequence (opt4) from neuraminidase__InfluenzaA__AFK14690

SEQ ID NO: 182515 - RNA, 1410 nt, Artificial Sequence; identical to SEQ ID NO: 176798
  derived and/or modified CDS sequence (opt4) from neuraminidase__InfluenzaA__AFK14707

SEQ ID NO: 182516 - RNA, 1410 nt, Artificial Sequence; identical to SEQ ID NO: 176798
  derived and/or modified CDS sequence (opt4) from neuraminidase__InfluenzaA__AFK14715

SEQ ID NO: 182517 - RNA, 1410 nt, Artificial Sequence; identical to SEQ ID NO: 176798
  derived and/or modified CDS sequence (opt4) from neuraminidase__InfluenzaA__AFK14724

SEQ ID NO: 182518 - RNA, 1410 nt, Artificial Sequence; identical to SEQ ID NO: 176798
  derived and/or modified CDS sequence (opt4) from neuraminidase__InfluenzaA__AFK14733

SEQ ID NO: 182519 - RNA, 1410 nt, Artificial Sequence; identical to SEQ ID NO: 176798
  derived and/or modified CDS sequence (opt4) from neuraminidase__InfluenzaA__AFK14751

SEQ ID NO: 182520 - RNA, 1410 nt, Artificial Sequence; identical to SEQ ID NO: 176798
  derived and/or modified CDS sequence (opt4) from neuraminidase__InfluenzaA__AFK14757

SEQ ID NO: 182521 - RNA, 1410 nt, Artificial Sequence; identical to SEQ ID NO: 176798
  derived and/or modified CDS sequence (opt4) from neuraminidase__InfluenzaA__AFK14766

SEQ ID NO: 182522 - RNA, 1410 nt, Artificial Sequence; identical to SEQ ID NO: 177381
  derived and/or modified CDS sequence (opt4) from neuraminidase__InfluenzaA__AFK14774

SEQ ID NO: 182523 - RNA, 1410 nt, Artificial Sequence; identical to SEQ ID NO: 182500
  derived and/or modified CDS sequence (opt4) from neuraminidase__InfluenzaA__AFK14781

SEQ ID NO: 182524 - RNA, 1410 nt, Artificial Sequence; identical to SEQ ID NO: 177381
  derived and/or modified CDS sequence (opt4) from neuraminidase__InfluenzaA__AFK14790

SEQ ID NO: 182525 - RNA, 1410 nt, Artificial Sequence
  derived and/or modified CDS sequence (opt4) from neuraminidase__InfluenzaA__AFK14800
augaaccccaaccagaagaucaucaccaucggcagcgugugcaugaccaucggcauggccaaccugauccugcagaucggcaacaucaucagcaucuggaucagccacagcauccagcugggcaaccagaaccagaucgagaccugcaaccagagcgugaucaccuacgagaacaacaccugggugaaccagaccuacgugaacaucagcaacaccaacuucgccgccggccagagcguggugagcgugaagcuggccggcaacagcagccugugccccgugagcggcugggccaucuacagcaaggacaacagcaucagaaucggcagcaagggcgacguguucgugaucagagagcccuucaucagcugcagcccccuggagugcagaaccuucuuccugacccagggcgcccugcugaacgacaagcacagcaacggcaccaucaaggacagaagccccuacagaacccugaugagcugccccaucggcgaggugcccagccccuacaacagcagauucgagagcguggccuggagcgccagcgccugccacgacggcaucaacuggcugaccaucggcaucagcggccccgacaacggcgccguggccgugcugaaguacaacggcaucaucaccgacaccaucaagagcuggagaaacaacauccugagaacccaggagagcgagugcgccugcgugaacggcagcugcuucaccgugaugaccgacggccccagcgacggccaggccagcuacaagaucuucagaaucgagaagggcaagaucgugaagagcguggagaugaacgcccccaacuaccacuacgaggagugcagcugcuaccccgacagcagcgagaucaccugcgugugcagagacaacuggcacggcagcaacagacccugggugagcuucaaccagaaccuggaguaccagaucggcuacaucugcagcggcaucuucggcgacaaccccagacccaacgacaagaccggcagcugcggccccgugagcagcaacggcgccaacggcgugaagggcuucagcuucaaguacggcaacggcguguggaucggcagaaccaagagcaucagcagcagaaacggcuucgagaugaucugggaccccaacggcuggaccggcaccgacaacaacuucagcaucaagcaggacaucgugggcaucaacgaguggagcggcuacagcggcagcuucgugcagcaccccgagcugaccggccuggacugcaucagacccugcuucuggguggagcugaucagaggcagacccagagagaacaccaucuggaccagcggcagcagcaucagcuucugcggcgugaacagcgacaccgugggcuggagcuggcccgacggcgccgagcugcccuucaccaucgacaaguga

SEQ ID NO: 182526 - RNA, 1410 nt, Artificial Sequence; identical to SEQ ID NO: 178779
  derived and/or modified CDS sequence (opt4) from neuraminidase__InfluenzaA__AFK14809

SEQ ID NO: 182527 - RNA, 1410 nt, Artificial Sequence; identical to SEQ ID NO: 178779
  derived and/or modified CDS sequence (opt4) from neuraminidase__InfluenzaA__AFK14816

SEQ ID NO: 182528 - RNA, 1410 nt, Artificial Sequence; identical to SEQ ID NO: 176798
  derived and/or modified CDS sequence (opt4) from neuraminidase__InfluenzaA__AFK14824

SEQ ID NO: 182529 - RNA, 1410 nt, Artificial Sequence; identical to SEQ ID NO: 176798
  derived and/or modified CDS sequence (opt4) from neuraminidase__InfluenzaA__AFK14841

SEQ ID NO: 182530 - RNA, 1410 nt, Artificial Sequence; identical to SEQ ID NO: 177871
  derived and/or modified CDS sequence (opt4) from neuraminidase__InfluenzaA__AFK14849

SEQ ID NO: 182531 - RNA, 1410 nt, Artificial Sequence
  derived and/or modified CDS sequence (opt4) from neuraminidase__InfluenzaA__AFK14856
augaaccccaaccagaagaucaucaccaucggcagcgugugcaugaccaucggcauggccaaccugauccugcagaucggcaacaucaucagcaucuggaucagccacagcauccagcugggcaaccagaaccagaucgagaccugcaaccagagcgugaucaccuacgagaacaacaccugggugaaccagaccuacgugaacaucagcaacaccaacuucgccgccggccagagcguggugagcgugaagcuggccggcaacagcagccugugccccgugagcggcugggccaucuacagcaaggacaacagcgugagaaucggcagcaagggcgacguguucgugaucagagagcccuucaucagcugcagcccccuggagugcagaaccuucuuccugacccagggcgcccugcugaacgacaagcacagcaacggcaccaucaaggacagaagccccuacagaacccugaugagcugccccaucggcgaggugcccagccccuacaacagcagauucgagagcguggccuggagcgccagcgccugccacgacggcaucaacuggcugaccaucggcaucagcggccccgacaacggcgccguggccgugcugaaguacaacggcaucaucaccgacaccaucaagagcuggagaaacaacauccugagaacccaggagagcgagugcgccugcgugaacggcagcugcuucaccgugaugaccgacggccccagcaacggccaggccagcuacaagaucuucaagaucgagaagggcaagaucgugaagagcguggagaugaacgcccccaacuaccacuacgaggagugcagcugcuaccccgacagcagcgagaucaccugcgugugcagagacaacuggcacggcagcaacagacccugggugagcuucaaccagaaccuggaguaccagaucggcuacaucugcagcggcaucuucggcgacaaccccagacccaucgacaagaccggcagcugcggccccgugagcagcaacggcgccaacggcgugaagggcuucagcuucaaguacggcaacggcguguggaucggcagaaccaagagcaucagcagcagaaacggcuucgagaugaucugggaccccaacggcuggaccggcaccgacaacaacuucagcaucaagcaggacaucgugggcaucaacgaguggagcggcuacagcggcagcuucgugcagcaccccgagcugaccggccuggacugcaucagacccugcuucuggguggagcugaucagaggcagacccaaggagaacaccaucuggaccagcggcagcagcaucagcuucugcggcgugaacagcgacaccgugggcuggagcuggcccgacggcgccgagcugcccuucaccaucgacaaguga

SEQ ID NO: 182532 - RNA, 1410 nt, Artificial Sequence; identical to SEQ ID NO: 176798
  derived and/or modified CDS sequence (opt4) from neuraminidase__InfluenzaA__AFK14870

SEQ ID NO: 182533 - RNA, 1410 nt, Artificial Sequence; identical to SEQ ID NO: 176798
  derived and/or modified CDS sequence (opt4) from neuraminidase__InfluenzaA__AFK14879

SEQ ID NO: 182534 - RNA, 1410 nt, Artificial Sequence; identical to SEQ ID NO: 176798
  derived and/or modified CDS sequence (opt4) from neuraminidase__InfluenzaA__AFK14885

SEQ ID NO: 182535 - RNA, 1410 nt, Artificial Sequence; identical to SEQ ID NO: 176798
  derived and/or modified CDS sequence (opt4) from neuraminidase__InfluenzaA__AFK14894

SEQ ID NO: 182536 - RNA, 1410 nt, Artificial Sequence; identical to SEQ ID NO: 176798
  derived and/or modified CDS sequence (opt4) from neuraminidase__InfluenzaA__AFK14903

SEQ ID NO: 182537 - RNA, 1410 nt, Artificial Sequence; identical to SEQ ID NO: 176798
  derived and/or modified CDS sequence (opt4) from neuraminidase__InfluenzaA__AFK14912

SEQ ID NO: 182538 - RNA, 1410 nt, Artificial Sequence; identical to SEQ ID NO: 176798
  derived and/or modified CDS sequence (opt4) from neuraminidase__InfluenzaA__AFK14921

SEQ ID NO: 182539 - RNA, 1410 nt, Artificial Sequence; identical to SEQ ID NO: 176798
  derived and/or modified CDS sequence (opt4) from neuraminidase__InfluenzaA__AFK14931

SEQ ID NO: 182540 - RNA, 1410 nt, Artificial Sequence
  derived and/or modified CDS sequence (opt4) from neuraminidase__InfluenzaA__AFK25604
augaaccccaaccagaagaucaucaccaucggcagcgugugcaugaccaucggcauggccaaccugauccugcagaucggcaacaucaucagcaucuggaucagccacagcauccagcugagaaaccagagccagaucgagaccugcaaccagagcgugaucaccuacgagaacaacaccugggugaaccagaccuacgugaacaucagcaacaccaacuucgccgccggccagagcguggugagcgugaagcuggccggcaacagcagccugugccccgugagcggcugggccaucuacagcaaggacaacagcaucagaaucggcagcaagggcgacguguucgugaucagagagcccuucaucagcugcagcccccuggagugcagaaccuucuuccugacccagggcgcccugcugaacgacaagcacagcaacggcaccaucaaggacagaagccccuacagaacccugaugagcugccccaucggcgaggugcccagccccuacaacagcagauucgagagcguggccuggagcgccagcgccugccacgacggcaucaacuggcugaccaucggcaucagcggccccgacaacggcgccguggccgugcugaaguacaacggcaucaucaccgacaccaucaagagcuggagaaacaacauccugagaacccaggagagcgagugcgccugcgugaacggcagcugcuucaccaucaugaccgacggccccagcgacggccaggccagcuacaagaucuucagaaucgagaagggcaagaucgugaagagcguggagaugaacgcccccaacuacuacuacgaggagugcagcugcuaccccgacagcagcgagaucaccugcgugugcagagacaacuggcacggcagcaacagacccugggugagcuucaaccagaaccuggaguaccagaucggcuacaucugcagcggcaucuucggcgacaaccccagacccaacgacaagaccggcagcugcggccccgugagcagcaacggcgccaacggcgugaagggcuucagcuucaaguacggcaacggcguguggaucggcagaaccaagagcaucagcagcagaaagggcuucgagaugaucugggaccccaacggcuggaccggcaccgacaacaacuucagcaucaagcaggacaucgugggcaucaacgaguggagcggcuacagcggcagcuucgugcagcaccccgagcugaccggccuggacugcaucagacccugcuucuggguggagcugaucagaggcagacccaaggagaacaccaucuggaccagcggcagcagcaucagcuucugcggcgugaacagcgacaccgugggcuggagcuggcccgacggcgccgagcugcccuucaccaucgacaaguga

SEQ ID NO: 182541 - RNA, 1410 nt, Artificial Sequence; identical to SEQ ID NO: 182540
  derived and/or modified CDS sequence (opt4) from neuraminidase__InfluenzaA__AFK25606

SEQ ID NO: 182542 - RNA, 1410 nt, Artificial Sequence; identical to SEQ ID NO: 178149
  derived and/or modified CDS sequence (opt4) from neuraminidase__InfluenzaA__AFK74537

SEQ ID NO: 182543 - RNA, 1410 nt, Artificial Sequence; identical to SEQ ID NO: 176798
  derived and/or modified CDS sequence (opt4) from neuraminidase__InfluenzaA__AFK74547

SEQ ID NO: 182544 - RNA, 1410 nt, Artificial Sequence; identical to SEQ ID NO: 179790
  derived and/or modified CDS sequence (opt4) from neuraminidase__InfluenzaA__AFK74557

SEQ ID NO: 182545 - RNA, 1410 nt, Artificial Sequence; identical to SEQ ID NO: 176798
  derived and/or modified CDS sequence (opt4) from neuraminidase__InfluenzaA__AFK74567

SEQ ID NO: 182546 - RNA, 1410 nt, Artificial Sequence; identical to SEQ ID NO: 176798
  derived and/or modified CDS sequence (opt4) from neuraminidase__InfluenzaA__AFK74578

SEQ ID NO: 182547 - RNA, 1410 nt, Artificial Sequence; identical to SEQ ID NO: 181913
  derived and/or modified CDS sequence (opt4) from neuraminidase__InfluenzaA__AFK74588

SEQ ID NO: 182548 - RNA, 1410 nt, Artificial Sequence; identical to SEQ ID NO: 176798
  derived and/or modified CDS sequence (opt4) from neuraminidase__InfluenzaA__AFK74598

SEQ ID NO: 182549 - RNA, 1410 nt, Artificial Sequence; identical to SEQ ID NO: 176798
  derived and/or modified CDS sequence (opt4) from neuraminidase__InfluenzaA__AFK74608

SEQ ID NO: 182550 - RNA, 1410 nt, Artificial Sequence; identical to SEQ ID NO: 176798
  derived and/or modified CDS sequence (opt4) from neuraminidase__InfluenzaA__AFK74618

SEQ ID NO: 182551 - RNA, 1410 nt, Artificial Sequence; identical to SEQ ID NO: 176798
  derived and/or modified CDS sequence (opt4) from neuraminidase__InfluenzaA__AFK74628

SEQ ID NO: 182552 - RNA, 1410 nt, Artificial Sequence; identical to SEQ ID NO: 176798
  derived and/or modified CDS sequence (opt4) from neuraminidase__InfluenzaA__AFK74638

SEQ ID NO: 182553 - RNA, 1410 nt, Artificial Sequence; identical to SEQ ID NO: 176798
  derived and/or modified CDS sequence (opt4) from neuraminidase__InfluenzaA__AFK74648

SEQ ID NO: 182554 - RNA, 1410 nt, Artificial Sequence; identical to SEQ ID NO: 181922
  derived and/or modified CDS sequence (opt4) from neuraminidase__InfluenzaA__AFK74658

SEQ ID NO: 182555 - RNA, 1410 nt, Artificial Sequence; identical to SEQ ID NO: 181922
  derived and/or modified CDS sequence (opt4) from neuraminidase__InfluenzaA__AFK74668

SEQ ID NO: 182556 - RNA, 1410 nt, Artificial Sequence; identical to SEQ ID NO: 176798
  derived and/or modified CDS sequence (opt4) from neuraminidase__InfluenzaA__AFK74678

SEQ ID NO: 182557 - RNA, 1410 nt, Artificial Sequence; identical to SEQ ID NO: 176798
  derived and/or modified CDS sequence (opt4) from neuraminidase__InfluenzaA__AFK74688

SEQ ID NO: 182558 - RNA, 1410 nt, Artificial Sequence; identical to SEQ ID NO: 176798
  derived and/or modified CDS sequence (opt4) from neuraminidase__InfluenzaA__AFK74698

SEQ ID NO: 182559 - RNA, 1410 nt, Artificial Sequence; identical to SEQ ID NO: 181929
  derived and/or modified CDS sequence (opt4) from neuraminidase__InfluenzaA__AFK74708

SEQ ID NO: 182560 - RNA, 1410 nt, Artificial Sequence; identical to SEQ ID NO: 179790
  derived and/or modified CDS sequence (opt4) from neuraminidase__InfluenzaA__AFK74718

SEQ ID NO: 182561 - RNA, 1410 nt, Artificial Sequence; identical to SEQ ID NO: 176798
  derived and/or modified CDS sequence (opt4) from neuraminidase__InfluenzaA__AFK74728

SEQ ID NO: 182562 - RNA, 1410 nt, Artificial Sequence; identical to SEQ ID NO: 176798
  derived and/or modified CDS sequence (opt4) from neuraminidase__InfluenzaA__AFK74738

SEQ ID NO: 182563 - RNA, 1410 nt, Artificial Sequence; identical to SEQ ID NO: 176798
  derived and/or modified CDS sequence (opt4) from neuraminidase__InfluenzaA__AFK74748

SEQ ID NO: 182564 - RNA, 1410 nt, Artificial Sequence; identical to SEQ ID NO: 176798
  derived and/or modified CDS sequence (opt4) from neuraminidase__InfluenzaA__AFK74758

SEQ ID NO: 182565 - RNA, 1410 nt, Artificial Sequence; identical to SEQ ID NO: 176798
  derived and/or modified CDS sequence (opt4) from neuraminidase__InfluenzaA__AFK74768

SEQ ID NO: 182566 - RNA, 1410 nt, Artificial Sequence; identical to SEQ ID NO: 176798
  derived and/or modified CDS sequence (opt4) from neuraminidase__InfluenzaA__AFK74778

SEQ ID NO: 182567 - RNA, 1410 nt, Artificial Sequence; identical to SEQ ID NO: 179790
  derived and/or modified CDS sequence (opt4) from neuraminidase__InfluenzaA__AFK74788

SEQ ID NO: 182568 - RNA, 1410 nt, Artificial Sequence; identical to SEQ ID NO: 179790
  derived and/or modified CDS sequence (opt4) from neuraminidase__InfluenzaA__AFK74798

SEQ ID NO: 182569 - RNA, 1410 nt, Artificial Sequence; identical to SEQ ID NO: 179790
  derived and/or modified CDS sequence (opt4) from neuraminidase__InfluenzaA__AFK74808

SEQ ID NO: 182570 - RNA, 1410 nt, Artificial Sequence; identical to SEQ ID NO: 179790
  derived and/or modified CDS sequence (opt4) from neuraminidase__InfluenzaA__AFK74818

SEQ ID NO: 182571 - RNA, 1410 nt, Artificial Sequence; identical to SEQ ID NO: 176798
  derived and/or modified CDS sequence (opt4) from neuraminidase__InfluenzaA__AFK74828

SEQ ID NO: 182572 - RNA, 1410 nt, Artificial Sequence; identical to SEQ ID NO: 178689
  derived and/or modified CDS sequence (opt4) from neuraminidase__InfluenzaA__AFK74838

SEQ ID NO: 182573 - RNA, 1410 nt, Artificial Sequence; identical to SEQ ID NO: 176798
  derived and/or modified CDS sequence (opt4) from neuraminidase__InfluenzaA__AFK74848

SEQ ID NO: 182574 - RNA, 1410 nt, Artificial Sequence; identical to SEQ ID NO: 176798
  derived and/or modified CDS sequence (opt4) from neuraminidase__InfluenzaA__AFK74898

SEQ ID NO: 182575 - RNA, 1410 nt, Artificial Sequence; identical to SEQ ID NO: 176798
  derived and/or modified CDS sequence (opt4) from neuraminidase__InfluenzaA__AFK74908

SEQ ID NO: 182576 - RNA, 1410 nt, Artificial Sequence; identical to SEQ ID NO: 176798
  derived and/or modified CDS sequence (opt4) from neuraminidase__InfluenzaA__AFK74918

SEQ ID NO: 182577 - RNA, 1410 nt, Artificial Sequence; identical to SEQ ID NO: 176798
  derived and/or modified CDS sequence (opt4) from neuraminidase__InfluenzaA__AFK74928

SEQ ID NO: 182578 - RNA, 1410 nt, Artificial Sequence
  derived and/or modified CDS sequence (opt4) from neuraminidase__InfluenzaA__AFK74938
augaaccccaaccagaagaucaucaccaucggcagcgugugcaugaccaucggcauggccaaccugauccugcagaucggcaacaucaucagcaucuggaucagccacagcauccagcugggcaaccagaaccagaucgagaccugcaaccagagcgugaucaccuacgagaacaacaccugggugaaccagaccuacgugaacaucagcaacaccaacuucgccgccggccagagcguggugagcgugaagcuggccggcaacagcagccugugccccgugagcggcugggccaucuacagcaaggacaacagcaucagaaucggcagcaagggcgacguguucgugaucagagagcccuucaucagcugcagcccccuggagugcagaaccuucuuccugacccagggcgcccugcugaacgacaagcacagcaacggcaccaucaaggacagaagccccuacagaacccugaugagcugccccaucggcgaggugcccagccccuacaacagcagauucgagagcguggccuggagcgccagcgccugccacgacggcaucaacuggcugaccaucggcaucagcggccccgacaacggcgccguggccgugcugaaguacaacggcaucaucaccgacaccaucaagagcuggagaaacaacauccugagaacccaggagagcgagugcgccugcgugaacggcagcugcuucaccgugaugaccgacggccccagcgacggccaggccagcuacaagaucuucagaaucgagaagggcaagaucgugaagagcguggagaugaacgcccccaacuaccacuacgaggagugcagcugcuaccccgacagcagcgagaucaccugcgugugcagagacaacuggcacggcagcaacagacccugggugagcuucaaccagaaccuggaguaccagaucggcuacaucugcagcggcaucuucggcgacaaccccagacccaacgacaacaccggcagcugcggccccgugagcagcaacggcgccaacggcgugaagggcuucagcuucaaguacggcaacggcguguggaucggcagaaccaagagcaucagcagcagaaacggcuucgagaugaucugggaccccaacggcuggaccggcaccgacaacaacuucagcaucaagcaggacaucgugggcaucaacgaguggagcggcuacagcggcagcuucgugcagcaccccgagcugaccggccuggacugcaucagacccugcuucuggguggagcugaucagaggcagacccaaggagaacaccaucuggaccagcggcagcagcaucagcuucugcggcgugaacagcgacaccgugggcuggagcuggcccgacggcgccgagcugcccuucaccaucgacaaguga

SEQ ID NO: 182579 - RNA, 1410 nt, Artificial Sequence; identical to SEQ ID NO: 176798
  derived and/or modified CDS sequence (opt4) from neuraminidase__InfluenzaA__AFK74948

SEQ ID NO: 182580 - RNA, 1410 nt, Artificial Sequence; identical to SEQ ID NO: 178689
  derived and/or modified CDS sequence (opt4) from neuraminidase__InfluenzaA__AFK74958

SEQ ID NO: 182581 - RNA, 1410 nt, Artificial Sequence; identical to SEQ ID NO: 179790
  derived and/or modified CDS sequence (opt4) from neuraminidase__InfluenzaA__AFK74968

SEQ ID NO: 182582 - RNA, 1410 nt, Artificial Sequence; identical to SEQ ID NO: 176798
  derived and/or modified CDS sequence (opt4) from neuraminidase__InfluenzaA__AFK74978

SEQ ID NO: 182583 - RNA, 1410 nt, Artificial Sequence; identical to SEQ ID NO: 178689
  derived and/or modified CDS sequence (opt4) from neuraminidase__InfluenzaA__AFK74988

SEQ ID NO: 182584 - RNA, 1410 nt, Artificial Sequence; identical to SEQ ID NO: 176798
  derived and/or modified CDS sequence (opt4) from neuraminidase__InfluenzaA__AFK74998

SEQ ID NO: 182585 - RNA, 1410 nt, Artificial Sequence; identical to SEQ ID NO: 179790
  derived and/or modified CDS sequence (opt4) from neuraminidase__InfluenzaA__AFK75008

SEQ ID NO: 182586 - RNA, 1410 nt, Artificial Sequence; identical to SEQ ID NO: 176798
  derived and/or modified CDS sequence (opt4) from neuraminidase__InfluenzaA__AFK75018

SEQ ID NO: 182587 - RNA, 1410 nt, Artificial Sequence; identical to SEQ ID NO: 176798
  derived and/or modified CDS sequence (opt4) from neuraminidase__InfluenzaA__AFK75028

SEQ ID NO: 182588 - RNA, 1410 nt, Artificial Sequence; identical to SEQ ID NO: 176798
  derived and/or modified CDS sequence (opt4) from neuraminidase__InfluenzaA__AFK75038

SEQ ID NO: 182589 - RNA, 1410 nt, Artificial Sequence; identical to SEQ ID NO: 176798
  derived and/or modified CDS sequence (opt4) from neuraminidase__InfluenzaA__AFK75048

SEQ ID NO: 182590 - RNA, 1410 nt, Artificial Sequence; identical to SEQ ID NO: 176798
  derived and/or modified CDS sequence (opt4) from neuraminidase__InfluenzaA__AFK75058

SEQ ID NO: 182591 - RNA, 1410 nt, Artificial Sequence; identical to SEQ ID NO: 179790
  derived and/or modified CDS sequence (opt4) from neuraminidase__InfluenzaA__AFK75068

SEQ ID NO: 182592 - RNA, 1410 nt, Artificial Sequence; identical to SEQ ID NO: 176798
  derived and/or modified CDS sequence (opt4) from neuraminidase__InfluenzaA__AFK75078

SEQ ID NO: 182593 - RNA, 1410 nt, Artificial Sequence; identical to SEQ ID NO: 176798
  derived and/or modified CDS sequence (opt4) from neuraminidase__InfluenzaA__AFK75088

SEQ ID NO: 182594 - RNA, 1410 nt, Artificial Sequence; identical to SEQ ID NO: 176798
  derived and/or modified CDS sequence (opt4) from neuraminidase__InfluenzaA__AFK75098

SEQ ID NO: 182595 - RNA, 1410 nt, Artificial Sequence; identical to SEQ ID NO: 178711
  derived and/or modified CDS sequence (opt4) from neuraminidase__InfluenzaA__AFK75108

SEQ ID NO: 182596 - RNA, 1410 nt, Artificial Sequence; identical to SEQ ID NO: 176798
  derived and/or modified CDS sequence (opt4) from neuraminidase__InfluenzaA__AFK77860

SEQ ID NO: 182597 - RNA, 1410 nt, Artificial Sequence; identical to SEQ ID NO: 176798
  derived and/or modified CDS sequence (opt4) from neuraminidase__InfluenzaA__AFK77870

SEQ ID NO: 182598 - RNA, 1410 nt, Artificial Sequence; identical to SEQ ID NO: 176798
  derived and/or modified CDS sequence (opt4) from neuraminidase__InfluenzaA__AFK77880

SEQ ID NO: 182599 - RNA, 1410 nt, Artificial Sequence
  derived and/or modified CDS sequence (opt4) from neuraminidase__InfluenzaA__AFK77890
augaaccccaaccagaagaucaucaccaucggcagcgugugcaugaccaucggcauggccaaccugauccugcagaucggcaacaucaucagcaucuggaucagccacagcauccagcugggcaaccagaaccagaucgagaccugcaaccagagcgugaucaccuacgagaacaacaccugggugaaccagaccuacgugaacaucagcaacaccaacuucgccgccggccagagcguggugagcgugaagcuggccggcaacagcagccugugccccgugagcggcugggccaucuacagcaaggacaacagcaucagaaucggcagcaagggcgacguguucgugaucagagagcccuucaucagcugcagcccccuggagugcagaaccuucuuccugacccagggcgcccugcugaacgacaagcacagcaacggcaccaucaaggacagaagccccuacagaacccugaugagcugccccaucggcgaggugcccagccccuacaacagcagauucgagagcguggccuggagcgccagcgccugccacgacggcaucaacuggcugaccaucggcaucagcggccccgacaacggcgccguggccgugcugaaguacaacggcaucaucaccgacaccaucaagagcuggagaaacaacauccugagaacccaggagagcgagugcgccugcgugaacggcagcugcuucaccgugaugaccgacggccccagcgacggccaggccagcuacaagaucuucagaaucgagaagggcaagaucgugaagagcguggagaugaacgcccccaacuaccacuacgaggagugcagcugcuaccccgacagcagcgagaucaccugcgugugcagagacaacuggcacggcagcaacagacccugggugagcuucaaccagaaccuggaguaccagaucggcuacaucugcagcggcaucuucggcgacaaccccagacccaacgacaagaccggcagcugcggccccgugagcagcaacggcgccaacggcgugaagggcuucagcuucaaguacggcaacggcguguggaucggcagaaccaagggcaucagcagcagaaacggcuucgagaugaucugggaccccaacggcuggaccggcaccgacaacaacuucagcaucaagcaggacaucgugggcaucaacgaguggagcggcuacagcggcagcuucgugcagcaccccgagcugaccggccuggacugcaucagacccugcuucuggguggagcugaucagaggcagacccaaggagaacaccaucuggaccagcggcagcagcaucagcuucugcggcgugaacagcgacaccgugggcuggagcuggcccgacggcgccgagcugcccuucaccaucgacaaguga

SEQ ID NO: 182600 - RNA, 1410 nt, Artificial Sequence
  derived and/or modified CDS sequence (opt4) from neuraminidase__InfluenzaA__AFK77900
augaaccccaaccagaagaucaucaccaucggcagcgugugcaugaccaucggcauggccaaccugauccugcagaucggcaacaucaucagcaucuggaucagccacagcauccagaucggcaaccagaaccagaucgagaccugcaaccagagcgugaucaccuacgagaacaacaccugggugaaccagaccuacgugaacaucagcaacaccaacuucgccgccggccagagcguggccagcgugaagcuggccggcaacagcagccugugccccgugagcggcugggccaucuacagcaaggacaacagcaucagaaucggcagcaagggcgacguguucgugaucagagagcccuucaucagcugcagcccccuggagugcagaaccuucuuccugacccagggcgcccugcugaacgacaagcacagcaacggcaccaucaaggacagaagccccuacagagcccugaugagcugccccaucggcgaggugcccagccccuacaacagcagauucgagagcguggccuggagcgccagcgccugccacgacggcaucaacuggcugaccaucggcaucagcggccccgacaacggcgccguggccgugcugaaguacaacggcaucaucaccgacaccaucaagagcuggagaaacaacauccugagaacccaggagagcgagugcgccugcgugaacggcagcugcuucaccaucaugaccgacggccccagcgacggccaggccagcuacaagaucuucagaaucgagaagggcaagaucgugaagagcguggagaugaacgcccccaacuaccacuacgaggagugcagcugcuaccccgacagcagcgagaucaccugcgugugcagagacaacuggcacggcagcaacagacccugggugagcuucaaccagaaccuggaguaccagaucggcuacaucugcagcggcaucuucggcgacaaccccagacccaacgacaagaccggcagcugcggccccgugagcagcaacggcgccaacggcgugaagggcuucagcuucaaguacggcaacggcguguggaucggcagaaccaagagcaucagcagcagaaagggcuucgagaugaucugggaccccaacggcuggaccggcaccgacaacaacuucagcaucaagcaggacaucgugggcaugaacgaguggagcggcuacagcggcagcuucgugcagcaccccgagcugaccggccuggacugcaucagacccugcuucuggguggagcugaucagaggcagacccaaggagaacaccaucuggaccagcggcagcagcaucagcuucugcggcgugaacagcgacaccgugggcuggagcuggcccgacggcgccgagcugcccuucaccaucgacaaguga

SEQ ID NO: 182601 - RNA, 1410 nt, Artificial Sequence
  derived and/or modified CDS sequence (opt4) from neuraminidase__InfluenzaA__AFK78031
augaaccccaaccagaagaucaucaccaucggcagcgugugcaugaccaucggcauggccaaccugauccugcagaucggcaacaucaucagcaucuggaucagccacagcauccagcugggcaaccagaaccagaucgagaccugcaaccagagcgugaucaccuacgagaacaacaccugggugaaccagaccuacgugaacaucagcaacaccaacuucgccgccggccagagcguggccagcgugaagcuggccggcaacagcagccugugccccgugagcggcugggccaucuacagcaaggacaacagcaucagaaucggcagcaagggcgacguguucgugaucagagagcccuucaucagcugcagcccccuggagugcagaaccuucuuccugacccagggcgcccugcugaacgacaagcacagcaacggcaccaucaaggacagaagccccuacagagcccugaugagcugccccaucggcgaggugcccagccccuacaacagcagauucgagagcguggccuggagcgccagcgccugccacgacggcaucaacuggcugaccaucggcaucagcggccccgacaacggcgccguggccgugcugaaguacaacggcaucaucaccgacaccaucaagagcuggagaaacaacauccugagaacccaggagagcgagugcgccugcgugaacggcagcugcuucaccaucaugaccgacggccccagcgacggccaggccagcuacaagaucuucagaaucgagaagggcaagaucgugaagagcguggagaugaacgcccccaacuaccacuacgaggagugcagcugcuaccccgacagcagcgagaucaccugcgugugcagagacaacuggcacggcagcaacagacccugggugagcuucaaccagaaccuggaguaccagaucggcuacaucugcagcggcaucuucggcgacaaccccagacccaacgacaagaccggcagcugcggccccgugagcagcaacggcgccaacggcgugaagggcuucagcuucaaguacggcaacggcguguggaucggcagaaccaagagcaucagcagcagaaagggcuucgagaugaucugggaccccaacggcuggaccggcaccgacaacaacuucagcaucaagcaggacaucgugggcaugaacgaguggagcggcuacagcggcagcuucgugcagcaccccgagcugaccggccuggacugcaucagacccugcuucuggguggagcugaucagaggcagacccaaggagaacaccaucuggaccagcggcagcagcaucagcuucugcggcgugaacagcgacaccgugggcuggagcuggcccgacggcgccgagcugcccuucaccaucgacaaguga

SEQ ID NO: 182602 - RNA, 1410 nt, Artificial Sequence; identical to SEQ ID NO: 176798
  derived and/or modified CDS sequence (opt4) from neuraminidase__InfluenzaA__AFK78190

SEQ ID NO: 182603 - RNA, 1362 nt, Artificial Sequence
  derived and/or modified CDS sequence (opt4) from neuraminidase__InfluenzaA__AFM68957
augaaccccaaccagaagaucaucaccaucggcagcaucugcaugguggugggcaucaucagccugauccugcagaucggcaacaucaucagcaucuggaucagccacagcauccagaccggcaaccagaaccacaccggcaucugcaaccagggcaucaucacccacaacgugguggccggccaggacagcaccagcgugauccugaccggcaacagcagccugugccccaucagaggcugggccauccacagcaaggacaacggcaucagaaucggcagcaagggcgacguguucgugaucagagagcccuucaucagcugcagccaccuggagugcagaaccuucuuccugacccagggcgcccugcugaacgacaagcacagcuacggcaccagcaaggacagaagccccuacagagcccugaugagcugccccgugggcgaggcccccagccccuacaacagcagauucgagagcguggccuggagcgccagcgccugccacgacggcaugggcuggcugaccaucggcaucagcggccccgacaacggcgccguggccgugcugaaguacaacggcaucaucaccgagaccaucaagagcuggagaaagaagauccugagaacccaggagagcgagugcaccugcgugaacggcagcugcuucaccaucaugaccgacggccccagcgacggccuggccagcuacaagaucuucaagaucgagaagggcaaggugaccaagagcaucgagcugaacgcccccaacagccacuacgaggagugcagcugcuaccccgacaccggcaaggugaugugcgugugcagagacaacuggcacggcagcaacagacccugggugagcuucgaccagaaccuggacuaccagaucggcuacaucugcagcggcguguucggcgacaaccccagacccaaggacggcaccggcagcugcggccccgugagcgccgacggcgccaacggcgugaagggcuucagcuacagauacggcaacggcguguggaucggcagaaccaagagcgacagcagcagacacggcuucgagaugaucugggaccccaacggcuggaccgagaccgacagcagauucagcgugagacaggacgugguggccaugaccgacagaagcggcuacagcggcagcuucgugcagcaccccgagcugaccggccuggacugcaugagacccugcuucuggguggagcugaucagaggccagcccgaggaggagaccaucuggaccagcggcagcaucaucagcuucugcggcgugaacagcgacaccguggacuggagcuggcccgacggcgccgagcugcccuucaccaucgacaaguga

SEQ ID NO: 182604 - RNA, 1410 nt, Artificial Sequence
  derived and/or modified CDS sequence (opt4) from neuraminidase__InfluenzaA__AFM68968
augaaccccaaccagaagaucaucaccaucggcagcgugagccugaccaucgccaccaucugcuuccugaugcagaucgccauccuggugaccaccgugacccugcacuucaagcaguacgagugcgacagccccgccaacaaccaggugaugcccugcgagcccaucaucaucgagagaaacaucaccgagaucguguaccugaccaacaccaccaucgagaaggagaucugccccaagcugguggaguacagaaacuggagcaagccccagugcaagaucaccggcuucgcccccuucagcaaggacaacagcaucagacugagcgccggcggcgacaucugggugaccagagagcccuacgugagcugcgaccccggcaagugcuaccaguucgcccugggccagggcaccacccuggacaacaagcacagcaacgacaccauccacgacagaaccccccacagaacccugcugaugaacgagcugggcgugcccuuccaccugggcaccagacaggugugcaucgccuggagcagcagcagcugccacgacggcaaggccuggcugcacgugugcgugaccggcuacgacaagaacgccaccgccagcuucaucuacgacggcagacugguggacagcaucggcagcuggagcaagaacauccugagaacccaggagagcgagugcgugugcaucaacggcaccugcaccguggugaugaccgacggcagcgccagcgagagagccgacaccaagauccuguucaucgaggagggcaagaucgugcacaucagcccccugagcggcagcgcccagcacguggaggagugcagcugcuaccccagauaccccggcgugagaugcgugugcagagacaacuggaagggcagcaacagacccaucguggacaucaacgugaaggacuacagcaucgccagcagcuacgugugcagcggccuggugggcgacacccccagaaagaacgacagaagcagcagcagcuacugcagaaaccccaacaacgagaagggcaaccacggcgugaagggcugggccuucgacgacggcaacgacguguggaugggcagaaccaucagcgaggagagcagaagcggcuacgagaccuucaaggugaucggcggcuggagcacccccaacagcaagcugcagaucaacagacaggugaucguggacagcgacaacagaagcggcuacagcggcaucuucagcguggagggcaagagcugcaucaacagaugcuucuacguggagcugaucagaggcagagagcaggagaccagagugugguggaccagcaacagcaucgugguguucugcggcaccagcggcaccuacggcaccggcagcuggcccgacggcgccgacaucaaccugaugcccaucuga

SEQ ID NO: 182605 - RNA, 1410 nt, Artificial Sequence
  derived and/or modified CDS sequence (opt4) from neuraminidase__InfluenzaA__AFM68979
augaaccccaaccagaagaucaucaccaucggcagcgugagccugaccaucgccaccaucugcuuccugaugcagaucgccauccuggugaccaccgugacccugcacuucaagcaguacgagugcagcagcccccccaacaaccaggugaugcccugcgagcccaucaucaucgagagaaacaucaccgagaucguguaccugaccaacaccaccaucgagaaggagaucugccccaagcugguggaguacagaaacuggagcaagccccagugcaagaucaccggcuucgcccccuucagcaaggacaacagcaucagacugagcgccggcggcggcaucugggugaccagagagcccuacgugagcugcgaccccggcaagugcuaccaguucgcccugggccagggcaccacccuggacaacaagcacagcaacgacaccauccacgacagaacccccuacagaacccugcugaugaacgagcugggcgugcccuuccaccugggcaccagacaggugugcaucgccuggagcagcagcagcugccacgacggcaaggccuggcugcacgugugcgugaccggcuacgacaagaacgccaccgccagcuucaucuacgacggcagacugguggacagcaucggcagcuggagcaagaacauccugagaacccaggagagcgagugcgugugcaucaacggcaccugcaccguggugaugaccgacggcagcgccagcgagagagccgacaccaagauccuguucaucgaggagggcaagaucgugcacaucagcccccugagcggcagcgcccagcacguggaggagugcagcugcuaccccagauaccccggcgugagaugcgugugcagagacaacuggaagggcagcaacagacccgugguggacaucaacgugaaggacuacagcaucgugagcagcuacgugugcagcggccuggugggcgacacccccagaaagaacgacagaagcagcagcagcuacugcagaaaccccaacaacgagaagggcaaccacggcgugaagggcugggccuucgacgacggcaacgacguguggaugggcagaaccaucagcgaggagagcagaagcggcuacgagaccuucaaggugaucggcggcuggagcacccccaacagcaagcugcagaucaacagacaggugaucguggacagcgacaacagaagcggcuacagcggcaucuucagcguggagggcaagagcugcaucaacagaugcuucuacguggagcugaucagaggcagagagcaggagaccagagugugguggaccagcaacagcaucgugguguucugcggcaccagcggcaccuacggcaccggcagcuggcccgacggcgccgacaucaaccugaugcccaucuga

SEQ ID NO: 182606 - RNA, 1410 nt, Artificial Sequence; identical to SEQ ID NO: 182605
  derived and/or modified CDS sequence (opt4) from neuraminidase__InfluenzaA__AFM68990

SEQ ID NO: 182607 - RNA, 1410 nt, Artificial Sequence; identical to SEQ ID NO: 174873
  derived and/or modified CDS sequence (opt4) from neuraminidase__InfluenzaA__AFM71723

SEQ ID NO: 182608 - RNA, 1410 nt, Artificial Sequence; identical to SEQ ID NO: 182195
  derived and/or modified CDS sequence (opt4) from neuraminidase__InfluenzaA__AFM71734

SEQ ID NO: 182609 - RNA, 1410 nt, Artificial Sequence; identical to SEQ ID NO: 182009
  derived and/or modified CDS sequence (opt4) from neuraminidase__InfluenzaA__AFM71745

SEQ ID NO: 182610 - RNA, 1410 nt, Artificial Sequence; identical to SEQ ID NO: 178669
  derived and/or modified CDS sequence (opt4) from neuraminidase__InfluenzaA__AFM71771

SEQ ID NO: 182611 - RNA, 1410 nt, Artificial Sequence; identical to SEQ ID NO: 181695
  derived and/or modified CDS sequence (opt4) from neuraminidase__InfluenzaA__AFM71782

SEQ ID NO: 182612 - RNA, 1410 nt, Artificial Sequence; identical to SEQ ID NO: 181695
  derived and/or modified CDS sequence (opt4) from neuraminidase__InfluenzaA__AFM71794

SEQ ID NO: 182613 - RNA, 1410 nt, Artificial Sequence; identical to SEQ ID NO: 176659
  derived and/or modified CDS sequence (opt4) from neuraminidase__InfluenzaA__AFM71805

SEQ ID NO: 182614 - RNA, 1410 nt, Artificial Sequence
  derived and/or modified CDS sequence (opt4) from neuraminidase__InfluenzaA__AFM71827
augaaccccaaccagaagaucaucaccaucggcagcgugagccugaccaucagcaccaucugcuucuucaugcagaucgccauccugaucaccaccgugacccugcacuucaagcaguacgaguucaacagcccccccaacaaccaggugaugcugugcgagcccaccaucaucgagagaaacaucaccgagaucguguaccugaccaacaccaccaucgagaaggagaucugccccaagcuggccgaguacagaaacuggagcaagccccagugcgacaucaccggcuucgcccccuucagcaaggacaacagcaucagacugagcgccggcggcgacaucugggugaccagagagcccuacgugagcugcgaccccgacaagugcuaccaguucgcccugggccagggcaccacccugaacaacgugcacagcaacaacaccgugagagacagaacccccuacagaacccugcugaugaacgagcugggcgugcccuuccaccugggcaccaagcaggugugcaucgccuggagcagcagcagcugccacgacggcaaggccuggcugcacgugugcaucaccggcgacgacaagaacgccaccgccagcuucaucuacaacggcagacugguggacagcguggugagcuggagcaaggagauccugagaacccaggagagcgagugcgugugcaucaacggcaccugcaccguggugaugaccgacggcagcgccagcggcaaggccgacaccaagauccuguucaucgaggagggcaagaucgugcacaccagcacccugagcggcagcgcccagcacguggaggagugcagcugcuaccccagauaccccggcgugagaugcgugugcagagacaacuggaagggcagcaacagacccaucguggacaucaacaucaaggaccacagcaucgugagcagcuacgugugcagcggccuggugggcgacacccccagaaagaacgacagcagcagcagcagccacugccuggaccccaacaacgaggagggcggccacggcgugaagggcugggccuucgacgacggcaaggacguguggaugggcagaaccaucagcgagaagagcagacugggcuacgagaccuucaaggugaucgagggcuggagcaaccccaagagcaagcugcagaucaacagacaggugaucguggacagaggcaacagaagcggcuacagcggcaucuucagcguggagggcaagagcugcaucaacagaugcuucuacguggagcugaucagaggcagaaaggaggagaccgaggugcuguggaccagcaacagcaucgugguguucugcggcaccagcggcaccuacggcaccggcagcuggcccgacggcgccgacaucaaccugaugcccaucuga

SEQ ID NO: 182615 - RNA, 1410 nt, Artificial Sequence; identical to SEQ ID NO: 179578
  derived and/or modified CDS sequence (opt4) from neuraminidase__InfluenzaA__AFM71838

SEQ ID NO: 182616 - RNA, 1365 nt, Artificial Sequence; identical to SEQ ID NO: 175779
  derived and/or modified CDS sequence (opt4) from neuraminidase__InfluenzaA__AFM71849

SEQ ID NO: 182617 - RNA, 1410 nt, Artificial Sequence; identical to SEQ ID NO: 174155
  derived and/or modified CDS sequence (opt4) from neuraminidase__InfluenzaA__AFM71860

SEQ ID NO: 182618 - RNA, 1410 nt, Artificial Sequence; identical to SEQ ID NO: 174387
  derived and/or modified CDS sequence (opt4) from neuraminidase__InfluenzaA__AFM71871

SEQ ID NO: 182619 - RNA, 1410 nt, Artificial Sequence; identical to SEQ ID NO: 174387
  derived and/or modified CDS sequence (opt4) from neuraminidase__InfluenzaA__AFM71882

SEQ ID NO: 182620 - RNA, 1410 nt, Artificial Sequence
  derived and/or modified CDS sequence (opt4) from neuraminidase__InfluenzaA__AFM71893
augaaccccaaccagaagaucaucaccaucggcagcgugagccugaccaucgccaccgugugcuuccugaugcagaucgccauccuggccaccaccgugacccugcacuucaagcagcacgagugcgacagccccgccagcaaccaggugaugcccugcgagcccaucaucaucgagagaaacaucaccgagaucguguaccugaacaacaccaccaucgagaaggagaucugccccgaggugguggaguacagaaacuggagcaagccccagugccagaucaccggcuucgcccccuucagcaaggacaacagcaucagacugagcgccggcggcgacaucugggugaccagagagcccuacgugagcugcgaccccggcaagugcuaccaguucgcccugggccagggcaccacccuggacaacaagcacagcaacggcaccauccacgacagaaucccccacagaacccugcugaugaacgagcugggcgugcccuuccaccugggcaccaagcaggugugcguggccuggagcagcagcagcugccacgacggcaaggccuggcugcacgugugcgugaccggcgacgacagaaacgccaccgccagcuucaucuacgacggcagacugguggacagcaucggcagcuggagccagaacauccugagaacccaggagagcgagugcgugugcaucaacggcaccugcaccguggugaugaccgacggcagcgccagcggcagagccgacaccagaauccuguucaucaaggagggcaagaucgugcacaucagcccccugagcggcagcgcccagcacaucgaggagugcagcugcuaccccagauaccccgacgugagaugcaucugcagagacaacuggaagggcagcaacagacccgugaucgacaucaacauggaggacuacagcaucgacagcagcuacgugugcagcggccuggugggcgacacccccagaaacgacgacagcagcagcaacagcaacugcagagaccccaacaacgagagaggcaaccccggcgugaagggcugggccuucgacaacggcgacgacguguggaugggcagaaccaucaacaaggagagcagaagcggcuacgagaccuucaaggugaucggcggcuggagcacccccaacagcaagagccaggugaacagacaggugaucguggacaacaacaacuggagcggcuacagcggcaucuucagcguggagggcaagagcugcaucaacagaugcuucuacguggagcugaucagaggcagaccccaggagaccagagugugguggaccagcaacagcaucgugguguucugcggcaccagcggcaccuacggcaccggcagcuggcccgacggcgccaacaucaacuucaugcccaucuga

SEQ ID NO: 182621 - RNA, 1410 nt, Artificial Sequence
  derived and/or modified CDS sequence (opt4) from neuraminidase__InfluenzaA__AFM71904
augaaccccaaccagaagaucaucaccaucggcagcgugagccugaccaucgccaccgugugcuuccugaugcagaucgccauccuggccaccaccgugacccugcacuucaagcagcacgagugcgacagccccgccagcaaccaggugaugcccugcgagcccaucaucaucgagagaaacaucaccgagaucguguaccugaacaacaccaccaucgagaaggagaucugccccgaggugguggaguacagaaacuggagcaagccccagugccagaucaccggcuucgcccccuucagcaaggacaacagcaucagacugagcgccggcggcgacaucugggugaccagagagcccuacgugagcugcgaccccggcaagugcuaccaguucgcccugggccagggcaccacccuggacaacaagcacagcaacgugaccauccacgacagaaucccccacagaacccugcugaugaacgagcugggcgugcccuuccaccugggcaccaagcaggugugcguggccuggagcagcagcagcugccacgacggcaaggccuggcugcacgugugcgugaccggcgacgacagaaacgccaccgccagcuucaucuacgacggcagacugguggacagcaucggcagcuggagccagaacauccugagaacccaggagagcgagugcgugugcaucaacggcaccugcaccguggugaugaccgacggcagcgccagcggcagagccgacaccagaauccuguucaucaaggagggcaagaucgugcacaucagcccccugagcggcagcgcccagcacaucgaggagugcagcugcuaccccagauaccccgacgugagaugcaucugcagagacaacuggaagggcagcaacagacccgugaucgacaucaacauggaggacuacagcaucgacagcggcuacgugugcagcggccuggugggcgacacccccagaaacgacgacagcagcagcaacagcaacugcagagaccccaacaacgagagaggcaaccccggcgugaagggcugggccuucgacaacggcgacgacguguggaugggcagaaccaucaacaaggagagcagaagcggcuacgagaccuucaaggugaucggcggcuggagcacccccaacagcaagagccaggugaacagacaggugaucguggacaacaacaacuggagcggcuacagcggcaucuucagcguggagggcaagagcugcaucaacagaugcuucuacguggagcugaucagaggcagaccccaggagaccagagugugguggaccagcaacagcaucgugguguucugcggcaccagcggcaccuacggcaccggcagcuggcccgacggcgccaacaucaacuucaugcccaucuga

SEQ ID NO: 182622 - RNA, 1410 nt, Artificial Sequence; identical to SEQ ID NO: 175032
  derived and/or modified CDS sequence (opt4) from neuraminidase__InfluenzaA__AFM71915

SEQ ID NO: 182623 - RNA, 1410 nt, Artificial Sequence; identical to SEQ ID NO: 175032
  derived and/or modified CDS sequence (opt4) from neuraminidase__InfluenzaA__AFM71926

SEQ ID NO: 182624 - RNA, 1410 nt, Artificial Sequence; identical to SEQ ID NO: 175032
  derived and/or modified CDS sequence (opt4) from neuraminidase__InfluenzaA__AFM71937

SEQ ID NO: 182625 - RNA, 1410 nt, Artificial Sequence; identical to SEQ ID NO: 182040
  derived and/or modified CDS sequence (opt4) from neuraminidase__InfluenzaA__AFM71948

SEQ ID NO: 182626 - RNA, 1410 nt, Artificial Sequence; identical to SEQ ID NO: 182040
  derived and/or modified CDS sequence (opt4) from neuraminidase__InfluenzaA__AFM71959

SEQ ID NO: 182627 - RNA, 1410 nt, Artificial Sequence
  derived and/or modified CDS sequence (opt4) from neuraminidase__InfluenzaA__AFM71970
augaaccccaaccagaagaucaucaccaucggcagcgugagccugaccaucgccaccaucugcuuccugaugcagaucgccauccuggugaccaccgugacccugcacuucaagcaguacgagugcgacagccccgccaacaaccaggugaugcccuacgagcccaucaucaucgagagaaacaucaccgagaucguguaccugaccaacaccaccaucgagaaggagaucugccccaagcugguggaguacagaaacuggagcaagccccagugcaagaucaccggcuucgcccccuucagcaaggacaacagcaucagacugagcgccggcggcgacaucugggugaccagagagcccuacgugagcugcgaccccggcaagugcuaccaguucgcccugggccagggcaccacccuggagaacaagcacagcaacgacaccauccacgacagaaccccccacagaacccugcugaugaacgagcugggcgugcccuuccaccugggcaccagacaggugugcaucgccuggagcagcagcagcugccacgacggcaaggccuggcugcacgugugcgugaccggcuacgacaagaacgccaccgccagcuucaucuacgacggcagacugguggacagcaucggcagcuggagccagaacauccugagaacccaggagagcgagugcgugugcaucaacggcaccugcaccguggugaugaccgacggcagcgccagcggcagagccgacaccaagauccuguucaucgaggagggcaagaucgugcacaucagcccccugagcggcagcgcccagcacguggaggagugcagcugcuaccccagauaccccggcgugagaugcaucugcagagacaacuggaagggcagcaacagacccgugguggacaucaacgugaaggacuacagcaucgacagcagcuacgugugcagcggccuggugggcgacacccccagaaagaacgacagaagcagcagcagcuacugcagaaaccccaacaacgagaagggcaaccacggcgugaagggcugggccuucgacgacggcaacgacguguggaugggcagaaccaucagcgaggacagcagaagcggcuacgagaccuucaaggugaucggcggcuggagcacccccaacagcaagcugcagaucaacagacaggugaucguggacagcgccaacagaagcggcuacagcggcaucuucagcguggagggcaagagcugcaucaacagaugcuucuacguggagcugaucagaggcagagagcaggagaccagagugugguggaccagcaacagcaucgugguguucugcggcaccagcggcaccuacggcaccggcagcuggcccgacggcgccgacaucaaccugaugcccaucuga

SEQ ID NO: 182628 - RNA, 1410 nt, Artificial Sequence; identical to SEQ ID NO: 182048
  derived and/or modified CDS sequence (opt4) from neuraminidase__InfluenzaA__AFM71981

SEQ ID NO: 182629 - RNA, 1410 nt, Artificial Sequence
  derived and/or modified CDS sequence (opt4) from neuraminidase__InfluenzaA__AFM71992
augaaccccaaccagaagaucaucaccaucggcagcgugagccugaccaucagcaccaucugcuucuucaugcagaucgccauccugaucaccaccgugacccugcacuucaagcaguacgaguucaacagcccccccaacaaccaggugaugcugugcgagcccaccaucaucgagagaaacaucaccgagaucguguaccugaccaacaccaccaucgagaaggagaucugccccaagcuggccgaguacagaaacuggagcaagccccagugcgacaucaccggcuucgcccccuucagcaaggacaacagcaucagacugagcgccggcggcgacaucugggugaccagagagcccuacgugagcugcgaccccgacaagugcuaccaguucgcccugggccagggcaccacccugaacaacgugcacagcaacaacaccgugagagacagaacccccuacagaacccugcugaugaacgagcugggcgugcccuuccaccugggcaccaagcaggugugcaucgccuggagcagcagcagcugccacgacggcaaggccuggcugcacgugugcaucaccggcgacgacaagaacgccaccgccagcuucaucuacaacggcagacugguggacagcguggugagcuggagccaggagauccugagaacccaggagagcgagugcgugugcaucaacggcaccugcaccguggugaugaccgacggcagcgccagcggcaaggccgacaccaagauccuguucaucgaggagggcaagaucgugcacaccagcacccugagcggcagcgcccagcacguggaggagugcagcugcuaccccagauaccccggcgugagaugcgugugcagagacaacuggaagggcagcaacagacccaucguggacaucaacaucaaggaccacagcaucgugagcagcuacgugugcagcggccuggugggcgacacccccagaaagaacgacagcagcagcagcagccacugccuggaccccaacaacgaggagggcggccacggcgugaagggcugggccuucgacgacggcaacgacguguggaugggcagaaccaucaacgagaccagcagacugggcuacgagaccuucaaggugaucgagggcuggagcaaccccaagagcaagcugcagaugaacagacaggugaucguggacagaggcaacagaagcggcuacagcggcaucuucagcguggagggcaagagcugcaucaacagaugcuucuacguggagcugaucagaggcagaaaggaggagaccgaggugcuguggaccagcaacagcaucgugguguucugcggcaccagcggcaccuacggcaccggcagcuggcccgacggcgccgaccugaaccugaugcccaucuga

SEQ ID NO: 182630 - RNA, 1410 nt, Artificial Sequence; identical to SEQ ID NO: 182604
  derived and/or modified CDS sequence (opt4) from neuraminidase__InfluenzaA__AFM72013

SEQ ID NO: 182631 - RNA, 1365 nt, Artificial Sequence; identical to SEQ ID NO: 175779
  derived and/or modified CDS sequence (opt4) from neuraminidase__InfluenzaA__AFM72024

SEQ ID NO: 182632 - RNA, 1410 nt, Artificial Sequence; identical to SEQ ID NO: 179055
  derived and/or modified CDS sequence (opt4) from neuraminidase__InfluenzaA__AFM72035

SEQ ID NO: 182633 - RNA, 1410 nt, Artificial Sequence; identical to SEQ ID NO: 179055
  derived and/or modified CDS sequence (opt4) from neuraminidase__InfluenzaA__AFM72046

SEQ ID NO: 182634 - RNA, 1413 nt, Artificial Sequence
  derived and/or modified CDS sequence (opt4) from neuraminidase__InfluenzaA__AFM72057
augaaccccaaccagaagaucaucaccaucggcagcaucugcaccaccaucggcaucaucagccugauccugcagaucggcaacaucaucagcaucugggugagccacagcauccagaccggcagccagaaccacaccggcaucugcaaccagagaaucaucaccuacgagaacagcaccugggugaaccagaccuacgugaacaucaacaacaccaacgugguggccggcaaggacaccaccagcgugacccuggccggcaacagcagccugugccccaucagaggcugggccaucuacagcaaggacaacagcaucagaaucggcagcaagggcgacguguucgugaucagagagcccuucaucagcugcagccaccuggagugcagaaccuucuuccugacccagggcgcccugcugaacgacaagcacagcaacggcaccgugaaggacagaagccccuacagagcccugaugagcugccccaucggcgaggcccccagccccuacaacagcagauucgagagcguggccuggagcgccagcgccugccacgacggcaugggcuggcugaccaucggcaucagcggccccgacgacggcgccguggccgugcugaaguacaacggcaucaucaccgagaccaucaagagcuggagaaagagaauccugagaacccaggagagcgagugcgugugcgugaacggcagcugcuucaccaucaugaccgacggccccagcaacggccccgccagcuacagaaucuucaagaucgagaagggcaagaucaccaagagcaucgagcuggacgcccccaacagccacuacgaggagugcagcugcuaccccgacaccggcaccgugaugugcgugugcagagacaacuggcacggcagcaacagacccugggugagcuucaaccagaaccuggacuaccagaucggcuacaucugcagcggcguguucggcgacaaccccagacccaaggacggcaagggcagcugcgaccccgugaccguggacggcgccgacggcgugaagggcuucagcuacagauacggcaacggcguguggaucggcagaaccaagagcaacagcagcagaaagggcuucgagaugaucugggaccccaacggcuggaccgacaccgacagcaacuuccuggugaagcaggacgugguggccaugaccgacuggagcggcuacagcggcagcuucgugcagcaccccgagcugaccggccuggacugcaugagacccugcuucuggguggagcugaucagaggcagacccagagagaagaccaccaucuggaccagcggcagcagcaucagcuucugcggcgugaacagcgacaccgccaacuggagcuggcccgacggcgccgagcugcccuucaccaucgacaaguga

SEQ ID NO: 182635 - RNA, 1413 nt, Artificial Sequence; identical to SEQ ID NO: 175119
  derived and/or modified CDS sequence (opt4) from neuraminidase__InfluenzaA__AFM72068

SEQ ID NO: 182636 - RNA, 1410 nt, Artificial Sequence
  derived and/or modified CDS sequence (opt4) from neuraminidase__InfluenzaA__AFM72090
augaaccccaaccagaagaucaucaccaucggcagcgugagccugaccaucgccaccaucugcuuccugaugcagaucgccauccuggugaccaccgugacccugcacuucaagcaguacgagugcagcagcccccccaacaaccaggugaugcccugcgagcccaucaucaucgagagaaacaucaccgagaucguguaccugaccaacaccaccaucgagaaggagaucugccccaagcugguggaguacagaaacuggagcaagccccagugcaagaucaccggcuucgcccccuucagcaaggacaacagcaucagacugagcgccggcggcgacaucugggugaccagagagcccuacgugagcugcgaccccggcaagugcuaccaguucgcccugggccagggcaccacccugaacaacaagcacagcaacgacaccgugcacgacagaacccccuacagaacccugcugaugaacgagcugggcgugcccuuccaccugggcaccaagcaggugugcaucgccuggagcagcagcagcugccacgacggcaaggccuggcugcacgugugcgugaccggccacgacaagaacgccaccgccagcuucaucuacgacggcagacugguggacagcaucggcagcuggagcaagaacauccugagaacccaggagagcgagugcgugugcaucaacggcaccugcaccguggugaugaccgacggcagcgccagcgagagagccgacaccaagauccuguucaucgaggagggcaagaucgugcacaucagcccccugagcggcagcgcccagcacguggaggagugcagcugcuaccccagauaccccggcgugagaugcgugugcagagacaacuggaagggcagcaacagacccaucguggacaucaacgugaaggacuacagcaucgugagcagcuacgugugcagcggccuggugggcgacacccccagaaagaacgacagaagcagcagcagcuacugcagaaaccccaacaacgagaagggcaaccacggcgugaagggcugggccuucgacgacggcaacgacguguggaugggcagaaccaucggcgaggagcugagacugggcuacgagaccuucaaggugaucggcggcuggagcacccccaacagcaagcugcagaucaacagacaggugaucguggacagcaagaacagaagcggcuacagcggcaucuucagcguggagggcaagagcugcaucaacagaugcuucuacguggagcugaucagaggcagagagcaggagaccagagugugguggaccagcaacagcaucgugguguucugcggcaccagcggcaccuacggcaccggcagcuggcccgacggcgccgacaucaaccugaugcccaucuga

SEQ ID NO: 182637 - RNA, 1410 nt, Artificial Sequence
  derived and/or modified CDS sequence (opt4) from neuraminidase__InfluenzaA__AFM72101
augaaccccaaccagaagaucaucaccaucggcagcgugagccugaccaucgccaccaucugcuuccugaugcagaucgccauccuggugaccaccgugacccugcacuucaagcaguacgagugcagcagcccccccaacaaccaggccaugcccugcgagcccaccaucaucgagagaaacaucaccgagaucguguaccugaccaacaccaccaucgagaaggagaucugccccaagcugguggaguacagaaacuggagcaagccccagugcaagaucaccggcuucgcccccuucagcaaggacaacagcaucagacugagcgccggcggcgacaucugggugaccagagagcccuacgugagcugcgaccccggcaagugcuaccaguucgcccugggccagggcaccacccugaacaacagacacagcaacgacaccgugcacgacagaacccccuacagaacccugcugaugaacgagcugggcgugcccuuccaccugggcaccaagcaggugugcaucgccuggagcagcagcagcugccacgacggcaaggccuggcugcacgugugcgugaccggccacgacaagaacgccaccgccagcuucaucuacgacggcagacugguggacagcaucggcagcuggagcaagaacauccugagaacccaggagagcgagugcgugugcaucaacggcaccugcaccguggugaugaccgacggcagcgccagcgagagagccgacaccaagauccuguucaucgaggagggcaagaucgugcacaucagcccccugagcggcagcgcccagcacguggaggagugcagcugcuaccccagauaccccggcgugagaugcgugugcagagacaacuggaagggcagcaacagacccaucguggacaucaacgugaaggacuacagcaucgugagcagcuacgugugcagcggccuggugggcgacacccccagaaagaacgacagaagcagcagcagcuacugcagaaaccccaacaacgagaagggcagccacggcgugaagggcugggccuucgacgacggcaacgacguguggaugggcagaaccaucggcgaggagcugagaagcggcuacgagaccuucaaggugaucggcggcuggagcacccccaacagcaagcugcagaucaacagacaggugaucguggacagcggcaacagaagcggcuacagcggcaucuucagcguggagggcaagagcugcaucaacagaugcuucuacguggagcugaucagaggcagagagcaggagaccagagugugguggaccagcaacagcaucgugguguucugcggcaccagcggcaccuacggcaccggcagcuggcccgacggcgccgacaucaaccugaugcccaucuga

SEQ ID NO: 182638 - RNA, 1410 nt, Artificial Sequence; identical to SEQ ID NO: 174873
  derived and/or modified CDS sequence (opt4) from neuraminidase__InfluenzaA__AFM72112

SEQ ID NO: 182639 - RNA, 1410 nt, Artificial Sequence
  derived and/or modified CDS sequence (opt4) from neuraminidase__InfluenzaA__AFM72123
augaaccccaaccagaagaucaucaccaucggcagcgugagccugaccaucgccaccaucugcuuccugaugcagaucgccauccuggugaccaccgugacccugcacuucaagcaguacgagugcagcagcccccccaacaaccaggugaugcccugcgagcccaccaucaucgagagaaacaucaccgagaucguguaccugaccaacaccaccaucgagaaggagaucugccccaagcugguggaguacagaaacuggagcaagccccagugcaagaucaccggcuucgcccccuucagcaaggacaacagcaucagacugagcgccggcggcgacaucugggugaccagagagcccuacgugagcugcgaccccggcaagugcuaccaguucgcccugggccagggcaccacccugaacaacagacacagcaacgacaccgugcacgacagaacccccuacagaacccugcugaugaacgagcugggcgugcccuuccaccugggcaccaagcaggugugcaucgccuggagcagcagcagcugccacgacggcaaggccuggcugcacgugugcgugaccggccacgacaagaacgccaccgccagcuucaucuacgacggcagacugguggacagcaucggcagcuggagcaagaacauccugagaacccaggagagcgagugcgugugcaucaacggcaccugcaccguggugaugaccgacggcagcgccagcgagagagccgacaccaagauccuguucaucgaggagggcaagaucgugcacaucagcccccugagcggcagcgcccagcacguggaggagugcagcugcuaccccagauaccccggcgugagaugcgugugcagagacaacuggaagggcagcaacagacccaucguggacaucaacgugaaggacuacagcaucgugagcagcuacgugugcagcggccuggugggcgacacccccagaaagaacgacagaagcagcagcagcuacugcagaaaccccaacaacgagaagggcagccacggcgugaagggcugggccuucgacgacggcaacgacguguggaugggcagaaccaucggcgaggagcugagaagcggcuacgagaccuucaaggugaucggcggcuggagcacccccaacagcaagcugcagaccaacagacaggugaucguggacagcggcaacagaagcggcuacagcggcaucuucagcguggagggcaagagcugcaucaacagaugcuucuacguggagcugaucagaggcagagagcaggagaccagagugugguggaccagcaacagcaucgugguguucugcggcaccagcggcaccuacggcaccggcagcuggcccgacggcgccgacaucaaccugaugcccaucuga

SEQ ID NO: 182640 - RNA, 1410 nt, Artificial Sequence; identical to SEQ ID NO: 182195
  derived and/or modified CDS sequence (opt4) from neuraminidase__InfluenzaA__AFM72134

SEQ ID NO: 182641 - RNA, 1410 nt, Artificial Sequence
  derived and/or modified CDS sequence (opt4) from neuraminidase__InfluenzaA__AFM72145
augaaccccaaccagaagaucaucaccaucggcagcgugagccugaccaucgccaccaucugcuuccugaugcagaucgccauccuggccaucaccgugacccugcacuucaagcaguacgagugcaacagcccccccaacaaccaggugaugcugugcgagcccaccaucaucgagagaaacaccaccgagaucguguaccugaccaacaccaccaucgagaaggaggugugccccaagcuggccgaguacagaaacuggagcaagccccagugcaagaucaccggcuucgcccccuucagcaaggacaacagcaucagacugagcgccggcggcgacaucugggugaccagagagcccuacgugagcugcgaccccggcaagugcuaccaguucgcccugggccagggcaccacccugaacaacagacacagcaacgacaccgugcacgacagaacccccuacagaacccugcugaugaacgagcugggcgugcccuuccaccugggcaccaagcaggugugcaucgccuggagcagcagcagcugccacgacggcaaggccuggcugcacgugugcgugaccggccacgacgagaacgccaccgccagcuucaucuacgacggcagacugguggacagcaucggcagcuggagcaagaacauccugagaacccaggagagcgagugcgugugcaucaacggcaccugcaccguggugaugaccgacggcagcgccagcgagagagccgacaccaagauccuguucaucgaggagggcaagaucgugcacaucagcccccugagcggcagcgcccagcacguggaggagugcagcugcuaccccagauaccccggcgugagaugcgugugcagagacaacuggaagggcagcaacagacccaucguggacaucaacgugaaggacuacagcaucgugagcagcuacgugugcagcggccuggugggcgacacccccagaaagaacgacagcagcagcagcagcuacugcagaaaccccaacaacgagaagggcagccacggcgugaagggcugggccuucgacgacggcaacgacguguggaugggcagaaccaucagcgaggagcugagaagcggcuacgagaccuucaaggugaucggcggcuggagcaagcccaacagcaagcugcagaucaacagacaggugaucguggacagaggcaacagaagcggcuacagcggcaucuucagcguggagggcaagagcugcaucaacagaugcuucuacguggagcugaucagaggcagaaagcaggagaccgaggugugguggaccagcaacagcaucgugguguucugcggcaccagcggcaccuacggcaccggcagcuggcccgacggcgccgacaucaaccugaugcccaucuga

SEQ ID NO: 182642 - RNA, 1410 nt, Artificial Sequence; identical to SEQ ID NO: 175245
  derived and/or modified CDS sequence (opt4) from neuraminidase__InfluenzaA__AFM72156

SEQ ID NO: 182643 - RNA, 1410 nt, Artificial Sequence
  derived and/or modified CDS sequence (opt4) from neuraminidase__InfluenzaA__AFM72167
augaaccccaaccagaagaucaucaccaucggcagcaucagccugaccaucgccaccaucugcuuccugaugcagaucgccauccuggugaccaccgugacccugcacuucaagcaguacgagugcaacagcccccccaacaaccaggugaugcugugcgagcccaccaucaucgagagaaacaucaccgagaucguguaccugaccaacaccaccaucgagaaggagaucugccccgagcuggccgaguacagaaacuggagcaagccccagugcaagaucaccggcuucgcccccuucagcaaggacaacagcaucagacugagcgccggcggcgacaucugggugaccagagagcccuacgugagcugcgaccccggcaagugcuaccaguucgcccugggccagggcaccacccugaacaacagacacagcaacgacaccgugcacgacagaacccccuacagaacccugcugaugaacgagcugggcgugcccuuccaccugggcaccaagcaggugugcaucgccuggagcagcagcagcugccacgacggcaaggccuggcugcacgugugcgugaccggccacgacgagaacgccaccgccagcuucaucuacgacggcagacugguggacagcaucggcagcuggagcaagaacauccugagaacccaggagagcgagugcgugugcaucaacggcaccugcaccguggugaugaccgacggcagcgccagcgagagagccgacaccaagauccuguucaucgaggagggcaagaucgugcacaucagcccccugagcggcagcgcccagcacguggaggagugcagcugcuaccccagauaccccggcgugagaugcgugugcagagacaacuggaagggcagcaacagacccaucguggacaucaacgugaaggacuacagcaucgugagcagcuacgugugcagcggccuggugggcgacacccccagaaagaacgacagcagcagcagcagcuacugcuggaaccccaacaacgagaagggcggccacggcgugaagggcugggccuucgacgacggcaacgacguguggaugggcagaaccaucagcgaggagcugagaagcggcuacgagaccuucaaggugaucggcggcuggagcaagcccaacagcaagcugcagaucaacagacaggugaucguggacagaggcaacagaagcggcuacagcggcaucuucagcguggagggcaagagcugcaucaacagaugcuucuacguggagcugaucagaggcagaaagcaggagaccgaggugugguggaccagcaacagcaucgugguguucugcggcaccagcggcaccuacggcaccggcagcuggcccgacggcgccgacaucaaccugaugcccaucuga

SEQ ID NO: 182644 - RNA, 1410 nt, Artificial Sequence
  derived and/or modified CDS sequence (opt4) from neuraminidase__InfluenzaA__AFM72178
augaaccccaaccagaagaucaucaccaucggcagcgugagccugaccaucgccaccaucugcuuccugaugcagaucgccauccuggugaccaccgugacccugcacuucaagcaguacgagugcaacagcccccccaacaaccaggugaugcugugcgagcccaccaucaucgagagaaacaucaccgagaucguguaccugaccaacaccaccaucgagaaggagaucugccccgagcuggccgaguacagaaacuggagcaagccccagugcaagaucaccggcuucgcccccuucagcaaggacaacagcaucagacugagcgccggcggcgacaucugggugaccagagagcccuacgugagcugcgaccccggcaagugcuaccaguucgcccugggccagggcaccacccugaacaacagacacagcaacgacaccgugcacgacagaacccccuacagaacccugcugaugaacgagcugggcgugcccuuccaccugggcaccaagcaggugugcaucgccuggagcagcagcagcugccacgacggcaaggccuggcugcacgugugcgugaccggccacgacgagaacgccaccgccagcuucaucuacgacggcagacugguggacagcaucggcagcuggagcaagaacauccugagaacccaggagagcgagugcgugugcaucaacggcaccugcaccguggugaugaccgacggcagcgccagcgagagagccgacaccaagauccuguucaucgaggagggcaagaucgugcacaucagcccccugagcggcagcgcccagcacguggaggagugcagcugcuaccccagauaccccggcgugagaugcgugugcagagacaacuggaagggcagcaacagacccaucguggacaucaacgugaaggacuacagcaucgugagcagcuacgugugcagcggccuggugggcgacacccccagaaagaacgacagcagcagcagcagcuacugcuggaaccccaacaacgagaagggcggccacggcgugaagggcugggccuucgacgacggcaacgacguguggaugggcagaaccaucagcgaggagcugagaagcggcuacgagaccuucaaggugaucggcggcuggagcaagcccaacagcaagcugcagaucaacagacaggugaucguggacagaggcaacagaagcggcuacagcggcaucuucagcguggagggcaagagcugcaucaacagaugcuucuacguggagcugaucagaggcagaaagcaggagaccgaggugugguggaccagcaacagcaucgugguguucugcggcaccagcggcaccuacggcaccggcagcuggcccgacggcgccgacaucaaccugaugcccaucuga

SEQ ID NO: 182645 - RNA, 1410 nt, Artificial Sequence
  derived and/or modified CDS sequence (opt4) from neuraminidase__InfluenzaA__AFM72189
augaaccccaaccagaagaucaucaccaucggcagcgugagccugaccaucgccaccaucugcuuccugaugcagaucgccauccuggugaccaccgugacccugcacuucaagcaguacgagugcaacagcccccccaacaaccaggugaugcugugcgagcccaccaucaucgagagaaacaucaccgagaucguguaccugaccaacaccaccaucgagaaggagaucugccccaagcuggccgaguacagaaacuggagcaagccccagugcaagaucaccggcuucgcccccuucagcaaggacaacagcaucagacugagcgccggcggcgacaucugggugaccagagagcccuacgugagcugcgaccccgacaagugcuaccaguucgcccugggccagggcaccacccugaacaacagacacagcaacgacaccgugcacgacagaacccccuacagaacccugcugaugaacgagcugggcgugcccuuccaccugggcaccaagcaggugugcaucgccuggagcagcagcagcugccacgacggcaaggccuggcugcacgugugcgugaccggccacgacgagaacgccaccgccagcuucaucuacgacggcagacugguggacagcaucggcagcuggagcaagaagauccugagaacccaggagagcgagugcgugugcaucaacggcaccugcaccguggugaugaccgacggcagcgccagcggcagagccgacaccaagauccuguucaucgaggagggcaagaucgugcacaucagcccccugcugggcagcgcccagcacguggaggagugcagcugcuaccccagauaccccggcgugagaugcgugugcagagacaacuggaagggcagcaacagacccaucguggacaucaacgugaaggacuacagcaucgugagcagcuacgugugcagcggccuggugggcgacacccccagaaagaacgacagcagcagcagcagccacugccugaaccccaacaacgaggagggcggccacggcgugaagggcugggccuucgacgacggcgacgacguguggaugggcagaaccaucagcgagaagcugagaagcggcuacgagaccuucaaggugaucgagggcuggagcaagcccaacagcaagcugcagaucaacagacaggugaucguggacagaggcaacagaagcggcuacagcggcaucuucagcguggagggcaagagcugcaucaacagaugcuucuacguggagcugaucagaggcagaaagcaggagaccgaggugugguggaccagcaacagcaucgugguguucugcggcaccagcggcaccuacggcaccggcagcuggcccgacggcgccgacaucaaccugaugcccaucuga

SEQ ID NO: 182646 - RNA, 1410 nt, Artificial Sequence; identical to SEQ ID NO: 182645
  derived and/or modified CDS sequence (opt4) from neuraminidase__InfluenzaA__AFM72200

SEQ ID NO: 182647 - RNA, 1410 nt, Artificial Sequence; identical to SEQ ID NO: 175809
  derived and/or modified CDS sequence (opt4) from neuraminidase__InfluenzaA__AFM72211

SEQ ID NO: 182648 - RNA, 1410 nt, Artificial Sequence; identical to SEQ ID NO: 175809
  derived and/or modified CDS sequence (opt4) from neuraminidase__InfluenzaA__AFM72222

SEQ ID NO: 182649 - RNA, 1413 nt, Artificial Sequence; identical to SEQ ID NO: 176513
  derived and/or modified CDS sequence (opt4) from neuraminidase__InfluenzaA__AFM72233

SEQ ID NO: 182650 - RNA, 1410 nt, Artificial Sequence; identical to SEQ ID NO: 174633
  derived and/or modified CDS sequence (opt4) from neuraminidase__InfluenzaA__AFM72249

SEQ ID NO: 182651 - RNA, 1410 nt, Artificial Sequence; identical to SEQ ID NO: 174121
  derived and/or modified CDS sequence (opt4) from neuraminidase__InfluenzaA__AFM72260

SEQ ID NO: 182652 - RNA, 1410 nt, Artificial Sequence; identical to SEQ ID NO: 174121
  derived and/or modified CDS sequence (opt4) from neuraminidase__InfluenzaA__AFM72271

SEQ ID NO: 182653 - RNA, 1410 nt, Artificial Sequence
  derived and/or modified CDS sequence (opt4) from neuraminidase__InfluenzaA__AFM72293
augaaccccaaccagaagaucaucaccaucggcagcgugagccugaccaucgccaccaucugcuuccugaugcagaucgccauccuggugaccaccgugacccugcacuucaagcaguacgagugcaacagcccccccaacaaccaggugaugcugugcgagcccaccaucaucgagagaaacaucaccgagaucguguaccugaccaacaccaccaucgagaaggagaucugccccaagcuggccgaguacagaaacuggagcaagccccagugcaacaucaccggcuucgcccccuucagcaaggacaacagcaucagacugagcgccggcggcgacaucugggugaccagagagcccuacgugagcugcgaccccgacaagugcuaccaguucgcccugggccagggcaccacccugaacaacggccacagcaacuacaccgugcacgacagaacccccuacagaacccugcugaugaacgagcugggcgugcccuuccaccugggcaccaagcaggugugcaucgccuggagcagcagcagcugccacgacggcaaggccuggcugcacgugugcgugaccggcgacgacgagaacgccaccgccagcuucaucuacaacggcagacugguggacagcaucggcagcuggagcaagaagauccugagaacccaggagagcgagugcgugugcaucaacggcaccugcaccguggugaugaccgacggcagcgccagcggcaaggccgacaccaagauccuguucaucgaggagggcaagaucgugcacaccagcagccugagcggcagcgcccagcacguggaggagugcagcugcuaccccagauaccccggcgugagaugcgugugcagagacaacuggaagggcagcaacagacccaucguggacaucaacgugaaggacuacagcaucgugagcagcuacgugugcagcggccuggugggcgacacccccagaaagaacgacagcagcagcagcagccacugccuggaccccaacaacgaggagggcggccacggcgugaagggcugggccuucgacgacggcaacgacguguggaugggcagaaccaucagcgagaagcugagaagcggcuacgagaccuucaaggugaucgagggcuggagcaagcccaacagcaagcugcagaucaacagacaggugaucguggacagaggcaacagaagcggcuacagcggcaucuucagcguggagggcaagagcugcaucaacagaugcuucuacguggagcugaucagaggcagaaagcaggagaccgaggugcuguggaccagcaacagcaucgugguguucugcggcaccagcggcaccuacggcaccggcagcuggcccgacggcgccgacaucaaccugaugcccaucuga

SEQ ID NO: 182654 - RNA, 1410 nt, Artificial Sequence; identical to SEQ ID NO: 175989
  derived and/or modified CDS sequence (opt4) from neuraminidase__InfluenzaA__AFM72304

SEQ ID NO: 182655 - RNA, 1410 nt, Artificial Sequence
  derived and/or modified CDS sequence (opt4) from neuraminidase__InfluenzaA__AFM72315
augaaccccaaccagaagaucaucaccaucggcagcgugagccugaccaucagcaccaucugcuucuucaugcagaucgccauccugaucaccaccgugacccugcacuucaagcaguacgaguucaacagcccccccaacaaccaggugaugcugugcgagcccaccaucaucgagagaaacaucaccgagaucguguaccugaccaacaccaccaucgagaaggagaucugccccaagcuggccgaguacagaaacuggagcaagccccagugcaacaucaccggcuucgcccccuucagcaaggacaacagcaucagacugagcgccggcggcgacaucugggugaccagagagcccuacgugagcugcgaccccgacaagugcuaccaguucgcccugggccagggcaccacccugaacaacgugcacagcaacgacaccgugcacgacagaacccccuacagaacccugcugaugaacgagcugggcgugcccuuccaccugggcaccaagcaggugugcaucgccuggagcagcagcagcugccacgacggcaaggccuggcugcacgugugcgugaccggcgacgacgagaacgccaccgccagcuucaucuacaacggcagacugguggacagcaucgugagcuggagcaagaagauccugagaacccaggagagcgagugcgugugcaucaacggcaccugcaccguggugaugaccgacggcagcgccagcggcaaggccgacaccaagauccuguucaucgaggagggcaagaucgugcacaccagcacccugagcggcagcgcccagcacguggaggagugcagcugcuaccccagauaccccggcgugagaugcgugugcagagacaacuggaagggcagcaacagacccaucguggacaucaacaucaaggacuacagcaucgugagcagcuacgugugcagcggccuggugggcgacacccccagaaagaacgacagcagcagcagcagccacugccuggaccccaacaacgagaagggcggccacggcgugaagggcugggccuucgacgacggcaacgacguguggaugggcagaaccaucagcgagaagcugagaagcggcuacgagaccuucaaggugaucgagggcuggagcaaccccaacagcaagcugcagaucaacagacaggugaucguggacagagacaacagaagcggcuacagcggcaucuucagcguggagggcaagagcugcaucaacagaugcuucuacguggagcugaucagaggcagaaaccaggagaccgaggugcuguggaccagcaacagcaucgugguguucugcggcaccagcggcaccuacggcaccggcagcuggcccgacggcgccgacaucaaccugaugcccaucuga

SEQ ID NO: 182656 - RNA, 1410 nt, Artificial Sequence
  derived and/or modified CDS sequence (opt4) from neuraminidase__InfluenzaA__AFM72326
augaaccccaaccagaagaucaucaccaucggcagcgugagccugaccaucagcaccaucugcuucuucaugcagaucgccauccugaucaccaccgugacccugcacuucaagcaguacgaguucaacagcccccccaacaaccaggugaugcugugcgagcccaccaucaucgagagaaacaucaccgagaucguguaccugaccaacaccaccaucgagaaggagaucugccccaagcuggccgaguacagaaacuggagcaagccccagugcaacaucaccggcuucgcccccuucagcaaggacaacagcaucagacugagcgccggcggcgacaucugggugaccagagagcccuacgugagcugcgaccccgacaagugcuaccaguucgcccugggccagggcaccacccugaacaacgugcacagcaacgacaccgugcacgacagaacccccuacagaacccugcugaugaacgagcugggcgugcccuuccaccugggcaccaagcaggugugcaucgccuggagcagcagcagcugccacgacggcaaggccuggcugcacgugugcgugaccggcgacgacgagaacgccaccgccagcuucaucuacaacggcagacugguggacagcaucgugagcuggagcaagaagauccugagaacccaggagagcgagugcgugugcaucaacggcaccugcaccguggugaugaccgacggcagcgccagcggcaaggccgacaccaagauccuguucaucgaggagggcaagaucgugcacaccagcacccugagcggcagcgcccagcacguggaggagugcagcugcuaccccagauaccccggcgugagaugcgugugcagagacaacuggaagggcagcaacagacccaucguggacaucaacaucaaggacuacagcaucgugagcagcuacgugugcagcggccuggugggcgacacccccagaaagaacgacagcagcagcagcagccacugccuggaccccaacaacgaggagggcggccacggcgugaagggcugggccuucgacgacggcaacgacguguggaugggcagaaccaucagcgagaagcugagaagcggcuacgagaccuucaaggugaucgagggcuggagcaaccccaacagcaaguuccagaucaacagacaggugaucguggacagagacaacagaagcggcuacagcggcaucuucagcguggagggcaagagcugcaucaacagaugcuucuacguggagcugaucagaggcagaaaccaggagaccgaggugcuguggaccagcaacagcaucgugguguucugcggcaccagcggcaccuacggcaccggcagcuggcccgacggcgccgacaucaaccugaugcccaucuga

SEQ ID NO: 182657 - RNA, 1410 nt, Artificial Sequence
  derived and/or modified CDS sequence (opt4) from neuraminidase__InfluenzaA__AFM72337
augaaccccaaccagaagaucaucaccaucggcagcgugagccugaccaucagcaccaucugcuucuucaugcagaucgccauccugaucaccaccgugacccugcacuucaagcaguacgaguucaacagcccccccaacaaccaggugaugcugugcgagcccaccaucaucgagagaaacaucaccgagaucguguaccugaccaacaccaccaucgagaaggagaucugccccaagcuggccgaguacagaaacuggagcaagccccagugcgacaucaccggcuucgcccccuucagcaaggacaacagcaucagacugagcgccggcggcgacaucugggugaccagagagcccuacgugagcugcgaccccgacaagugcuaccaguucgcccugggccagggcaccacccugaacaacgugcacagcaacgacaccgugagagacagaacccccuacagaacccugcugaugaacgagcugggcgugcccuuccaccugggcaccaagcaggugugcaucgccuggagcagcagcagcugccacgacggcaaggccuggcugcacgugugcaucaccggcgacgacaagaacgccaccgccagcuucaucuacaacggcagacugguggacagcguggugagcuggagcaaggagauccugagaacccaggagagcgagugcgugugcaucaacggcaccugcaccguggugaugaccgacggcagcgccagcggcaaggccgacaccaagauccuguucaucgaggagggcaagaucgugcacaccagcacccugagcggcagcgcccagcacguggaggagugcagcugcuaccccagauaccccggcgugagaugcgugugcagagacaacuggaagggcagcaacagacccaucguggacaucaacaucaaggaccacagcaucgugagcagcuacgugugcagcggccuggugggcgacacccccagaaagaacgacagcagcagcagcagccacugccuggaccccaacaacgaggagggcggccacggcgugaagggcugggccuucgacgacggcaacgacguguggaugggcagaaccaucaacgagaccagcagacugggcuacgagaccuucaaggugaucgagggcuggagcaaccccaagagcaagcugcagaucaacagacaggugaucguggacagaggcaacagaagcggcuacagcggcaucuucagcguggagggcaagagcugcaucaacagaugcuucuacguggagcugaucagaggcagaaaggaggagaccgaggugcuguggaccagcaacagcaucgugguguucugcggcaccagcggcaccuacggcaccggcagcuggcccgacggcgccgaccugaaccugaugcccaucuga

SEQ ID NO: 182658 - RNA, 1410 nt, Artificial Sequence
  derived and/or modified CDS sequence (opt4) from neuraminidase__InfluenzaA__AFM72348
augaaccccaaccagaagaucaucaccaucggcagcgugagccugaccaucgccaccaucugcuuccugaugcagaucgccauccuggugaccaccgugacccugcacuucaagcagcacgagugcaacagcccccccaacaaccaggugaugcugugcgagcccaccaucaucgagagaaacaucaccgagaucguguaccugaccaacaccaccaucgagaaggagaucugccccaagcuggccgaguacagaaacuggagcaagccccagugcaacaucaccggcuucgcccccuucagcaaggacaacagcaucagacugagcgccggcggcgacaucugggugaccagagagcccuacgugagcugcgaccccgacaagugcuaccaguucgcccugggccagggcaccacccugaacaacggccacagcaacgacaccgugcacgacagaacccccuacagaacccugcugaugaacgagcugggcauccccuuccaccugggcaccagacaggugugcaucgccuggagcagcagcagcugccacgacggcaaggccuggcugcacgugugcgugaccggcgacgacaagaacgccaccgccagcuucaucuacaacggcagacugguggacagcaucggcagcuggagcaagaagauccugagaacccaggagagcgagugcgugugcaucaacggcaccugcaccguggugaugaccgacggcagcgccagcggcaaggccgacaccaagauccuguucaucgaggagggcaagaucgugcacaucagcacccugagcggcagcgcccagcacguggaggagugcagcugcuaccccagauaccccggcgugagaugcgugugcagagacaacuggaagggcagcaacagacccaucguggacaucaacgugaaggacuacagcaucgugagcagcuacgugugcagcggccuggugggcgacacccccagaaagaacgacagcagcagcagcagccacugccuggaccccaacaacgaggagggcggccacggcgugaagggcugggccuucgacgacggcaacgacguguggaugggcagaaccaucagcgagaagcugagaagcggcuacgagaccuucaaggugaucgagggcuggagcaagcccaacagcaagcugcagaucaacagacaggugaucguggagagaggcaacagaagcggcuacagcggcaucuucagcguggagggcaagagcugcaucaacagaugcuucuacguggagcugaucagaggcagaaaggaggagaccgaggugugguggaccagcaacagcaucgugguguucugcggcaccagcggcaccuacggcaccggcagcuggcccgacggcgccgacaucaaccugaugcccaucuga

SEQ ID NO: 182659 - RNA, 1410 nt, Artificial Sequence
  derived and/or modified CDS sequence (opt4) from neuraminidase__InfluenzaA__AFM72359
augaaccccaaccagaagaucaucaccaucggcagcgugagccugaccaucagcaccaucugcuucuucaugcagaucgccauccugaucaccaccgugacccugcacuucaagcaguacgaguucaacagcccccccaacaaccaggugaugcugugcgagcccaccaucaucgagagaaacaucaccgagaucguguaccugaccaacaccaccaucgagaaggagaucugccccaagcuggccgaguacagaaacuggagcaagccccagugcgacaucaccggcuucgcccccuucagcaaggacaacagcaucagacugagcgccggcggcgacaucugggugaccagagagcccuacgugagcugcgaccccgacaagugcuaccaguucgcccugggccagggcaccacccugaacaacgugcacagcaacgacaccgugcacgacagaacccccuacagaacccugcugaugaacgagcugggcgugcccuuccaccugggcaccaagcaggugugcaucgccuggagcagcagcagcugccacgacggcaaggccuggcugcacgugugcgugaccggcgacgacaagaacgccaccgccagcuucaucuacaacggcagacugguggacagcaucgugagcuggagcaagaagauccugagaacccaggagagcgagugcgugugcaucaacggcaccugcaccguggugaugaccgacggcagcgccagcggcaaggccgacaccaagauccuguucaucgaggagggcaagaucgugcacaccagcacccugagcggcagcgcccagcacguggaggagugcagcugcuaccccagauaccccggcgugagaugcgugugcagagacaacuggaagggcagcaacagacccaucguggacaucaacaucaaggacuacagcaucgugagcagcuacgugugcagcggccuggugggcgacacccccagaaagaacgacagcagcagcagcagccacugccuggaccccaacaacgaggagggcggccacggcgugaagggcugggccuucgacgacggcaacgacguguggaugggcagaaccaucagcgagaagcugagaagcggcuacgagaccuucaaggugaucgagggcuggagcaaccccaacagcaagcugcagaucaacagacaggugaucguggacagaggcaacagaagcggcuacagcggcaucuucagcguggagggcaagagcugcaucaacagaugcuucuacguggagcugaucagaggcagaaaggaggagaccaaggugcuguggaccagcaacagcaucgugguguucugcggcaccagcggcaccuacggcaccggcagcuggcccgacggcgccgacaucaaccugaugcccaucuga

SEQ ID NO: 182660 - RNA, 1410 nt, Artificial Sequence; identical to SEQ ID NO: 182659
  derived and/or modified CDS sequence (opt4) from neuraminidase__InfluenzaA__AFM72370

SEQ ID NO: 182661 - RNA, 1410 nt, Artificial Sequence; identical to SEQ ID NO: 179578
  derived and/or modified CDS sequence (opt4) from neuraminidase__InfluenzaA__AFM72381

SEQ ID NO: 182662 - RNA, 1410 nt, Artificial Sequence; identical to SEQ ID NO: 179578
  derived and/or modified CDS sequence (opt4) from neuraminidase__InfluenzaA__AFM72392

SEQ ID NO: 182663 - RNA, 1410 nt, Artificial Sequence; identical to SEQ ID NO: 176462
  derived and/or modified CDS sequence (opt4) from neuraminidase__InfluenzaA__AFM72403

SEQ ID NO: 182664 - RNA, 1410 nt, Artificial Sequence; identical to SEQ ID NO: 176462
  derived and/or modified CDS sequence (opt4) from neuraminidase__InfluenzaA__AFM72414

SEQ ID NO: 182665 - RNA, 1410 nt, Artificial Sequence; identical to SEQ ID NO: 176126
  derived and/or modified CDS sequence (opt4) from neuraminidase__InfluenzaA__AFM72425

SEQ ID NO: 182666 - RNA, 1410 nt, Artificial Sequence; identical to SEQ ID NO: 176126
  derived and/or modified CDS sequence (opt4) from neuraminidase__InfluenzaA__AFM72436

SEQ ID NO: 182667 - RNA, 1410 nt, Artificial Sequence; identical to SEQ ID NO: 176126
  derived and/or modified CDS sequence (opt4) from neuraminidase__InfluenzaA__AFM72447

SEQ ID NO: 182668 - RNA, 1410 nt, Artificial Sequence; identical to SEQ ID NO: 176126
  derived and/or modified CDS sequence (opt4) from neuraminidase__InfluenzaA__AFM72458

SEQ ID NO: 182669 - RNA, 1410 nt, Artificial Sequence; identical to SEQ ID NO: 176126
  derived and/or modified CDS sequence (opt4) from neuraminidase__InfluenzaA__AFM72469

SEQ ID NO: 182670 - RNA, 1410 nt, Artificial Sequence
  derived and/or modified CDS sequence (opt4) from neuraminidase__InfluenzaA__AFM72491
augaaccccaaccagaagaucaucaccaucggcagcgugagccugaccaucagcaccaucugcuucuucaugcagaucgccauccugaucaccaccgugacccugcacuucaagcaguacgaguucaacagcccccccaacaaccaggugaugaugugcgagcccaccaucaucgagagaaacaucaccgagaucguguaccugaccaacaccaccaucgagaaggagaucugccccaagcuggccgaguacagaaacuggagcaagccccagugcgacaucaccggcuucgcccccuucagcaaggacaacagcaucagacugagcgccggcggcgacaucugggugaccagagagcccuacgugagcugcgaccccgacaagugcuaccaguucgcccugggccagggcaccacccugaacaacgugcacagcaacgacaccgugagagacagaacccccuacagaacccugcugaugaacgagcugggcgugcccuuccaccugggcaccaagcaggugugcaucgccuggagcagcagcagcugccacgacggcaaggccuggcugcacgugugcaucaccggcgacgacaagaacgccaccgccagcuucaucuacaacggcagacugguggacagcaucgugagcuggagcaaggagauccugagaacccaggagagcgagugcgugugcaucaacggcaccugcaccguggugaugaccgacggcagcgccagcggcaaggccgacaccaagauccuguucaucgaggagggcaagaucgugcacaccagcacccugagcggcagcgcccagcacguggaggagugcagcugcuaccccagauaccccggcgugagaugcgugugcagagacaacuggaagggcagcaacagacccaucguggacaucaacaucaaggaccacagcaucgugagcagcuacgugugcagcggccuggugggcgacacccccagaaagaacgacagcagcagcagcagccacugccuggaccccaacaacgaggagggcggccacggcgugaagggcugggccuucgacgacggcaacgacguguggaugggcagaaccaucagcgagaagagcagacugggcuacgagaccuucaaggugaucgagggcuggagcaaccccaacagcaagcugcagaucaacagacaggugaucguggacagaggcaacagaagcggcuacagcggcaucuucagcguggagggcaagagcugcaucaacagaugcuucuacguggagcugaucagaggcagaaaggaggagaccgaggugcuguggaccagcaacagcaucgugguguucugcggcaccagcggcaccuacggcaccggcagcuggcccgacggcgccgacaucaaccugaugcccaucuga

SEQ ID NO: 182671 - RNA, 1410 nt, Artificial Sequence; identical to SEQ ID NO: 182670
  derived and/or modified CDS sequence (opt4) from neuraminidase__InfluenzaA__AFM72502

SEQ ID NO: 182672 - RNA, 1413 nt, Artificial Sequence; identical to SEQ ID NO: 176692
  derived and/or modified CDS sequence (opt4) from neuraminidase__InfluenzaA__AFM72513

SEQ ID NO: 182673 - RNA, 1413 nt, Artificial Sequence; identical to SEQ ID NO: 176692
  derived and/or modified CDS sequence (opt4) from neuraminidase__InfluenzaA__AFM72524

SEQ ID NO: 182674 - RNA, 1413 nt, Artificial Sequence; identical to SEQ ID NO: 176692
  derived and/or modified CDS sequence (opt4) from neuraminidase__InfluenzaA__AFM72535

SEQ ID NO: 182675 - RNA, 1413 nt, Artificial Sequence; identical to SEQ ID NO: 176692
  derived and/or modified CDS sequence (opt4) from neuraminidase__InfluenzaA__AFM72546

SEQ ID NO: 182676 - RNA, 1413 nt, Artificial Sequence; identical to SEQ ID NO: 176692
  derived and/or modified CDS sequence (opt4) from neuraminidase__InfluenzaA__AFM72557

SEQ ID NO: 182677 - RNA, 1410 nt, Artificial Sequence
  derived and/or modified CDS sequence (opt4) from neuraminidase__InfluenzaA__AFM72579
augaaccccaaccagaagaucaucaccaucggcagcgugagccugaccaucagcaccaucugcuucuucaugcagaccgccauccugaucaccaccgugacccugcacuucaagcaguacgaguucaacagcccccccaacaaccaggugaugcugugcgagcccaccaucaucgagagaaacaucaccgagaucguguaccugaccaacaccaccaucgagaaggagaucugccccaagcuggccgaguacagaaacuggagcaagccccagugcgacaucaccggcuucgcccccuucagcaaggacaacagcaucagacugagcgccggcggcgacaucugggugaccagagagcccuacgugagcugcgaccccgacaagugcuaccaguucgcccugggccagggcaccacccugaacaacgugcacagcaacgacaccgugcacgacagaacccccuacagaacccugcugaugaacgagcugggcgugcccuuccaccugggcaccaagcaggugugcaucgccuggagcagcagcagcugccacgacggcaaggccuggcugcacgugugcaucaccggcgacgacaagaacgccaccgccagcuucaucuacaacggcagacugguggacagcaucgugagcuggagcaaggagauccugagaacccaggagagcgagugcgugugcaucaacggcaccugcaccguggugaugaccgacggcagcgccagcggcaaggccgacaccaagauccuguucaucgaggagggcaagaucgugcacaccagcauccugagcggcagcgcccagcacguggaggagugcagcugcuaccccagauaccccggcgugagaugcgugugcagagacaacuggaagggcagcaacagacccaucguggacaucaacaucaaggaccacagcaucgugagcagcuacgugugcagcggccuggugggcgacacccccagaaagaacgacagcagcagcagcagccacugccuggaccccaacaacgaggagggcggccacggcgugaagggcugggccuucgacgacggcaacgacguguggaugggcagaaccaucagcgagaagagcagacugggcuacgagaccuucaaggugaucgagggcuggagcaaccccaagagcaagcugcagaucaacagacaggugaucguggacagaggcaacagaagcggcuacagcggcaucuucagcguggagggcaagagcugcaucaacagaugcuucuacguggagcugaucagaggcagaaaggaggagaccgaggugcuguggaccagcaacagcaucgugguguucugcggcaccagcggcaccuacggcaccggcagcuggcccgacggcgccgacaucaaccugaugcccaucuga

SEQ ID NO: 182678 - RNA, 1413 nt, Artificial Sequence
  derived and/or modified CDS sequence (opt4) from neuraminidase__InfluenzaA__AFM72802
augaaccccaaccagaagaucaucaccaucggcagcaucagcaucgccaucggcaucaucagccugaugcugcagaucggcaacaucaucagcaucugggccagccacagcauccagaccggcagccagaaccacaccggcaugugcaaccagagaaucaucaccuacgagaacagcaccugggugaaccacaccuacgugaacaucaacaacaccaacgugguggccggcaaggacaagacccccgugacccuggccggcaacagcagccugugcagcaucagcggcugggccauccacaccaaggacaacagcaucagaaucggcagcaagggcgacguguucgugaucagagagcccuucaucagcugcagccaccuggagugcaagaccuucuuccugacccagggcgcccugcugaacgacaagcacagcaacggcaccgugaaggacagaagccccuacagagcccugaugagcugcccccugggcgaggcccccagccccuacaacagcaaguucgagagcguggccuggagcgccagcgccugccacgacggcaucggcuggcugaccaucggcaucagcggccccgacaacggcgccguggccgugcugaaguacaacggcaucaucaccggcaccaucaagagcuggaagaagcagauccugagaacccaggagagcgagugcgugugcaugaacggcagcugcuucaccaucaugaccgacggccccagcaacggcgccgccagcuacaagaucuucaagaucgagaagggcaaggugaucaagagcauggagcugaacgcccccaacuuccacuacgaggagugcagcugcuaccccgacaccggcaccgugaugugcgugugcagagacaacuggcacggcagcaacagacccugggugagcuucaaccagaaccuggacuaccagaucggcuacaucugcagcggcguguucggcgacaaccccagacccgaggacggcgagggcagcugcaaccccgugaccguggacggcgccaacggcgugaagggcuucagcuacaaguacggcaacggcguguggaucggcagaaccaagagcaacagaaucagaaagggcuucgagaugaucugggaccccaacggcuggaccaacaccgacagcgacuucagcgugaagcaggacaucguggccaucaccgacuggagcggcuacagcggcagcuucgugcagcaccccgagcugaccggccuggacugcaucagacccugcuucuggguggagcuggugagaggccugcccagagagaacaccaccaucuggaccagcggcagcagcaucagcuucugcggcgugaacagcgacaucgccaacuggagcuggcccgacggcgccgagcugcccuucaccaucgacaaguga

SEQ ID NO: 182679 - RNA, 1413 nt, Artificial Sequence; identical to SEQ ID NO: 182678
  derived and/or modified CDS sequence (opt4) from neuraminidase__InfluenzaA__AFM72813

SEQ ID NO: 182680 - RNA, 1413 nt, Artificial Sequence; identical to SEQ ID NO: 182678
  derived and/or modified CDS sequence (opt4) from neuraminidase__InfluenzaA__AFM72824

SEQ ID NO: 182681 - RNA, 1410 nt, Artificial Sequence; identical to SEQ ID NO: 176788
  derived and/or modified CDS sequence (opt4) from neuraminidase__InfluenzaA__AFM72835

SEQ ID NO: 182682 - RNA, 1410 nt, Artificial Sequence; identical to SEQ ID NO: 176788
  derived and/or modified CDS sequence (opt4) from neuraminidase__InfluenzaA__AFM72845

SEQ ID NO: 182683 - RNA, 1410 nt, Artificial Sequence; identical to SEQ ID NO: 176788
  derived and/or modified CDS sequence (opt4) from neuraminidase__InfluenzaA__AFM72855

SEQ ID NO: 182684 - RNA, 1410 nt, Artificial Sequence; identical to SEQ ID NO: 176788
  derived and/or modified CDS sequence (opt4) from neuraminidase__InfluenzaA__AFM72865

SEQ ID NO: 182685 - RNA, 1410 nt, Artificial Sequence
  derived and/or modified CDS sequence (opt4) from neuraminidase__InfluenzaA__AFM72875
augaaccccaaccagaagaucaucaccaucggcagcgugagccugaccaucagcaccaucugcuucuucaugcagaucgccauccugaucaccaccgugacccugcacuucaagcaguacgaguucaacagcccccccaacaaccaggugaugcugugcgagcccaccaucaucgagagaaacaucaccgagaucguguaccugaccaacaccaccaucgagaaggagaucugccccaagcuggccgaguacagaaacuggagcaagccccagugcgacaucaccggcuucgcccccuucagcaaggacaacagcaucagacugagcgccggcggcgacaucugggugaccagagagcccuacgugagcugcgaccccgacaagugcuaccaguucgcccugggccagggcaccacccugaacaacgugcacagcaacaacaccgugagagacagaacccccuacagaacccugcugaugaacgagcugggcgugcccuuccaccugggcaccaagcaggugugcaucgccuggagcagcagcagcugccacgacggcaaggccuggcugcacgugugcaucaccggcgacgacaagaacgccaccgccagcuucaucuacaacggcagacugguggacagcguggugagcuggagcaaggagauccugagaacccaggagagcgagugcgugugcaucaacggcaccugcaccguggugaugaccgacggcagcgccagcggcaaggccgacaccaagauccuguucaucgaggagggcaagaucgugcacaccagcacccugagcggcagcgcccagcacguggaggagugcagcugcuaccccagauaccccggcgugagaugcgugugcagagacaacuggaagggcagcaacagacccaucguggacaucaacaucaaggaccacagcaucgugagcagcuacgugugcagcggccuggugggcgacacccccagaaagagcgacagcagcagcagcagccacugccuggaccccaacaacgaggagggcggccacggcgugaagggcugggccuucgacgacggcaacgacguguggaugggcagaaccaucagcgagaagagcagacugggcuacgagaccuucaaggugaucgagggcuggagcaaccccaagagcaagcugcagaucaacagacaggugaucguggacagaggcaacagaagcggcuacagcggcaucuucagcguggagggcaagagcugcaucaacagaugcuucuacguggagcugaucagaggcagaaaggaggagaccgaggugcuguggaccagcaacagcaucgugguguucugcggcaccagcggcaccuacggcaccggcagcuggcccgacggcgccgacaucaaccugaugcccguguga

SEQ ID NO: 182686 - RNA, 1410 nt, Artificial Sequence; identical to SEQ ID NO: 176659
  derived and/or modified CDS sequence (opt4) from neuraminidase__InfluenzaA__AFM72886

SEQ ID NO: 182687 - RNA, 1410 nt, Artificial Sequence; identical to SEQ ID NO: 176659
  derived and/or modified CDS sequence (opt4) from neuraminidase__InfluenzaA__AFM72897

SEQ ID NO: 182688 - RNA, 1410 nt, Artificial Sequence
  derived and/or modified CDS sequence (opt4) from neuraminidase__InfluenzaA__AFM72908
augaaccccaaccagaagaucaucaccaucggcagcgugagccugaccaucagcaccaucugcuucuucaugcagaucgccauccugaucaccaccgugacccugcacuucaagcaguacgaguucaacagcccccccaacaaccaggugaugcugugcgagcccaccaucaucgagagaaacaucaccgagaucguguaccugaccaacaccaccaucgagaaggagaucugccccaagcuggccgaguacagaaacuggagcaagccccagugcgacaucaccggcuucgcccccuucagcaaggacaacagcaucagacugagcgccggcggcgacaucugggugaccagagagcccuacgugagcugcgaccccgacaagugcuaccaguucgcccugggccagggcaccacccugaacaacgugcacagcaacaacaccgugagagacagaacccccuacagaacccugcugaugaacgagcugggcgugcccuuccaccugggcaccaagcaggugugcaucgccuggagcagcagcagcugccacgacggcaaggccuggcugcacgugugcaucaccggcgacgacaagaacgccaccgccagcuucaucuacaacggcagacugguggacagcguggugagcuggagcaaggagauccugagaacccaggagagcgagugcgugugcaucaacggcaccugcaccguggugaugaccgacggcagcgccagcggcaaggccgacaccaagauccuguucaucgaggagggcaagaucgugcacaccagcacccugagcggcagcgcccagcacguggaggagugcagcugcuaccccagauaccccggcgugagaugcgugugcagagacaacuggaagggcagcaacagacccaucguggacaucaacaccaaggaccacagcaucgugagcagcuacgugugcagcggccuggugggcgacacccccagaaagaacgacagcagcagcagcagccacugccuggaccccaacaacgaggagggcggccacggcgugaagggcugggccuucgacgacggcaacgacguguggaugggcagaaccaucagcgagaagagcagacugggcuacgagaccuucaaggugaucgagggcuggagcaaccccaagagcaagcugcagaucaacagacaggugaucguggacagaggcaacagaagcggcuacagcggcaucuucagcguggagggcaagagcugcaucaacagaugcuucuacguggagcugaucagaggcagaaaggaggagaccgaggugcuguggaccagcaacagcaucgugguguucugcggcaccagcggcaccuacggcaccggcagcuggcccgacggcgccgacaucaaccugaugcccguguga

SEQ ID NO: 182689 - RNA, 1410 nt, Artificial Sequence
  derived and/or modified CDS sequence (opt4) from neuraminidase__InfluenzaA__AFM72919
augaaccccaaccagaagaucaucaccaucggcagcgugagccugaccaucagcaccaucugcuucuucaugcagaucgccauccugaucaccaccgugacccugcacuucaagcagcacgaguucaacagcccccccaacaaccaggugaugcugugcgagcccaccaucaucgagagaaacaucaccgagaucguguaccugaccaacaccaccaucgagaaggagaucugccccaagcuggccgaguacagaaacuggagcaagccccagugcgacaucaccggcuucgcccccuucagcaaggacaacagcaucagacugagcgccggcggcgacaucugggugaccagagagcccuacgugagcugcgaccccgacaagugcuaccaguucgcccugggccagggcaccacccugaacaacgugcacagcaacaacaccgugagagacagaacccccuacagaacccugcugaugaacgagcugggcgugcccuuccaccugggcaccaagcaggugugcaucgccuggagcagcagcagcugccacgacggcaaggccuggcugcacgugugcaucaccggcgacgacaagaacgccaccgccagcuucaucuacaacggcagacugguggacagcguggugagcuggagcaaggagauccugagaacccaggagagcgagugcgugugcaucaacggcaccugcaccguggugaugaccgacggcagcgccagcggcaaggccgacaccaagauccuguucaucgaggagggcaagaucgugcacaccagcacccugagcggcagcgcccagcacguggaggagugcagcugcuaccccagauaccccggcgugagaugcgugugcagagacaacuggaagggcagcaacagacccaucguggacaucaacaccaaggaccacagcaucgugagcagcuacgugugcagcggccuggugggcgacacccccagaaagaacgacagcagcagcagcagccacugccuggaccccaacaacgaggagggcggccacggcgugaagggcugggccuucgacgacggcaacgacguguggaugggcagaaccaucagcgagaagagcagacugggcuacgagaccuucaaggugaucgagggcuggagcaaccccaagagcaagcugcagaucaacagacaggugaucguggacagaggcaacagaagcggcuacagcggcaucuucagcguggagggcaagagcugcaucaacagaugcuucuacguggagcugaucagaggcagaaaggaggagaccgaggugcuguggaccagcaacagcaucgugguguucugcggcaccagcggcaccuacggcaccggcagcuggcccgacggcgccgacaucaaccugaugcccguguga

SEQ ID NO: 182690 - RNA, 1410 nt, Artificial Sequence; identical to SEQ ID NO: 177965
  derived and/or modified CDS sequence (opt4) from neuraminidase__InfluenzaA__AFM72930

SEQ ID NO: 182691 - RNA, 1410 nt, Artificial Sequence; identical to SEQ ID NO: 177965
  derived and/or modified CDS sequence (opt4) from neuraminidase__InfluenzaA__AFM72941

SEQ ID NO: 182692 - RNA, 1410 nt, Artificial Sequence; identical to SEQ ID NO: 177965
  derived and/or modified CDS sequence (opt4) from neuraminidase__InfluenzaA__AFM72952

SEQ ID NO: 182693 - RNA, 1410 nt, Artificial Sequence; identical to SEQ ID NO: 177965
  derived and/or modified CDS sequence (opt4) from neuraminidase__InfluenzaA__AFM72963

SEQ ID NO: 182694 - RNA, 1410 nt, Artificial Sequence; identical to SEQ ID NO: 177965
  derived and/or modified CDS sequence (opt4) from neuraminidase__InfluenzaA__AFM72974

SEQ ID NO: 182695 - RNA, 1410 nt, Artificial Sequence; identical to SEQ ID NO: 179578
  derived and/or modified CDS sequence (opt4) from neuraminidase__InfluenzaA__AFM72985

SEQ ID NO: 182696 - RNA, 1410 nt, Artificial Sequence; identical to SEQ ID NO: 179578
  derived and/or modified CDS sequence (opt4) from neuraminidase__InfluenzaA__AFM72996

SEQ ID NO: 182697 - RNA, 1410 nt, Artificial Sequence; identical to SEQ ID NO: 179578
  derived and/or modified CDS sequence (opt4) from neuraminidase__InfluenzaA__AFM73007

SEQ ID NO: 182698 - RNA, 1410 nt, Artificial Sequence
  derived and/or modified CDS sequence (opt4) from neuraminidase__InfluenzaA__AFM73018
augaaccccaaccagaagaucaucaccaucggcagcgugugcaugaccaucggcauggccaaccugauccugcagaucggcaacaucaucagcaucuggaucagccacagcauccagcugggcaaccagagccagaucgagaccugcaaccagagcgugaucaccuacgagaacaacaccugggugaaccagaccuacgugaacaucagcaacaccaacuucgccgccggccagagcguggugagcgugaagcuggccggcaacagcagccugugccccgugagcggcugggccaucuacagcaaggacaacagcaucagaaucggcagcaagggcgacguguucgugaucagagagcccuucaucagcugcagcccccuggagugcagaaccuucuuccugacccagggcgcccugcugaacgacaagcacagcaacggcaccaucaaggacagaagccccuacagaacccugaugagcugccccaucggcgaggugcccagccccuacaacagcagauucgagagcguggccuggagcgccagcgccugccacgacggcaucaacuggcugaccaucggcaucagcggccccgacaacggcgccguggccgugcugaaguacaacggcaucaucaccgacaccaucaagagcuggagaaacaacauccugagaacccaggagagcgagugcgccugcgugaacggcagcugcuucaccaucaugaccgacggccccagcgacggccaggccagcuacaagaucuucagaaucgagaagggcaagaucgugaagagcguggagaugaacgcccccaacuaccacuacgaggagugcagcugcuaccccgacagcagcgagaucaccugcgugugcagagacaacuggcacggcagcaacagacccugggugagcuucaaccagaaccuggaguaccagaucggcuacaucugcagcggcaucuucggcgacaaccccagacccaacgacaagaccggcagcugcggccccgugagcagcaacggcgccaacggcgugaagggcuucagcuucaaguacggcaacggcaucuggaucggcagaaccaagagcaucagcagcagaaagggcuucgagaugaucugggaccccaacggcuggaccggcaccgacaacaacuucagcaucaagcaggacaucgugggcaucaacgaguggagcggcuacagcggcagcuucgugcagcaccccgagcugaccggccuggacugcaucagacccugcuucuggguggagcugaucagaggcagacccaaggagaacaccaucuggaccagcggcagcagcaucagcuucugcggcgugaacagcgacaccgugggcuggagcuggcccgacggcgccgagcugcccuucaccaucgacaaguga

SEQ ID NO: 182699 - RNA, 1410 nt, Artificial Sequence; identical to SEQ ID NO: 182698
  derived and/or modified CDS sequence (opt4) from neuraminidase__InfluenzaA__AFM73028

SEQ ID NO: 182700 - RNA, 1410 nt, Artificial Sequence; identical to SEQ ID NO: 182698
  derived and/or modified CDS sequence (opt4) from neuraminidase__InfluenzaA__AFM73038

SEQ ID NO: 182701 - RNA, 1410 nt, Artificial Sequence; identical to SEQ ID NO: 178533
  derived and/or modified CDS sequence (opt4) from neuraminidase__InfluenzaA__AFM73048

SEQ ID NO: 182702 - RNA, 1410 nt, Artificial Sequence
  derived and/or modified CDS sequence (opt4) from neuraminidase__InfluenzaA__AFM73058
augaaccccaaccagaagaucaucaccaucggcagcuucugcaugaccaucggccuggccaaccugauccugcagaucggcaacaucaucagcaucuggaucagccacagcauccagcugggcaaccagaaccagaucgagaccugcaaccagagcgugaucaccuacgagaacaacaccugggugaaccagaccuacgugaacaucagcaacaccaacuucgccgccggccagagcguggugagcgugaagcuggccggcaacagcagccugugccccgugagcggcugggccaucuacagcaaggacaacagcgugagaaucggcagcaagggcgacguguucgugaucagagagcccuucaucagcugcagcccccuggagugcagaaccuucuuccugacccagggcgcccugcugaacgacaagcacagcaacggcaccaucaaggacagaagccccuacagaacccugaugagcugccccaucggcgaggugcccagccccuacaacagcagauucgagagcguggccuggagcgccagcgccugccacgacggcaucaacuggcugaccaucggcaucagcggccccgacaacggcgccguggccgugcugaaguacaacggcaucaucaccgacaccaucaagagcuggagaaacaacauccugagaacccaggagagcgagugcgccugcgugaacggcagcugcuucaccgugaugaccgacggccccagcgacggccaggccagcuacaagaucuucagaaucgagaagggcaagaucgugaagagcguggagaugaacgcccccaacuaccacuacgaggagugcagcugcuaccccgacagcagcgagaucaccugcgugugcagagacaacuggcacggcagcaacagacccugggugagcuucaaccagaaccuggaguacagaaucggcuacaucugcagcggcaucuucggcgacaaccccagacccaacgacaagaccggcagcugcggccccgugagcagcaacggcgccaacggcgugaagggcuucagcuucaaguacggcaacggcguguggaucggcagaaccaagagcaucagcagcagaaacggcuucgagaugaucugggaccccaacggcuggaccggcaccgacaagaacuucagcaucaagcaggacaucgugggcaucaacgaguggagcggcuacagcggcagcuucgugcagcaccccgagcugaccggccuggacugcaucagacccugcuucuggguggagcugaucagaggcagacccaaggagaacaccaucuggaccagcggcagcagcaucagcuucugcggcgugaacagcgacaccgugggcuggagcuggcccgacggcgccgagcugcccuucaccaucgacaaguga

SEQ ID NO: 182703 - RNA, 1410 nt, Artificial Sequence; identical to SEQ ID NO: 178533
  derived and/or modified CDS sequence (opt4) from neuraminidase__InfluenzaA__AFM73068

SEQ ID NO: 182704 - RNA, 1413 nt, Artificial Sequence; identical to SEQ ID NO: 175011
  derived and/or modified CDS sequence (opt4) from neuraminidase__InfluenzaA__AFM73480

SEQ ID NO: 182705 - RNA, 1350 nt, Artificial Sequence
  derived and/or modified CDS sequence (opt4) from neuraminidase__InfluenzaA__AFM78569
augaaccccaaccagaagaucaucaccaucggcagcaucugcauggugaucggcaucgugagccugaugcugcagaucggcaacaugaucagcaucugggugauccacagcauccagaccggcaaccagcaccaggccgagagcaucagcaacaccaacccccugaccgagaaggccguggccagcgugacccuggccggcaacagcagccugugccccaucagaggcugggccgugcacagcaaggacaacaacaucagaaucggcagcaagggcgacguguucgugaucagagagcccuucaucagcugcagccaccuggagugcagaaccuucuuccugacccagggcgcccugcugaacgacaagcacagcaacggcaccgugaaggacagaagcccccacagaacccugaugagcugccccgugggcgaggcccccagccccuacaacagcagauucgagagcguggccuggagcgccagcgccugccacgacggcaccagcuggcugaccaucggcaucagcggccccgacaacgaggccguggccgugcugaaguacaacggcaucaucaccgacaccaucaagagcuggagaaacgacauccugagaacccaggagagcgagugcgccugcgugaacggcagcugcuucaccgugaugaccgacggccccagcaacggccaggccagcuacaagaucuucaagauggagaagggcaagguggugaagagcguggagcuggacgcccccaacuaccacuacgaggagugcagcugcuaccccgacgccggcgagaucaccugcgugugcagagacaacuggcacggcagcaacagacccugggugagcuucaaccagaaccuggaguaccagaucggcuacaucugcagcggcguguucggcgacaaccccagacccaacgacggcaccggcagcugcggccccaugagccccaacggcgccuacggcgugaagggcuucagcuucaaguacggcaacggcguguggaucggcagaaccaagagcaccaacagcagaagcggcuucgagaugaucugggaccccaacggcuggaccggcaccgacagcagcuucagcgugaagcaggacaucguggccaucaccgacuggagcggcuacagcggcagcuucgugcagcaccccgagcugaccggccuggacugcaucagacccugcuucuggguggagcugaucagaggcagacccaaggagagcaccaucuggaccagcggcagcagcaucagcuucugcggcgugaacagcgacaccgugagcuggagcuggcccgacggcgccgagcugcccuucaccaucgacaaguga

SEQ ID NO: 182706 - RNA, 1410 nt, Artificial Sequence
  derived and/or modified CDS sequence (opt4) from neuraminidase__InfluenzaA__AFM85180
augaaccccaaccagaagaucaucaccaucggcagcgugagccugaccaucgccaccaucugcuuccugacccagaucgccauccuggugaccaccgugacccugcacuucaagcaguacgagugcaacagcagccccaacaaccaggugaugcugugcgagcccaccaucaucgagagaaacaucaccgagaucguguaccugaccaacaccaccaucgagaaggagaucugccccaagcuggccgaguacagaaacuggagcaagccccagugcaacaucaccggcuucgcccccuucagcaaggacaacagcaucagacugagcgccggcggcgacaucugggugaccagagagcccuacgugagcugcggccccgacaagugcuaccaguucgcccugggccagggcaccacccugaacaacggccacagcaacgacaccgugcacgacagaacccccuacagaacccugcugaugaacgagcugggcgugcccuuccaccugggcaccaagcaggugugcaucgccuggagcagcagcagcugccacgacggcaaggccuggcugcacgugugcgugaccggcgacgacaagaacgccaccgccagcuucaucuacaacggcagacugguggacagcaucggcagcuggagcaagaagauccugagaacccaggagagcgagugcgugugcaucaacggcaccugcaccguggugaugaccgacggcagcgccagcggcaaggccgacaccaagauccuguucaucgaggagggcaagaucgugcacaccagccugcugagcggcagcgcccagcacguggaggagugcagcugcuaccccagauaccccggcgugagaugcgugugcagagacaacuggaagggcagcaacagacccaucguggacaucaacgugaaggacuacagcaucgugagcagcuacgugugcagcggccuggugggcgacacccccagaaagaacgacagcagcagcagcagccacugccuggaccccaacaacgaggagggcggccacggcgugaagggcugggccuucgacgacggcaacgacguguggaugggcagaaccaucagcgagaagcugagaagcggcuacgagaccuucaaggugaucgagggcuggagcaagcccaacagcaagcugcagaucaacagacaggugaucguggacagaggcaacagaagcggcuacagcggcaucuucagcguggagggcaagagcugcaucaacagaugcuucuacguggagcugaucagaggcagaaaccaggagaccgaggugcuguggaccagcaacagcaucgugguguucugcggcaccagcggcaccuacggcaccggcagcuggcccgacggcgccgacaucaaccugaugcccaucuga

SEQ ID NO: 182707 - RNA, 1410 nt, Artificial Sequence; identical to SEQ ID NO: 174163
  derived and/or modified CDS sequence (opt4) from neuraminidase__InfluenzaA__AFN11830

SEQ ID NO: 182708 - RNA, 1410 nt, Artificial Sequence
  derived and/or modified CDS sequence (opt4) from neuraminidase__InfluenzaA__AFN11831
augaaccccaaccagaagaucaucaccaucggcagcgugagccugaccaucgccaccaucugcuuccugaugcagaucgccauccuggugaccaccgugacccugcacuucaagcaguacgagugcgacagccccgccaacaaccaggugaugcccugcgagcccaucaucaucgagagaaacaucaccgagaucguguaccugaccaacaccaccaucgagaaggagaucugccccaagcugguggaguacagaaacuggagcaagccccagugcaagaucaccggcuucgcccccuucagcaaggacaacagcaucagacugagcgccggcggcgacaucugggugaccagagagcccuacgugagcugcgaccccggcaagugcuaccaguucgcccugggccagggcaccacccuggacaacaagcacagcaacgacaccauccacgacagaaccccccacagaacccugcugaugaacgagcugggcgugcccuuccaccugggcaccagacaggugugcaucgccuggagcagcagcagcugccacgacggcaaggccuggcugcacgugugcgugaccggcuacgacaagaacgccaccgccagcuucaucuacgacggcagacugguggacagcaucggcagcuggagcaagaacauccugagaacccaggagagcgagugcgugugcaucaacggcaccugcaccguggugaugaccgacggcagcgccagcggcagagccgacaccaagauccuguucaucgaggagggcaagaucgugcacaucagcccccugagcggcagcgcccagcacguggaggagugcagcugcuaccccagauaccccggcgugagaugcgugugcagagacaacuggaagggcagcaacagacccgugguggacaucaacgugaaggacuacagcaucgugagcagcuacgugugcagcggccuggugggcgacacccccagaaacaacgacagaagcagcagcagcuacugcagaaaccccaacaacgagaagggcaaccacggcgugaagggcugggccuucgacgacggcaacgacguguggaugggcagaaccaucagcgaggagagcagaagcggcuacgagaccuucaaggugaucggcggcuggagcacccccaacagcaagcugcagaucaacagacaggugaucguggacagcgacaacagaagcggcuacagcggcaucuucagcguggagggcaagagcugcaucaacagaugcuucuacguggagcugaucagaggcagagagcaggagaccagagugugguggaccagcaacagcaucgugguguucugcggcaccagcggcaccuacggcaccggcagcuggcccgacggcgccgacaucaaccugaugcccaucuga

SEQ ID NO: 182709 - RNA, 1410 nt, Artificial Sequence; identical to SEQ ID NO: 174636
  derived and/or modified CDS sequence (opt4) from neuraminidase__InfluenzaA__AFN11833

SEQ ID NO: 182710 - RNA, 1410 nt, Artificial Sequence; identical to SEQ ID NO: 176571
  derived and/or modified CDS sequence (opt4) from neuraminidase__InfluenzaA__AFN11835

SEQ ID NO: 182711 - RNA, 1410 nt, Artificial Sequence
  derived and/or modified CDS sequence (opt4) from neuraminidase__InfluenzaA__AFN11836
augaaccccaaccagaagaucaucaccaucggcagcgugagccugaccaucgccaccaugugcuuccugaugcagaucgccauccuggugaccaccgugacccugcacuucaagcaguacgagugcagcagcccccccaacaaccaggugaugcccugcgagcccaccaucaucgagagaaacaucaccgagaucguguaccugaccaacaccaccaucgagaaggagaucugccccaagcugguggaguacagaaacuggagcaagccccagugcaagaucaccggcuucgcccccuucagcaaggacaacagcaucagacugagcgccggcggcgacaucugggugaccagagagcccuacgugagcugcgaccccggcaagugcuaccaguucgcccugggccagggcaccacccugaacaacagacacagcaacgacaccgugcacgacagaacccccuacagaacccugcugaugaacgagcugggcgugcccuuccaccugggcaccaagcaggugugcaucgccuggagcagcagcagcugccacgacggcaaggccuggcugcacgugugcgugaccggccacgacaagaacgccaccgccagcuucaucuacgacggcagacugguggacagcaucggcagcuggagcaagaacauccugagaacccaggagagcgagugcgugugcaucaacggcaccugcaccguggugaugaccgacggcagcgccagcgagagagccgacaccaagauccuguucaucgaggagggcaagaucauccacaucagcccccugagcggcagcgcccagcacguggaggagugcagcugcuaccccagauaccccggcgugagaugcgugugcagagacaacuggaagggcagcaacagacccaucguggacaucaacgugaaggacuacagcaucgugagcagcuacgugugcagcggccuggugggcgacacccccagaaagaacgacagaagcagcagcagcuacugcagaaaccccaacaacgagaagggcagccacggcgugaagggcugggccuucgacgacggcaacgacguguggaugggcagaaccaucggcgaggagcugagaagcggcuacgagaccuucaaggugaucggcggcuggagcacccccaacagcaagcugcagaucaacagacaggugaucguggacagcggcaacagaagcggcuacagcggcaucuucagcguggagggcaagagcugcaucaacagaugcuucuacguggagcugaucagaggcagagagcaggagaccagagugugguggaccagcaacagcaucgugguguucugcggcaccagcggcaccuacggcaccggcagcuggcccgacggcgccgacaucaaccugaugcccaucuga

SEQ ID NO: 182712 - RNA, 1410 nt, Artificial Sequence
  derived and/or modified CDS sequence (opt4) from neuraminidase__InfluenzaA__AFN11839
augaaccccaaccagaagaucaucaccaucggcagcgugagccugaccaucgccaccaucugcuuccugaugcagaucgccauccuggugaccaccgugacccugcacuucaagcaguacgagugcagcagcccccccaacaaccaggugaugcccugccagcccaccaucaucgagagaaacaucaccgagaucguguaccugaccaacaccaccaucgagaaggagaucugccccaagcugguggaguacagaaacuggagcaagccccagugcaagaucaccggcuucgcccccuucagcaaggacaacagcaucagacugagcgccggcggcgacaucugggugaccagagagcccuacgugagcugcgaccccggcaagugcuaccaguucgcccugggccagggcaccacccugaacaacagacacagcaacgacaccgugcacgacagaacccccuacagaacccugcugaugaacgagcugggcgugcccuuccaccugggcaccaagcaggugugcaucgccuggagcagcagcagcugccacgacggcaaggccuggcugcacgugugcgugaccggccacgacgagaacgccaccgccagcuucaucuacgacggcagacugguggacagcaucggcagcuggagcaagaacauccugagaacccaggagagcgagugcgugugcaucaacggcaccugcaccguggugaugaccgacggcagcgccagcgagagagccgacaccaagauccuguucaucgaggagggcaagaucgugcacaucagcccccugagcggcagcgcccagcacguggaggagugcagcugcuaccccagauaccccggcgugagaugcgugugcagagacaacuggaagggcagcaacagacccaucguggacaucaacaugaaggacuacagcaucgugagcagcuacgugugcagcggccuggugggcgacacccccagaaagaacgacagcagcagcagcagcuacugcagaaaccccaacaacgagaagggcagccacggcgugaagggcugggccuucgacgacggcaacgacguguggaugggcagaaccaucagcgaggagcugagaagcggcuacgagaccuucaaggugaucggcggcuggagcacccccaacagcaagcugcagaucaacagacaggugaucguggacagcggcaacagaagcggcuacagcggcaucuucagcguggagggcaagagcugcaucaacagaugcuucuacguggagcugaucagaggcagaaagcaggagaccaaggugugguggaccagcaacagcaucgugguguucugcggcaccagcggcaccuacggcaccggcagcuggcccgacggcgccgacaucaaccugaugcccaucuga

SEQ ID NO: 182713 - RNA, 1410 nt, Artificial Sequence
  derived and/or modified CDS sequence (opt4) from neuraminidase__InfluenzaA__AFN11840
augaaccccaaccagaagaucaucaccaucggcagcgugagccugaccaucgccaccaucugcuuccugaugcagaucgccauccuggugaccaccgugacccugcacuucaagcaguacgagugcaacagcccccccaacaaccaggugaugcugugcgagcccaccaucaucgagagaaacaucaccgagaucguguaccugaccaacaccaccaucgagaaggagaucugccccaagcuggccgaguacagaaacuggagcaagccccagugcaagaucaccggcuucgcccccuucagcaaggacaacagcaucagacugagcgccggcggcgacaucugggugaccagagagcccuacgugagcugcgaccccggcaagugcuaccaguucgcccugggccagggcaccacccugaacaacagacacagcaacgacaccgugcacgacagaacccccuacagaacccugcugaugaacgagcugggcgugcccuuccaccugggcaccaagcaggugugcaucgccuggagcagcagcagcugccacgacggcaaggccuggcugcacgugugcgugaccggccacgacgagaacgccaccgccagcuucaucuacgacggcagacugguggacagcaucggcagcuggagcaagaacauccugagaacccaggagagcgagugcgugugcaucaacggcaccugcaccguggugaugaccgacggcagcgccagcgagagagccgacaccaagauccuguucaucgaggagggcaagaucgugcacaucagcccccugagcggcagcgcccagcacguggaggagugcagcugcuaccccagauaccccggcgugagaugcgugugcagagacaacuggaagggcagcaacagacccaucguggacaucaacgugaaggacuacagcaucgugagcagcuacgugugcagcggccuggugggcgacacccccagaaagaacgacagcagcagcagcagcuacugcagaaaccccaacaacgagaagggcagccacggcgugaagggcugggccuucgacgacggcaacgacguguggaugggcagaaccaucggcgaggagcugagaagcggcuacgagaccuucaaggugaucggcggcuggagcacccccaacagcaagcugcagaucaacagacaggugaucguggacagaggcaacagaagcggcuacagcggcaucuucagcguggagggcaagagcugcaucaacagaugcuucuacguggagcuggugagaggcagaaagcaggagaccgaggugugguggaccagcaacagcaucgugguguucugcggcaccagcggcaccuacggcaccggcagcuggcccgacggcgccgacaucaaccugaugcccaucuga

SEQ ID NO: 182714 - RNA, 1410 nt, Artificial Sequence; identical to SEQ ID NO: 175989
  derived and/or modified CDS sequence (opt4) from neuraminidase__InfluenzaA__AFN11841

SEQ ID NO: 182715 - RNA, 1410 nt, Artificial Sequence; identical to SEQ ID NO: 182077
  derived and/or modified CDS sequence (opt4) from neuraminidase__InfluenzaA__AFN11842

SEQ ID NO: 182716 - RNA, 1410 nt, Artificial Sequence
  derived and/or modified CDS sequence (opt4) from neuraminidase__InfluenzaA__AFN11844
augaaccccaaccagaagaucaucaccaucggcagcgugagccugaccaucagcaccaucugcuucuucaugcagaucgccauccugaucaccaccgugacccugcacuucaagcaguacgaguucaacagcccccccaacaaccaggugaugcugugcgagcccaccaucaucgagagaaacaucaccgagaucguguaccugaccaacaccaccaucgagaaggagaucugccccaagcuggccgaguacagaaacuggagcaagccccagugcaacaucaccggcuucgcccccuucagcaaggacaacagcaucagacugagcgccggcggcgacaucugggugaccagagagcccuacgugagcugcgaccccgacaagugcuaccaguucgcccugggccagggcaccacccugaacaacgugcacagcaacgacaccgugagagacagaacccccuacagaacccugcugaugaacgagcugggcgugcccuuccaccugggcaccaagcaggugugcaucgccuggagcagcagcagcugccacgacggcaaggccuggcugcacgugugcgugaccggcgacgacaagaacgccaccgccagcuucaucuacaacggcagacugguggacagcaucgugagcuggagcaaggagauccugagaacccaggagagcgagugcgugugcaucaacggcaccugcaccguggugaugaccgacggcagcgccagcggcaaggccgacaccaagauccuguucaucgaggagggcaagaucgugcacaccagcacccugagcggcagcgcccagcacguggaggagugcagcugcuaccccagauaccccggcgugagaugcgugugcagagacaacuggaagggcagcaacagacccaucguggacaucaacaucaaggacuacagcaucgugagcagcuacgugugcagcggccuggugggcgacacccccagaaagaacgacagcagcagcagcagccacugccuggaccccaacaacgaggagggcggccacggcgugaagggcugggccuucgacgacggcaacgacguguggaugggcagaaccaucagcgagaagcugagaagcggcuacgagaccuucaaggugaucgagggcuggagcaaccccaacagcaagcugcagaucaacagacaggugaucguggacagaggcaacagaagcggcuacagcggcaucuucagcguggagggcaagagcugcaucaacagaugcuucuacguggagcugaucagaggcagaaaggaggagaccgaggugcuguggaccagcaacagcaucgugguguucugcggcaccagcggcaccuacggcaccggcagcuggcccgacggcgccgacaucggccugaugcccauguga

SEQ ID NO: 182717 - RNA, 1410 nt, Artificial Sequence; identical to SEQ ID NO: 182636
  derived and/or modified CDS sequence (opt4) from neuraminidase__InfluenzaA__AFN11845

SEQ ID NO: 182718 - RNA, 1410 nt, Artificial Sequence; identical to SEQ ID NO: 182164
  derived and/or modified CDS sequence (opt4) from neuraminidase__InfluenzaA__AFN11847

SEQ ID NO: 182719 - RNA, 1410 nt, Artificial Sequence
  derived and/or modified CDS sequence (opt4) from neuraminidase__InfluenzaA__AFN11848
augaaccccaaccagaagaucaucaccaucggcagcgugagccugaccaucagcaccaucugcuucuucaugcagaucgccauccugaucaccaccgugacccugcacuucaagcaguacgaguucaacagcccccccaacaaccaggugaugcugugcgagcccaccaucaucgagagaaacaucaccgagaucguguaccugaccaacaccaccaucgagaaggagaucugccccaagcuggccgaguacagaaacuggagcaagccccagugcaacaucaccggcuucgcccccuucagcaaggacaacagcaucagacugagcgccggcggcgacaucugggugaccagagagcccuacgugagcugcgaccccgacaagugcuaccaguucgcccugggccagggcaccacccugaacaacgugcacagcaacgacaccgugcacgacagaacccccuacagaacccugcugaugaacgagcugggcgugcccuuccaccugggcaccaagcaggugugcaucgccuggagcagcagcagcugccacgacggcaaggccuggcugcacgugugcgugaccggcgacgacgagaacgccaccgccagcuucaucuacaacggcagacugguggacagcaucgugagcuggagcaagaagauccugagaacccaggagagcgagugcgugugcaucaacggcaccugcaccguggugaugaccgacggcagcgccagcggcaaggccgacaccaagauccuguucaucgaggagggcaagaucgugcacaccagcacccugagcggcagcgcccagcacguggaggagugcagcugcuaccccagauaccccggcgugagaugcgugugcagagacaacuggaagggcagcaacagacccaucguggacaucaacaucaaggacuacagcaucgugagcagcuacgugugcagcggccuggugggcgacacccccagaaagaacgacagcagcagcagcagccacugccugggccccaacaacgaggagggcggccacggcgugaagggcugggccuucgacgacggcaacgacguguggaugggcagaaccaucagcgagaagcugagaagcggcuacgagaccuucaaggugaucgagggcuggagcaaccccaacagcaagcugcagaucaacagacaggugaucguggacagaggcaacagaagcggcuacagcggcaucuucagcguggagggcaagagcugcaucaacagaugcuucuacguggagcugaucagaggcagaaagcaggagaccgaggugcuguggaccagcaacagcaucgugguguucugcggcaccagcggcaccuacggcaccggcagcuggcccgacggcgccgacaucaaccugaugcccaucuga

SEQ ID NO: 182720 - RNA, 1410 nt, Artificial Sequence
  derived and/or modified CDS sequence (opt4) from neuraminidase__InfluenzaA__AFN11850
augaaccccaaccagaagaucaucaccaucggcagcgugagccugaccaucagcaccaucugcuucuucaugcagaucgccauccugaucaccaccgugacccugcacuucaagcaguacgaguucaacagcccccccaacaaccaggugaugcugugcgagcccaccaucaucgagagaaacaucaccgagaucguguaccugaccaacaccaccaucgagaaggagaucugccccaagcuggccgaguacagaaacuggagcaagccccagugcgacaucaccggcuucgcccccuucagcaaggacaacagcaucagacugagcgccggcggcgacaucugggugaccagagagcccuacgugagcugcgaccccgacaagugcuaccaguucgcccugggccagggcaccacccugaacaacgugcacagcaacaacaccgugagaggcagaacccccuacagaacccugcugaugaacgagcugggcgugcccuuccaccugggcaccaagcaggugugcaucgccuggagcagcagcagcugccacgacggcaaggccuggcugcacgugugcaucaccggcgacgacaagaacgccaccgccagcuucaucuacaacggcagacugguggacagcguggugagcuggagcaaggagauccugagaacccaggagagcgagugcgugugcaucaacggcaccugcaccguggugaugaccgacggcagcgccagcggcaaggccgacaccaagauccuguucaucgaggagggcaagaucgugcacaccagcacccugagcggcagcgcccagcacguggaggagugcagcugcuaccccagauaccccggcgugagaugcgugugcagagacaacuggaagggcagcaacagacccaucguggacaucaacaucaaggaccacagcaucgugagcagcuacgugugcagcggccuggugggcgacacccccagaaagaacgacagcagcagcagcagccacugccuggaccccaacaacgaggagggcggccacggcgugaagggcugggccuucgacgacggcaacgacguguggaugggcagaaccaucagcgagaagagcagacugggcuacgagaccuucaaggugaucgagggcuggagcaaccacaagagcaagcugcagaucaacagacaggugaucguggacagaggcaacagaagcggcuacagcggcaucuucagcguggagggcaagagcugcaucaacagaugcuucuacguggagcugaucagaggcagaaaggaggagaccgaggugcuguggaccagcaacagcaucgugguguucugcggcaccagcggcaccuacggcaccggcagcuggcccgacggcgccgaccugaaccugaugcccaucuga

SEQ ID NO: 182721 - RNA, 1410 nt, Artificial Sequence
  derived and/or modified CDS sequence (opt4) from neuraminidase__InfluenzaA__AFN11851
augaaccccaaccagaagaucaucaccaucggcagcgugagccugaccaucgccaccaucugccugcugaugcagaucgccauccuggugaccaccgugacccugcacuucaagcaguacgagugcaacagcccccccaacaaccaggugaugcugugcgagcccaccaucaucgagagaaacaucaccaagaucguguaccugaccaacaccaccaucgagaaggagaucugccccaagcuggccgaguacagaaacuggagcaagccccagugcaagaucaccggcuucgcccccuucagcaaggacaacagcaucagacugagcgccggcggcgacaucugggugaccagagagcccuacgugagcugcgaccccggcaagugcuaccaguucgcccugggccagggcaccacccugaacaacagacacagcaacgacaccgugcacgacagaacccccuacagaacccugcugaugaacgagcugggcgugcccuuccaccugggcaccaagcaggugugcaucgccuggagcagcagcagcugccacgacggcaaggccuggcugcacgugugcgugaccggccacgacgagaacgccaccgccagcuucaucuacgacggcagacugguggacagcaucggcagcuggagcaagaacauccugagaacccaggagagcgagugcgugugcaucaacggcaccugcaccguggugaugaccgacggcagcgccagcgagagagccgacaccaagauccuguucaucgaggagggcaagaucgugcacaucagcccccugagcggcagcgcccagcacguggaggagugcagcugcuaccccagauaccccggcgugagaugcgugugcagagacaacuggaagggcagcaacagacccaucguggacaucaacgugaaggacuacagcaucgugagcagcuacgugugcagcggccuggugggcgacacccccagaaagaacgacagcagcagcagcagcuacugcagaaaccccaacaacgagaagggcagccacggcgugaagggcugggccuucgacgacggcaacgacguguggaugggcagaaccaucagcgaggagcugagaagcggcuacgagaccuucaaggugaucggcggcuggagcaagcccaacagcaagcugcagaucaacagacaggugaucguggacagaggcaacagaagcggcuacagcggcaucuucagcguggagggcaagagcugcaucaacagaugcuucuacguggagcugaucagaggcagaaagcaggagaccgaggugugguggaccagcaacagcaucgugguguucugcggcaccagcggcaccuacggcaccggcagcuggcccgacggcgccgacaucaaccugaugcccaucuga

SEQ ID NO: 182722 - RNA, 1410 nt, Artificial Sequence; identical to SEQ ID NO: 174387
  derived and/or modified CDS sequence (opt4) from neuraminidase__InfluenzaA__AFN11853

SEQ ID NO: 182723 - RNA, 1410 nt, Artificial Sequence
  derived and/or modified CDS sequence (opt4) from neuraminidase__InfluenzaA__AFN11855
augaaccccaaccagaagaucaucaccaucggcagcgugagccugaccaucagcaccaucugcuucuucaugcagaccgccauccugaucaccaucgugacccugcacuucaagcaguacgaguucaacagcccccccaacaaccaggugaugcugugcgagcccaccaucaucgagagaaacaucaccgagaucguguaccugaccaacaccaccaucgagaaggagaucugccccaagcuggccgaguacagaaacuggagcaagccccagugcgacaucaccggcuucgcccccuucagcaaggacaacagcaucagacugagcgccggcggcgacaucugggugaccagagagcccuacgugagcugcgaccccgacaagugcuaccaguucgcccugggccagggcaccacccugaacaacgugcacagcaacgacaccgugcacgacagaacccccuacagaacccugcugaugaacgagcugggcgugcccuuccaccugggcaccaagcaggugugcaucgccuggagcagcagcagcugccacgacggcaaggccuggcugcacgugugcaucaccggcgacgacaagaacgccaccgccagcuucaucuacaacggcagacugguggacagcaucgugagcuggagcaaggagauccugagaacccaggagagcgagugcgugugcaucaacggcaccugcaccguggugaugaccgacggcagcgccagcggcaaggccgacaccaagauccuguucaucgaggagggcaagaucgugcacaccagcauccugagcggcagcgcccagcacguggaggagugcagcugcuaccccagauaccccggcgugagaugcgugugcagagacaacuggaagggcagcaacagacccaucguggacaucaacaucaaggaccacagcaucgugagcagcuacgugugcagcggccuggugggcgacacccccagaaagaacgacagcagcagcagcagccacugccuggaccccaacaacgaggagggcggccacggcgugaagggcugggccuucgacgacggcaacgacguguggaugggcagaaccaucagcgagaagagcagacugggcuacgagaccuucaaggugaucgagggcuggagcaaccccaagagcaagcugcagaucaacagacaggugaucguggacagaggcaacagaagcggcuacagcggcaucuucagcguggagggcaagagcugcaucaacagaugcuucuacguggagcugaucagaggcagaaaggaggagaccgaggugcuguggaccagcaacagcaucgugguguucugcggcaccagcggcaccuacggcaccggcagcuggcccgacggcgccgacaucaaccugaugcccaucuga

SEQ ID NO: 182724 - RNA, 1410 nt, Artificial Sequence; identical to SEQ ID NO: 175989
  derived and/or modified CDS sequence (opt4) from neuraminidase__InfluenzaA__AFN11857

SEQ ID NO: 182725 - RNA, 1410 nt, Artificial Sequence; identical to SEQ ID NO: 176798
  derived and/or modified CDS sequence (opt4) from neuraminidase__InfluenzaA__AFN17373

SEQ ID NO: 182726 - RNA, 1410 nt, Artificial Sequence; identical to SEQ ID NO: 182431
  derived and/or modified CDS sequence (opt4) from neuraminidase__InfluenzaA__AFN17383

SEQ ID NO: 182727 - RNA, 1410 nt, Artificial Sequence; identical to SEQ ID NO: 176798
  derived and/or modified CDS sequence (opt4) from neuraminidase__InfluenzaA__AFN17393

SEQ ID NO: 182728 - RNA, 1410 nt, Artificial Sequence; identical to SEQ ID NO: 176798
  derived and/or modified CDS sequence (opt4) from neuraminidase__InfluenzaA__AFN17403

SEQ ID NO: 182729 - RNA, 1410 nt, Artificial Sequence; identical to SEQ ID NO: 176798
  derived and/or modified CDS sequence (opt4) from neuraminidase__InfluenzaA__AFN17413

SEQ ID NO: 182730 - RNA, 1410 nt, Artificial Sequence; identical to SEQ ID NO: 176798
  derived and/or modified CDS sequence (opt4) from neuraminidase__InfluenzaA__AFN17423

SEQ ID NO: 182731 - RNA, 1410 nt, Artificial Sequence; identical to SEQ ID NO: 176798
  derived and/or modified CDS sequence (opt4) from neuraminidase__InfluenzaA__AFN17433

SEQ ID NO: 182732 - RNA, 1410 nt, Artificial Sequence; identical to SEQ ID NO: 176798
  derived and/or modified CDS sequence (opt4) from neuraminidase__InfluenzaA__AFN17443

SEQ ID NO: 182733 - RNA, 1410 nt, Artificial Sequence; identical to SEQ ID NO: 176798
  derived and/or modified CDS sequence (opt4) from neuraminidase__InfluenzaA__AFN17453

SEQ ID NO: 182734 - RNA, 1410 nt, Artificial Sequence; identical to SEQ ID NO: 176798
  derived and/or modified CDS sequence (opt4) from neuraminidase__InfluenzaA__AFN17459

SEQ ID NO: 182735 - RNA, 1410 nt, Artificial Sequence; identical to SEQ ID NO: 176798
  derived and/or modified CDS sequence (opt4) from neuraminidase__InfluenzaA__AFN17469

SEQ ID NO: 182736 - RNA, 1410 nt, Artificial Sequence; identical to SEQ ID NO: 176798
  derived and/or modified CDS sequence (opt4) from neuraminidase__InfluenzaA__AFN17479

SEQ ID NO: 182737 - RNA, 1410 nt, Artificial Sequence; identical to SEQ ID NO: 176798
  derived and/or modified CDS sequence (opt4) from neuraminidase__InfluenzaA__AFN17489

SEQ ID NO: 182738 - RNA, 1410 nt, Artificial Sequence; identical to SEQ ID NO: 176798
  derived and/or modified CDS sequence (opt4) from neuraminidase__InfluenzaA__AFN17499

SEQ ID NO: 182739 - RNA, 1410 nt, Artificial Sequence; identical to SEQ ID NO: 176798
  derived and/or modified CDS sequence (opt4) from neuraminidase__InfluenzaA__AFN17509

SEQ ID NO: 182740 - RNA, 1410 nt, Artificial Sequence; identical to SEQ ID NO: 176798
  derived and/or modified CDS sequence (opt4) from neuraminidase__InfluenzaA__AFN17519

SEQ ID NO: 182741 - RNA, 1410 nt, Artificial Sequence; identical to SEQ ID NO: 176798
  derived and/or modified CDS sequence (opt4) from neuraminidase__InfluenzaA__AFN17529

SEQ ID NO: 182742 - RNA, 1410 nt, Artificial Sequence; identical to SEQ ID NO: 176798
  derived and/or modified CDS sequence (opt4) from neuraminidase__InfluenzaA__AFN17539

SEQ ID NO: 182743 - RNA, 1410 nt, Artificial Sequence; identical to SEQ ID NO: 176798
  derived and/or modified CDS sequence (opt4) from neuraminidase__InfluenzaA__AFN17549

SEQ ID NO: 182744 - RNA, 1410 nt, Artificial Sequence; identical to SEQ ID NO: 176798
  derived and/or modified CDS sequence (opt4) from neuraminidase__InfluenzaA__AFN17559

SEQ ID NO: 182745 - RNA, 1410 nt, Artificial Sequence; identical to SEQ ID NO: 176798
  derived and/or modified CDS sequence (opt4) from neuraminidase__InfluenzaA__AFN17569

SEQ ID NO: 182746 - RNA, 1410 nt, Artificial Sequence; identical to SEQ ID NO: 176798
  derived and/or modified CDS sequence (opt4) from neuraminidase__InfluenzaA__AFN17575

SEQ ID NO: 182747 - RNA, 1410 nt, Artificial Sequence; identical to SEQ ID NO: 176798
  derived and/or modified CDS sequence (opt4) from neuraminidase__InfluenzaA__AFN17581

SEQ ID NO: 182748 - RNA, 1410 nt, Artificial Sequence; identical to SEQ ID NO: 176798
  derived and/or modified CDS sequence (opt4) from neuraminidase__InfluenzaA__AFN17587

SEQ ID NO: 182749 - RNA, 1410 nt, Artificial Sequence; identical to SEQ ID NO: 176798
  derived and/or modified CDS sequence (opt4) from neuraminidase__InfluenzaA__AFN17597

SEQ ID NO: 182750 - RNA, 1410 nt, Artificial Sequence; identical to SEQ ID NO: 182431
  derived and/or modified CDS sequence (opt4) from neuraminidase__InfluenzaA__AFN17607

SEQ ID NO: 182751 - RNA, 1410 nt, Artificial Sequence; identical to SEQ ID NO: 176798
  derived and/or modified CDS sequence (opt4) from neuraminidase__InfluenzaA__AFN17617

SEQ ID NO: 182752 - RNA, 1410 nt, Artificial Sequence; identical to SEQ ID NO: 176798
  derived and/or modified CDS sequence (opt4) from neuraminidase__InfluenzaA__AFN17627

SEQ ID NO: 182753 - RNA, 1410 nt, Artificial Sequence; identical to SEQ ID NO: 176798
  derived and/or modified CDS sequence (opt4) from neuraminidase__InfluenzaA__AFN17637

SEQ ID NO: 182754 - RNA, 1410 nt, Artificial Sequence; identical to SEQ ID NO: 176798
  derived and/or modified CDS sequence (opt4) from neuraminidase__InfluenzaA__AFN17647

SEQ ID NO: 182755 - RNA, 1410 nt, Artificial Sequence; identical to SEQ ID NO: 176798
  derived and/or modified CDS sequence (opt4) from neuraminidase__InfluenzaA__AFN17657

SEQ ID NO: 182756 - RNA, 1410 nt, Artificial Sequence; identical to SEQ ID NO: 176798
  derived and/or modified CDS sequence (opt4) from neuraminidase__InfluenzaA__AFN17667

SEQ ID NO: 182757 - RNA, 1410 nt, Artificial Sequence; identical to SEQ ID NO: 176798
  derived and/or modified CDS sequence (opt4) from neuraminidase__InfluenzaA__AFN17677

SEQ ID NO: 182758 - RNA, 1410 nt, Artificial Sequence; identical to SEQ ID NO: 182431
  derived and/or modified CDS sequence (opt4) from neuraminidase__InfluenzaA__AFN17687

SEQ ID NO: 182759 - RNA, 1410 nt, Artificial Sequence; identical to SEQ ID NO: 176798
  derived and/or modified CDS sequence (opt4) from neuraminidase__InfluenzaA__AFN17697

SEQ ID NO: 182760 - RNA, 1410 nt, Artificial Sequence; identical to SEQ ID NO: 182431
  derived and/or modified CDS sequence (opt4) from neuraminidase__InfluenzaA__AFN17707

SEQ ID NO: 182761 - RNA, 1410 nt, Artificial Sequence; identical to SEQ ID NO: 176798
  derived and/or modified CDS sequence (opt4) from neuraminidase__InfluenzaA__AFN17717

SEQ ID NO: 182762 - RNA, 1410 nt, Artificial Sequence; identical to SEQ ID NO: 182431
  derived and/or modified CDS sequence (opt4) from neuraminidase__InfluenzaA__AFN17727

SEQ ID NO: 182763 - RNA, 1410 nt, Artificial Sequence; identical to SEQ ID NO: 176798
  derived and/or modified CDS sequence (opt4) from neuraminidase__InfluenzaA__AFN17737

SEQ ID NO: 182764 - RNA, 1410 nt, Artificial Sequence; identical to SEQ ID NO: 176798
  derived and/or modified CDS sequence (opt4) from neuraminidase__InfluenzaA__AFN17743

SEQ ID NO: 182765 - RNA, 1410 nt, Artificial Sequence; identical to SEQ ID NO: 182431
  derived and/or modified CDS sequence (opt4) from neuraminidase__InfluenzaA__AFN17749

SEQ ID NO: 182766 - RNA, 1410 nt, Artificial Sequence; identical to SEQ ID NO: 176798
  derived and/or modified CDS sequence (opt4) from neuraminidase__InfluenzaA__AFN17759

SEQ ID NO: 182767 - RNA, 1410 nt, Artificial Sequence; identical to SEQ ID NO: 176798
  derived and/or modified CDS sequence (opt4) from neuraminidase__InfluenzaA__AFN17769

SEQ ID NO: 182768 - RNA, 1410 nt, Artificial Sequence; identical to SEQ ID NO: 176798
  derived and/or modified CDS sequence (opt4) from neuraminidase__InfluenzaA__AFN17775

SEQ ID NO: 182769 - RNA, 1410 nt, Artificial Sequence
  derived and/or modified CDS sequence (opt4) from neuraminidase__InfluenzaA__AFN17785
augaaccccaaccagaagaucaucaccaucggcagcgugugcaugaccaucggcauggccaaccugauccugcagaucggcaacaucaucagcaucuggaucagccacagcauccagcugggcaaccagaaccagaucgagaccugcaaccagagcgugaucaccuacgagaacaacaccugggugaaccagaccuacgugaacaucagcaacaccaacuucgccgccggccagagcguggugagcgugaagcuggccggcaacagcagccugugccccgugagcggcugggccaucuacagcaaggacaacagcaucagaaucggcagcaagggcgacguguucgugaucagagagcccuucaucagcugcagcccccuggagugcagaaccuucuuccugacccagggcgcccugcugaacgacaagcacagcaacggcaccaucaaggacagaagccccuacagaacccugaugagcugccccaucggcgaggugcccagccccuacaacagcagauucgagagcguggccuggagcgccagcgccugccacgacggcaucaacuggcugaccaucggcaucagcggccccgacaacggcgccguggccgugcugaaguacaacggcaucaucaccgacaccaucaagagcuggagaaacaacauccugagaacccaggagagcgagugcgccugcgugaacggcagcugcuucacccugaugaccgacggccccagcgacggccaggccagcuacaagaucuucagaaucgagaagggcaagaucgugaagagcguggagaugaacgcccccaacuaccacuacgaggagugcagcugcuaccccgacagcagcgagaucaccugcgugugcagagacaacuggcacggcagcaacagacccugggugagcuucaaccagaaccuggaguaccagaucggcuacaucugcagcggcaucuucggcgacaaccccagacccaacgacaagaccggcagcugcggccccgugagcagcaacggcgccaacggcgugaagggcuucagcuucaaguacggcaacggcguguggaucggcagaaccaagagcaucagcagcagaaacggcuucgagaugaucugggaccccaacggcuggaccggcaccgacaacaccuucagcaucaagcaggacaucgugggcaucaacgaguggagcggcuacagcggcagcuucgugcagcaccccgagcugaccggccuggacugcaucagacccugcuucuggguggagcugaucagaggcagacccaaggagaacaccaucuggaccagcggcagcagcaucagcuucugcggcgugaacagcgacaccgugggcuggagcuggcccgacggcgccgagcugcccuucaccaucgacaaguga

SEQ ID NO: 182770 - RNA, 1410 nt, Artificial Sequence
  derived and/or modified CDS sequence (opt4) from neuraminidase__InfluenzaA__AFN17795
augaaccccaaccagaagaucaucaccaucggcagcgugugcaugaccaucggcauggccaaccugauccugcagaucggcaacaucaucagcaucuggaucagccacagcauccagcugggcaaccagaaccagaucgagaccugcaaccagagcgugaucaccuacgagaacaacaccugggugaaccagaccuacgugaacaucagcaacaccaacuucgccgccggccagagcguggugagcgugaagcuggccggcaacagcagccugugccccgugggcggcugggccaucuacagcaaggacaacagcaucagaaucggcagcaagggcgacguguucgugaucagagagcccuucaucagcugcagcccccuggagugcagaaccuucuuccugacccagggcgcccugcugaacgacaagcacagcaacggcaccaucaaggacagaagccccuacagaacccugaugagcugccccaucggcgaggugcccagccccuacaacagcagauucgagagcguggccuggagcgccagcgccugccacgacggcaucaacuggcugaccaucggcaucagcggccccgacaacggcgccguggccgugcugaaguacaacggcaucaucaccgacaccaucaagagcuggagaaacaacauccugagaacccaggagagcgagugcgccugcgugaacggcagcugcuucaccgugaugaccgacggccccagcgacggccaggccagcuacaagaucuucagaaucgagaagggcaagaucgugaagagcguggagaugaacgcccccaacuaccacuacgaggagugcagcugcuaccccgacagcagcgagaucaccugcgugugcagagacaacuggcacggcagcaacagacccugggugagcuucaaccagaaccuggaguaccagaucggcuacaucugcagcggcaucuucggcgacaaccccagacccaacgacaagaccggcagcugcggccccgugagcagcaacggcgccaacggcgugaagggcuucagcuucaaguacggcaacggcguguggaucggcagaaccaagagcaucagcagcagaaacggcuucgagaugaucugggaccccaacggcuggaccggcaccgacaacaacuucagcaucaagcaggacaucgugggcaucaacgaguggagcggcuacagcggcagcuucgugcagcaccccgagcugaccggccuggacugcaucagacccugcuucuggguggagcugaucagaggcagacccaaggagaacaccaucuggaccagcggcagcagcaucagcuucugcggcgugaacagcgacaccgugggcuggagcuggcccgacggcgccgagcugcccuucaccaucgacaaguga

SEQ ID NO: 182771 - RNA, 1410 nt, Artificial Sequence; identical to SEQ ID NO: 176798
  derived and/or modified CDS sequence (opt4) from neuraminidase__InfluenzaA__AFN17805

SEQ ID NO: 182772 - RNA, 1410 nt, Artificial Sequence
  derived and/or modified CDS sequence (opt4) from neuraminidase__InfluenzaA__AFN17815
augaaccccaaccagaagaucaucaccaucggcagcgugagcaugaccaucggcauggccaaccugauccugcagaucggcaacaucaucagcaucuggaucagccacagcauccagcugggcaaccagaaccagaucgagaccugcaaccagagcgugaucaccuacgagaacaacaccugggugaaccagaccuacgugaacaucagcaacaccaacuucgccgccggccagagcguggugagcgugaagcuggccggcaacagcagccugugccccgugagcggcugggccaucuacagcaaggacaacagcaucagaaucggcagcaagggcgacguguucgugaucagagagcccuucaucagcugcagcccccuggagugcagaaccuucuuccugacccagggcgcccugcugaacgacaagcacagcaacggcaccaucaaggacagaagccccuacagaacccugaugagcugccccaucggcgaggugcccagccccuacaacagcagauucgagagcguggccuggagcgccagcgccugccacgacggcaucaacuggcugaccaucggcaucagcggccccgacaacggcgccguggccgugcugaaguacaacggcaucaucaccgacaccaucaagagcuggagaaacaacauccugagaacccaggagagcgagugcgccugcgugaacggcagcugcuucaccgugaugaccgacggccccagcgacggccaggccagcuacaagaucuucagaaucgagaagggcaagaucgugaagagcguggagaugaacgcccccaacuaccacuacgaggagugcagcugcuaccccgacagcagcgagaucaccugcgugugcagagacaacuggcacggcagcaacagacccugggugagcuucaaccagaaccuggaguaccagaucggcuacaucugcagcggcaucuucggcgacaaccccagacccaacgacaagaccggcagcugcggccccgugagcagcaacggcgccaacggcgugaagggcuucagcuucaaguacggcaacggcguguggaucggcagaaccaagagcaucagcagcagaaacggcuucgagaugaucugggaccccaacggcuggaccggcaccgacaacaacuucagcaucaagcaggacaucgugggcaucaacgaguggagcggcuacagcggcagcuucgugcagcaccccgagcugaccggccuggacugcaucagacccugcuucuggguggagcugaucagaggcagacccaaggagaacaccaucuggaccagcggcagcagcaucagcuucugcggcgugaacagcgacaccgugggcuggagcuggcccgacggcgccgagcugcccuucaccaucgacaaguga

SEQ ID NO: 182773 - RNA, 1410 nt, Artificial Sequence; identical to SEQ ID NO: 176798
  derived and/or modified CDS sequence (opt4) from neuraminidase__InfluenzaA__AFN17825

SEQ ID NO: 182774 - RNA, 1410 nt, Artificial Sequence; identical to SEQ ID NO: 182431
  derived and/or modified CDS sequence (opt4) from neuraminidase__InfluenzaA__AFN17835

SEQ ID NO: 182775 - RNA, 1410 nt, Artificial Sequence; identical to SEQ ID NO: 176798
  derived and/or modified CDS sequence (opt4) from neuraminidase__InfluenzaA__AFN17845

SEQ ID NO: 182776 - RNA, 1410 nt, Artificial Sequence; identical to SEQ ID NO: 176798
  derived and/or modified CDS sequence (opt4) from neuraminidase__InfluenzaA__AFN17855

SEQ ID NO: 182777 - RNA, 1410 nt, Artificial Sequence; identical to SEQ ID NO: 178612
  derived and/or modified CDS sequence (opt4) from neuraminidase__InfluenzaA__AFN17865

SEQ ID NO: 182778 - RNA, 1410 nt, Artificial Sequence; identical to SEQ ID NO: 182431
  derived and/or modified CDS sequence (opt4) from neuraminidase__InfluenzaA__AFN17875

SEQ ID NO: 182779 - RNA, 1410 nt, Artificial Sequence; identical to SEQ ID NO: 182431
  derived and/or modified CDS sequence (opt4) from neuraminidase__InfluenzaA__AFN17885

SEQ ID NO: 182780 - RNA, 1410 nt, Artificial Sequence; identical to SEQ ID NO: 176798
  derived and/or modified CDS sequence (opt4) from neuraminidase__InfluenzaA__AFN17895

SEQ ID NO: 182781 - RNA, 1410 nt, Artificial Sequence; identical to SEQ ID NO: 182431
  derived and/or modified CDS sequence (opt4) from neuraminidase__InfluenzaA__AFN17905

SEQ ID NO: 182782 - RNA, 1410 nt, Artificial Sequence; identical to SEQ ID NO: 176798
  derived and/or modified CDS sequence (opt4) from neuraminidase__InfluenzaA__AFN17911

SEQ ID NO: 182783 - RNA, 1410 nt, Artificial Sequence; identical to SEQ ID NO: 182431
  derived and/or modified CDS sequence (opt4) from neuraminidase__InfluenzaA__AFN17921

SEQ ID NO: 182784 - RNA, 1410 nt, Artificial Sequence
  derived and/or modified CDS sequence (opt4) from neuraminidase__InfluenzaA__AFN17931
augaaccccaaccagaagaucaucaccaucggcagcgugugcaugaccaucggcauggccaaccugauccugcagaucggcaacaucaucagcaucuggaucagccacagcauccagcugggcaaccagaaccagaucgagaccugcaaccagagcgugaucaccuacgagaacaacaccugggugaaccagaccuacgugaacaucagcaacaccaacuucgccgccggccagagcguggugagcgugaagcuggccggcaacagcagccugugccccgugagcggcugggccaucuacagcaaggacaacagcaucagaaucggcagcagaggcgacguguucgugaucagagagcccuucaucagcugcagcccccuggagugcagaaccuucuuccugacccagggcgcccugcugaacgacaagcacagcaacggcaccaucaaggacagaagccccuacagaacccugaugagcugccccaucggcgaggugcccagccccuacaacagcagauucgagagcguggccuggagcgccagcgccugccacgacggcaucaacuggcugaccaucggcaucagcggccccgacaacggcgccguggccgugcugaaguacaacggcaucaucaccgacaccaucaagagcuggagaaacaacauccugagaacccaggagagcgagugcgccugcgugaacggcagcugcuucaccgugaugaccgacggccccagcgacggccaggccagcuacaagaucuucagaaucgagaagggcaagaucgugaagagcguggagaugaacgcccccaacuaccacuacgaggagugcagcugcuaccccgacagcagcgagaucaccugcgugugcagagacaacuggcacggcagcaacagacccugggugagcuucaaccagaaccuggaguacagaaucggcuacaucugcagcggcaucuucggcgacaaccccagacccaacgacaagaccggcagcugcggccccgugagcagcaacggcgccaacggcgugaagggcuucagcuucaaguacggcaacggcguguggaucggcagaaccaagagcaucagcagcagaaacggcuucgagaugaucugggaccccaacggcuggaccggcaccgacaacaacuucagcaucaagcaggacaucgugggcaucaacgaguggagcggcuacagcggcagcuucgugcagcaccccgagcugaccggccuggacugcaucagacccugcuucuggguggagcugaucagaggcagacccaaggagaacaccaucuggaccagcggcagcagcaucagcuucugcggcgugaacagcgacaccgugggcuggagcuggcccgacggcgccgagcugcccuucaccaucgacaaguga

SEQ ID NO: 182785 - RNA, 1410 nt, Artificial Sequence; identical to SEQ ID NO: 176798
  derived and/or modified CDS sequence (opt4) from neuraminidase__InfluenzaA__AFN17941

SEQ ID NO: 182786 - RNA, 1410 nt, Artificial Sequence; identical to SEQ ID NO: 176798
  derived and/or modified CDS sequence (opt4) from neuraminidase__InfluenzaA__AFN17951

SEQ ID NO: 182787 - RNA, 1410 nt, Artificial Sequence
  derived and/or modified CDS sequence (opt4) from neuraminidase__InfluenzaA__AFN17961
augaaccccaaccagaagaucaucaccaucggcagcgugugcaugaccaucggcauggccaaccugauccugcagaucggcaacaucaucagcaucuggaucagccacagcauccagcugggcaaccagaaccagaucgagaccugcaaccagagcgugaucaccuacgagaacaacaccugggugaaccagaccuacgugaacaucagcaacaccaacuucgccgccggccagagcguggugagcgugaagcuggccggcaacagcagccugugccccgugagcggcugggccaucuacagcaaggacaacagcaucagaaucggcagcaagggcgacguguucgugaucagagagcccuucaucagcugcagcccccuggagugcagaaccuucuuccugacccagggcgcccugcugaacgacaagcacagcaacggcaccaucaaggacagaagccccuacagaacccugaugagcugccccaucggcgaggugcccagccccuacaacagcagauucgagagcguggccuggagcgccagcgccugccacgacggcaucaacuggcugaccaucggcaucagcggccccgacaacggcgccguggccgugcugaaguacaacggcaucaucaccgacaccaucaagagcuggagaaacaacauccugagaacccaggagagcgagugcgccugcgugaacggcagcugcuucaccgugaugaccgacggccccagcgacggccaggccagcuacaagaucuucagaaucgagaagggcaagaucgugaacagcguggagaugaacgcccccaacuaccacuacgaggagugcagcugcuaccccgacagcagcgagaucaccugcgugugcagagacaacuggcacggcagcaacagacccugggugagcuucaaccagaaccuggaguaccagaucggcuacaucugcagcggcaucuucggcgacaaccccagacccaacgacaagaccggcagcugcggccccgugagcagcaacggcgccaacggcgugaagggcuucagcuucaaguacggcaacggcguguggaucggcagaaccaagagcaucagcagcagaaacggcuucgagaugaucugggaccccaacggcuggaccggcaccgacaacaacuucagcaucaagcaggacaucgugggcaucaacgaguggagcggcuacagcggcagcuucgugcagcaccccgagcugaccggccuggacugcaucagacccugcuucuggguggagcugaucagaggcagacccaaggagaacaccaucuggaccagcggcagcagcaucagcuucugcggcgugaacagcgacaccgugggcuggagcuggcccgacggcgccgagcugcccuucaccaucgacaaguga

SEQ ID NO: 182788 - RNA, 1410 nt, Artificial Sequence; identical to SEQ ID NO: 176798
  derived and/or modified CDS sequence (opt4) from neuraminidase__InfluenzaA__AFN17971

SEQ ID NO: 182789 - RNA, 1410 nt, Artificial Sequence; identical to SEQ ID NO: 176798
  derived and/or modified CDS sequence (opt4) from neuraminidase__InfluenzaA__AFN17981

SEQ ID NO: 182790 - RNA, 1410 nt, Artificial Sequence; identical to SEQ ID NO: 176798
  derived and/or modified CDS sequence (opt4) from neuraminidase__InfluenzaA__AFN17991

SEQ ID NO: 182791 - RNA, 1410 nt, Artificial Sequence
  derived and/or modified CDS sequence (opt4) from neuraminidase__InfluenzaA__AFN18001
augaaccccaaccagaagaucaucaccaucagcagcgugugcaugaccaucggcauggccaaccugauccugcagaucggcaacaucaucagcaucuggaucagccacagcauccagcugggcaaccagaaccagaucgagaccugcaaccagagcgugaucaccuacgagaacaacaccugggugaaccagaccuacgugaacaucagcaacaccaacuucgccgccggccagagcguggugagcgugaagcuggccggcaacagcagccugugccccgugagcggcugggccaucuacagcaaggacaacagcaucagaaucggcagcaagggcgacguguucgugaucagagagcccuucaucagcugcagcccccuggagugcagaaccuucuuccugacccagggcgcccugcugaacgacaagcacagcaacggcaccaucaaggacagaagccccuacagaacccugaugagcugccccaucggcgaggugcccagccccuacaacagcagauucgagagcguggccuggagcgccagcgccugccacgacggcaucaacuggcugaccaucggcaucagcggccccgacaacggcgccguggccgugcugaaguacaacggcaucaucaccgacaccaucaagagcuggagaaacaacauccugagaacccaggagagcgagugcgccugcgugaacggcagcugcuucacccugaugaccgacggccccagcgacggccaggccagcuacaagaucuucagaaucgagaagggcaagaucgugaagagcguggagaugaacgcccccaacuaccacuacgaggagugcagcugcuaccccgacagcagcgagaucaccugcgugugcagagacaacuggcacggcagcaacagacccugggugagcuucaaccagaaccuggaguaccagaucggcuacaucugcagcggcaucuucggcgacaaccccagacccaacgacaagaccggcagcugcggccccgugagcagcaacggcgccaacggcgugaagggcuucagcuucaaguacggcaacggcguguggaucggcagaaccaagagcaucagcagcagaaacggcuucgagaugaucugggaccccaacggcuggaccggcaccgacaacaacuucagcaucaagcaggacaucgugggcaucaacgaguggagcggcuacagcggcagcuucgugcagcaccccgagcugaccggccuggacugcaucagacccugcuucuggguggagcugaucagaggcagacccaaggagaacaccaucuggaccagcggcagcagcaucagcuucugcggcgugaacagcgacaccgugggcuggagcuggcccgacggcgccgagcugcccuucaccaucgacaaguga

SEQ ID NO: 182792 - RNA, 1410 nt, Artificial Sequence; identical to SEQ ID NO: 176798
  derived and/or modified CDS sequence (opt4) from neuraminidase__InfluenzaA__AFN18011

SEQ ID NO: 182793 - RNA, 1410 nt, Artificial Sequence; identical to SEQ ID NO: 176798
  derived and/or modified CDS sequence (opt4) from neuraminidase__InfluenzaA__AFN18021

SEQ ID NO: 182794 - RNA, 1410 nt, Artificial Sequence
  derived and/or modified CDS sequence (opt4) from neuraminidase__InfluenzaA__AFN18031
augaaccccaaccagaagaucaucaccaucggcagcaucugcaugaccaucggcauggccaaccugauccugcagaucggcaacaucaucagcaucuggaucagccacagcauccagcugggcaaccagaaccagaucgagaccugcaaccagagcgugaucaccuacgagaacaacaccugggugaaccagaccuacgugaacaucagcaacaccaacuucgccgccggccagagcguggugagcgugaagcuggccggcaacagcagccugugccccgugagcggcugggccaucuacagcaaggacaacagcaucagaaucggcagcaagggcgacguguucgugaucagagagcccuucaucagcugcagcccccuggagugcagaaccuucuuccugacccagggcgcccugcugaacgacaagcacagcaacggcaccaucaaggacagaagccccuacagaacccugaugagcugccccaucggcgaggugcccagccccuacaacagcagauucgagagcguggccuggagcgccagcgccugccacgacggcaucaacuggcugaccaucggcaucagcggccccgacaacggcgccguggccgugcugaaguacaacggcaucaucaccgacaccaucaagagcuggagaaacaacauccugagaacccaggagagcgagugcgccugcgugaacggcagcugcuucacccugaugaccgacggccccagcgacggccaggccagcuacaagaucuucagaaucgagaagggcaagaucgugaagagcguggagaugaacgcccccaacuaccacuacgaggagugcagcugcuaccccgacagcagcgagaucaccugcgugugcagagacaacuggcacggcagcaacagacccugggugagcuucaaccagaaccuggaguaccagaucggcuacaucugcagcggcaucuucggcgacaaccccagacccaacgacaagaccggcagcugcggccccgugagcagcaacggcgccaacggcgugaagggcuucagcuucaaguacggcaacggcguguggaucggcagaaccaagagcaucagcagcagaaacggcuucgagaugaucugggaccccaacggcuggaccggcaccgacaacaacuucagcaucaagcaggacaucgugggcaucaacgaguggagcggcuacagcggcagcuucgugcagcaccccgagcugaccggccuggacugcaucagacccugcuucuggguggagcugaucagaggcagacccaaggagaacaccaucuggaccagcggcagcagcaucagcuucugcggcgugaacagcgacaccgugggcuggagcuggcccgacggcgccgagcugcccuucaccaucgacaaguga

SEQ ID NO: 182795 - RNA, 1410 nt, Artificial Sequence; identical to SEQ ID NO: 176798
  derived and/or modified CDS sequence (opt4) from neuraminidase__InfluenzaA__AFN18041

SEQ ID NO: 182796 - RNA, 1410 nt, Artificial Sequence; identical to SEQ ID NO: 182431
  derived and/or modified CDS sequence (opt4) from neuraminidase__InfluenzaA__AFN18051

SEQ ID NO: 182797 - RNA, 1410 nt, Artificial Sequence; identical to SEQ ID NO: 182431
  derived and/or modified CDS sequence (opt4) from neuraminidase__InfluenzaA__AFN18061

SEQ ID NO: 182798 - RNA, 1410 nt, Artificial Sequence; identical to SEQ ID NO: 176798
  derived and/or modified CDS sequence (opt4) from neuraminidase__InfluenzaA__AFN18070

SEQ ID NO: 182799 - RNA, 1410 nt, Artificial Sequence; identical to SEQ ID NO: 176798
  derived and/or modified CDS sequence (opt4) from neuraminidase__InfluenzaA__AFN18080

SEQ ID NO: 182800 - RNA, 1410 nt, Artificial Sequence; identical to SEQ ID NO: 176798
  derived and/or modified CDS sequence (opt4) from neuraminidase__InfluenzaA__AFN18090

SEQ ID NO: 182801 - RNA, 1410 nt, Artificial Sequence; identical to SEQ ID NO: 176798
  derived and/or modified CDS sequence (opt4) from neuraminidase__InfluenzaA__AFN18100

SEQ ID NO: 182802 - RNA, 1410 nt, Artificial Sequence; identical to SEQ ID NO: 176798
  derived and/or modified CDS sequence (opt4) from neuraminidase__InfluenzaA__AFN18106

SEQ ID NO: 182803 - RNA, 1410 nt, Artificial Sequence
  derived and/or modified CDS sequence (opt4) from neuraminidase__InfluenzaA__AFN18108
augaaccccaaccagaagaucaucaccaucggcagcgugugcaugaccaucggcauggccaaccugauccugcagaucggcaacaucaucagcaucuggaucagccacagcauccagcugggcaaccagaaccagaucgagaccugcaaccagagcgugaucaccuacgagaacaacaccugggugaaccagaccuacgugaacaucagcaacaccaacuucgccgccggccagagcguggugagcgugaagcuggccggcaacagcagccugugccccgugagcggcugggccaucuacagcaaggacaacagcaucagaaucggcagcaagggcgacguguucgugaucagagagcccuucaucagcugcagcccccuggagugcagaaccuucuuccugacccagggcgcccugcugaacgacaagcacagcaacggcaccaucaaggacagaagccccuacagaacccugaugagcugccccaucggcgaggugcccagccccuacaacagcagauucgagagcguggccuggagcgccagcgccugccacgacggcaucaacuggcugaccaucggcaucagcggccccgacaacggcgccguggccgugcugaaguacaacggcaucaucaccgacaccaucaagagcuggagaaacaacauccugagaacccaggagagcgagugcgccugcgugaacggcagcugcuucaccgugaugaccgacggccccagcgacggccaggccagcuacaagaucuucagaaucgagaagggcaagaucgugaagagcguggagaugaacgcccccaacuaccacuacgaggagugcagcugcuaccccgacagcagcgagaucaccugcgugugcagagacaacuggcacggcagcaacagacccugggugagcuucaaccagaaccuggaguacagaaucggcuacaucugcagcggcaucuucggcgacaaccccagacccaacgacaagaccggcagcugcggccccgugcugagcaacggcgccaacggcgugaagggcuucagcuucaaguacggcaacggcguguggaucggcagaaccaagagcaucagcagcagaaacggcuucgagaugaucugggaccccaacggcuggaccggcaccgacaacaacuucagcaucaagcaggacaucgugggcaucaacgaguggagcggcuacagcggcagcuucgugcagcaccccgagcugaccggccuggacugcaucagacccugcuucuggguggagcugaucagaggcagacccaaggagaacaccaucuggaccagcggcagcagcaucagcuucugcggcgugaacagcgacaccgugggcuggagcuggcccgacggcgccgagcugcccuucaccaucgacaaguga

SEQ ID NO: 182804 - RNA, 1410 nt, Artificial Sequence
  derived and/or modified CDS sequence (opt4) from neuraminidase__InfluenzaA__AFN18118
augaaccccaaccagaagaucaucaccaucggcagcgugugcaugaccaucggcauggccaaccugauccugcagaucggcaacaugaucagcaucuggaucagccacagcauccagcugggcaaccagaaccagaucgagaccugcaaccagagcgugaucaccuacgagaacaacaccugggugaaccagaccuacgugaagaucagcaacaccaacuucgccgccggccagagcguggugagcgugaagcuggccggcaacagcagccugugccccgugagcggcugggccaucuacagcaaggacaacagcaucagaaucggcagcaagggcgacguguucgugaucagagagcccuucaucagcugcagcccccuggagugcagaaccuucuuccugacccagggcgcccugcugaacgacaagcacagcaacggcaccaucaaggacagaagccccuacagaacccugaugagcugccccaucggcgaggugcccagccccuacaacagcagauucgagagcguggccuggagcgccagcgccugccacgacggcaucaacuggcugaccaucggcaucagcggccccgacaacggcgccguggccgugcugaaguacaacggcaucaucaccgacaccaucaagagcuggagaaacaacauccugagaacccaggagagcgagugcgccugcgugaacggcagcugcuucacccugaugaccgacggccccagcgacggccaggccagcuacaagaucuucagaaucgagaagggcaagaucgugaagagcguggagaugaacgcccccaacuaccacuacgaggagugcagcugcuaccccgacagcagcgagaucaccugcgugugcagagacaacuggcacggcagcaacagacccugggugagcuucaaccagaaccuggaguaccagaucggcuacaucugcagcggcaucuucggcgacaaccccagacccaacgacaagaccggcagcugcggccccgugagcagcaacggcgccaacggcgugaagggcuucagcuucaaguacggcaacggcguguggaucggcagaaccaagagcaucagcagcagaaacggcuucgagaugaucugggaccccaacggcuggaccggcaccgacaacaacuucagcaucaagcaggacaucgugggcaucaacgaguggagcggcuacagcggcagcuucgugcagcaccccgagcugaccggccuggacugcaucagacccugcuucuggguggagcugaucagaggcagacccaaggagaacaccaucuggaccagcggcagcagcaucagcuucugcggcgugaacagcgacaccgugggcuggagcuggcccgacggcgccgagcugcccuucaccaucgacaaguga

SEQ ID NO: 182805 - RNA, 1410 nt, Artificial Sequence; identical to SEQ ID NO: 176798
  derived and/or modified CDS sequence (opt4) from neuraminidase__InfluenzaA__AFN18120

SEQ ID NO: 182806 - RNA, 1410 nt, Artificial Sequence; identical to SEQ ID NO: 176798
  derived and/or modified CDS sequence (opt4) from neuraminidase__InfluenzaA__AFN18122

SEQ ID NO: 182807 - RNA, 1410 nt, Artificial Sequence; identical to SEQ ID NO: 182431
  derived and/or modified CDS sequence (opt4) from neuraminidase__InfluenzaA__AFN18128

SEQ ID NO: 182808 - RNA, 1410 nt, Artificial Sequence; identical to SEQ ID NO: 182431
  derived and/or modified CDS sequence (opt4) from neuraminidase__InfluenzaA__AFN18134

SEQ ID NO: 182809 - RNA, 1410 nt, Artificial Sequence; identical to SEQ ID NO: 176798
  derived and/or modified CDS sequence (opt4) from neuraminidase__InfluenzaA__AFN18136

SEQ ID NO: 182810 - RNA, 1410 nt, Artificial Sequence; identical to SEQ ID NO: 176798
  derived and/or modified CDS sequence (opt4) from neuraminidase__InfluenzaA__AFN18138

SEQ ID NO: 182811 - RNA, 1410 nt, Artificial Sequence
  derived and/or modified CDS sequence (opt4) from neuraminidase__InfluenzaA__AFN18140
augaaccccaaccagaagaucaucaccaucggcagcgugugcaugaccaucggcauggccaaccugauccugcagaucggcaacaucaucagcaucuggaucagccacagcauccagcugggcaaccagaaccagaucgagaccugcaaccagagcgugaucaccuacgagaacaacaccugggugaaccagaccuacgugaacaucagcaacaccaacuucgccgccggccagagcguggugagcgugaagcuggccggcaacagcagccugugccccgugagcggcugggccaucuacagcaaggacaacagcaucagaaucggcagcaagggcgacguguucgugaucagagagcccuucaucagcugcagcccccuggagugcagaaccuucuuccugacccagggcgcccugcugaacgacaagcacagcaacggcaccaucaaggacagaagccccuacagaacccugaugagcugccccaucggcgaggugcccagccccuacaacagcagauucgagagcguggccuggagcgccagcgccugccacgacggcaucaacuggcugaccaucggcaucagcggccccgacaacggcgccguggccgugcugaaguacaacggcaucaucaccgacaccaucaagagcuggagaaacaacauccugagaacccaggagagcgagugcgccugcgugaacggcagcugcuucaccgugaugaccgacggccccagcgacggccaggccagcuacaagaucuucagaaucgagaagggcaagaucgugaagagcguggagaugaacgcccccaacuaccacuacgaggagugcagcugcuaccccgacagcagcgagaucaccugcgugugcagagacaacuggcacggcagcaacagacccugggugagcuucaaccagaaccuggaguacagaaucggcuacaucugcagcggcaucuucggcgacaaccccagacccaacgacaagaccggcagcugcggccccgugagcagcaacggcgccaacggcgugaagggcuucagcuucaaguacggcaacggcaucuggaucggcagaaccaagagcaucagcagcagaaacggcuucgagaugaucugggaccccaacggcuggaccggcaccgacaacaacuucagcaucaagcaggacaucgugggcaucaacgaguggagcggcuacagcggcagcuucgugcagcaccccgagcugaccggccuggacugcaucagacccugcuucuggguggagcugaucagaggcagacccaaggagaacaccaucuggaccagcggcagcagcaucagcuucugcggcgugaacagcgacaccgugggcuggagcuggcccgacggcgccgagcugcccuucaccaucgacaaguga

SEQ ID NO: 182812 - RNA, 1410 nt, Artificial Sequence; identical to SEQ ID NO: 176798
  derived and/or modified CDS sequence (opt4) from neuraminidase__InfluenzaA__AFN18144

SEQ ID NO: 182813 - RNA, 1410 nt, Artificial Sequence; identical to SEQ ID NO: 176798
  derived and/or modified CDS sequence (opt4) from neuraminidase__InfluenzaA__AFN18150

SEQ ID NO: 182814 - RNA, 1410 nt, Artificial Sequence; identical to SEQ ID NO: 176798
  derived and/or modified CDS sequence (opt4) from neuraminidase__InfluenzaA__AFN18156

SEQ ID NO: 182815 - RNA, 1410 nt, Artificial Sequence; identical to SEQ ID NO: 176798
  derived and/or modified CDS sequence (opt4) from neuraminidase__InfluenzaA__AFN18158

SEQ ID NO: 182816 - RNA, 1410 nt, Artificial Sequence; identical to SEQ ID NO: 178612
  derived and/or modified CDS sequence (opt4) from neuraminidase__InfluenzaA__AFN18160

SEQ ID NO: 182817 - RNA, 1410 nt, Artificial Sequence
  derived and/or modified CDS sequence (opt4) from neuraminidase__InfluenzaA__AFN18166
augaaccccaaccagaagaucaucaccaucggcagcgugugcaugaccaucggcauggccaaccugauccugcagaucggcaacaucaucagcaucuggaucagccacagcauccagcugggcaaccagaaccagaucgagaccugcaaccagagcgugaucaccuacgagaacaagaccugggugaaccagaccuacgugaacaucagcaacgccaacuucgccgccggccagagcguggugagcgugaagcuggccggcaacagcagccugugccccgugagcggcugggccaucuacagcaaggacaacagcaucagaaucggcagcaagggcgacguguucgugaucagagagcccuucaucagcugcagcccccuggagugcagaaccuucuuccugacccagggcgcccugcugaacgacaagcacagcaacggcaccaucaaggacagaagccccuacagaacccugaugagcugccccaucggcgaggugcccagccccuacaacagcaaguucgagagcguggccuggagcgccagcgccugccacgacggcaucaacuggcugaccaucggcaucagcggccccgacaacggcgccguggccgugcugaaguacaacggcaucaucaccgacaccaucaagagcuggagaaacaacauccugagaacccaggagagcgagugcgccugcgugaacggcagcugcuucaccgugaugaccgacggccccagcgacggccaggccagcuacaagaucuucagaaucgagaagggcaagaucgugaagagcguggagaugaacgcccccaacuaccacuacgaggagugcagcugcuaccccgacagcagcgagaucaccugcgugugcagagacaacuggcacggcagcaacagacccugggugagcuucaaccagaaccuggaguaccagaucggcuacaucugcagcggcaucuucggcgacaaccccagacccaacgacaagaccggcagcugcggccccgugagcagcaacggcgccaacggcgugaagggcuucagcuucaaguacggcaacggcguguggaucggcagaaccaagagcaucagcagcagaaacggcuucgagaugaucugggaccccaacggcuggaccggcaccgacaacaacuucagcaucaagcaggacaucgugggcaucaacgaguggagcggcuacagcggcagcuucgugcagcaccccgagcugaccggccuggacugcaucagacccugcuucuggguggagcugaucagaggcagacccaaggagaacaccaucuggaccagcggcagcagcaucagcuucugcggcgugaacagcgacaccgugggcuggagcuggcccgacggcgccgagcugcccuucaccaucgacaaguga

SEQ ID NO: 182818 - RNA, 1410 nt, Artificial Sequence; identical to SEQ ID NO: 176798
  derived and/or modified CDS sequence (opt4) from neuraminidase__InfluenzaA__AFN18172

SEQ ID NO: 182819 - RNA, 1410 nt, Artificial Sequence; identical to SEQ ID NO: 177816
  derived and/or modified CDS sequence (opt4) from neuraminidase__InfluenzaA__AFN18178

SEQ ID NO: 182820 - RNA, 1410 nt, Artificial Sequence
  derived and/or modified CDS sequence (opt4) from neuraminidase__InfluenzaA__AFN18184
augaaccccaaccagaagaucaucaccaucggcagcgugugcaugaccaucggcauggccaaccugauccugcagaucggcaacaucaucagcaucuggaucagccacagcauccagcugggcaaccagaaccagaucgagaccugcaaccagagcgugaucaccuacgagaacaacaccugggugaaccagaccuacgugaacaucagcaacaccaacuucgccgccggccagagcauggugagcgugaagcuggccggcaacagcagccugugccccgugagcggcugggccaucuacagcaaggacaacagcaucagaaucggcagcaagggcgacguguucgugaucagagagcccuucaucagcugcagcccccuggagugcagaaccuucuuccugacccagggcgcccugcugaacgacaagcacagcaacggcaccaucaaggacagaagccccuacagaacccugaugagcugccccaucggcgaggugcccagccccuacaacagcagauucgagagcguggccuggagcgccagcgccugccacgacggcaucaacuggcugaccaucggcaucagcggccccgacaacggcgccguggccgugcugaaguacaacggcaucaucaccgacaccaucaagagcuggagaaacaacauccugagaacccaggagagcgagugcgccugcgugaacggcagcugcuucaccgugaugaccgacggccccagcgacggccaggccagcuacaagaucuucagaaucgagaagggcaagaucgugaagagcguggagaugaacgcccccaacuaccacuacgaggagugcagcugcuaccccgacagcagcgagaucaccugcgugugcagagacaacuggcacggcagcaacagacccugggugagcuucaaccagaaccuggaguaccagaucggcuacaucugcagcggcaucuucggcgacaaccccagacccaacgacaagaccggcagcugcggccccgugagcagcaacggcgccaacggcgugaagggcuucagcuucaaguacggcaacggcguguggaucggcagaaccaagagcaucagcagcagaaacggcuucgagaugaucugggaccccaacggcuggaccggcaccgacaacaacuucagcaucaagcaggacaucgugggcaucaacgaguggagcggcuacagcggcagcuucgugcagcaccccgagcugaccggccuggacugcaucagacccugcuucuggguggagcugaucagaggcagacccaaggagaacaccaucuggaccagcggcagcagcaucagcuucugcggcgugaacagcgacaccgugggcuggagcuggcccgacggcgccgagcugcccuucaccaucgacaaguga

SEQ ID NO: 182821 - RNA, 1410 nt, Artificial Sequence; identical to SEQ ID NO: 179790
  derived and/or modified CDS sequence (opt4) from neuraminidase__InfluenzaA__AFN18190

SEQ ID NO: 182822 - RNA, 1410 nt, Artificial Sequence; identical to SEQ ID NO: 180811
  derived and/or modified CDS sequence (opt4) from neuraminidase__InfluenzaA__AFN18196

SEQ ID NO: 182823 - RNA, 1410 nt, Artificial Sequence
  derived and/or modified CDS sequence (opt4) from neuraminidase__InfluenzaA__AFN18202
augaaccccaaccagaagaucaucaccaucggcagcgugugcaugaccaucggcauggccaaccugauccugcagaucggcaacaucaucagcaucuggaucagccacagcauccagcugggcaaccagaaccagaucgagaccugcaaccagagcgugaucaccuacgagaacaacaccugggugaaccagaccuacgugaacaucagcaacaccaacuucgccgccggcagaagcguggugagcgugaagcuggccggcaacagcagccugugccccgugagcggcugggccaucuacagcaaggacaacagcaucagaaucggcagcaagggcgacguguucgugaucagagagcccuucaucagcugcagcccccuggagugcagaaccuucuuccugacccagggcgcccugcugaacgacaagcacagcaacggcaccaucaaggacagaagccccuacagaacccugaugagcugccccaucggcgaggugcccagccccuacaacagcagauucgagagcguggccuggagcgccagcgccugccacgacggcaucaacuggcugaccaucggcaucagcggccccgacaacggcgccguggccgugcugaaguacaacggcaucaucaccgacaccaucaagagcuggagaaacaacauccugagaacccaggagagcgagugcgccugcgugaacggcagcugcuucaccgugaugaccgacggccccagcgacggccaggccagcuacaagaucuucagaaucgagaagggcaagaucgugaagagcguggagaugaacgcccccaacuaccacuacgaggagugcagcugcuaccccgacagcagcgagaucaccugcgugugcagagacaacuggcacggcagcaacagacccugggugagcuucaaccagaaccuggaguaccagaucggcuacaucugcagcggcaucuucggcgacaaccccagacccaacgacaagaccggcagcugcggccccgugagcagcaacggcgccaacggcgugaagggcuucagcuucaaguacggcaacggcguguggaucggcagaaccaagagcaucagcagcagaaacggcuucgagaugaucugggaccccaacggcuggaccggcaccgacaacaacuucagcaucaagcaggacaucgugggcaucaacgaguggagcggcuacagcggcagcuucgugcagcaccccgagcugaccggccuggacugcaucagacccugcuucuggguggagcugaucagaggcagacccaaggagaacaccaucuggaccagcggcagcagcaucagcuucugcggcgugaacagcgacaccgugggcuggagcuggcccgacggcgccgagcugcccuucaccaucgacaaguga

SEQ ID NO: 182824 - RNA, 1410 nt, Artificial Sequence; identical to SEQ ID NO: 176798
  derived and/or modified CDS sequence (opt4) from neuraminidase__InfluenzaA__AFN18208

SEQ ID NO: 182825 - RNA, 1410 nt, Artificial Sequence
  derived and/or modified CDS sequence (opt4) from neuraminidase__InfluenzaA__AFN18210
augaaccccaaccagaagaucaucaccaucggcagcgugugcaugaccaucggcauggccaaccugauccugcagaucggcaacaucaucagcaucuggaucagccacagcauccagcugggcaaccagaaccagaucgagaccugcaaccagagcgugaucaccuacgagaacaacaccugggugaaccagaccuacgugaacaucagcaacaccaacuucgccgccggccagagcguggugagcgugaagcuggccggcaacagcagccugugccccgugagcggcugggccaucuacagcaaggacaacagcaucagaaucggcagcaagggcgacguguucgugaucagagagcccuucaucagcugcagcccccuggagugcagagccuucuuccugacccagggcgcccugcugaacgacaagcacagcaacggcaccaucaaggacagaagccccuacagaacccugaugagcugccccaucggcgaggugcccagccccuacaacagcagauucgagagcguggccuggagcgccagcgccugccacgacggcaucaacuggcugaccaucggcaucagcggccccgacaacggcgccguggccgugcugaaguacaacggcaucaucaccgacaccaucaagagcuggagaaacaacauccugagaacccaggagagcgagugcgccugcgugaacggcagcugcuucaccgugaugaccgacggccccagcgacggccaggccagcuacaagaucuucagaaucgagaagggcaagaucgugaagagcguggagaugaacgcccccaacuaccacuacgaggagugcagcugcuaccccgacagcagcgagaucaccugcgugugcagagacaacuggcacggcagcaacagacccugggugagcuucaaccagaaccuggaguacagaaucggcuacaucugcagcggcaucuucggcgacaaccccagacccaacgacaagaccggcagcugcggccccgugagcagcaacggcgccaacggcgugaagggcuucagcuucaaguacggcaacggcguguggaucggcagaaccaagagcaucagcagcagaaacggcuucgagaugaucugggaccccaacggcuggaccggcaccgacaacaacuucagcaucaagcaggacaucgugggcaucaacgaguggagcggcuacagcggcagcuucgugcagcaccccgagcugaccggccuggacugcaucagacccugcuucuggguggagcugaucagaggcagacugaaggagaacaccaucuggaccagcggcagcagcaucagcuucugcggcgugaacagcgacaccgugggcuggagcuggcccgacggcgccgagcugcccuucaccaucgacaaguga

SEQ ID NO: 182826 - RNA, 1410 nt, Artificial Sequence; identical to SEQ ID NO: 177381
  derived and/or modified CDS sequence (opt4) from neuraminidase__InfluenzaA__AFN18216

SEQ ID NO: 182827 - RNA, 1410 nt, Artificial Sequence; identical to SEQ ID NO: 179127
  derived and/or modified CDS sequence (opt4) from neuraminidase__InfluenzaA__AFN18226

SEQ ID NO: 182828 - RNA, 1410 nt, Artificial Sequence; identical to SEQ ID NO: 176798
  derived and/or modified CDS sequence (opt4) from neuraminidase__InfluenzaA__AFN18232

SEQ ID NO: 182829 - RNA, 1410 nt, Artificial Sequence; identical to SEQ ID NO: 176798
  derived and/or modified CDS sequence (opt4) from neuraminidase__InfluenzaA__AFN18234

SEQ ID NO: 182830 - RNA, 1410 nt, Artificial Sequence; identical to SEQ ID NO: 176798
  derived and/or modified CDS sequence (opt4) from neuraminidase__InfluenzaA__AFN18244

SEQ ID NO: 182831 - RNA, 1410 nt, Artificial Sequence; identical to SEQ ID NO: 176798
  derived and/or modified CDS sequence (opt4) from neuraminidase__InfluenzaA__AFN18246

SEQ ID NO: 182832 - RNA, 1410 nt, Artificial Sequence; identical to SEQ ID NO: 179127
  derived and/or modified CDS sequence (opt4) from neuraminidase__InfluenzaA__AFN18256

SEQ ID NO: 182833 - RNA, 1410 nt, Artificial Sequence; identical to SEQ ID NO: 176798
  derived and/or modified CDS sequence (opt4) from neuraminidase__InfluenzaA__AFN18262

SEQ ID NO: 182834 - RNA, 1410 nt, Artificial Sequence; identical to SEQ ID NO: 176798
  derived and/or modified CDS sequence (opt4) from neuraminidase__InfluenzaA__AFN18268

SEQ ID NO: 182835 - RNA, 1410 nt, Artificial Sequence; identical to SEQ ID NO: 176798
  derived and/or modified CDS sequence (opt4) from neuraminidase__InfluenzaA__AFN18270

SEQ ID NO: 182836 - RNA, 1410 nt, Artificial Sequence; identical to SEQ ID NO: 179787
  derived and/or modified CDS sequence (opt4) from neuraminidase__InfluenzaA__AFN18272

SEQ ID NO: 182837 - RNA, 1410 nt, Artificial Sequence; identical to SEQ ID NO: 176798
  derived and/or modified CDS sequence (opt4) from neuraminidase__InfluenzaA__AFN18274

SEQ ID NO: 182838 - RNA, 1410 nt, Artificial Sequence; identical to SEQ ID NO: 176798
  derived and/or modified CDS sequence (opt4) from neuraminidase__InfluenzaA__AFN18282

SEQ ID NO: 182839 - RNA, 1410 nt, Artificial Sequence; identical to SEQ ID NO: 176798
  derived and/or modified CDS sequence (opt4) from neuraminidase__InfluenzaA__AFN18304

SEQ ID NO: 182840 - RNA, 1410 nt, Artificial Sequence
  derived and/or modified CDS sequence (opt4) from neuraminidase__InfluenzaA__AFN18306
augaaccccaaccagaagaucaucaccaucggcagcgugugcaugaccaucggcaucgccaaccugauccugcagaucggcaacaucaucagcaucuggaucagccacagcauccagcugggcaaccagaaccagaucgagaccugcaaccagagcgugaucaccuacgagaacaacaccugggugaaccagaccuacgugaacaucagcaacaccaacuucgccgccggccagagcguggugagcgugaagcuggccggcaacagcagccugugccccgugagcggcugggccaucuacagcaaggacaacagcaucagaaucggcagcaagggcgacguguucgugaucagagagcccuucaucagcugcagcccccuggagugcagaaccuucuuccugacccagggcgcccugcugaacgacaagcacagcaacggcaccaucaaggacagaagccccuacagaacccugaugagcugccccaucggcgaggugcccagccccuacaacagcagauucgagagcguggccuggagcgccagcgccugccacgacggcaucaacuggcugaccaucggcaucagcggccccgacaacggcgccguggccgugcugaaguacaacggcaucaucaccgacaccaucaagagcuggagaaacaacauccugagaacccaggagagcgagugcgccugcgugaacggcagcugcuucaccgugaugaccgacggccccagcgacggccaggccagcuacaagaucuucagaaucgagaagggcaagaucgugaagagcguggagaugaacgcccccaacuaccacuacgaggagugcagcugcuaccccgacagcagcgagaucaccugcgugugcagagacaacuggcacggcagcaacagacccugggugagcuucaaccagaaccuggaguaccagaucggcuacaucugcagcggcaucuucggcgacaaccccagacccaacgacaagaccggcagcugcggccccgugagcagcaacggcgccaacggcgugaagggcuucagcuucaaguacggcaacggcguguggaucggcagaaccaagagcaucagcagcagaaacggcuucgagaugaucugggaccccaacggcuggaccggcaccgacaacaacuucagcaucaagcaggacaucgugggcaucaacgaguggagcggcuacagcggcagcuucgugcagcaccccgagcugaccggccuggacugcaucagacccugcuucuggguggagcugaucagaggcagacccaaggagaacaccaucuggaccagcggcagcagcaucagcuucugcggcgugaacagcgacaccgugggcuggagcuggcccgacggcgccgagcugcccuucaccaucgacaaguga

SEQ ID NO: 182841 - RNA, 1410 nt, Artificial Sequence
  derived and/or modified CDS sequence (opt4) from neuraminidase__InfluenzaA__AFN18308
augaaccccaaccagaagaucaucaccaucggcagcgugugcaugaccaucggcauggccaaccugauccugcagaucggcaacaucaucagcaucuggaucagccacagcauccagcugggcaaccagaaccagaucgagaccugcaaccagagcgugaucaccuacgagaacaacaccugggugaaccagaccuacgugaacaucagcaacaccaacuucgccgccggccagagcguggugagcgugaagcuggccggcaacagcagccugugccccgugagcggcugggccaucuacagcaaggacaacagcaucagaaucggcagcaagggcgacguguucgugaucagagagcccuucaucagcugcagcccccuggagugcagaaccuucuuccugacccagggcgcccugcugaacgacaagcacagcaacggcaccaucaaggacagaagccccuacagaacccugaugagcugccccaucggcgaggugcccagccccuacaacagcagauucgagagcguggccuggagcgccagcgccugccacgacggcaucaacuggcugaccaucggcaucagcggccccgacaacggcgccguggccgugcugaaguacaacggcaucaucaccgacaccaucaagagcuggagaaacaacauccugagaacccaggagagcgagugcgccugcgugaacggcagcugcuucaccgugaugaccgacggccccagcgacggccaggccagcuacaagaucuucagaaucgagaagggcaagaucgugaagagcguggagaugaacgcccccaacuaccacuacgaggagugcagcugcuaccccgacagcagcgagaucaccugcgugugcagagacaacuggcacggcagcaacagacccugggugagcuucaaccagaaccuggaguaccagaucggcuacaucugcagcggcaucuucggcgacaaccccagacccaacgacaagaccggcagcugcggccccgugagcagcaagggcgccaacggcgugaagggcuucagcuucaaguacggcaacggcguguggaucggcagaaccaagagcaucagcagcagaaacggcuucgagaugaucugggaccccaacggcuggaccggcaccgacaacaacuucagcaucaagcaggacaucgugggcaucaacgaguggagcggcuacagcggcagcuucgugcagcaccccgagcugaccggccuggacugcaucagacccugcuucuggguggagcugaucagaggcagacccaaggagaacaccaucuggaccagcggcagcagcaucagcuucugcggcgugaacagcgacaccgugggcuggagcuggcccgacggcgccgagcugcccuucaccaucgacaaguga

SEQ ID NO: 182842 - RNA, 1410 nt, Artificial Sequence
  derived and/or modified CDS sequence (opt4) from neuraminidase__InfluenzaA__AFN18314
augaaccccaaccagaagaucaucaccaucggcagcgugugcaugaccaucggcauggccaaccugauccugcagaucggcaacaucaucagcaucuggaucagccacagcauccagcugggcaaccagaaccagaucgagaccugcaaccagagcgugaucaccuacgagaacaacaccugggugaaccagaccuacgugaacaucagcaacaccaacuucgccgccggccagagcguggugagcgugaagcuggccggcaacagcagccugugccccgugagcggcugggccaucuacagcaaggacaacagcaucagaaucggcagcaagggcgacguguucgugaucagagagcccuucaucagcugcagcccccuggagugcagaaccuucuuccugacccagggcgcccugcugaacgacaagcacagcaacggcaccaucaaggacagaagccccuacagaacccugaugagcugccccaucggcgaggugcccagccccuacaacagcagauucgagagcguggccuggagcgccagcgccugccacgacggcaucaacuggcugaccaucggcaucagcggccccgacaacggcgccguggccgugcugaaguacaacggcaucaucaccgacaccaucaagagcuggagaaacaacauccugagaacccaggagagcgagugcgccugcgugaacggcagcugcuucaccgugaugaccgacggccccagcgacggccaggccagcuacaagaucuucagaaucgagaagggcaagaucgugaagagcguggagaugaacgcccccaacuaccacuacgaggagugcagcugcuaccccgacagcagcgagaucaccugcgugugcagagacaacuggcacggcagcaacagacccugggugagcuucaaccagaaccuggaguaccagaucggcuacaucugcagcggcaucuucggcgacaaccccagacccaacgacaagaccggcagcugcggccccgugagcagcaacggcgccaacggcgugaagggcuucagcuucaaguacggcaacggcguguggaucggcagaaccaagagcaucagcagcagaaacggcuucgagaugaucugggaccccaacggcuggaccggcaccgacaacaacuucagcaucaagcaggacaucgugggcaucaacgaguggagcggcuacagcggcagcuucgugcagcaccccgagcugaccggccuggacugcaucagacccugcuucuggguggagcugaucagaggcagacccaaggagaagaccaucuggaccagcggcagcagcaucagcuucugcggcgugaacagcgacaccgugggcuggagcuggcccgacggcgccgagcugcccuucaccaucgacaaguga

SEQ ID NO: 182843 - RNA, 1410 nt, Artificial Sequence; identical to SEQ ID NO: 176798
  derived and/or modified CDS sequence (opt4) from neuraminidase__InfluenzaA__AFN18320

SEQ ID NO: 182844 - RNA, 1410 nt, Artificial Sequence
  derived and/or modified CDS sequence (opt4) from neuraminidase__InfluenzaA__AFN18326
augaaccccaaccagaagaucaucaccaucggcagcgugugcaugaccaucggcauggccaaccugcugcugcagaucggcaacaucaucagcaucuggaucagccacagcauccagcugggcaaccagaaccagaucgagaccugcaaccagagcgugaucaccuacgagaacaacaccugggugaaccagaccuacgugaacaucagcaacaccaacuucgccgccggccagagcguggugagcgugaagcuggccggcaacagcagccugugccccgugagcggcugggccaucuacagcaaggacaacagcaucagaaucggcagcaagggcgacguguucgugaucagagagcccuucaucagcugcagcccccuggagugcagaaccuucuuccugacccagggcgcccugcugaacgacaagcacagcaacggcaccaucaaggacagaagccccuacagaacccugaugagcugccccaucggcgaggugcccagccccuacaacagcagauucgagagcguggccuggagcgccagcgccugccacgacggcaucaacuggcugaccaucggcaucagcggccccgacaacggcgccguggccgugcugaaguacaacggcaucaucaccgacaccaucaagagcuggagaaacaacauccugagaacccaggagagcgagugcgccugcgugaacggcagcugcuucaccgugaugaccgacggccccagcgacggccaggccagcuacaagaucuucagaaucgagaagggcaagaucgugaagagcguggagaugaacgcccccaacuaccacuacgaggagugcagcugcuaccccgacagcagcgagaucaccugcgugugcagagacaacuggcacggcagcaacagacccugggugagcuucaaccagaaccuggaguaccagaucggcuacaucugcagcggcaucuucggcgacaaccccagacccaacgacaagaccggcagcugcggccccgugagcagcaacggcgccaacggcgugaagggcuucagcuucaaguacggcaacggcguguggaucggcagaaccaagagcaucagcagcagaaacggcuucgagaugaucugggaccccaacggcuggaccggcaccgacaacaacuucagcaucaagcaggacaucgugggcaucaacgaguggagcggcuacagcggcagcuucgugcagcaccccgagcugaccggccuggacugcaucagacccugcuucuggguggagcugaucagaggcagacccaaggagaacaccaucuggaccagcggcagcagcaucagcuucugcggcgugaacagcgacaccgugggcuggagcuggcccgacggcgccgagcugcccuucaccaucgacaaguga

SEQ ID NO: 182845 - RNA, 1410 nt, Artificial Sequence; identical to SEQ ID NO: 176798
  derived and/or modified CDS sequence (opt4) from neuraminidase__InfluenzaA__AFN18336

SEQ ID NO: 182846 - RNA, 1410 nt, Artificial Sequence; identical to SEQ ID NO: 176798
  derived and/or modified CDS sequence (opt4) from neuraminidase__InfluenzaA__AFN18346

SEQ ID NO: 182847 - RNA, 1410 nt, Artificial Sequence; identical to SEQ ID NO: 182431
  derived and/or modified CDS sequence (opt4) from neuraminidase__InfluenzaA__AFN18356

SEQ ID NO: 182848 - RNA, 1410 nt, Artificial Sequence
  derived and/or modified CDS sequence (opt4) from neuraminidase__InfluenzaA__AFN18366
augaaccccaaccagaagaucaucaccaucggcagcgugugcaugaccaucggcauggccaaccugauccugcagaucggcaacaucaucagcaucuggaucagccacagcauccagcugggcaaccagaaccagaucgagaccugcaaccagagcgugaucaccuacgagaacaacaccugggugaaccagaccuacgugaacaucagcaacaccaacuucgccgccgagcagagcguggugagcgugaagcuggccggcaacagcagccugugccccgugagcggcugggccaucuacagcaaggacaacagcaucagaaucggcagcaagggcgacguguucgugaucagagagcccuucaucagcugcagcccccuggagugcagaaccuucuuccugacccagggcgcccugcugaacgacaagcacagcaacggcaccaucaaggacagaagccccuacagaacccugaugagcugccccaucggcgaggugcccagccccuacaacagcagauucgagagcguggccuggagcgccagcgccugccacgacggcaucaacuggcugaccaucggcaucagcggccccgacaacggcgccguggccgugcugaaguacaacggcaucaucaccgacaccaucaagagcuggagaaacaacauccugagaacccaggagagcgagugcgccugcgugaacggcagcugcuucaccgugaugaccgacggccccagcgacggccaggccagcuacaagaucuucagaaucgagaagggcaagaucgugaagagcguggagaugaacgcccccaacuaccacuacgaggagugcagcugcuaccccgacagcagcgaggugaccugcgugugcagagacaacuggcacggcagcaacagacccugggugagcuucaaccagaaccuggaguaccagaucggcuacaucugcagcggcaucuucggcgacaaccccagacccaacgacaagaccggcagcugcggccccgugagcagcaacggcgccaacggcgugaagggcuucagcuucaaguacggcaacggcguguggaucggcagaaccaagagcaucagcagcagaaacggcuucgagaugaucugggaccccaacggcuggaccggcaccgacaacaacuucagcaucaagcaggacaucgugggcaucaacgaguggagcggcuacagcggcagcuucgugcagcaccccgagcugaccggccuggacugcaucagacccugcuucuggguggagcugaucagaggcagacccaaggagaacaccaucuggaccagcggcagcagcaucagcuucugcggcgugaacagcgacaccgugggcuggagcuggcccgacggcgccgagcugcccuucaccaucgacaaguga

SEQ ID NO: 182849 - RNA, 1410 nt, Artificial Sequence; identical to SEQ ID NO: 182431
  derived and/or modified CDS sequence (opt4) from neuraminidase__InfluenzaA__AFN18376

SEQ ID NO: 182850 - RNA, 1410 nt, Artificial Sequence; identical to SEQ ID NO: 176798
  derived and/or modified CDS sequence (opt4) from neuraminidase__InfluenzaA__AFN18382

SEQ ID NO: 182851 - RNA, 1410 nt, Artificial Sequence; identical to SEQ ID NO: 176798
  derived and/or modified CDS sequence (opt4) from neuraminidase__InfluenzaA__AFN18392

SEQ ID NO: 182852 - RNA, 1410 nt, Artificial Sequence; identical to SEQ ID NO: 176798
  derived and/or modified CDS sequence (opt4) from neuraminidase__InfluenzaA__AFN18402

SEQ ID NO: 182853 - RNA, 1410 nt, Artificial Sequence; identical to SEQ ID NO: 176798
  derived and/or modified CDS sequence (opt4) from neuraminidase__InfluenzaA__AFN18412

SEQ ID NO: 182854 - RNA, 1410 nt, Artificial Sequence; identical to SEQ ID NO: 176798
  derived and/or modified CDS sequence (opt4) from neuraminidase__InfluenzaA__AFN18422

SEQ ID NO: 182855 - RNA, 1410 nt, Artificial Sequence; identical to SEQ ID NO: 176798
  derived and/or modified CDS sequence (opt4) from neuraminidase__InfluenzaA__AFN18432

SEQ ID NO: 182856 - RNA, 1410 nt, Artificial Sequence; identical to SEQ ID NO: 176798
  derived and/or modified CDS sequence (opt4) from neuraminidase__InfluenzaA__AFN18442

SEQ ID NO: 182857 - RNA, 1410 nt, Artificial Sequence; identical to SEQ ID NO: 176798
  derived and/or modified CDS sequence (opt4) from neuraminidase__InfluenzaA__AFN18452

SEQ ID NO: 182858 - RNA, 1410 nt, Artificial Sequence; identical to SEQ ID NO: 176798
  derived and/or modified CDS sequence (opt4) from neuraminidase__InfluenzaA__AFN18462

SEQ ID NO: 182859 - RNA, 1410 nt, Artificial Sequence
  derived and/or modified CDS sequence (opt4) from neuraminidase__InfluenzaA__AFN18472
augaaccccaaccagaagaucaucaccaucggcagcgugugcaugaccaucggcauggccaaccugauccugcagaucggcaacaucaucagcaucuggaucagccacagcauccagcugggcaaccagaaccagaucgagaccugcaaccagagcgugaucaccuacgagaacaacaccugggugaaccagaccuacgugaacaucagcaacaccaacuucgccgccggccagagcguggugagcgugaagcuggccggcaacagcagccugugccccgugagcggcugggccaucuacagcaaggacaacagcaucagaaucggcagcaagggcgacguguucgugaucagagagcccuucaucagcugcagcccccuggagugcagaaccuucuuccugacccagggcgcccugcugaacgacaagcacagcaacggcaccaucaaggacagaagccccuacagaacccugaugagcugccccaucggcgaggugcccagccccuacaacagcagauucgagagcguggccuggagcgccagcgccugccacgacggcaucaacuggcugaccaucggcaucagcggccccgacaacggcgccguggccgugcugaaguacaacggcaucaucaccgacaccaucaagagcuggagaaacaacauccugagaacccaggagagcgagugcgccugcgugaacggcagcugcuucaccgugaugaccgacggccccagcgacggccaggccagcuacaagaucuucagaaucgagaagggcaagaucgugaagagcguggagaugaacgcccccaacuaccacuacgaggagugcagcugcuaccccgacagcagcgagaucaccugcgugugcagagacaacuggcacggcagcaacagacccugggugagcuucaaccagaaccuggaguaccagaucggcuacaucugcagcggcaucuucggcgacaaccccagacccaacgacaagaccggcagcugcggccccgugagcagcaacggcgccaagggcgugaagggcuucagcuucaaguacggcaacggcguguggaucggcagaaccaagagcaucagcagcagaaacggcuucgagaugaucugggaccccaacggcuggaccggcaccgacaacaacuucagcaucaagcaggacaucgugggcaucaacgaguggagcggcuacagcggcagcuucgugcagcaccccgagcugaccggccuggacugcaucagacccugcuucuggguggagcugaucagaggcagacccaaggagaacaccaucuggaccagcggcagcagcaucagcuucugcggcgugaacagcgacaccgugggcuggagcuggcccgacggcgccgagcugcccuucaccaucgacaaguga

SEQ ID NO: 182860 - RNA, 1410 nt, Artificial Sequence; identical to SEQ ID NO: 176798
  derived and/or modified CDS sequence (opt4) from neuraminidase__InfluenzaA__AFN18482

SEQ ID NO: 182861 - RNA, 1410 nt, Artificial Sequence; identical to SEQ ID NO: 176798
  derived and/or modified CDS sequence (opt4) from neuraminidase__InfluenzaA__AFN18492

SEQ ID NO: 182862 - RNA, 1410 nt, Artificial Sequence
  derived and/or modified CDS sequence (opt4) from neuraminidase__InfluenzaA__AFN18514
augaaccccaaccagaagaucaucaccaucggcagcgugugcaugaccaucggcauggccaaccugauccugcagaucggcaacaucaucagcaucuggaucagccacagcauccagcugggcaaccagaaccagaucgagaccugcaaccagagcgugaucaccuacgagaacaacaccugggugaaccagaccuacgugaacaucagcaacaccaacuucgccgccggccagagcguggugagcgugaagcuggugggcaacagcagccugugccccgugagcggcugggccaucuacagcaaggacaacagcaucagaaucggcagcaagggcgacguguucgugaucagagagcccuucaucagcugcagcccccuggagugcagaaccuucuuccugacccagggcgcccugcugaacgacaagcacagcaacggcaccaucaaggacagaagccccuacagaacccugaugagcugccccaucggcgaggugcccagccccuacaacagcagauucgagagcguggccuggagcgccagcgccugccacgacggcaucaacuggcugaccaucggcaucagcggccccgacaacggcgccguggccgugcugaaguacaacggcaucaucaccgacaccaucaagagcuggagaaacaacauccugagaacccaggagagcgagugcgccugcgugaacggcagcugcuucaccgugaugaccgacggccccagcgacggccaggccagcuacaagaucuucagaaucgagaagggcaagaucgugaagagcguggagaugaacgcccccaacuaccacuacgaggagugcagcugcuaccccgacagcagcgagaucaccugcgugugcagagacaacuggcacggcagcaacagacccugggugagcuucaaccagaaccuggaguaccagaucggcuacaucugcagcggcaucuucggcgacaaccccagacccaacgacaagaccggcagcugcggccccgugagcagcaacggcgccaacggcgugaagggcuucagcuucaaguacggcaacggcguguggaucggcagaaccaagagcaucagcagcagaaacggcuucgagaugaucugggaccccaacggcuggaccggcaccgacaacaacuucagcaucaagcaggacaucgugggcaucaacgaguggagcggcuacagcggcagcuucgugcagcaccccgagcugaccggccuggacugcaucagacccugcuucuggguggagcugaucagaggcagacccaaggagaacaccaucuggaccagcggcagcagcaucagcuucugcggcgugaacagcgacaccgugggcuggagcuggcccgacggcgccgagcugcccuucaccaucgacaaguga

SEQ ID NO: 182863 - RNA, 1410 nt, Artificial Sequence
  derived and/or modified CDS sequence (opt4) from neuraminidase__InfluenzaA__AFN18520
augaaccccaaccagaagaucaucaccaucggcagcgugugcaugaccaucggcauggccaaccugauccugcagaucggcaacaucaucagcaucuggaucagccacagcauccagcugggcaaccagaaccagaucgagaccugcaaccagagcgugaucaccuacgagaacaacaccugggugaaccagaccuacgugaacaucagcaacaccaacuucgccgccggccagagcguggugagcgugaagcuggccggcaacagcagccugugccccgugagcggcugggccaucuacagcaaggacaacagcaucagaaucggcagcaagggcgacguguucgugaucagagagcccuucaucagcugcagcccccuggagugcagaaccuucuuccugacccagggcgcccugcugaacgacaagcacagcaacggcaccaucaaggacagaagccccuacagaacccugaugagcugccccaucggcgaggugcccagccccuacaacagcagauucgagagcguggccuggagcgccagcgccugccacgacggcaucaacuggcugaccaucggcaucagcggccccgacaacggcgccguggccgugcugaaguacaacggcgugaucaccgacaccaucaagagcuggagaaacaacauccugagaacccaggagagcgagugcgccugcgugaacggcagcugcuucacccugaugaccgacggccccagcgacggccaggccagcuacaagaucuucagaaucgagaagggcaagaucgugaagagcguggagaugaacgcccccaacuaccacuacgaggagugcagcugcuaccccgacagcagcgagaucaccugcgugugcagagacaacuggcacggcagcaacagacccugggugagcuucaaccagaaccuggaguaccagaucggcuacaucugcagcggcaucuucggcgacaaccccagacccaacgacaagaccggcagcugcggccccgugagcagcaacggcgccaacggcgugaagggcuucagcuucaaguacggcaacggcguguggaucggcagaaccaagagcaucagcagcagaaacggcuucgagaugaucugggaccccaacggcuggaccggcaccgacaacaacuucagcaucaagcaggacaucgugggcaucaacgaguggagcggcuacagcggcagcuucgugcagcaccccgagcugaccggccuggacugcaucagacccugcuucuggguggagcugaucagaggcagacccaaggagaacaccaucuggaccagcggcagcagcaucagcuucugcggcgugaacagcgacaccgugggcuggagcuggcccgacggcgccgagcugcccuucaccaucgacaaguga

SEQ ID NO: 182864 - RNA, 1410 nt, Artificial Sequence; identical to SEQ ID NO: 176798
  derived and/or modified CDS sequence (opt4) from neuraminidase__InfluenzaA__AFN18522

SEQ ID NO: 182865 - RNA, 1410 nt, Artificial Sequence; identical to SEQ ID NO: 176798
  derived and/or modified CDS sequence (opt4) from neuraminidase__InfluenzaA__AFN18524

SEQ ID NO: 182866 - RNA, 1410 nt, Artificial Sequence; identical to SEQ ID NO: 182431
  derived and/or modified CDS sequence (opt4) from neuraminidase__InfluenzaA__AFN18530

SEQ ID NO: 182867 - RNA, 1410 nt, Artificial Sequence; identical to SEQ ID NO: 176798
  derived and/or modified CDS sequence (opt4) from neuraminidase__InfluenzaA__AFN18532

SEQ ID NO: 182868 - RNA, 1410 nt, Artificial Sequence; identical to SEQ ID NO: 176798
  derived and/or modified CDS sequence (opt4) from neuraminidase__InfluenzaA__AFN18538

SEQ ID NO: 182869 - RNA, 1410 nt, Artificial Sequence; identical to SEQ ID NO: 176798
  derived and/or modified CDS sequence (opt4) from neuraminidase__InfluenzaA__AFN18544

SEQ ID NO: 182870 - RNA, 1410 nt, Artificial Sequence; identical to SEQ ID NO: 176798
  derived and/or modified CDS sequence (opt4) from neuraminidase__InfluenzaA__AFN18546

SEQ ID NO: 182871 - RNA, 1410 nt, Artificial Sequence; identical to SEQ ID NO: 176798
  derived and/or modified CDS sequence (opt4) from neuraminidase__InfluenzaA__AFN18552

SEQ ID NO: 182872 - RNA, 1410 nt, Artificial Sequence; identical to SEQ ID NO: 176798
  derived and/or modified CDS sequence (opt4) from neuraminidase__InfluenzaA__AFN18558

SEQ ID NO: 182873 - RNA, 1410 nt, Artificial Sequence; identical to SEQ ID NO: 176798
  derived and/or modified CDS sequence (opt4) from neuraminidase__InfluenzaA__AFN18560

SEQ ID NO: 182874 - RNA, 1410 nt, Artificial Sequence; identical to SEQ ID NO: 176798
  derived and/or modified CDS sequence (opt4) from neuraminidase__InfluenzaA__AFN18562

SEQ ID NO: 182875 - RNA, 1410 nt, Artificial Sequence; identical to SEQ ID NO: 176798
  derived and/or modified CDS sequence (opt4) from neuraminidase__InfluenzaA__AFN18564

SEQ ID NO: 182876 - RNA, 1410 nt, Artificial Sequence; identical to SEQ ID NO: 176798
  derived and/or modified CDS sequence (opt4) from neuraminidase__InfluenzaA__AFN18566

SEQ ID NO: 182877 - RNA, 1410 nt, Artificial Sequence; identical to SEQ ID NO: 176798
  derived and/or modified CDS sequence (opt4) from neuraminidase__InfluenzaA__AFN18572

SEQ ID NO: 182878 - RNA, 1410 nt, Artificial Sequence; identical to SEQ ID NO: 176798
  derived and/or modified CDS sequence (opt4) from neuraminidase__InfluenzaA__AFN18582

SEQ ID NO: 182879 - RNA, 1410 nt, Artificial Sequence; identical to SEQ ID NO: 176798
  derived and/or modified CDS sequence (opt4) from neuraminidase__InfluenzaA__AFN18592

SEQ ID NO: 182880 - RNA, 1410 nt, Artificial Sequence; identical to SEQ ID NO: 182431
  derived and/or modified CDS sequence (opt4) from neuraminidase__InfluenzaA__AFN18602

SEQ ID NO: 182881 - RNA, 1410 nt, Artificial Sequence
  derived and/or modified CDS sequence (opt4) from neuraminidase__InfluenzaA__AFN18612
augaaccccaaccagaagaucaucaccaucggcagcgugugcaugaccaucggcauggccaaccugauccugcagaucggcaacaucaucagcaucuggaucagccacagcauccagcugggcaaccagaaccagaucgagaccugcaaccagagcgugaucaccuacgagaacaacaccugggugaaccagaccuacgugaacaucagcaacaccaacuucgccgccggccagagcguggugagcgugaagcuggccggcaacagcagccugugccccgugagcggcugggccaucuacagcaaggacaacagcaucagaaucggcagcaagggcgacguguucgugaucagagagcccuucaucagcugcagcccccuggagugcagaaccuucuuccugacccagggcgcccugcugaacgacaagcacagcaacggcaccaucaaggacagaagccccuacagaacccugaugagcugccccaucggcgaggugcccagccccuacaacagcagauucgagagcguggccuggagcgccagcgccugccacgacggcaucaacuggcugaccaucggcaucagcggccccgacaacggcgccguggccgugcugaaguacaacggcaucaucaccgacaccaucaagagcuggagaaacaacauccugagaacccaggagagcgagugcgccugcgugaacggcagcugcuucaccgugaugaccgacggccccagcgacggccaggccagcuacaagaucuucagaaucgagaagggcaagaucaucaagagcguggagaugaacgcccccaacuaccacuacgaggagugcagcugcuaccccgacagcagcgagaucaccugcgugugcagagacaacuggcacggcagcaacagacccugggugagcuucaaccagaaccuggaguaccagaucggcuacaucugcagcggcaucuucggcgacaaccccagacccaacgacaagaccggcagcugcggccccgugagcagcaacggcgccaacggcgugaagggcuucagcuucaaguacggcaacggcguguggaucggcagaaccaagagcaucagcagcagaaacggcuucgagaugaucugggaccccaacggcuggaccggcaccgacaacaacuucagcaucaagcaggacaucgugggcaucaacgaguggagcggcuacagcggcagcuucgugcagcaccccgagcugaccggccuggacugcaucagacccugcuucuggguggagcugaucagaggcagacccaaggagaacaccaucuggaccagcggcagcagcaucagcuucugcggcgugaacagcgacaccgugggcuggagcuggcccgacggcgccgagcugcccuucaccaucgacaaguga

SEQ ID NO: 182882 - RNA, 1410 nt, Artificial Sequence; identical to SEQ ID NO: 176798
  derived and/or modified CDS sequence (opt4) from neuraminidase__InfluenzaA__AFN18618

SEQ ID NO: 182883 - RNA, 1410 nt, Artificial Sequence; identical to SEQ ID NO: 177624
  derived and/or modified CDS sequence (opt4) from neuraminidase__InfluenzaA__AFN18624

SEQ ID NO: 182884 - RNA, 1410 nt, Artificial Sequence
  derived and/or modified CDS sequence (opt4) from neuraminidase__InfluenzaA__AFN18630
augaaccccaaccagaagaucaucaccaucggcagcgugugcaugaccaucggcauggccaaccugauccugcagaucggcaacaucaucagcaucuggaucagccacagcauccagcugggcaaccagaaccagaucgagaccugcaaccagagcgugaucaccuacgagaacaacaccugggugaaccagaccuacgugaacaucagcaacaccaacuucgccgccggccagagcguggugagcgugaagcuggccggcaacagcagccugugccccgugagcggcugggccaucuacagcaaggacaacagcaucagaaucggcagcaagggcgacguguucgugaucagagagcccuucaucagcugcagcccccuggagugcagaaccuucuuccugacccagggcgcccugcugaacgacaagcacagcaacggcaccaucaaggacagaagccccuacagaacccugaugagcugccccaucggcgaggugcccagccccuacaacagcagauucgagagcguggccuggagcgccagcgccugccacgacggcaucaacuggcugaccaucggcaucagcggccccgacaacggcgccguggccgugcugaaguacaacggcaucaucaccgacaccaucaagagcuggagaaacaacauccugagaacccaggagagcgagugcgccugcgugaacggcagcugcuucaccgugaugaccgacggccccagcgacggccaggccagcuacaagaucuucagaaucgagaagggcaagaucgugaagagcguggagaugaacgcccccaacuaccacuacgaggagugcagcugcuaccccgacagcagcgagaucaccugcgugugcagagacaacuggcacggcagcaacagacccugggugagcuucaaccagaaccuggaguaccagaucggcuacaucugcagcggcaucuucggcgacaaccccagacccaacgacaagaccggcagcugcggccccgugagcagcaacggcgccaacggcgugaagggcuucagcuucaaguacggcaacggcguguggaucggcagaaccaagagcaucagcagcagaaacggcuucgagaugaucugggaccccaacggcuggaccggcaccgacaacaacuucagcaucaagcaggacaucgugggcaucaacgaguggagcggcuacagcggcagcuucgugcagcaccccgagcugaccggccugggcugcaucagacccugcuucuggguggagcugaucagaggcagacccaaggagaacaccaucuggaccagcggcagcagcaucagcuucugcggcgugaacagcgacaccgugggcuggagcuggcccgacggcgccgagcugcccuucaccaucgacaaguga

SEQ ID NO: 182885 - RNA, 1410 nt, Artificial Sequence
  derived and/or modified CDS sequence (opt4) from neuraminidase__InfluenzaA__AFN18636
augaaccccaaccagaagaucaucaccaucggcagcgugugcaugaccaucggcauggccaaccugauccugcagaucggcaacaucaucagcaucuggaucagccacagcauccagcugggcaaccagaaccagaucgagaccugcaaccagagcgugaucaccuacgagaacaacaccugggugaaccagaccuacgugaacaucagcaacaccaacuucgccgccggccagagcguggugagcgugaagcuggccggcaacagcagccugugccccgugagcggcugggccaucuacagcaaggacaacagcaucagaaucggcagcaagggcgacguguucgugaucagagagcccuucaucagcugcagcccccuggagugcagaaccuucuuccugacccagggcgcccugcugaacgacaagcacagcaacggcaccaucaaggacagaagccccuacagaacccugaugagcugccccaucggcgaggugcccagccccuacaacagcagauucgagagcguggccuggagcgccagcgccugccacgacggcaucaacuggcugaccaucggcaucagcggccccgacaacggcgccguggccgugcugaaguacaacggcaucaucaccgacaccaucaagagcuggagaaacaacauccugagaacccaggagagcgagugcgccugcgugaacggcagcugcuucaccgugaugaccgacggccccagcgacggccaggccagcuacaagaucuucagaaucgagaagggcaagaucgugaagagcguggagaugaacgcccccaacuaccacuacgaggagugcagcugcuaccccgacagcagcgagaucaccugcgugugcagagacaacuggcacggcagcaacagacccugggugagcuucaaccagaaccuggaguacagaaucggcuacaucugcagcggcaucuucggcgacaaccccagacccaacgacaagaccggcagcugcggccccgugagcagcaacggcgccaacggcgugaagggcuucagcuucaaguacggcaacggcguguggaucggcagaaccaagagcaucagcagcagaaacggcuucgagaugaucugggaccccaacggcuggaccggcaccgacaacaacuucagcaucaagcaggacaucgugggcaucaacgaguggagcggcuacagcggcagcuucgugcagcaccccgagcugaccggccuggacugcaucagacccugcuucuggguggagcugaucagaggcagaagcaaggagaacaccaucuggaccagcggcagcagcaucagcuucugcggcgugaacagcgacaccgugggcuggagcuggcccgacggcgccgagcugcccuucaccaucgacaaguga

SEQ ID NO: 182886 - RNA, 1410 nt, Artificial Sequence; identical to SEQ ID NO: 176798
  derived and/or modified CDS sequence (opt4) from neuraminidase__InfluenzaA__AFN18646

SEQ ID NO: 182887 - RNA, 1410 nt, Artificial Sequence; identical to SEQ ID NO: 176798
  derived and/or modified CDS sequence (opt4) from neuraminidase__InfluenzaA__AFN18656

SEQ ID NO: 182888 - RNA, 1410 nt, Artificial Sequence
  derived and/or modified CDS sequence (opt4) from neuraminidase__InfluenzaA__AFN18666
augaaccccaaccagaagaucaucaccaucggcagcgugugcaugaccaucggcauggccaaccugauccugcagaucggcaacaucaucagcaucuggaucagccacagcauccagcugggcaaccagaaccagaucgagaccugcaaccagagcgugaucaccuacgagaacaacaccugggugaaccagaccuacgugaacaucagcaacaccaacuucgccgccggccagagcguggugagcgugaagcuggccggcaacagcagccugugccccgugagcggcugggccaucuacagcaaggacaacagcaucagaaucggcagcaagggcgacguguucgugaucagagagcccuucaucagcugcagcccccuggagugcagaaccuucuuccugacccagggcgcccugcugaacgacaagcacagcaacggcaccaucaaggacagaagccccuacagaacccugaugagcugccccaucggcgaggugcccagccccuacaacagcagauucgagagcguggccuggagcgccagcgccugccacgacggcaucaacuggcugaccaucggcaucagcggccccgacaacggcgccguggccgugcugaaguacaacggcaucaucaccgacaccaucaagagcuggagaaacaacauccugagaacccaggagagcgagugcgccugcgugaacggcagcugcuucaccgugaugaccgacggccccagcgacggccaggccagcuacaagaucuucagaaucgagaagggcaagaucgugaagagcguggagaugaacgcccccaacuaccacuacgaggagugcagcugcuaccccgacagcagcgagaucaccugcgugugcagagacaacuggcacggcagcaacagacccugggugagcuucaaccagaaccuggaguaccagaucggcuacaucugcagcggcaucuucggcgacaaccccagacccaacgacaagaccggcagcugcggccccgugagcagcaacggcgccaacggcgugaagggcuucagcuucaaguacggcaacggcguguggaucggcagaaccaagagcaucagcagcagaaacggcuucgagaugaucugggaccccaacggcuggaccggcaccgacaacaacuucagcaucaagcaggacaucgugggcaucaacgaguggagcggcuacagcggcagcuucgugcagcaccccgagcugaccggccuggacugcaucagacccugcuucuggguggagcugaucagaggcagacccaaggagaacaccaucuggaccagcggcagcagcaucagcuucugcggcgugaacagcgacaccgugggcuggagcuggcccgacggcgccgagcugcccuucaucaucgacaaguga

SEQ ID NO: 182889 - RNA, 1410 nt, Artificial Sequence
  derived and/or modified CDS sequence (opt4) from neuraminidase__InfluenzaA__AFN18676
augaaccccaaccagaagaucaucaccaucggcagcgugugcaugaccaucggcauggccaaccugauccugcagaucggcaacaucaucagcaucuggaucagccacagcauccagcugggcaaccagaaccagaucgagaccugcaaccagagcgugaucaccuacgagaacaacaccugggugaaccagaccuacgugaacaucagcaacaccaacuucgccgccggccagagcguggugagcgugaagcuggccggcaacagcagccugugccccgugagcggcugggccaucuacagcaaggacaacagcaucagaaucggcagcaagggcgacguguucgugaucagagagcccuucaucagcugcagcccccuggagugcagaaccuucuuccugacccagggcgcccugcugaacgacaagcacagcaacggcaccaucaaggacagaagccccuacagaacccugaugagcugccccaucggcgaggugcccagccccuacaacagcagauucgagagcguggccuggagcgccagcgccugccacgacggcaucaacuggcugaccaucggcaucagcggccccgacaacggcgccguggccgugcugaaguacaacggcaucaucaccgacaccaucaagagcuggagaaacaacauccugagaacccaggagagcgagugcgccugcgugaacggcagcugcuucaccgugaugaccgacggccccagcgacggccaggccagcuacaagaucuucagaaucgagaagggcaagaucgugaagagcguggagaugaacgcccccaacuaccacuacgaggagugcagcugcuaccccgacagcagcgagaucaccugcgugugcagagacaacuggcacggcagcaacagacccugggugagcuucaaccagaaccuggaguacagaaucggcuacaucugcagcggcaucuucggcgacaaccccagacccaacgacaagaccggcagcugcggccccgugagcagcaacggcgccaacggcgugaagggcuucagcuucaaguacggcaacggcguguggaucggcagaaccaagagcaucagcagcagaaacggcuucgagaugaucugggaccccaacggcuggaccgagaccgacaacaacuucagcaucaagcaggacaucgugggcaucaacgaguggagcggcuacagcggcagcuucgugcagcaccccgagcugaccggccuggacugcaucagacccugcuucuggguggagcugaucagaggcagacccaaggagaacaccaucuggaccagcggcagcagcaucagcuucugcggcgugaacagcgacaccgugggcuggagcuggcccgacggcgccgagcugcccuucaccaucgacaaguga

SEQ ID NO: 182890 - RNA, 1410 nt, Artificial Sequence
  derived and/or modified CDS sequence (opt4) from neuraminidase__InfluenzaA__AFN18686
augaaccccaaccagaagaucaucaccaucggcagcgugugcaugaccaucggcauggccaaccugauccugcagaucggcaacaucaucagcaucuggaucagccacagcauccagcugggcaaccagaaccagaucgagaccugcaaccagagcgugaucaccuacgagaacaacaccugggugaaccagaccuacgugaacaucagcagcaccaacuucgccgccggccagagcguggugagcgugaagcuggccggcaacagcagccugugccccgugagcggcugggccaucuacagcaaggacaacagcaucagaaucggcagcaagggcgacguguucgugaucagagagcccuucaucagcugcagcccccuggagugcagaaccuucuuccugacccagggcgcccugcugaacgacaagcacagcaacggcaccaucaaggacagaagccccuacagaacccugaugagcugccccaucggcgaggugcccagccccuacaacagcagauucgagagcguggccuggagcgccagcgccugccacgacggcaucaacuggcugaccaucggcaucagcggccccgacaacggcgccguggccgugcugaaguacaacggcaucaucaccgacaccaucaagagcuggagaaacaacauccugagaacccaggagagcgagugcgccugcgugaacggcagcugcuucacccugaugaccgacggccccagcgacggccaggccagcuacaagaucuucagaaucgagaagggcaagaucgugaagagcguggagaugaacgcccccaacuaccacuacgaggagugcagcugcuaccccgacagcagcgagaucaccugcgugugcagagacaacuggcacggcagcaacagacccugggugagcuucaaccagaaccuggaguaccagaucggcuacaucugcagcggcaucuucggcgacaaccccagacccaacgacaagaccggcagcugcggccccgugagcagcaacggcgccaacggcgugaagggcuucagcuucaaguacggcaacggcguguggaucggcagaaccaagagcaucagcagcagaaacggcuucgagaugaucugggaccccaacggcuggaccggcaccgacaacaacuucagcaucaagcaggacaucgugggcaucaacgaguggagcggcuacagcggcagcuucgugcagcaccccgagcugaccggccuggacugcaucagacccugcuucuggguggagcugaucagaggcagacccaaggagaacaccaucuggaccagcggcagcagcaucagcuucugcggcgugaacagcgacaccgugggcuggagcuggcccgacggcgccgagcugcccuucaccaucgacaaguga

SEQ ID NO: 182891 - RNA, 1410 nt, Artificial Sequence; identical to SEQ ID NO: 176798
  derived and/or modified CDS sequence (opt4) from neuraminidase__InfluenzaA__AFN18696

SEQ ID NO: 182892 - RNA, 1410 nt, Artificial Sequence; identical to SEQ ID NO: 179385
  derived and/or modified CDS sequence (opt4) from neuraminidase__InfluenzaA__AFN18706

SEQ ID NO: 182893 - RNA, 1410 nt, Artificial Sequence; identical to SEQ ID NO: 176798
  derived and/or modified CDS sequence (opt4) from neuraminidase__InfluenzaA__AFN18716

SEQ ID NO: 182894 - RNA, 1410 nt, Artificial Sequence; identical to SEQ ID NO: 176798
  derived and/or modified CDS sequence (opt4) from neuraminidase__InfluenzaA__AFN18727

SEQ ID NO: 182895 - RNA, 1410 nt, Artificial Sequence
  derived and/or modified CDS sequence (opt4) from neuraminidase__InfluenzaA__AFN18737
augaaccccaaccagaagaucaucaccaucggcagcgugugcaugaccaucggcauggccaaccugauccugcagaucggcaacaucaucagcaucuggaucagccacagcauccagcugggcaaccagaaccagaucgagaccugcaaccagagcgugaucaccuacgagaacaacaccugggugaaccagaccuacgugaacaucagcaacaccaacuucgccgccggccagagcguggugagcgugaagcuggccggcaacagcagccugugccccgugagcggcugggccaucuacagcaaggacaacagcaucagaaucggcagcaagggcgacguguucgugaucagagagcccuucaucagcugcagcccccuggagugcagaaccuucuuccugacccagggcgcccugcugaacgacaagcacagcaacggcaccaucaaggacagaagccccuacagaacccugaugagcugccccaucggcgaggugcccagccccuacaacagcagauucgagagcguggccuggagcgccagcgccugccacgacggcaucaacuggcugaccaucggcaucagcggccccgacaacggcgccguggccgugcugaaguacaacggcaucaucaccgacaccaucaagagcuggagaaacaacauccugagaacccaggagagcgagugcgccugcgugaacggcagcugcuucaccgugaugaccgacggccccagcgacggccaggccagcuacaagaucuucagaaucgagaagggcaagaucgugaagagcguggagaugaacgcccccaacuaccacuacgaggagugcagcugcuaccccgacagcagcgagaucaccugcgugugcagagacaacuggcacggcagcaacagacccugggugagcuucaaccagaaccuggaguaccagaucggcuacaucugcagcggcaucuucggcgacaaccccagacccaacgacaagaccggcagcugcggccccgugagcagcaacggcgccaacggcgugaagggcuucagcuucaaguacggcaacggcguguggaucggcagaaccaagagcaucagcagcagaaacggcuucgagauggugugggaccccaacggcuggaccggcaccgacaacaacuucagcaucaagcaggacaucgugggcaucaacgaguggagcggcuacagcggcagcuucgugcagcaccccgagcugaccggccuggacugcaucagacccugcuucuggguggagcugaucagaggcagacccaaggagaacaccaucuggaccagcggcagcagcaucagcuucugcggcgugaacagcgacaccgugggcuggagcuggcccgacggcgccgagcugcccuucaccaucgacaaguga

SEQ ID NO: 182896 - RNA, 1410 nt, Artificial Sequence; identical to SEQ ID NO: 176798
  derived and/or modified CDS sequence (opt4) from neuraminidase__InfluenzaA__AFN18743

SEQ ID NO: 182897 - RNA, 1410 nt, Artificial Sequence; identical to SEQ ID NO: 176798
  derived and/or modified CDS sequence (opt4) from neuraminidase__InfluenzaA__AFN18749

SEQ ID NO: 182898 - RNA, 1410 nt, Artificial Sequence; identical to SEQ ID NO: 176798
  derived and/or modified CDS sequence (opt4) from neuraminidase__InfluenzaA__AFN18759

SEQ ID NO: 182899 - RNA, 1410 nt, Artificial Sequence
  derived and/or modified CDS sequence (opt4) from neuraminidase__InfluenzaA__AFN18769
augaaccccaaccagaagaucaucaccaucggcagcgugugcaugaccaucggcauggccaaccugauccugcagaucggcaacaucaucagcaucuggaucagccacagcauccagcugggcaaccagaaccagaucgagaccugcaaccagagcgugaucaccuacgagaacaacaccugggugaaccagaccuacgugaacaucagcaacaccaacuucgccgccggccagagcguggugagcgugaagcuggccggcaacagcagccugugccccgugagcggcugggccaucuacagcaaggacaacagcaucagaaucggcagcaagggcgacguguucgugaucagagagcccuucaucagcugcagcccccuggagugcagaaccuucuuccugacccagggcgcccugcugaacgacaagcacagcaacggcaccaucaaggacagaagccccuacagaacccugaugagcugccccaucggcgaggugcccagccccuacaacagcagauucgagagcguggccuggagcgccagcgccugccacgacggcaucaacuggcugaccaucggcaucagcggccccgacaacggcgccguggccgugcugaaguacaacggcaucaucaccgacaccaucaagagcuggagaaacaacauccugagaacccaggagagcgagugcgccugcgugaacggcagcugcuucacccugaugaccgacggccccagcgacggccaggccagcuacaagaucuucagaaucgagaagggcaagaucgugaagagcguggagaugaacgcccccaacuaccacuacgaggagugcagcugcuaccccgacagcaacgagaucaccugcgugugcagagacaacuggcacggcagcaacagacccugggugagcuucaaccagaaccuggaguaccagaucggcuacaucugcagcggcaucuucggcgacaaccccagacccaacgacaagaccggcagcugcggccccgugagcagcaacggcgccaacggcgugaagggcuucagcuucaaguacggcaacggcguguggaucggcagaaccaagagcaucagcagcagaaacggcuucgagaugaucugggaccccaacggcuggaccggcaccgacaacaacuucagcaucaagcaggacaucgugggcaucaacgaguggagcggcuacagcggcagcuucgugcagcaccccgagcugaccggccuggacugcaucagacccugcuucuggguggagcugaucagaggcagacccaaggagaacaccaucuggaccagcggcagcagcaucagcuucugcggcgugaacagcgacaccgugggcuggagcuggcccgacggcgccgagcugcccuucaccaucgacaaguga

SEQ ID NO: 182900 - RNA, 1410 nt, Artificial Sequence; identical to SEQ ID NO: 178700
  derived and/or modified CDS sequence (opt4) from neuraminidase__InfluenzaA__AFN18775

SEQ ID NO: 182901 - RNA, 1410 nt, Artificial Sequence; identical to SEQ ID NO: 176798
  derived and/or modified CDS sequence (opt4) from neuraminidase__InfluenzaA__AFN18777

SEQ ID NO: 182902 - RNA, 1410 nt, Artificial Sequence; identical to SEQ ID NO: 176798
  derived and/or modified CDS sequence (opt4) from neuraminidase__InfluenzaA__AFN18779

SEQ ID NO: 182903 - RNA, 1410 nt, Artificial Sequence
  derived and/or modified CDS sequence (opt4) from neuraminidase__InfluenzaA__AFN18785
augaaccccaaccagaagaucaucaccaucggcagcgugugcaugaccaucggcauggccaaccugauccugcagaucggcaacaucaucagcaucuggaucagccacagcauccagcugggcaaccagaaccagaucgagaccugcaaccagagcgugaucaccuacgagaacaacaccugggugaaccagaccuacgugaacaucagcaacaccaacuucgccgccggccagagcguggugagcgugaagcuggccggcaacagcagccugugccccgugagcggcugggccaucuacagcaaggacaacagcaucagaaucggcagcaagggcgacguguucgugaucagagagcccuucaucagcugcagcccccuggagugcagaaccuucuuccugacccagggcgcccugcugaacgacaagcacagcaacggcaccaucaaggacagaagccccuacagaacccugaugagcugccccaucggcgaggugcccagccccuacaacagcagauucgagagcguggccuggagcgccagcgccugccacgacggcaucaacuggcugaccaucggcaucagcggccccgacaacggcgccguggccgugcugaaguacaacggcaucaucaccgacaccaucaagagcuggagaaacaacauccugagaacccaggagagcgagugcgccugcgugaacggcagcugcuucaccgugaugaccgacggccccagcgacggccaggccagcuacaagaucuucagaaucgagaagggcaagaucgugaagagcguggagaugaacgcccccaacuaccacuacgaggagugcagcugcuaccccgacagcagcgagaucaccugcgugugcagagacaacuggcacggcagcaacagacccugggugagcuucaaccagaaccuggaguaccagaucggcuacaucugcagcggcaucuucggcgacaaccccagacccaacgacaagaccggcagcugcggccccgugagcagcaacggcgccaacggcgugaagggcuucagcuucaaguacggcaacggcguguggaucggcagaaccaagagcaucagcagcagaaacggcuucgagaugaucugggaccccaacggcuggaccggcaccgacaacaacuucagcaucagacaggacaucgugggcaucaacgaguggagcggcuacagcggcagcuucgugcagcaccccgagcugaccggccuggacugcaucagacccugcuucuggguggagcugaucagaggcagacccaaggagaacaccaucuggaccagcggcagcagcaucagcuucugcggcgugaacagcgacaccgugggcuggagcuggcccgacggcgccgagcugcccuucaccaucgacaaguga

SEQ ID NO: 182904 - RNA, 1410 nt, Artificial Sequence
  derived and/or modified CDS sequence (opt4) from neuraminidase__InfluenzaA__AFN18791
augaaccccaaccagaagaucaucaccaucggcagcgugugcaugaccaucggcauggccaaccugauccugcagaucggcaacaucaucagcaucuggaucagccacagcauccagcugggcaaccagaaccagaucgagaccugcaaccagagcgugaucaccuacgagaacaacaccugggugaaccagaccuacgugaacaucagcaacaccaacuucgccgccggccagagcguggugagcgugaagcuggccggcaacagcagccugugccccgugagcggcugggccaucuacagcaaggacaacagcaucagaaucggcagcaagggcgacguguucgugaucagagagcccuucaucagcugcagcccccuggagugcagaaccuucuuccugacccagggcgcccugcugaacgacaagcacagcaacggcaccaucaaggacagaagccccuacagaacccugaugagcugccccaucggcgaggugcccagccccuacaacagcagauucgagagcguggccuggagcgccagcgccugccacgacggcaucaacuggcugaccaucggcaucagcggccccgacaacggcgccguggccgugcugaaguacaacggcaucaucaccgacaccaucaagagcuggagaaacaacauccugagaacccaggagagcgagugcgccugcgugaacggcagcugcuucaccgugaugaccgacggccccagcgacggccaggccagcuacaagaucuucagaaucgagaagggcaagaucgugaagagcguggagaugaacgcccccaacuaccacuacgaggagugcagcugcuaccccgagagcagcgagaucaccugcgugugcagagacaacuggcacggcagcaacagacccugggugagcuucaaccagaaccuggaguaccagaucggcuacaucugcagcggcaucuucggcgacaaccccagacccaacgacaagaccggcagcugcggccccgugagcagcaacggcgccaacggcgugaagggcuucagcuucaaguacggcaacggcguguggaucggcagaaccaagagcaucagcagcagaaacggcuucgagaugaucugggaccccaacggcuggaccggcaccgacaacaacuucagcaucaagcaggacaucgugggcaucaacgaguggagcggcuacagcggcagcuucgugcagcaccccgagcugaccggccuggacugcaucagacccugcuucuggguggagcugaucagaggcagacccaaggagaacaccaucuggaccagcggcagcagcaucagcuucugcggcgugaacagcgacaccgugggcuggagcuggcccgacggcgccgagcugcccuucaccaucgacaaguga

SEQ ID NO: 182905 - RNA, 1410 nt, Artificial Sequence; identical to SEQ ID NO: 176798
  derived and/or modified CDS sequence (opt4) from neuraminidase__InfluenzaA__AFN18801

SEQ ID NO: 182906 - RNA, 1410 nt, Artificial Sequence; identical to SEQ ID NO: 179217
  derived and/or modified CDS sequence (opt4) from neuraminidase__InfluenzaA__AFN18811

SEQ ID NO: 182907 - RNA, 1410 nt, Artificial Sequence; identical to SEQ ID NO: 176798
  derived and/or modified CDS sequence (opt4) from neuraminidase__InfluenzaA__AFN18817

SEQ ID NO: 182908 - RNA, 1410 nt, Artificial Sequence; identical to SEQ ID NO: 176798
  derived and/or modified CDS sequence (opt4) from neuraminidase__InfluenzaA__AFN18819

SEQ ID NO: 182909 - RNA, 1410 nt, Artificial Sequence; identical to SEQ ID NO: 179790
  derived and/or modified CDS sequence (opt4) from neuraminidase__InfluenzaA__AFN18821

SEQ ID NO: 182910 - RNA, 1410 nt, Artificial Sequence; identical to SEQ ID NO: 176798
  derived and/or modified CDS sequence (opt4) from neuraminidase__InfluenzaA__AFN18823

SEQ ID NO: 182911 - RNA, 1410 nt, Artificial Sequence; identical to SEQ ID NO: 176798
  derived and/or modified CDS sequence (opt4) from neuraminidase__InfluenzaA__AFN18825

SEQ ID NO: 182912 - RNA, 1410 nt, Artificial Sequence; identical to SEQ ID NO: 176798
  derived and/or modified CDS sequence (opt4) from neuraminidase__InfluenzaA__AFN18827

SEQ ID NO: 182913 - RNA, 1410 nt, Artificial Sequence; identical to SEQ ID NO: 176798
  derived and/or modified CDS sequence (opt4) from neuraminidase__InfluenzaA__AFN18829

SEQ ID NO: 182914 - RNA, 1410 nt, Artificial Sequence; identical to SEQ ID NO: 176798
  derived and/or modified CDS sequence (opt4) from neuraminidase__InfluenzaA__AFN18831

SEQ ID NO: 182915 - RNA, 1410 nt, Artificial Sequence; identical to SEQ ID NO: 177935
  derived and/or modified CDS sequence (opt4) from neuraminidase__InfluenzaA__AFN18833

SEQ ID NO: 182916 - RNA, 1410 nt, Artificial Sequence; identical to SEQ ID NO: 177973
  derived and/or modified CDS sequence (opt4) from neuraminidase__InfluenzaA__AFN18835

SEQ ID NO: 182917 - RNA, 1410 nt, Artificial Sequence; identical to SEQ ID NO: 176798
  derived and/or modified CDS sequence (opt4) from neuraminidase__InfluenzaA__AFN18841

SEQ ID NO: 182918 - RNA, 1410 nt, Artificial Sequence
  derived and/or modified CDS sequence (opt4) from neuraminidase__InfluenzaA__AFN18851
augaaccccaaccagaagaucaucaccaucggcagcgugugcaugaccaucggcauggccaaccugauccugcagaucggcaacaugaucagcaucuggaucagccacagcauccagcugggcaaccagaaccagaucgagaccugcaaccagagcgugaucaccuacgagaacaacaccugggugaaccagaccuacgugaacaucagcaacaccaacuucgccgccggccagagcguggugagcgugaagcuggccggcaacagcagccugugccccgugagcggcugggccaucuacagcaaggacaacagcaucagaaucggcagcaagggcgacguguucgugaucagagagcccuucaucagcugcagcccccuggagugcagaaccuucuuccugacccagggcgcccugcugaacgacaagcacagcaacggcaccaucaaggacagaagccccuacagaacccugaugagcugccccaucggcgaggugcccagccccuacaacagcagauucgagagcguggccuggagcgccagcgccugccacgacggcaucaacuggcugaccaucggcaucagcggccccgacaacggcgccguggccgugcugaaguacaacggcaucaucaccgacaccaucaagagcuggagaaacaacauccugagaacccaggagagcgagugcgccugcgugaacggcagcugcuucaccgugaugaccgacggccccagcgacggccaggccagcuacaagaucuucagaaucgagaagggcaagaucgugaagagcguggagaugaacgcccccaacuaccacuacgaggagugcagcugcuaccccgacagcagcgagaucaccugcgugugcagagacaacuggcacggcagcaacagacccugggugagcuucaaccagaaccuggaguaccagaucggcuacaucugcagcggcaucuucggcgacaaccccagacccaacgacaagaccggcagcugcggccccgugagcagcaacggcgccaacggcgugaagggcuucagcuucaaguacggcaacggcguguggaucggcagaaccaagagcaucagcagcagaaacggcuucgagaugaucugggaccccaacggcuggaccggcaccgacaacaacuucagcaucaagcaggacaucgugggcaucaacgaguggagcggcuacagcggcagcuucgugcagcaccccgagcugaccggccuggacugcaucagacccugcuucuggguggagcugaucagaggcagacccaaggagaacaccaucuggaccagcggcagcagcaucagcuucugcggcgugaacagcgacaccgugggcuggagcuggcccgacggcgccgagcugcccuucaccaucgacaaguga

SEQ ID NO: 182919 - RNA, 1410 nt, Artificial Sequence; identical to SEQ ID NO: 176798
  derived and/or modified CDS sequence (opt4) from neuraminidase__InfluenzaA__AFN18857

SEQ ID NO: 182920 - RNA, 1410 nt, Artificial Sequence
  derived and/or modified CDS sequence (opt4) from neuraminidase__InfluenzaA__AFN18859
augaaccccaaccagaagaucaucaccaucggcagcgugugcaugaccaucggccuggccaaccugauccugcagaucggcaacaucaucagcaucuggaucagccacagcauccagcugggcaaccagaaccagaucgagaccugcaaccagagcgugaucaccuacgagaacaacaccugggugaaccagaccuacgugaacaucagcaacaccaacuucgccgccggccagagcguggugagcgugaagcuggccggcaacagcagccugugccccgugagcggcugggccaucuacagcaaggacaacagcaucagaaucggcagcaagggcgacguguucgugaucagagagcccuucaucagcugcagcccccuggagugcagaaccuucuuccugacccagggcgcccugcugaacgacaagcacagcaacggcaccaucaaggacagaagccccuacagaacccugaugagcugccccaucggcgaggugcccagccccuacaacagcagauucgagagcguggccuggagcgccagcgccugccacgacggcaucaacuggcugaccaucggcaucagcggccccgacaacggcgccguggccgugcugaaguacaacggcaucaucaccgacaccaucaagagcuggagaaacaacauccugagaacccaggagagcgagugcgccugcgugaacggcagcugcuucaccgugaugaccgacggccccagcgacggccaggccagcuacaagaucuucagaaucgagaagggcaagaucgugaagagcguggagaugaacgcccccaacuaccacuacgaggagugcagcugcuaccccgacagcagcgagaucaccugcgugugcagagacaacuggcacggcagcaacagacccugggugagcuucaaccagaaccuggaguaccagaucggcuacaucugcagcggcaucuucggcgacaaccccagacccaacgacaagaccggcagcugcggccccgugagcagcaacggcgccaacggcgugaagggcuucagcuucaaguacggcaacggcguguggaucggcagaaccaagagcaucagcagcagaaacggcuucgagaugaucugggaccccaacggcuggaccggcaccgacaacaacuucagcaucaagcaggacaucgugggcaucaacgaguggagcggcuacagcggcagcuucgugcagcaccccgagcugaccggccuggacugcaucagacccugcuucuggguggagcugaucagaggcagacccaaggagaacaccaucuggaccagcggcagcagcaucagcuucugcggcgugaacagcgacaccgugggcuggagcuggcccgacggcgccgagcugcccuucaccaucgacaaguga

SEQ ID NO: 182921 - RNA, 1410 nt, Artificial Sequence
  derived and/or modified CDS sequence (opt4) from neuraminidase__InfluenzaA__AFN18861
augaaccccaaccagaagaucaucaccaucggcagcgugugcaugaccaucggcauggccaaccugauccugcagaucggcaacaucaucagcaucuggaucagccacagcauccagcugggcaaccagaaccagaucgagaccugcaaccagagcgugaucaccuacgagaacaacaccugggugaaccagaccuacgugaacaucagcaacaccaacuucgccgccggccagagcguggugagcgugaagcuggccggcaacagcagccugugcagcgugagcggcugggccaucuacagcaaggacaacagcaucagaaucggcagcaagggcgacguguucgugaucagagagcccuucaucagcugcagcccccuggagugcagaaccuucuuccugacccagggcgcccugcugaacgacaagcacagcaacggcaccaucaaggacagaagccccuacagaacccugaugagcugccccaucggcgaggugcccagccccuacaacagcagauucgagagcguggccuggagcgccagcgccugccacgacggcaucaacuggcugaccaucggcaucagcggccccgacaacggcgccguggccgugcugaaguacaacggcaucaucaccgacaccaucaagagcuggagaaacaacauccugagaacccaggagagcgagugcgccugcgugaacggcagcugcuucaccgugaugaccgacggccccagcgacggccaggccagcuacaagaucuucagaaucgagaagggcaagaucgugaagagcguggagaugaacgcccccaacuaccacuacgaggagugcagcugcuaccccgacagcagcgagaucaccugcgugugcagagacaacuggcacggcagcaacagacccugggugagcuucaaccagaaccuggaguaccagaucggcuacaucugcagcggcaucuucggcgacaaccccagacccaacgacaagaccggcagcugcggccccgugagcagcaacggcgccaacggcgugaagggcuucagcuucaaguacggcaacggcguguggaucggcagaaccaagagcaucagcagcagaaacggcuucgagaugaucugggaccccaacggcuggaccggcaccgacaacaacuucagcaucaagcaggacaucgugggcaucaacgaguggagcggcuacagcggcagcuucgugcagcaccccgagcugaccggccuggacugcaucagacccugcuucuggguggagcugaucagaggcagacccaaggagaacaccaucuggaccagcggcagcagcaucagcuucugcggcgugaacagcgacaccgugggcuggagcuggcccgacggcgccgagcugcccuucaccaucgacaaguga

SEQ ID NO: 182922 - RNA, 1410 nt, Artificial Sequence; identical to SEQ ID NO: 176798
  derived and/or modified CDS sequence (opt4) from neuraminidase__InfluenzaA__AFN18867

SEQ ID NO: 182923 - RNA, 1410 nt, Artificial Sequence; identical to SEQ ID NO: 178612
  derived and/or modified CDS sequence (opt4) from neuraminidase__InfluenzaA__AFN18877

SEQ ID NO: 182924 - RNA, 1410 nt, Artificial Sequence; identical to SEQ ID NO: 176798
  derived and/or modified CDS sequence (opt4) from neuraminidase__InfluenzaA__AFN18887

SEQ ID NO: 182925 - RNA, 1410 nt, Artificial Sequence; identical to SEQ ID NO: 177816
  derived and/or modified CDS sequence (opt4) from neuraminidase__InfluenzaA__AFN18893

SEQ ID NO: 182926 - RNA, 1410 nt, Artificial Sequence
  derived and/or modified CDS sequence (opt4) from neuraminidase__InfluenzaA__AFN18895
augaaccccaaccagaagaucaucaccaucggcagcgugugcaugaccaucggcauggccaaccugauccugcagaucggcaacaucaucagcaucuggaucagccacagcauccagcugggcaaccagaaccagaucgagaccugcaaccagagcgugaucaccuacgagaacaacaccugggugaaccagaccuacgugaacaucagcaacaccaacuucgccgccggccagagcguggugagcgugaagcuggccggcaacagcagccugugccccgugagcggcugggccaucuacagcaaggacaacagcaucagaaucggcagcaagggcgacguguucgugaucagagagcccuucaucagcugcagcccccuggagugcagaaccuucuuccugacccagggcgcccugcugaacgacaagcacagcaacggcaccaucaaggacagaagccccuacagaacccugaugagcugccccaucggcgaggugcccagccccuacaacagcagauucgagagcguggccuggagcgccagcgccugccacgacggcaucaacuggcugaccaucggcaucagcggccccgacaacggcgccguggccgugcugaaguacaacggcaucaucaccgacaccaucaagagcuggagaaacaacauccugagaacccaggagagcgagugcgccugcgugaacggcagcugcuucaccgugaugaccgacggccccagcgacggccaggccagcuacaagaucuucagaaucgagaagggcaagaucgugaagagcguggagaugaacgcccccaacuaccacuacgaggagugcagcugcuaccccgacagcagcgagaucaccugcgugugcagagacaacuggcacggcagcaacagacccugggugagcuucaaccagaaccuggaguacagaaucggcuacaucugcagcggcaucuucggcgacaaccccagacccaacgacaagaccggcagcugcggccccgugagcagcaacggcgccaacggcgugaagggcuucagcuucaaguacggcaacggcguguggaucggcagaaccaagagcaucagcagcagaaacggcuucgagaugaucugggaccccaacggcuggaccggcaccgacaacaacuucagcaucaagcaggacaucgugggcaucaacgaguggagcggcuacagcggcagcuucgugcagcaccccgagcugaccggccuggacugcaucagacccugcuucuggguggagcugaucaagggcagacccaaggagaacaccaucuggaccagcggcagcagcaucagcuucugcggcgugaacagcgacaccgugggcuggagcuggcccgacggcgccgagcugcccuucaccaucgacaaguga

SEQ ID NO: 182927 - RNA, 1410 nt, Artificial Sequence; identical to SEQ ID NO: 178700
  derived and/or modified CDS sequence (opt4) from neuraminidase__InfluenzaA__AFN18905

SEQ ID NO: 182928 - RNA, 1410 nt, Artificial Sequence; identical to SEQ ID NO: 178612
  derived and/or modified CDS sequence (opt4) from neuraminidase__InfluenzaA__AFN18913

SEQ ID NO: 182929 - RNA, 1410 nt, Artificial Sequence
  derived and/or modified CDS sequence (opt4) from neuraminidase__InfluenzaA__AFN18919
augaaccccaaccagaagaucaucaccaucggcagcgugugcaugaccaucggcauggccaaccugauccugcagaucggcaacaucaucagcaucuggaucagccacagcauccagcugggcaaccagaaccagaucgagaccugcaaccagagcgugaucaccuacgagaacaacaccugggugaaccagaccuacgugaacaucagcaacaccaacuucgccgccggccagagcguggugagcgugaagcuggccggcaacagcagccugugccccgugagcggcugggccaucuacagcaaggacaacagcaucagaaucggcagcaagggcgacguguucgugaucagagagcccuucaucagcugcagcccccuggagugcagaaccuucuuccugacccagggcgcccugcugaacgacaagcacagcaacggcaccaucaaggacagaagccccuacagaacccugaugagcugccccaucggcgaggugcccagccccuacaacagcagauucgagagcguggccuggagcgccagcgccugccacgacggcaucaacuggcugaccaucggcaucagcggccccgacaacggcgccguggccgugcugaaguacaacggcaucaucaccgacaccaucaagagcuggagaaacaacauccugagaacccaggagagcgagugcgccugcgugaacggcagcugcuucaccgugaugaccgacggccccagcgacggccaggccagcuacaagaucuucagaaucgagaagggcaagaucgugaagagcguggagaugaacgcccccaacuaccacuacgaggagugcagcugcuaccccgacagcagcgagaucaccugcgugugcagagacaacuggcacggcagcaacagacccugggugagcuucaaccagaaccuggaguaccagaucggcuacaucugcagcggcaucuucggcgacaaccccagacccaacgacaagaccggcagcugcggccccgugagcagcaacggcgagaacggcgugaagggcuucagcuucaaguacggcaacggcguguggaucggcagaaccaagagcaucagcagcagaaacggcuucgagaugaucugggaccccaacggcuggaccggcaccgacaacaacuucagcaucaagcaggacaucgugggcaucaacgaguggagcggcuacagcggcagcuucgugcagcaccccgagcugaccggccuggacugcaucagacccugcuucuggguggagcugaucagaggcagacccaaggagaacaccaucuggaccagcggcagcagcaucagcuucugcggcgugaacagcgacaccgugggcuggagcuggcccgacggcgccgagcugcccuucaccaucgacaaguga

SEQ ID NO: 182930 - RNA, 1410 nt, Artificial Sequence
  derived and/or modified CDS sequence (opt4) from neuraminidase__InfluenzaA__AFN18929
augaaccccaaccagaagaucaucaccaucggcagcgugugcaugaccaucggcauggccaaccugauccugcagaucggcaacaucaucagcaucuggaucagccacagcauccagcugggcaaccagaaccagaucgagaccugcaaccagagcgugaucaccuacgagaacaacaccugggugaaccagaccuacgugaacaucagcaacaccaacuucgccgccggccagagcguggugagcgugaagcuggccggcaacagcagccugugccccgugagcggcugggccaucuacagcaaggacaacagcaucagaaucggcagcaagggcgacguguucgugaucagagagcccuucaucagcugcagcccccuggagugcagaaccuucuuccugacccagggcgcccugcugaacgacaagcacagcaacggcaccaucaaggacagaagccccuacagaacccugaugagcugccccaucggcgaggugcccagccccuacaacagcagauucgagagcguggccuggagcgccagcgccugccacgacggcaucaacuggcugaccaucggcaucagcggccccgacaacggcgccguggccgugcugaaguacaacggcaucaucaccgacaccaucaagagcuggagaaacaacauccugagaacccaggagagcgagugcgccugcgugaacggcagcugcuucacccugaugaccgacggccccagcgacggccaggccagcuacaagaucuucagaaucgagaagggcaagaucgugaagagcguggagaugaacgcccccaacuaccacuacgaggagugcagcugcuaccccgacagcagcgagaucaccugcgugugcagagacaacuggcacggcagcaacagacccugggugagcuucaaccagaaccuggaguaccagaucggcuacaucugcagcggcaucuucggcgacaaccccagacccaacgacaagaccggcagcugcggccccgugagcagcaacggcgccaacggcgugaagggcuucagcuucaaguacggcaacggcguguggaucggcagaaccaagagcaucagcagcagaaacggcuucgagaugaucugggaccccaacggcuggaccggcaccgacaacaacuucagcaucaagcaggacaucgugggcaucaacgaguggagcggcuacagcggcagcuucgugcagcaccccgagcugaccggccuggacugcaucagacccugcuucuggguggagcugaucagaggcagacccaaggagaacaccaucuggaccagcggcagcagcaucagcuucugcggcgugaacagcgacaccgugggcuggagcuggagcgacggcgccgagcugcccuucaccaucgacaaguga

SEQ ID NO: 182931 - RNA, 1410 nt, Artificial Sequence; identical to SEQ ID NO: 176798
  derived and/or modified CDS sequence (opt4) from neuraminidase__InfluenzaA__AFN18939

SEQ ID NO: 182932 - RNA, 1410 nt, Artificial Sequence; identical to SEQ ID NO: 176798
  derived and/or modified CDS sequence (opt4) from neuraminidase__InfluenzaA__AFN18953

SEQ ID NO: 182933 - RNA, 1410 nt, Artificial Sequence; identical to SEQ ID NO: 176798
  derived and/or modified CDS sequence (opt4) from neuraminidase__InfluenzaA__AFN18959

SEQ ID NO: 182934 - RNA, 1410 nt, Artificial Sequence; identical to SEQ ID NO: 176798
  derived and/or modified CDS sequence (opt4) from neuraminidase__InfluenzaA__AFN18965

SEQ ID NO: 182935 - RNA, 1410 nt, Artificial Sequence; identical to SEQ ID NO: 180868
  derived and/or modified CDS sequence (opt4) from neuraminidase__InfluenzaA__AFN18975

SEQ ID NO: 182936 - RNA, 1410 nt, Artificial Sequence; identical to SEQ ID NO: 176798
  derived and/or modified CDS sequence (opt4) from neuraminidase__InfluenzaA__AFN18981

SEQ ID NO: 182937 - RNA, 1410 nt, Artificial Sequence
  derived and/or modified CDS sequence (opt4) from neuraminidase__InfluenzaA__AFN18983
augaaccccaaccagaagaucaucaccaucggcagcgugugcaugaccaucggcauggccaaccugauccugcagaucggcaacaucaucagcaucuggaucagccacagcauccagcugggcaaccagaaccagaucgagaccugcaaccagagcgugaucaccuacgagaacaacaccugggugaaccagaccuacgugaacaucagcaacaccaacuucgccgccggccagagcguggugagcgugaagcuggccggcaacagcagccugugccccgugagcggcugggccaucuacagcaaggacaacagcaucagaaucggcagcaagggcgacguguucgugaucagagagcccuucaucagcugcagcccccuggagugcagaaccuucuuccugacccagggcgcccugcugaacgacaagcacagcaacggcaccaucaaggacagaagccccuacagaacccugaugagcugccccaucggcgaggugcccagccccuacaacagcagauucgagagcguggccuggagcgccagcgccugccacgacggcaucaacuggcugaccaucggcaucagcggccccgacaacggcgccguggccgugcugaaguacaacggcaucaucaccgacaccaucaagagcuggagaaacaacauccugagaacccaggagagcgagugcgccugcgugaacggcagcugcuucaccgugaugaccgacggccccagcgacggccaggccagcuacaagaucuucagaaucgagaagggcaagaucgugaagagcguggagaugaacgccagcaacuaccacuacgaggagugcagcugcuaccccgacagcagcgagaucaccugcgugugcagagacaacuggcacggcagcaacagacccugggugagcuucaaccagaaccuggaguaccagaucggcuacaucugcagcggcaucuucggcgacaaccccagacccaacgacaagaccggcagcugcggccccgugagcagcaacggcgccaacggcgugaagggcuucagcuucaaguacggcaacggcguguggaucggcagaaccaagagcaucagcagcagaaacggcuucgagaugaucugggaccccaacggcuggaccggcaccgacaacaacuucagcaucaagcaggacaucgugggcaucaacgaguggagcggcuacagcggcagcuucgugcagcaccccgagcugaccggccuggacugcaucagacccugcuucuggguggagcugaucagaggcagacccaaggagaacaccaucuggaccagcggcagcaucaucagcuucugcggcgugaacagcgacaccgugggcuggagcuggcccgacggcgccgagcugcccuucaccaucgacaaguga

SEQ ID NO: 182938 - RNA, 1410 nt, Artificial Sequence; identical to SEQ ID NO: 176798
  derived and/or modified CDS sequence (opt4) from neuraminidase__InfluenzaA__AFN18985

SEQ ID NO: 182939 - RNA, 1410 nt, Artificial Sequence
  derived and/or modified CDS sequence (opt4) from neuraminidase__InfluenzaA__AFN18987
augaaccccaaccagaagaucaucaccaucggcagcgugugcaugaccaucggcauggccaaccugauccugcagaucggcaacaucaucagcaucuggaucagccacagcauccagcugggcaaccagaaccagaucgagaccugcaaccagagcgugaucaccuacgagaacaacaccugggugaaccagaccuacgugaacaucagcaacaccaacuucgccgccggccagagcguggugagcgugaagcuggccggcaacagcagccugugccccgugagcggcugggccaucuacagcaaggacaacagcaucagaaucggcagcaagggcgacguguucgugaucagagagcccuucaucagcugcagcccccuggagugcagaaccuucuuccugacccagggcgcccugcugaacgacaagcacagcaacggcaccaucaaggacagaagccccuacagaacccugaugagcugccccaucggcgaggugcccagccccuacaacagcagauucgagagcguggccuggagcgccagcgccugccacgacggcaucaacuggcugaccaucggcaucagcggccccgacaacggcgccguggccgugcugaaguacaacggcaucaucaccgacaccaucaagagcuggagaaacaacauccugagaacccaggagagcgagugcgccugcgugaacggcagcugcuucaccgugaugaccgacggccccagcgacggccaggccagcuacaagaucuucagaaucgagaagggcaagaucgugaagagcguggagaugaacgcccccaacuaccacuacgaggagugcagcugcuaccccgacagcagcgagaucaccugcgugugcagagacaacuggcacggcagcaacagacccugggugagcuucaaccagaaccuggaguaccagaucggcuacaucugcagcggcaucuucggcgacaaccccagacccaucgacaagaccggcagcugcggccccgugagcagcaacggcgccaacggcgugaagggcuucagcuucaaguacggcaacggcguguggaucggcagaaccaagagcaucagcagcagaaacggcuucgagaugaucugggaccccaacggcuggaccggcaccgacaacaacuucagcaucaagcaggacaucgugggcaucaacgaguggagcggcuacagcggcagcuucgugcagcaccccgagcugaccggccuggacugcaucagacccugcuucuggguggagcugaucagaggcagacccaaggagaacaccaucuggaccagcggcagcagcaucagcuucugcggcgugaacagcgacaccgugggcuggagcuggcccgacggcgccgagcugcccuucaccaucgacaaguga

SEQ ID NO: 182940 - RNA, 1410 nt, Artificial Sequence; identical to SEQ ID NO: 176798
  derived and/or modified CDS sequence (opt4) from neuraminidase__InfluenzaA__AFN18989

SEQ ID NO: 182941 - RNA, 1410 nt, Artificial Sequence; identical to SEQ ID NO: 176798
  derived and/or modified CDS sequence (opt4) from neuraminidase__InfluenzaA__AFN18995

SEQ ID NO: 182942 - RNA, 1410 nt, Artificial Sequence; identical to SEQ ID NO: 182920
  derived and/or modified CDS sequence (opt4) from neuraminidase__InfluenzaA__AFN19001

SEQ ID NO: 182943 - RNA, 1410 nt, Artificial Sequence; identical to SEQ ID NO: 176798
  derived and/or modified CDS sequence (opt4) from neuraminidase__InfluenzaA__AFN19007

SEQ ID NO: 182944 - RNA, 1410 nt, Artificial Sequence; identical to SEQ ID NO: 176798
  derived and/or modified CDS sequence (opt4) from neuraminidase__InfluenzaA__AFN19024

SEQ ID NO: 182945 - RNA, 1410 nt, Artificial Sequence
  derived and/or modified CDS sequence (opt4) from neuraminidase__InfluenzaA__AFN19025
augaaccccaaccagaagaucaucaccaucggcagcgugugcaugaccaucggcauggccaaccugauccugcagaucggcaacaucaucagcaucuggaucagccacagcauccagcugggcaaccagaaccagaucgagaccugcaaccagagcgugaucaccuacgagaacaacaccugggugaaccagaccuacgugaacaucagcaacaccaacuucgccgccggccagagcguggugagcgugaagcuggccggcaacagcagccugugccccgugagcggcugggccaucuacagcaaggacaacagcaucagaaucggcagcaagggcgacguguucgugaucagagagcccuucaucagcugcagcccccuggagugcagaaccuucuuccugacccagggcgcccugcugaacgacaagcacagcaacggcaccaucaaggacagaagccccuacagaacccugaugagcugccccaucggcgaggugcccagccccuacaacagcagauucgagagcguggccuggagcgccagcgccugccacgacggcaucaacuggcugaccaucggcaucagcggccccgacaacggcgccguggccgugcugaaguacaacggcaucaucaccgacaccaucaagagcuggagaaacaagauccugagaacccaggagagcgagugcgccugcgugaacggcagcugcuucaccgugaugaccgacggccccagcgacggccaggccagcuacaagaucuucagaaucgagaagggcaagaucgugaagagcguggagaugaacgcccccaacuaccacuacgaggagugcagcugcuaccccgacagcagcgagaucaccugcgugugcagagacaacuggcacggcagcaacagacccugggugagcuucaaccagaaccuggaguaccagaucggcuacaucugcagcggcaucuucggcgacaaccccagacccaacgacaagaccggcagcugcggccccgugagcagcaacggcgccaacggcgugaagggcuucagcuucaaguacggcaacggcguguggaucggcagaaccaagagcaucagcagcagaaacggcuucgagaugaucugggaccccaacggcuggaccggcaccgacaacaacuucagcaucaagcaggacaucgugggcaucaacgaguggagcggcuacagcggcagcuucgugcagcaccccgagcugaccggccuggacugcaucagacccugcuucuggguggagcugaucagaggcagacccaaggagaacaccaucuggaccagcggcagcagcaucagcuucugcggcgugaacagcgacaccgugggcuggagcuggcccgacggcgccgagcugcccuucaccaucgacaaguga

SEQ ID NO: 182946 - RNA, 1410 nt, Artificial Sequence; identical to SEQ ID NO: 176798
  derived and/or modified CDS sequence (opt4) from neuraminidase__InfluenzaA__AFN19027

SEQ ID NO: 182947 - RNA, 1410 nt, Artificial Sequence; identical to SEQ ID NO: 176798
  derived and/or modified CDS sequence (opt4) from neuraminidase__InfluenzaA__AFN19032

SEQ ID NO: 182948 - RNA, 1410 nt, Artificial Sequence; identical to SEQ ID NO: 176798
  derived and/or modified CDS sequence (opt4) from neuraminidase__InfluenzaA__AFN19038

SEQ ID NO: 182949 - RNA, 1410 nt, Artificial Sequence; identical to SEQ ID NO: 182431
  derived and/or modified CDS sequence (opt4) from neuraminidase__InfluenzaA__AFN19049

SEQ ID NO: 182950 - RNA, 1410 nt, Artificial Sequence; identical to SEQ ID NO: 176798
  derived and/or modified CDS sequence (opt4) from neuraminidase__InfluenzaA__AFN19055

SEQ ID NO: 182951 - RNA, 1410 nt, Artificial Sequence; identical to SEQ ID NO: 176798
  derived and/or modified CDS sequence (opt4) from neuraminidase__InfluenzaA__AFN19065

SEQ ID NO: 182952 - RNA, 1410 nt, Artificial Sequence; identical to SEQ ID NO: 176798
  derived and/or modified CDS sequence (opt4) from neuraminidase__InfluenzaA__AFN19071

SEQ ID NO: 182953 - RNA, 1410 nt, Artificial Sequence; identical to SEQ ID NO: 176798
  derived and/or modified CDS sequence (opt4) from neuraminidase__InfluenzaA__AFN19077

SEQ ID NO: 182954 - RNA, 1410 nt, Artificial Sequence; identical to SEQ ID NO: 176798
  derived and/or modified CDS sequence (opt4) from neuraminidase__InfluenzaA__AFN19083

SEQ ID NO: 182955 - RNA, 1410 nt, Artificial Sequence; identical to SEQ ID NO: 176798
  derived and/or modified CDS sequence (opt4) from neuraminidase__InfluenzaA__AFN19089

SEQ ID NO: 182956 - RNA, 1410 nt, Artificial Sequence; identical to SEQ ID NO: 176798
  derived and/or modified CDS sequence (opt4) from neuraminidase__InfluenzaA__AFN19099

SEQ ID NO: 182957 - RNA, 1410 nt, Artificial Sequence; identical to SEQ ID NO: 176798
  derived and/or modified CDS sequence (opt4) from neuraminidase__InfluenzaA__AFN19105

SEQ ID NO: 182958 - RNA, 1410 nt, Artificial Sequence; identical to SEQ ID NO: 176798
  derived and/or modified CDS sequence (opt4) from neuraminidase__InfluenzaA__AFN19114

SEQ ID NO: 182959 - RNA, 1410 nt, Artificial Sequence; identical to SEQ ID NO: 176798
  derived and/or modified CDS sequence (opt4) from neuraminidase__InfluenzaA__AFN19126

SEQ ID NO: 182960 - RNA, 1410 nt, Artificial Sequence; identical to SEQ ID NO: 176798
  derived and/or modified CDS sequence (opt4) from neuraminidase__InfluenzaA__AFN19136

SEQ ID NO: 182961 - RNA, 1410 nt, Artificial Sequence; identical to SEQ ID NO: 176798
  derived and/or modified CDS sequence (opt4) from neuraminidase__InfluenzaA__AFN19146

SEQ ID NO: 182962 - RNA, 1410 nt, Artificial Sequence; identical to SEQ ID NO: 176798
  derived and/or modified CDS sequence (opt4) from neuraminidase__InfluenzaA__AFN19156

SEQ ID NO: 182963 - RNA, 1410 nt, Artificial Sequence; identical to SEQ ID NO: 176798
  derived and/or modified CDS sequence (opt4) from neuraminidase__InfluenzaA__AFN19166

SEQ ID NO: 182964 - RNA, 1410 nt, Artificial Sequence; identical to SEQ ID NO: 176798
  derived and/or modified CDS sequence (opt4) from neuraminidase__InfluenzaA__AFN19186

SEQ ID NO: 182965 - RNA, 1410 nt, Artificial Sequence; identical to SEQ ID NO: 182431
  derived and/or modified CDS sequence (opt4) from neuraminidase__InfluenzaA__AFN19196

SEQ ID NO: 182966 - RNA, 1410 nt, Artificial Sequence; identical to SEQ ID NO: 176798
  derived and/or modified CDS sequence (opt4) from neuraminidase__InfluenzaA__AFN19205

SEQ ID NO: 182967 - RNA, 1410 nt, Artificial Sequence; identical to SEQ ID NO: 176798
  derived and/or modified CDS sequence (opt4) from neuraminidase__InfluenzaA__AFN19215

SEQ ID NO: 182968 - RNA, 1410 nt, Artificial Sequence; identical to SEQ ID NO: 176798
  derived and/or modified CDS sequence (opt4) from neuraminidase__InfluenzaA__AFN19225

SEQ ID NO: 182969 - RNA, 1410 nt, Artificial Sequence; identical to SEQ ID NO: 176798
  derived and/or modified CDS sequence (opt4) from neuraminidase__InfluenzaA__AFN19235

SEQ ID NO: 182970 - RNA, 1410 nt, Artificial Sequence; identical to SEQ ID NO: 176798
  derived and/or modified CDS sequence (opt4) from neuraminidase__InfluenzaA__AFN19245

SEQ ID NO: 182971 - RNA, 1410 nt, Artificial Sequence; identical to SEQ ID NO: 176798
  derived and/or modified CDS sequence (opt4) from neuraminidase__InfluenzaA__AFN19251

SEQ ID NO: 182972 - RNA, 1410 nt, Artificial Sequence; identical to SEQ ID NO: 176798
  derived and/or modified CDS sequence (opt4) from neuraminidase__InfluenzaA__AFN19261

SEQ ID NO: 182973 - RNA, 1410 nt, Artificial Sequence; identical to SEQ ID NO: 182431
  derived and/or modified CDS sequence (opt4) from neuraminidase__InfluenzaA__AFN19271

SEQ ID NO: 182974 - RNA, 1410 nt, Artificial Sequence; identical to SEQ ID NO: 178529
  derived and/or modified CDS sequence (opt4) from neuraminidase__InfluenzaA__AFN19281

SEQ ID NO: 182975 - RNA, 1410 nt, Artificial Sequence
  derived and/or modified CDS sequence (opt4) from neuraminidase__InfluenzaA__AFN19287
augaaccccaaccagaagaucaucaccaucggcagcgugugcaugaccaucggcauggccaaccugauccugcagaucggcaacaucaucagcaucuggaucagccacagcauccagcugggcaaccagaaccagaucgagaccugcaaccagagcgugaucaccuacgagaacaacaccugggugaaccagaccuacgugaacaucagcaacaccaacuucgccgccggccagagcguggugagcgugaagcuggccggcaacagcagccugugccccgugagcggcugggccaucuacagcaaggacaacagcaucagaaucggcagcaagggcgacguguucgugaucagagagcccuucaucagcugcagcccccuggagugcagaaccuucuuccugacccagggcgcccugcugagcgacaagcacagcaacggcaccaucaaggacagaagccccuacagaacccugaugagcugccccaucggcgaggugcccagccccuacaacagcagauucgagagcguggccuggagcgccagcgccugccacgacggcaucaacuggcugaccaucggcaucagcggccccgacaacggcgccguggccgugcugaaguacaacggcaucaucaccgacaccaucaagagcuggagaaacaacauccugagaacccaggagagcgagugcgccugcgugaacggcagcugcuucaccgugaugaccgacggccccagcgacggccaggccagcuacaagaucuucagaaucgagaagggcaagaucgugaagagcguggagaugaacgcccccaacuaccacuacgaggagugcagcugcuaccccgacagcagcgagaucaccugcgugugcagagacaacuggcacggcagcaacagacccugggugagcuucaaccagaaccuggaguaccagaucggcuacaucugcagcggcaucuucggcgacaaccccagacccaacgacaagaccggcagcugcggccccgugagcagcaacggcgccaacggcgugaagggcuucagcuucaaguacggcaacggcguguggaucggcagaaccaagagcaucagcagcagaaacggcuucgagaugaucugggaccccaacggcuggaccggcaccgacaacaacuucagcaucaagcaggacaucgugggcaucaacgaguggagcggcuacagcggcagcuucgugcagcaccccgagcugaccggccuggacugcaucagacccugcuucuggguggagcugaucagaggcagacccaaggagaacaccaucuggaccagcggcagcagcaucagcuucugcggcgugaacagcgacaccgugggcuggagcuggcccgacggcgccgagcugcccuucaccaucgacaaguga

SEQ ID NO: 182976 - RNA, 1410 nt, Artificial Sequence; identical to SEQ ID NO: 176798
  derived and/or modified CDS sequence (opt4) from neuraminidase__InfluenzaA__AFN19297

SEQ ID NO: 182977 - RNA, 1410 nt, Artificial Sequence; identical to SEQ ID NO: 176798
  derived and/or modified CDS sequence (opt4) from neuraminidase__InfluenzaA__AFN19307

SEQ ID NO: 182978 - RNA, 1410 nt, Artificial Sequence; identical to SEQ ID NO: 176798
  derived and/or modified CDS sequence (opt4) from neuraminidase__InfluenzaA__AFN19317

SEQ ID NO: 182979 - RNA, 1410 nt, Artificial Sequence; identical to SEQ ID NO: 182431
  derived and/or modified CDS sequence (opt4) from neuraminidase__InfluenzaA__AFN19327

SEQ ID NO: 182980 - RNA, 1410 nt, Artificial Sequence; identical to SEQ ID NO: 176798
  derived and/or modified CDS sequence (opt4) from neuraminidase__InfluenzaA__AFN19346

SEQ ID NO: 182981 - RNA, 1410 nt, Artificial Sequence
  derived and/or modified CDS sequence (opt4) from neuraminidase__InfluenzaA__AFN19352
augaaccccaaccagaagaucaucaccaucggcagcgugagccugaccaucagcaccaucugcuucuucaugcagaucgccauccugaucaccaccgugacccugcacuucaagcaguacgaguucaacagcccccccaacaaccaggugaugcugugcgagcccaccaucaucgagagaaacaugaccgagaucguguaccugaccaacaccaccaucgagaaggagaucugccccaagcccgccgaguacagaaacuggagcaagccccagugcgacaucaccggcuucgcccccuucagcaaggacaacagcaucagacugagcgccggcggcgacaucugggugaccagagagcccuacgugagcugcgaccccgacaagugcuaccaguucgcccugggccagggcaccacccugaacaacgugcacagcaacaacaccgugagagacagaacccccuacagaacccugcugaugaacgagcugggcgugcccuuccaccugggcaccaagcaggugugcaucgccuggagcagcagcagcugccacgacggcaaggccuggcugcacgugugcaucaccggcgacgacaagaacgccaccgccagcuucaucuacaacggcagacugguggacagcguggugagcuggagcaaggagauccugagaacccaggagagcgagugcgugugcaucaacggcaccugcaccguggugaugaccgacggcagcgccagcggcaaggccgacaccaagauccuguucaucgaggagggcaagaucgugcacaccagcacccugagcggcagcgcccagcacguggaggagugcagcugcuaccccagauaccccggcgugagaugcgugugcagagacaacuggaagggcagcaacagacccaucguggacaucaacaucaaggaccacagcaucgugagcagcuacgugugcagcggccuggugggcgacacccccagaaagaacgacagcagcagcagcggccacugccuggaccccaacaacgaggagggcggccacggcgugaagggcugggccuucgacgacggcaacgacguguggaugggcagaaccaucaacgagaccagcagacugggcuacgagaccuucaaggugaucgagggcuggagcaaccccaagagcaagcugcagaucaacagacaggugaucguggacagaagcgacagaagcggcuacagcggcaucuucagcguggagggcaagagcugcaucaacagaugcuucuacguggagcugaucagaggcagaaaggaggagaccgaggugcuguggaccagcaacagcaucgugguguucugcggcaccagcggcaccuacggcaccggcagcuggcccgacggcgccgaccugaaccugaugcccaucuga

SEQ ID NO: 182982 - RNA, 1410 nt, Artificial Sequence
  derived and/or modified CDS sequence (opt4) from neuraminidase__InfluenzaA__AFN19354
augaaccccaaccagaagaucaucaccaucggcagcgugagccugaccaucagcaccaucugcuucuucaugcagaucgccauccugaucaccaccgugacccugcacuucaagcaguacgaguucaacagcccccccaacaaccaggugaugcugugcgagcccaccaucaucgagagaaacaucaccgagaucguguaccugaccaacaccaccaucgagaaggagaucugccccaagcccgccgaguacagaaacuggagcaagccccagugcgacaucaccggcuucgcccccuucagcaaggacaacagcaucagacugagcgccggcggcgacaucugggugaccagagagcccuacgugagcugcgaccccgacaagugcuaccaguucgcccugggccagggcaccacccugaacaacgugcacagcaacaacaccgugagagacagaacccccuacagaacccugcugaugaacgagcugggcgugcccuuccaccugggcaccaagcaggugugcaucgccuggagcagcagcagcugccacgacggcaaggccuggcugcacgugugcaucaccggcgacgacaagaacgccaccgccagcuucaucuacaacggcagacugguggacagcguggugagcuggagcaaggagauccugagaacccaggagagcgagugcgugugcaucaacggcaccugcaccguggugaugaccgacggcagcgccagcggcaaggccgacaccaagauccuguucaucgaggagggcaagaucgugcacaccagcacccugagcggcagcgcccagcacguggaggagugcagcugcuaccccagauaccccggcgugagaugcgugugcagagacaacuggaagggcagcaacagacccaucguggacaucaacaucaaggaccacagcaucgugagcagcuacgugugcagcggccuggugggcgacacccccagaaagaacgacagcagcagcagcagccacugccuggaccccaacaacgaggagggcggccacggcgugaagggcugggccuucgacgacggcaacgacguguggaugggcagaaccaucaacgagaccagcagacugggcuacgagaccuucaaggugaucgagggcuggagcaaccccaagagcaagcugcagaucaacagacaggugaucguggacagaggcgacagaagcggcuacagcggcaucuucagcguggagggcaagagcugcaucaacagaugcuucuacguggagcugaucagaggcagaaaggaggagaccgaggugcuguggaccagcaacagcaucgugguguucugcggcaccagcggcaccuacggcaccggcagcuggcccgacggcgccgaccugaaccugaugcccaucuga

SEQ ID NO: 182983 - RNA, 1410 nt, Artificial Sequence; identical to SEQ ID NO: 182982
  derived and/or modified CDS sequence (opt4) from neuraminidase__InfluenzaA__AFN19356

SEQ ID NO: 182984 - RNA, 1410 nt, Artificial Sequence; identical to SEQ ID NO: 182982
  derived and/or modified CDS sequence (opt4) from neuraminidase__InfluenzaA__AFN19358

SEQ ID NO: 182985 - RNA, 1410 nt, Artificial Sequence; identical to SEQ ID NO: 182982
  derived and/or modified CDS sequence (opt4) from neuraminidase__InfluenzaA__AFN19360

SEQ ID NO: 182986 - RNA, 1410 nt, Artificial Sequence
  derived and/or modified CDS sequence (opt4) from neuraminidase__InfluenzaA__AFN19362
augaaccccaaccagaagaucaucaccaucggcagcgugagccugaccaucagcaccaucugcuucuucaugcagaucgccauccugaucaccaccgugacccugcacuucaagcaguacgaguucaacagcccccccaacaaccaggugaugcugugcgagcccaccaucaucgagagaaacaucaccgagaucguguaccugaccaacaccaccaucgagaaggagaucugccccaagcccgccgaguacagaaacuggagcaagccccagugcgacaucaccggcuucgcccccuucagcaaggacaacagcaucagacugagcgccggcggcgacaucugggugaccagagagcccuacgugagcugcgaccccgacaagugcuaccaguucgcccugggccagggcaccacccugaacaacgugcacagcaacaacaccgugagagacagaacccccuacagaacccugcugaugaacgagcugggcgugcccuuccaccugggcaccaagcaggugugcaucgccuggagcagcagcagcugccacgacggcaaggccuggcugcacgugugcaucaccggcgacgacaagaacgccaccgccagcuucaucuacaacggcagacugguggacagcguggugagcuggagcaaggagauccugagaacccaggagagcgagugcgugugcaucaacggcaccugcaccguggugaugaccgacggcagcgccagcggcaaggccgacaccaagauccuguucaucgaggagggcaagaucgugcacaccagcacccugagcggcagcgcccagcacguggaggagugcagcugcuaccccagauaccccggcgugagaugcgugugcagagacaacuggaagggcagcaacagacccaucguggacaucaacaucaaggaccacagcaucgugagcagcuacgugugcagcggccuggugggcgacacccccagaaagaacgacagcagcagcagcagccacugccuggaccccaacaacgaggagggcggccacggcgugaagggcugggccuucgacgacggcaacgacguguggaugggcagaaccaucaacgagaccagcagacugggcuacgagaccuucaaggugaucgagggcuggagcaaccccaagagcaagcugcagaucaacagacaggugaucguggacagaggcgacagaagcggcuacagcggcaucuucagcguggagggcaagagaugcaucaacagaugcuucuacguggagcugaucagaggcagaaaggaggagaccgaggugcuguggaccagcaacagcaucgugguguucugcggcaccagcggcaccuacggcaccggcagcuggcccgacggcgccgaccugaaccugaugcccaucuga

SEQ ID NO: 182987 - RNA, 1410 nt, Artificial Sequence; identical to SEQ ID NO: 182982
  derived and/or modified CDS sequence (opt4) from neuraminidase__InfluenzaA__AFN19364

SEQ ID NO: 182988 - RNA, 1410 nt, Artificial Sequence; identical to SEQ ID NO: 179578
  derived and/or modified CDS sequence (opt4) from neuraminidase__InfluenzaA__AFN19366

SEQ ID NO: 182989 - RNA, 1410 nt, Artificial Sequence; identical to SEQ ID NO: 182982
  derived and/or modified CDS sequence (opt4) from neuraminidase__InfluenzaA__AFN19370

SEQ ID NO: 182990 - RNA, 1410 nt, Artificial Sequence
  derived and/or modified CDS sequence (opt4) from neuraminidase__InfluenzaA__AFN19374
augaaccccaaccagaagaucaucaccaucggcagcgugagccugaccaucagcaccaucugcuucuucaugcagaucgccauccugaucaccaccgugacccugcacuucaagcaguacgaguucaacagcccccccaacaaccaggugaugcugugcgagcccaccaucaucgagagaaacaucaccgagaucguguaccugaccaacaccaccaucgagaaggagaucugccccaagcccgccgaguacagaaacuggagcaagccccagugcggcaucaccggcuucgcccccuucagcaaggacaacagcaucagacugagcgccggcggcgacaucugggugaccagagagcccuacgugagcugcgaccccgacaagugcuaccaguucgcccugggccagggcaccacccugaacaacgugcacagcaacaacaccgugagagacagaacccccuacagaacccugcugaugaacgagcugggcgugcccuuccaccugggcaccaagcaggugugcaucgccuggagcagcagcagcugccacgacggcaaggccuggcugcacgugugcaucaccggcgacgacaagaacgccaccgccagcuucaucuacaacggcagacugguggacagcguggugagcuggagcaaggagauccugagaacccaggagagcgagugcgugugcaucaacggcaccugcaccguggugaugaccgacggcagcgccagcggcaaggccgacaccaagauccuguucaucaaggagggcaagaucgugcacaccagcacccugagcggcagcgcccagcacguggaggagugcagcugcuaccccagauaccccggcgugagaugcgugugcagagacaacuggaagggcagcaacagacccaucguggacaucaacaucaaggaccacagcaucgugagcagcuacgugugcagcggccuggugggcgacacccccagaaagaccgacagcagcagcagcagccacugccuggaccccaacaacgaggagggcggccacggcgugaagggcugggccuucgacgacggcaacgacguguggaugggcagaaccaucaacgagaccagcagacugggcuacgagaccuucaaggugaucgagggcuggagcaaccccaagagcaagcugcagaucaacagacaggugaucguggacagaggcgacagaagcggcuacagcggcaucuucagcguggagggcaagagcugcaucaacagaugcuucuacguggagcugaucagaggcagaaaggaggagaccgaggugcuguggaccagcaacagcaucgugguguucugcggcaccagcggcaccuacggcaccggcagcuggcccgacggcgccgaccugaaccugaugcccaucuga

SEQ ID NO: 182991 - RNA, 1410 nt, Artificial Sequence; identical to SEQ ID NO: 182982
  derived and/or modified CDS sequence (opt4) from neuraminidase__InfluenzaA__AFN19376

SEQ ID NO: 182992 - RNA, 1410 nt, Artificial Sequence; identical to SEQ ID NO: 182982
  derived and/or modified CDS sequence (opt4) from neuraminidase__InfluenzaA__AFN19378

SEQ ID NO: 182993 - RNA, 1410 nt, Artificial Sequence
  derived and/or modified CDS sequence (opt4) from neuraminidase__InfluenzaA__AFN19380
augaaccccaaccagaagaucaucaccaucggcagcgugagccugaccaucagcaccaucugcuucuucaugcagaucgccauccugaucaccaccgugacccugcacuucaagcaguacgaguucaacagcccccccaacaaccaggugaugcugugcgagcccaccaucaucgagagaaacaucaccgagaucguguaccugaccaacaccaccaucgagaaggagaucugccccaagcccagcgaguacagaaacuggagcaagccccagugcgacaucaccggcuucgcccccuucagcaaggacaacagcaucagacugagcgccggcggcgacaucugggugaccagagagcccuacgugagcugcgaccccgacaagugcuaccaguucgcccugggccagggcaccacccugaacaacgugcacagcaacaacaccgugagagacagaacccccuacagaacccugcugaugaacgagcugggcgugcccuuccaccugggcaccaagcaggugugcaucgccuggagcagcagcagcugccacgacggcaaggccuggcugcacgugugcaucaccggcgacgacaagaacgccaccgccagcuucaucuacaacggcagacugguggacagcguggugagcuggagcaaggagauccugagaacccaggagagcgagugcgugugcaucaacggcaccugcaccguggugaugaccgacggcagcgccagcggcaaggccgacaccaagauccuguucaucgaggagggcaagaucgugcacaccagcacccugagcggcagcgcccagcacguggaggagugcagcugcuaccccagauaccccggcgugagaugcgugugcagagacaacuggaagggcagcaacagacccaucguggacaucaacaucaaggaccacagcaucgugagcagcuacgugugcagcggccuggugggcgacacccccagaaagaacgacagcagcagcagcagccacugccuggaccccaacaacgaggagggcggccacggcgugaagggcugggccuucgacgacggcaacgacguguggaugggcagaaccaucaacgagaccagcagacugggcuacgagaccuucaaggugaucgagggcuggagcaaccccaagagcaagcugcagaucaacagacaggugaucguggacagaggcgacagaagcggcuacagcggcaucuucagcguggagggcaagagcugcaucaacagaugcuucuacguggagcugaucagaggcagaaaggaggagaccgaggugcuguggaccagcaacagcaucgugguguucugcggcaccagcggcaccuacggcaccggcagcuggcccgacggcgccgaccugaaccugaugcccaucuga

SEQ ID NO: 182994 - RNA, 1410 nt, Artificial Sequence; identical to SEQ ID NO: 182990
  derived and/or modified CDS sequence (opt4) from neuraminidase__InfluenzaA__AFN19382

SEQ ID NO: 182995 - RNA, 1410 nt, Artificial Sequence; identical to SEQ ID NO: 182982
  derived and/or modified CDS sequence (opt4) from neuraminidase__InfluenzaA__AFN19384

SEQ ID NO: 182996 - RNA, 1410 nt, Artificial Sequence
  derived and/or modified CDS sequence (opt4) from neuraminidase__InfluenzaA__AFN19386
augaaccccaaccagaagaucaucaccaucggcagcgugagccugaccaucagcaccaucugcuucuucaugcagaucgccauccugaucaccaccgugacccugcacuucaagcaguacgaguucaacagcccccccaacaaccaggugaugcugugcgagcccaccaucaucgagagaaacaucaccgagaucguguaccugaccaacaccaccaucgagaaggagaucugccccaagcccgccgaguacagaaacuggagcaagccccagugcgacaucaccggcuucgcccccuucagcaaggacaacagcaucagacugagcgccggcggcgacaucugggugaccagagagcccuacgugagcugcgaccccgacaagugcuaccaguucgcccugggccagggcaccacccugaacaacgugcacagcaacaacaccgugagagacagaacccccuacagaacccugcugaugaacgagcugggcgugcccuuccaccugggcaccaagcaggugugcaucgccuggagcagcagcagcugccacgacggcaaggccuggcugcacgugugcaucaccggcgacgacaagaacgccaccgccagcuucaucuacaacggcagacugguggacagcguggugagcuggagcaaggagauccugagaacccaggagagcgagugcgugugcaucaacggcaccugcaccguggugaugaccgacggcagcgccagcggcaaggccgacaccaagauccuguucaucgaggagggcaagaucgugcacaccagcacccugagcggcagcgcccagcacguggaggagugcagcugcuaccccagauaccccggcgugagaugcgugugcagagacaacuggaagggcagcaacagacccaucguggacaucaacaucaaggaccacagcaucgugagcagcuacgugugcagcggccuggugggcgacacccccagaaagaacgacagcagcagcagcagccacugccuggaccccaacaacgaggagggcggccacggcgugaagggcugggccuucgacgacggcaacgacguguggaugggcagaaccaucaacgagaccagcagacugggcuacgagaccuucaaggugaucgagggcuggagcaaccccaagagcaagcugcagaucaacagacagaucaucguggacagaggcgacagaagcggcuacagcggcaucuucagcguggagggcaagagcugcaucaacagaugcuucuacguggagcugaucagaggcagaaaggaggagaccgaggugcuguggaccagcaacagcaucgugguguucugcggcaccagcggcaccuacggcaccggcagcuggcccgacggcgccgaccugaaccugaugcccaucuga

SEQ ID NO: 182997 - RNA, 1410 nt, Artificial Sequence; identical to SEQ ID NO: 182982
  derived and/or modified CDS sequence (opt4) from neuraminidase__InfluenzaA__AFN19388

SEQ ID NO: 182998 - RNA, 1410 nt, Artificial Sequence; identical to SEQ ID NO: 182982
  derived and/or modified CDS sequence (opt4) from neuraminidase__InfluenzaA__AFN19390

SEQ ID NO: 182999 - RNA, 1410 nt, Artificial Sequence
  derived and/or modified CDS sequence (opt4) from neuraminidase__InfluenzaA__AFN19392
augaaccccaaccagaagaucaucaccaucggcagcgugagccugaccaucagcaccaucugcuucuucaugcagaucgccgugcugaucaccaccgugacccugcacuucaagcaguacgaguucaacagcccccccaacaaccaggugaugcugugcgagcccaccaucaucgagagaaacaucaccgagaucguguaccugaccaacaccaccaucgagaaggagaucugccccaagcccgccgaguacagaaacuggagcaagccccagugcgacaucaccggcuucgcccccuucagcaaggacaacagcaucagacugagcgccggcggcgacaucugggugaccagagagcccuacgugagcugcgaccccgacaagugcuaccaguucgcccugggccagggcaccacccugaacaacgugcacagcaacaacaccgugagagacagaacccccuacagaacccugcugaugaacgagcugggcgugcccuuccaccugggcaccaagcaggugugcaucgccuggagcagcagcagcugccacgacggcaaggccuggcugcacgugugcaucaccggcgacgacaagaacgccaccgccagcuucaucuacaacggcagacugguggacagcguggugagcuggagcaaggagauccugagaacccaggagagcgagugcgugugcaucaacggcaccugcaccguggugaugaccgacggcagcgccagcggcaaggccgacaccaagauccuguucaucgaggagggcaagaucgugcacaccagcacccugagcggcagcgcccagcacguggaggagugcagcugcuaccccagauaccccggcgugagaugcgugugcagagacaacuggaagggcagcaacagacccaucguggacaucaacaucaaggaccacagcaucgugagcagcuacgugugcagcggccuggugggcgacacccccagaaagaacgacagcagcagcagcagccacugccuggaccccaacaacgaggagggcggccacggcgugaagggcugggccuucgacgacggcaacgacguguggaugggcagaaccaucaacgagaccagcagacugggcuacgagaccuucaaggugaucgagggcuggagcaaccccaagagcaagcugcagaucaacagacaggugaucguggacagaggcgacagaagcggcuacagcggcaucuucagcguggagggcaagagcugcaucaacagaugcuucuacguggagcugaucagaggcagaaaggaggagaccgaggugcuguggaccagcaacagcaucgugguguucugcggcaccagcggcaccuacggcaccggcagcuggcccgacggcgccgaccugaaccugaugcccaucuga

SEQ ID NO: 183000 - RNA, 1410 nt, Artificial Sequence; identical to SEQ ID NO: 181847
  derived and/or modified CDS sequence (opt4) from neuraminidase__InfluenzaA__AFN19394

SEQ ID NO: 183001 - RNA, 1410 nt, Artificial Sequence
  derived and/or modified CDS sequence (opt4) from neuraminidase__InfluenzaA__AFN19396
augaaccccaaccagaagaucaucaccaucggcagcgugagccugaccaucagcaccaucugcuucuucaugcagaucgccauccugaucaccaccgugacccugcacuucaagcaguacgaguucaacagcccccccaacaaccaggugaugcugugcgagcccaccaucaucgagagaaacaucaccgagaucguguaccugaccaacaccaccaucgagaaggagaucugccccaagcuggccgaguacagaaacuggagcaagccccagugcgacaucaccggcuucgcccccuucagcaaggacaacagcaucagacugagcgccggcggcgacaucugggugaccagagagcccuacgugagcugcgaccccgacaagugcuaccaguucgcccugggccagggcaccacccugaacaacgugcacagcaacaacaccgugagagacagaacccccuacagaacccugcugaugaacgagcugggcgugcccuuccaccugggcaccaagcaggugugcaucgccuggagcagcagcagcugccacgacggcaaggccuggcugcacgugugcaucaccggcgacgacaagaacgccaccgccagcuucaucuacaacggcagacugguggacagcguggugagcuggagcaaggacauccugagaacccaggagagcgagugcgugugcaucaacggcaccugcgccguggugaugaccgacggcagcgccagcggcaaggccgacaccaagauccuguucaucgaggagggcaagaucgugcacaccagcacccugagcggcagcgcccagcacguggaggagugcagcugcuaccccagauaccccggcgugagaugcgugugcagagacaacuggaagggcagcaacagacccaucguggacaucaacaucaaggaccacagcaucgugagcagcuacgugugcagcggccuggugggcgacacccccagaaagaacgacagcagcagcagcagccacugccuggaccccaacaacgaggagggcggccacggcgugaagggcugggccuucgacgacggcaacgacguguggaugggcagaaccaucaacgagaccagcagacugggcuacgagaccuucaaggugaucgagggcuggagcaaccccaagagcaagcugcagaucaacagacaggugaucguggacagaggcaacagaagcggcuacagcggcaucuucagcguggagggcaagaacugcaucaacagaugcuucuacguggagcugaucagaggcagaaaggaggagaccgaggugcuguggaccagcaacagcaucgugguguucugcggcaccagcggcaccuacggcaccggcagcuggcccgacggcgccgaccugaaccugaugcccaucuga

SEQ ID NO: 183002 - RNA, 1410 nt, Artificial Sequence
  derived and/or modified CDS sequence (opt4) from neuraminidase__InfluenzaA__AFN19398
augaaccccaaccagaagaucaucaccaucggcagcgugagccugaccaucagcaccaucugcuucuucaugcagaucgccauccugaucaccaccgugacccugcacuucaagcaguacgaguucaacagcccccccaacaaccaggugaugcugugcgagcccaccaucaucgagagaaacaucaccgagaucguguaccugaccaacaccaccaucgagaaggagaucugccccaagcccgccgaguacagaaacuggagcaagccccagugcgacaucaccggcuucgcccccuucagcaaggacaacagcaucagacugagcgccggcggcgacaucugggugaccagagagcccuacgugagcugcgaccccgacaagugcuaccaguucgcccugggccagggcaccacccugaacaacgugcacagcaacaacaccgugagagacagaacccccuacagaacccugcugaugaacgagcugggcgugcccuuccaccugggcaccaagcaggugugcaucgccuggagcagcagcagcugccacgacggcaaggccuggcugcacgugugcaucaccggcgacgacaagaacgccaccgccagcuucaucuacaacggcagacugguggacagcguggugagcuggagcaaggagauccugagaacccaggagagcgagugcgugugcaucaacggcaccugcaccguggugaugaccgacggcagcgccagcggcaaggccgacaccaagauccuguucaucgaggagggcaagaucgugcacaccagcacccugagcggcagcgcccagcacguggaggagugcagcugcuaccccagauaccccggcgugagaugcgugugcagagacaacuggagaggcagcaacagacccaucguggacaucaacaucaaggaccacagcaucgugagcagcuacgugugcagcggccuggugggcgacacccccagaaagaacgacagcagcagcagcagccacugccuggaccccaacaacgaggagggcggccacggcgugaagggcugggccuucgacgacggcaacgacguguggaugggcagaaccaucaacgagaccagcagacugggcuacgagaccuucaaggugaucgagggcuggagcaaccccaagagcaagcugcagaucaacagacaggugaucguggacagaggcgacagaagcggcuacagcggcaucuucagcguggagggcaagagcugcaucaacagaugcuucuacguggagcugaucagaggcagaaaggaggagaccgaggugcuguggaccagcaacagcaucgugguguucugcggcaccagcggcaccuacggcaccggcagcuggcccgacggcgccgaccugaaccugaugcccaucuga

SEQ ID NO: 183003 - RNA, 1410 nt, Artificial Sequence
  derived and/or modified CDS sequence (opt4) from neuraminidase__InfluenzaA__AFN19400
augaaccccaaccagaagaucaucaccaucggcagcgugagccugaccaucagcaccaucugcuucuucaugcagaucgccauccugaucaccaccgugacccugcacuucaagcaguacgaguucaacagcccccccaacaaccaggugaugcugugcgagcccaccaucaucgagagaaacaucaccgagaucguguaccugaccaacaccaccaucgagaaggagaucugccccaagcccagcgaguacagaaacuggagcaagccccagugcgacaucaccggcuucgcccccuucagcaaggacaacagcaucagacugagcgacggcggcgacaucugggugaccagagagcccuacgugagcugcgaccccgacaagugcuaccaguucgcccugggccagggcaccacccugaacaacgugcacagcaacaacaccgugagagacagaacccccuacagaacccugcugaugaacgagcugggcgugcccuuccaccugggcaccaagcaggugugcaucgccuggagcagcagcagcugccacgacggcaaggccuggcugcacgugugcaucaccggcgacgacaagaacgccaccgccagcuucaucuacaacggcagacugguggacagcguggugagcuggagcaaggagauccugagaacccaggagagcgagugcgugugcaucaacggcaccugcaccguggugaugaccgacggcagcgccagcggcaaggccgacaccaagauccuguucaucgaggagggcaagaucgugcacaccagcacccugagcggcagcgcccagcacguggaggagugcagcugcuaccccagauaccccggcgugagaugcgugugcagagacaacuggaagggcagcaacagacccaucguggacaucaacaucaaggaccacagcaucgugagcagcuacgugugcagcggccuggugggcgacacccccagaaagaacgacagcagcagcagcagccacugccuggaccccaacaacgaggagggcggccacggcgugaagggcugggccuucgacgacggcaacgacguguggaugggcagaaccaucaacgagaccagcagacugggcuacgagaccuucaaggugaucgagggcuggagcaaccccaagagcaagcugcagaucaacagacaggugaucguggacagaggcgacagaagcggcuacagcggcaucuucagcguggagggcaagagcugcaucaacagaugcuucuacguggagcugaucagaggcagaaaggaggagaccgaggugcuguggaccagcaacagcaucgugguguucugcggcaccagcggcaccuacggcaccggcagcuggcccgacggcgccgaccugaaccugaugcccaucuga

SEQ ID NO: 183004 - RNA, 1410 nt, Artificial Sequence; identical to SEQ ID NO: 182982
  derived and/or modified CDS sequence (opt4) from neuraminidase__InfluenzaA__AFN19402

SEQ ID NO: 183005 - RNA, 1410 nt, Artificial Sequence; identical to SEQ ID NO: 182982
  derived and/or modified CDS sequence (opt4) from neuraminidase__InfluenzaA__AFN19404

SEQ ID NO: 183006 - RNA, 1410 nt, Artificial Sequence; identical to SEQ ID NO: 182982
  derived and/or modified CDS sequence (opt4) from neuraminidase__InfluenzaA__AFN19406

SEQ ID NO: 183007 - RNA, 1410 nt, Artificial Sequence; identical to SEQ ID NO: 182982
  derived and/or modified CDS sequence (opt4) from neuraminidase__InfluenzaA__AFN19410

SEQ ID NO: 183008 - RNA, 1410 nt, Artificial Sequence; identical to SEQ ID NO: 182982
  derived and/or modified CDS sequence (opt4) from neuraminidase__InfluenzaA__AFN19412

SEQ ID NO: 183009 - RNA, 1410 nt, Artificial Sequence; identical to SEQ ID NO: 182982
  derived and/or modified CDS sequence (opt4) from neuraminidase__InfluenzaA__AFN19414

SEQ ID NO: 183010 - RNA, 1410 nt, Artificial Sequence; identical to SEQ ID NO: 182982
  derived and/or modified CDS sequence (opt4) from neuraminidase__InfluenzaA__AFN19416

SEQ ID NO: 183011 - RNA, 1410 nt, Artificial Sequence
  derived and/or modified CDS sequence (opt4) from neuraminidase__InfluenzaA__AFN19418
augaaccccaaccagaagaucaucaccaucggcagcgugagccugaccaucagcaccaucugcuucuucaugcagaucgccauccugaucaccaccgugacccugcacuucaagcaguacgaguucaacagcccccccaacaaccaggugaugcugugcgagcccaccaucaucgagagaaacaucaccgagaucguguaccugaccaacaccaccaucgagaaggagaucugccccaagcccgccgaguacagaaacuggagcaagccccagugcgacaucaccggcuucgcccccuucagcaaggacaacagcaucagacugagcgccggcggcgacaucugggugaccagagagcccuacgugagcugcgaccccgacaagugcuaccaguucgcccugggccagggcaccacccugaacaacgugcacagcaacaacaccgugagagacagaacccccuacagaacccugcugaugaacgagcugggcgugcccuuccaccugggcaccaagcaggugugcaucgccuggagcagcagcagcugccacgacggcaaggccuggcugcacgugugcaucaccggcgacgacaagaacgccaccgccagcuucaucuacaacggcagacugguggacagcguggugagcuggagcaaggagauccugagaacccaggagagcgagugcgugugcaucaacggcaccugcaccguggugaugaccgacggcagcgccagcggcagagccgacaccaagauccuguucaucgaggagggcaagaucgugcacaccagcacccugagcggcagcgcccagcacguggaggagugcagcugcuaccccagauaccccggcgugagaugcgugugcagagacaacuggaagggcagcaacagacccaucguggacaucaacaucaaggaccacagcaucgugagcagcuacgugugcagcggccuggugggcgacacccccagaaagaacgacagcagcagcagcagccacugccuggaccccaacaacgaggagggcggccacggcgugaagggcugggccuucgacgacggcaacgacguguggaugggcagaaccaucaacgagaccagcagacugggcuacgagaccuucaaggugaucgagggcuggagcaaccccaagagcaagcugcagaucaacagacaggugaucguggacagaggcgacagaagcggcuacagcggcaucuucagcguggagggcaagagcugcaucaacagaugcuucuacguggagcugaucagaggcagaaaggaggagaccgaggugcuguggaccagcaacagcaucgugguguucugcggcaccagcggcaccuacggcaccggcagcuggcccgacggcgccgaccugaaccugaugcccaucuga

SEQ ID NO: 183012 - RNA, 1410 nt, Artificial Sequence
  derived and/or modified CDS sequence (opt4) from neuraminidase__InfluenzaA__AFN19420
augaaccccaaccagaagaucaucaccaucggcagcgugagccugaccaucagcaccaucugcuucuucaugcagaucgccauccugaucaccaccgugacccugcacuucaagcaguacgaguucaacagcccccccaacaaccaggugaugcugugcgagcccaccaucaucgagagaaacaugaccgagaucguguaccugaccaacaccaccaucgagaaggagaucugccccaagcccgccgaguacagaaacuggagcaagccccagugcgacaucaccggcuucgcccccuucagcaaggacaacagcaucagacugagcgccggcggcgacaucugggugaccagagagcccuacgugagcugcgaccccgacaagugcuaccaguucgcccugggccagggcaccacccugaacaacgugcacagcaacaacaccgugagagacagaacccccuacagaacccugcugaugaacgagcugggcgugcccuuccaccugggcaccaagcaggugugcaucgccuggagcagcagcagcugccacgacggcaaggccuggcugcacgugugcaucaccggcgacgacaagaacgccaccgccagcuucaucuacaacggcagacugguggacagcguggugagcuggagcaaggagauccugagaacccaggagagcgagugcgugugcaucaacggcaccugcaccguggugaugaccgacggcagcgccagcggcaaggccgacaccaagauccuguucaucgaggagggcaagaucgugcacaccagcacccugagcggcagcgcccagcacguggaggagugcagcugcuaccccagauaccccggcgugagaugcgugugcagagacaacuggaagggcagcaacagacccaucguggacaucaacaucaaggaccacagcaucgugagcagcuacgugugcagcggccuggugggcgacacccccagaaagaacgacagcagcagcagcagccacugccuggaccccaacaacgaggagggcggccacggcgugaagggcugggccuucgacgacggcaacgacguguggaugggcagaaccaucaacgagaccagcagacugggcuacgagaccuucaaggugaucgagggcuggagcaaccccaagagcaagcugcagaucaacagacaggugaucguggacagaggcgacagaagcggcuacagcggcaucuucagcguggagggcaagagcugcaucaacagaugcuucuacguggagcugaucagaggcagaaaggaggagaccgaggugcuguggaccagcaacagcaucgugguguucugcggcaccagcggcaccuacggcaccggcagcuggcccgacggcgccgaccugaaccugaugcccaucuga

SEQ ID NO: 183013 - RNA, 1410 nt, Artificial Sequence
  derived and/or modified CDS sequence (opt4) from neuraminidase__InfluenzaA__AFN19422
augaaccccaaccagaagaucaucaccaucggcagcgugagccugaccaucagcaccaucugcuucuucaugcagaucgccauccugaucaccaccgugacccugcacuucaagcaguacgaguucaacagcccccccaacaaccaggugaugcugugcgagcccaccaucaucgagagaaacaucaccgagaucguguaccugaccaacaccaccaucgagaaggagaucugccccaagcccgccgaguacagaaacuggagcaagccccagugcggcaucaccggcuucgcccccuucagcaaggacaacagcaucagacugagcgccggcggcgacaucugggugaccagagagcccuacgugagcugcgaccccgacaagugcuaccaguucgcccugggccagggcaccacccugaacaacgugcacagcaacaacaccgugagagacagaacccccuacagaacccugcugaugaacgagcugggcgugcccuuccaccugggcaccaagcaggugugcaucgccuggagcagcagcagcugccacgacggcaaggccuggcugcacgugugcaucaccggcaacgacaagaacgccaccgccagcuucaucuacaacggcagacugguggacagcguggugagcuggagcaaggaggugcugagaacccaggagagcgagugcgugugcaucaacggcaccugcaccguggugaugaccgacggcagcgccagcggcaaggccgacaccaagauccuguucaucgaggagggcaagaucgugcacaccagcacccugagcggcagcgcccagcacguggaggagugcagcugcuaccccagauaccccggcgugagaugcgugugcagagacaacuggaagggcagcaacagacccaucguggacaucaacaucaaggaccacagcaucgugagcagcuacgugugcagcggccuggugggcgacacccccagaaagaacgacagcagcagcagcagccacugccuggaccccaacaacgaggagggcggccacggcgugaagggcugggccuucgacgacggcaacgacguguggaugggcagaaccaucaacgagaccagcagacugggcuacgagaccuucaaggugaucgagggcuggagcaaccccaagagcaagcugcagaucaacagacaggugaucguggacagaggcgacagaagcggcuacagcggcaucuucagcguggagggcaagagcugcaucaacagaugcuucuacguggagcugaucagaggcagaaaggaggagaccgaggugcuguggaccagcaacagcaucgugguguucugcggcaccagcggcaccuacggcaccggcagcuggcccgacggcgccgaccugaaccugaugcccaucuga

SEQ ID NO: 183014 - RNA, 1410 nt, Artificial Sequence
  derived and/or modified CDS sequence (opt4) from neuraminidase__InfluenzaA__AFN19426
augaaccccaaccagaagaucaucaccaucggcagcgugagccugaccaucagcaccaucugcuucuucaugcagaucgccauccugaucaccaccgugacccugcacuucaagcaguacgaguucaacagcccccccaacaaccaggugaugcugugcgagcccaccaucaucgagagaaacaucaccgagaucguguaccugaccaacaccaccaucgagaaggagaucugccccaagcccgccgaguacagaaacuggagcaagccccagugcgacaucaccggcuucgcccccuucagcaaggacaacagcaucagacugagcgccggcggcgacaucugggugaccagagagcccuacgugagcugcgaccccgacaagugcuaccaguucgcccugggccagggcaccacccugaacaacgugcacagcaacaacaccgugagagacagaacccccuacagaacccugcugaugaacgagcugggcgugcccuuccaccugggcaccaagcaggugugcaucgccuggagcagcagcagcugccacgacggcaaggccuggcugcacgugugcaucaccggcgacgacgagaacgccaccgccagcuucaucuacaacggcagacugguggacagcguggugagcuggagcaaggagauccugagaacccaggagagcgagugcgugugcaucaacggcaccugcaccguggugaugaccgacggcagcgccagcggcaaggccgacaccaagauccuguucaucgaggagggcaagaucgugcacaccagcacccugagcggcagcgcccagcacguggaggagugcagcugcuaccccagauaccccggcgugagaugcgugugcagagacaacuggaagggcagcaacagacccaucguggacaucaacaucaaggaccacagcaucgugagcagcuacgugugcagcggccuggugggcgacacccccagaaagaacgacagcagcagcagcagccacugccuggaccccaacaacgaggagggcggccacggcgugaagggcugggccuucgacgacggcaacgacguguggaugggcagaaccaucaacgagaccagcagacugggcuacgagaccuucaaggugaucgagggcuggagcaaccccaagagcaagcugcagaucaacagacaggugaucguggacagaggcgacagaagcggcuacagcggcaucuucagcguggagggcaagagcugcaucaacagaugcuucuacguggagcugaucagaggcagaaaggaggagaccgaggugcuguggaccagcaacagcaucgugguguucugcggcaccagcggcaccuacggcaccggcagcuggcccgacggcgccgaccugaaccugaugcccaucuga

SEQ ID NO: 183015 - RNA, 1410 nt, Artificial Sequence; identical to SEQ ID NO: 182982
  derived and/or modified CDS sequence (opt4) from neuraminidase__InfluenzaA__AFN19428

SEQ ID NO: 183016 - RNA, 1410 nt, Artificial Sequence
  derived and/or modified CDS sequence (opt4) from neuraminidase__InfluenzaA__AFN19430
augaaccccaaccagaagaucaucaccaucggcagcgugagccugaccaucagcaccaucugcuucuucaugcagaucgccauccugaucaucaccgugacccugcacuucaagcaguacgaguucaacagcccccccaacaaccaggugaugcugugcgagcccaccaucaucgagagaaacaugaccgagaucguguaccugaccaacaccaccaucgagaaggagaucugccccaagcccgccgaguacagaaacuggagcaagccccagugcgacaucaccggcuucgcccccuucagcaaggacaacagcaucagacugagcgccggcggcgacaucugggugaccagagagcccuacgugagcugcgaccccgacaagugcuaccaguucgcccugggccagggcaccacccugaacaacgugcacagcaacaacaccgugagagacagaacccccuacagaacccugcugaugaacgagcugggcgugcccuuccaccugggcaccaagcaggugugcaucgccuggagcagcagcagcugccacgacggcaaggccuggcugcacgugugcaucaccggcgacgacaagaacgccaccgccagcuucaucuacaacggcagacugguggacagcguggugagcuggagcaaggagauccugagaacccaggagagcgagugcgugugcaucaacggcaccugcaccguggugaugaccgacggcagcgccagcggcaaggccgacaccaagauccuguucaucgaggagggcaagaucgugcacaccagcacccugagcggcagcgcccagcacguggaggagugcagcugcuaccccagauaccccggcgugagaugcgugugcagagacaacuggaagggcagcaacagacccaucguggacaucaacaucaaggaccacagcaucgugagcagcuacgugugcagcggccuggugggcgacacccccagaaagaacgacagcagcagcagcagccacugccuggaccccaacaacgaggagggcggccacggcgugaagggcugggccuucgacgacggcaacgacguguggaugggcagaaccaucaacgagaccagcagacugggcuacgagaccuucaaggugaucgagggcuggagcaaccccaagagcaagcugcagaucaacagacaggugaucguggacagaagcgacagaagcggcuacagcggcaucuucagcguggagggcaagagcugcaucaacagaugcuucuacguggagcugaucagaggcagaaaggaggagaccgaggugcuguggaccagcaacagcaucgugguguucugcggcaccagcggcaccuacggcaccggcagcuggcccgacggcgccgaccugaaccugaugcccaucuga

SEQ ID NO: 183017 - RNA, 1410 nt, Artificial Sequence
  derived and/or modified CDS sequence (opt4) from neuraminidase__InfluenzaA__AFN19432
augaaccccaaccagaagaucaucaccaucggcagcgugagccugaccaucagcaccaucugcuucuucaugcagaucgccauccugaucaccaccgugacccugcacuucaagcaguacgaguucaacagcccccccaacaaccaggugaugcugugcgagcccaccaucaucgagagaaacaucaccgagaucguguaccugaccaacaccaccaucgagaaggagaucugccccaagcccgccgaguacagaaacuggagcaagccccagugcgacaucaccggcuucgcccccuucagcaaggacaacagcaucagacugagcgccggcggcgacaucugggugaccagagagcccuacgugagcugcgaccccgacaagugcuaccaguucgcccugggccagggcaccacccugaacaacgugcacagcaacaacaccgugagagacagaaccccccacagaacccugcugaugaacgagcugggcgugcccuuccaccugggcaccaagcaggugugcaucgccuggagcagcagcagcugccacgacggcaaggccuggcugcacgugugcaucaccggcgacgacaagaacgccaccgccagcuucaucuacaacggcagacugguggacagcguggugagcuggagcaaggagauccugagaacccaggagagcgagugcgugugcaucaacggcaccugcaccguggugaugaccgacggcagcgccagcggcaaggccgacaccaagauccuguucaucgaggagggcaagaucgugcacaccagcacccugagcggcagcgcccagcacguggaggagugcagcugcuaccccagauaccccggcgugagaugcgugugcagagacaacuggaagggcagcaacagacccaucguggacaucaacaucaaggaccacagcaucgugagcagcuacgugugcagcggccuggugggcgacacccccagaaagaacgacagcagcagcagcagccacugccuggaccccaacaacgaggagggcggccacggcgugaagggcugggccuucgacgacggcaacgacguguggaugggcagaaccaucaacgagaccagcagacugggcuacgagaccuucaaggugaucgagggcuggagcaaccccaagagcaagcugcagaucaacagacaggugaucguggacagaggcgacagaagcggcuacagcggcaucuucagcguggagggcaagagcugcaucaacagaugcuucuacguggagcugaucagaggcagaaaggaggagaccgaggugcuguggaccagcaacagcaucgugguguucugcggcaccagcggcaccuacggcaccggcagcuggcccgacggcgccgaccugaaccugaugcccaucuga

SEQ ID NO: 183018 - RNA, 1410 nt, Artificial Sequence
  derived and/or modified CDS sequence (opt4) from neuraminidase__InfluenzaA__AFN19434
augaaccccaaccagaagaucaucaccaucggcagcgugagccugaccaucagcaccaucugcuucuucaugcagaucgccauccugaucaccaccgugacccugcacuucaagcaguacgaguucaacagcccccccaacaaccaggugaugcugugcgagcccaccaucaucgagagaaacaugaccgagaucguguaccugaccaacaccaccaucgagaaggagaucugccccaagcccgccgaguacagaaacuggagcaagccccagugcgacaucaccggcuucgcccccuucagcaaggacaacagcaucagacugagcgccggcggcgacaucugggugaccagagagcccuacgugagcugcgaccccgacaagugcuaccaguucgcccugggccagggcaccacccugaacaacgugcacagcaacaacaccgugagagacagaacccccuacagaacccugcugaugaacgagcugggcgugcccuuccaccugggcaccaagcaggugugcaucgccuggagcagcagcagcugccacgacggcaaggccuggcugcacgugugcaucaccggcgacgacaagaacgccaccgccagcuucaucuacaacggcagacugguggacagcguggugagcuggagcaaggagauccugagaacccaggagagcgagugcgugugcaucaacggcaccugcaccguggugaugaccgacggcagcgccagcggcaaggccgacaccaagauccuguucaucgaggagggcaagaucgugcacaccagcacccugagcggcagcgcccagcacguggaggagugcagcugcuaccccagauaccccggcgugagaugcgugugcagagacaacuggaagggcagcaacagacccaucguggacaucaacaucaaggaccacagcaucgugagcagcuacgugugcagcggccuggugggcgacacccccagaaagaacgacagcagcagcagcagccacugccuggaccccaacaacgaggagggcggccacggcgugaagggcugggccuucgacgacggcaacgacguguggaugggcagaaccaucaacgagaccagcagacugggcuacgagaccuucaaggugaucgagggcuggagcaaccccaagagcaagcugcagaucaacagacaggugaucguggacagaagcgacagaagcggcuacagcggcaucuucagcguggagggcaagagcugcaucaacagaugcuucuacguggagcugaucagaggcagaaaggaggagaccgaggugcuguggaccagcaacagcaucgugguguucugcggcaccagcggcaccuacggcaccggcagcuggcccgacggcgccgaccugaaccugaugcccaucuga

SEQ ID NO: 183019 - RNA, 1410 nt, Artificial Sequence; identical to SEQ ID NO: 182206
  derived and/or modified CDS sequence (opt4) from neuraminidase__InfluenzaA__AFN19436

SEQ ID NO: 183020 - RNA, 1410 nt, Artificial Sequence
  derived and/or modified CDS sequence (opt4) from neuraminidase__InfluenzaA__AFN19438
augaaccccaaccagaagaucaucaccaucggcagcgugagccugaccaucagcaccaucugcuucuucaugcagaucgccauccugaucaccaccgugacccugcacuucaagcaguacgaguucaacagcccccccaacaaccaggugaugcugugcgagcccaccaucaucgagagaaacaugaccgagaucguguaccugaccaacaccaccaucgagaaggagaucugccccaagcccgccgaguacagaaacuggagcaagccccagugcgacaucaccggcuucgcccccuucagcaaggacaacagcaucagacugagcgccggcggcgacaucugggugaccagagagcccuacgugagcugcgaccccgacaagugcuaccaguucgcccugggccagggcaccacccugaacaacgugcacagcaacaacaccgugagagacagaacccccuacagaacccugcugaugaacgagcugggcgugcccuuccaccugggcaccaagcaggugugcaucgccuggagcagcagcagcugccacgacggcaaggccuggcugcacgugugcaucaccggcgacgacaagaacgccaccgccagcuucaucuacaacggcagacugguggacagcguggugagcuggagcaaggagauccugagaacccaggagagcgagugcgugugcaucaacggcaccugcaccguggugaugaccgacggcagcgccagcggcaaggccgacaccaagauccuguucaucgaggagggcaagaucgugcacaccagcacccugagcggcagcgcccagcacguggaggagugcagcugcuaccccagauaccccggcgugagaugcgugugcagagacaacuggaagggcagcaacagacccaucguggacaucaacaucaaggaccacagcaucgugagcagcuacgugugcagcggccuggugggcgacacccccagaaagaacgacagcagcagcagcagccacugccuggaccccaacaacgaggagggcggccacggcgugaagggcugggccuucgacgacggcaacgacguguggaugggcagaaccaucaacgagaccagcagacugggcuacgagaccuucaaggugaucgagggcuggagcaaccccaagagcaagcugcagaucaacagacaggugaucguggacagaagcgacagaagcggcuacagcggcaucuucagcguggagggcaagagcugcaucaacagaugcuucuacguggagcugaucagaggcagaaaggaggagaccgaggugcuguggaccagcaacagcaucgugguguucugcggcaccagcggcaccuacggcaccggcagcuggcccgacggcgccgaccugaaccugaugagcaucuga

SEQ ID NO: 183021 - RNA, 1410 nt, Artificial Sequence
  derived and/or modified CDS sequence (opt4) from neuraminidase__InfluenzaA__AFN19442
augaaccccaaccagaagaucaucaccaucggcagcgugagccugaccaucagcaccaucugcuucuucaugcagaucgccauccugaucaccaccgugacccugcacuucaagcaguacgaguucaacagcccccccaacaaccaggugaugcugugcgagcccaccaucaucgagagaaacaucaccgagaucguguaccugaccaacaccaucaucgagaaggagaucugccccaagcccaccgaguacagaaacuggagcaagccccagugcgacaucaccggcuucgcccccuucagcaaggacaacagcaucagacugagcgccggcggcgacaucugggugaccagagagcccuacgugagcugcgaccccgacaagugcuaccaguucgcccugggccagggcaccacccugaacaacgugcacagcaacaacaccgugagagacagaacccccuacagaacccugcugaugaacgagcugggcgugcccuuccaccugggcaccaagcaggugugcaucgccuggagcagcagcagcugccacgacggcaaggccuggcugcacgugugcaucaccggcgacgacaagaacgccaccgccagcuucaucuacaacggcagacugguggacagcguggugagcuggagcaaggagauccugagaacccaggagagcgagugcgugugcaucaacggcaccugcaccguggugaugaccgacggcagcgccagcggcaaggccgacaccaagauccuguucaucgaggagggcaagaucgugcacaccagcacccugagcggcagcgcccagcacguggaggagugcagcugcuaccccagauaccccggcgugagaugcgugugcagagacaacuggaagggcagcaacagacccaucguggacaucaacaucaaggaccacagcaucgugagcagcuacgugugcagcggccuggugggcgacacccccagaaagaacgacagcagcagcagcagccacugccuggaccccaacaacgaggagggcggccacggcgugaagggcugggccuucgacgacggcaacgacguguggaugggcagaaccaucaacgagaccagcagacugggcuacgagaccuucaaggugaucgagggcuggagcaaccccaagagcaagcugcagaucaacagacaggugaucguggacagaggcgacagaagcggcuacagcggcaucuucagcguggagggcaagagcugcaucaacagaugcuucuacguggagcugaucagaggcagaaaggaggagaccgaggugcuguggaccagcaacagcaucgugguguucugcggcaccagcggcaccuacggcaccggcagcuggcccgacggcgccgaccugaaccugaugcacaucuga

SEQ ID NO: 183022 - RNA, 1410 nt, Artificial Sequence; identical to SEQ ID NO: 182206
  derived and/or modified CDS sequence (opt4) from neuraminidase__InfluenzaA__AFN19446

SEQ ID NO: 183023 - RNA, 1410 nt, Artificial Sequence; identical to SEQ ID NO: 182206
  derived and/or modified CDS sequence (opt4) from neuraminidase__InfluenzaA__AFN19448

SEQ ID NO: 183024 - RNA, 1410 nt, Artificial Sequence; identical to SEQ ID NO: 182982
  derived and/or modified CDS sequence (opt4) from neuraminidase__InfluenzaA__AFN19458

SEQ ID NO: 183025 - RNA, 1410 nt, Artificial Sequence
  derived and/or modified CDS sequence (opt4) from neuraminidase__InfluenzaA__AFN19460
augaaccccaaccagaagaucaucaccaucggcagcgugagccugaccaucagcaccaucugcuucuucaugcagaucgccauccugaucaccaccgugacccugcacuucaagcaguacgaguucaacagcccccccaacaaccaggugaugcugugcgagcccaccaucaucgagagaaacaucaccgagaucguguaccugaccaacaccaccaucgagaaggagaucugccccaagcccgccgaguacagaaacuggagcaagccccagugcggcaucaccggcuucgcccccuucagcaaggacaacagcaucagacugagcgccggcggcgacaucugggugaccagagagcccuacgugagcugcgaccccgacaagugcuaccaguucgcccugggccagggcaccacccugaacaacaugcacagcaacaacaccgugagagacagaacccccuacagaacccugcugaugaacgagcugggcgugcccuuccaccugggcaccaagcaggugugcaucgccuggagcagcagcagcugccacgacggcaaggccuggcugcacgugugcaucaccggcgacgacaagaacgccaccgccagcuucaucuacaacggcagacugguggacagcguggugagcuggagcaacgagauccugagaacccaggagagcgagugcgugugcaucaacggcaccugcaccguggugaugaccgacggcagcgccagcggcaaggccgacaccaagauccuguucaucgaggagggcaagaucgugcacaccagcacccugagcggcagcgcccagcacguggaggagugcagcugcuaccccagauaccccggcgugagaugcgugugcagagacaacuggaagggcagcaacagacccaucguggacaucaacaucaaggaccacagcaucgugagcagcuacgugugcagcggccuggugggcgacacccccagaaagaacgacagcagcagcagcagccacugccuggaccccaacaacgaggagggcggccacggcgugaagggcugggccuucgacgacggcaacgacguguggaugggcagaaccaucaacgagaccagcagacugggcuacgagaccuucaaggugaucgagggcuggagcaaccccaagagcaagcugcagaucaacagacaggugaucguggacagaggcgacagaagcggcuacagcggcaucuucagcguggagggcaagagcugcaucaacagaugcuucuacguggagcugaucagaggcagaaaggaggagaacgaggugcuguggaccagcaacagcaucgugguguucugcggcaccagcggcaccuacggcaccggcagcuggcccgacggcgccgaccugaaccugaugcccaucuga

SEQ ID NO: 183026 - RNA, 1410 nt, Artificial Sequence; identical to SEQ ID NO: 182206
  derived and/or modified CDS sequence (opt4) from neuraminidase__InfluenzaA__AFN19462

SEQ ID NO: 183027 - RNA, 1410 nt, Artificial Sequence
  derived and/or modified CDS sequence (opt4) from neuraminidase__InfluenzaA__AFN19466
augaaccccaaccagaagaucaucaccaucggcagcgugagccugaccaucagcaccaucugcuucuucaugcagaucgccauccugaucaccaccgugacccugcacuucaagcaguacgaguucaacagcccccccaacaaccaggugaugcugugcgagcccaccaucaucgagagaaacaucaccgagaucguguaccugaccaacaccaccaucgagaaggagaucugccccaagcccgccgaguacagaaacuggagcaagccccagugcgacaucgccggcuucgcccccuucagcaaggacaacagcaucagacugagcgccggcggcgacaucugggugaccagagagcccuacgugagcugcgaccccgacaagugcuaccaguucgcccugggccagggcaccacccugaacaacgugcacagcaacaacaccgugagagacagaacccccuacagaacccugcugaugaacgagcugggcgugcccuuccaccugggcaccaagcaggugugcaucgccuggagcagcagcagcugccacgacggcaaggccuggcugcacgugugcaucaccggcgacgacaagaacgccaccgccagcuucaucuacaacggcagacugguggacagcguggugagcuggagcaaggagauccugagaacccaggagagcgagugcgugugcaucaacggcaccugcaccguggugaugaccgacggcagcgccagcggcaaggccgacaccaagauccuguucaucgaggagggcaagaucgugcacaccagcacccugagcggcagcgcccagcacguggaggagugcagcugcuaccccagauaccccggcgugagaugcgugugcagagacaacuggaagggcagcaacagacccaucguggacaucaacaucaaggaccacagcaucgugagcagcuacgugugcagcggccuggugggcgacacccccagaaagaacgacagcagcagcagcagccacugccuggaccccaacaacgaggagggcggccacggcgugaagggcugggccuucgacgacggcaacgacguguggaugggcagaaccaucaacgagaccagcagacugggcuacgagaccuucaaggugaucgagggcuggagcaaccccaagagcaagcugcagaucaacagacaggugaucguggacagaggcgacagaagcggcuacagcggcaucuucagcguggagggcaagagcugcaucaacagaugcuucuacguggagcugaucagaggcagaaaggaggagaccgaggugcuguggaccagcaacagcaucgugguguucugcggcaccagcggcaccuacggcaccggcagcuggcccgacggcgccgaccugaaccugaugcccaucuga

SEQ ID NO: 183028 - RNA, 1410 nt, Artificial Sequence; identical to SEQ ID NO: 182206
  derived and/or modified CDS sequence (opt4) from neuraminidase__InfluenzaA__AFN19468

SEQ ID NO: 183029 - RNA, 1410 nt, Artificial Sequence
  derived and/or modified CDS sequence (opt4) from neuraminidase__InfluenzaA__AFN19470
augaaccccaaccagaagaucaucaccaucggcagcgugagccugaccaucagcaccaucugcuucuucaugcagaucgccauccugaucaccaccgugacccugcacuucaagcaguacgaguucaacagcccccccaacaaccaggugaugcugugcgagcccaccaucaucgagagaaacaugaccgagaucguguaccugaccaacaccaccaucgagaaggagaucugccccaagcccgccgaguacagaaacuggagcaagccccagugcgacaucaccggcuucgcccccuucagcaaggacaacagcaucagacugagcgccggcggcgacaucugggugaccagagagcccuacgugagcugcgaccccgacaagugcuaccaguucgcccugggccagggcaccacccugaacaacgugcacagcaacaacaccgugagagacagaacccccuacagaacccugcugaugaacgagcugggcgugcccuuccaccugggcaccaagcaggugugcaucgccuggagcagcagcagcugccacgacggcaaggccuggcugcacgugugcaucaccggcgacgacaagaacgccaccgccagcuucaucuacaacggcagacugguggacagcguggugagcuggagcaaggagauccugagaacccaggagagcgagugcgugugcaucaacggcaccugcaccguggugaugaccgacggcagcgccagcggcaaggccgacaccaagauccuguucaucgaggagggcaagaucgugcacaccagcacccugagcggcagcgcccagcacguggaggagugcagcugcuaccccagauaccccggcgugagaugcgugugcagagacaacuggaagggcagcaacagacccaucguggacaucaacaucaaggaccacagcaucgugagcagcuacgugugcagcggccuggugggcgacacccccagaaagaacgacagcagcagcagcagccacugccuggaccccaacaacgaggagggcggccacggcgugaagggcugggccuucgacgacggcaacgacguguggaugggcagaaccaucaacgagaccagcagacugggcuacgagaccuucaaggugaucgagggcuggagcaaccccaagagcaagcugcagaucaacagacaggugaucgugaacaagagcgacagaagcggcuacagcggcaucuucagcguggagggcaagagcugcaucaacagaugcuucuacguggagcugaucagaggcagaaaggaggagaccgaggugcuguggaccagcaacagcaucgugguguucugcggcaccagcggcaccuacggcaccggcagcuggcccgacggcgccgaccugaaccugaugcccaucuga

SEQ ID NO: 183030 - RNA, 1410 nt, Artificial Sequence; identical to SEQ ID NO: 182982
  derived and/or modified CDS sequence (opt4) from neuraminidase__InfluenzaA__AFN19472

SEQ ID NO: 183031 - RNA, 1410 nt, Artificial Sequence
  derived and/or modified CDS sequence (opt4) from neuraminidase__InfluenzaA__AFN19476
augaaccccaaccagaagaucaucaccaucggcagcgugagccugaccaucagcaccaucugcuucuucaugcagaucgccauccugaucaccaccgugacccugcacuucaagcaguacgaguucaacagcccccccaacaaccaggugaugcugugcgagcccaccaucaucgagagaaacaucaccgagaucguguaccugaccaacaccaccaucgagaaggagaucugccccaagcccgccgaguacagaaacuggagcaagccccagugcggcaucaccggcuucgccccccugagcaaggacaacagcaucagacugagcgccggcggcgacaucugggugaccagagagcccuacgugagcugcgaccccgacaagugcuaccaguucgcccugggccagggcaccacccugaacaacgugcacagcaacaacaccgugagagacagaacccccuacagaacccugcugaugaacgagcugggcgugcccuuccaccugggcaccaagcaggugugcaucgccuggagcagcagcagcugccacgacggcaaggccuggcugcacgugugcaucaccggcgacgacaagaacgccaccgccagcuucaucuacaacggcagacugguggacagcguggugagcuggagcaaggagauccugagaacccaggagagcgagugcgugugcaucaacggcaccugcaccguggugaugaccgacggcagcgccagcggcaaggccgacaccaagauccuguucaucgaggagggcaagaucgugcacaccagcacccugagcggcagcgcccagcacguggaggagugcagcugcuaccccagauaccccggcgugagaugcgugugcagagacaacuggaagggcagcaacagacccaucguggacaucaacaucaaggaccacagcaucgugagcagcuacgugugcagcggccuggugggcgacacccccagaaagaacgacagcagcagcagcagccacugccuggaccccaacaacgaggagggcggccacggcgugaagggcugggccuucgacgacggcaacgacguguggaugggcagaaccaucaacgagaccagcagacugggcuacgagaccuucaaggugaucgagggcuggagcaaccccaagagcaagcugcagaucaacagacaggugaucguggacagaggcgacagaagcggcuacagcggcaucuucagcguggagggcaagagcugcaucaacagaugcuucuacguggagcugaucagaggcagaaaggaggagaccgaggugcuguggaccagcaacagcaucgugguguucugcggcaccagcggcaccuacggcaccggcagcuggcccgacggcgccgaccugaaccugaugcccaucuga

SEQ ID NO: 183032 - RNA, 1410 nt, Artificial Sequence; identical to SEQ ID NO: 182982
  derived and/or modified CDS sequence (opt4) from neuraminidase__InfluenzaA__AFN19478

SEQ ID NO: 183033 - RNA, 1410 nt, Artificial Sequence
  derived and/or modified CDS sequence (opt4) from neuraminidase__InfluenzaA__AFN19480
augaaccccaaccagaagaucaucaccaucggcagcgugagccugaccaucagcaccaucugcuucuucaugcagaucgccauccugaucaccaccgugacccugcacuucaagcaguacgaguucaacagcccccccaacaaccaggugaugcugugcgagcccaccaucaucgagagaaacaugaccgagaucguguaccugaccaacaccaccaucgagaaggagaucugccccaagcccgccgaguacagaaacuggagcaagccccagugcgacaucaccggcuucgcccccuucagcaaggacaacagcaucagacugagcgccggcggcgacaucugggugaccagagagcccuacgugagcugcgaccccgacaagugcuaccaguucgcccugggccagggcaccacccugaacaacgugcacagcaacaacaccgugggcgacagaacccccuacagaacccugcugaugaacgagcugggcgugcccuuccaccugggcaccaagcaggugugcaucgccuggagcagcagcagcugccacgacggcaaggccuggcugcacgugugcaucaccggcgacgacaagaacgccaccgccagcuucaucuacaacggcagacugguggacagcguggugagcuggagcaaggagauccugagaacccaggagagcgagugcgugugcaucaacggcaccugcaccguggugaugaccgacggcagcgccagcggcaaggccgacaccaagauccuguucaucgaggagggcaagaucgugcacaccagcacccugagcggcagcgcccagcacguggaggagugcagcugcuaccccagauaccccggcgugagaugcgugugcagagacaacuggaagggcagcaacagacccaucguggacaucaacaucaaggaccacagcaucgugagcagcuacgugugcagcggccuggugggcgacacccccagaaagaacgacagcagcagcagcagccacugccuggaccccaacaacgaggagggcggccacggcgugaagggcugggccuucgacgacggcaacgacguguggaugggcagaaccaucaacgagaccagcagacugggcuacgagaccuucaaggugaucgagggcuggagcaaccccaagagcaagcugcagaucaacagacaggugaucguggacagaagcgacagaagcggcuacagcggcaucuucagcguggagggcaagagcugcaucaacagaugcuucuacguggagcugaucagaggcagaaaggaggagaccgaggugcuguggaccagcaacagcaucgugguguucugcggcaccagcggcaccuacggcaccggcagcuggcccgacggcgccgaccugaaccugaugcccaucuga

SEQ ID NO: 183034 - RNA, 1410 nt, Artificial Sequence
  derived and/or modified CDS sequence (opt4) from neuraminidase__InfluenzaA__AFN19482
augaaccccaaccagaagaucaucaccaucggcagcgugagccugaccaucagcaccaucugcuucuucaugcagaucgccauccugaucaccaccgugacccugcacuucaagcaguacgaguucaacagcccccccaacaaccaggugaugcugugcgagcccaccaucaucgagagaaacaucaccgagaucguguaccugaccaacaccaccaucgagaaggagaucugccccaagcccgccaaguacagaaacuggagcaagccccagugcgacaucaccggcuucgcccccuucagcaaggacaacagcaucagacugagcgccggcggcgacaucugggugaccagagagcccuacgugagcugcgaccccgacaagugcuaccaguucgcccugggccagggcaccacccugaacaacgugcacagcaacaacaccgugagagacagaacccccuacagaacccugcugaugaacgagcugggcgugcccuuccaccugggcaccaagcaggugugcaucgccuggagcagcagcagcugccacgacggcaaggccuggcugcacgugugcaucaccggcgacgacaagaacgccaccgccagcuucaucuacaacggcagacugguggacagcguggugagcuggagcaaggagauccugagaacccaggagagcgagugcgugugcaucaacggcaccugcaccguggugaugaccgacggcagcgccagcggcaaggccgacaccaagauccuguucaucgaggagggcaagaucgugcacaccagcacccugagcggcagcgcccagcacguggaggagugcagcugcuaccccagauaccccggcgugagaugcgugugcagagacaacuggaagggcagcaacagacccaucguggacaucaacaucaaggaccacagcaucgugagcagcuacgugugcagcggccuggugggcgacacccccagaaagaacgacagcagcagcagcagccacugccuggaccccaacaacgaggagggcggccacggcgugaagggcugggccuucgacgacggcaacgacguguggaugggcagaaccaucaacgagaccagcagacugggcuacgagaccuucaaggugaucgagggcuggagcaaccccaagagcaagcugcagaucaacagacaggugaucguggacagaagcgacagaagcggcuacagcggcaucuucagcguggagggcaagagcugcaucaacagaugcuucuacguggagcugaucagaggcagaaaggaggagaccgaggugcuguggaccagcaacagcaucgugguguucugcggcaccagcggcaccuacggcaccggcagcuggcccgacggcgccgaccugaaccugaugcccaucuga

SEQ ID NO: 183035 - RNA, 1410 nt, Artificial Sequence; identical to SEQ ID NO: 182206
  derived and/or modified CDS sequence (opt4) from neuraminidase__InfluenzaA__AFN19484

SEQ ID NO: 183036 - RNA, 1410 nt, Artificial Sequence; identical to SEQ ID NO: 182982
  derived and/or modified CDS sequence (opt4) from neuraminidase__InfluenzaA__AFN19488

SEQ ID NO: 183037 - RNA, 1410 nt, Artificial Sequence
  derived and/or modified CDS sequence (opt4) from neuraminidase__InfluenzaA__AFN19492
augaaccccaaccagaagaucaucaccaucggcagcgugagccugaccaucagcaccaucugcuucuucaugcagaucgccauccugaucaccaccgugacccugcacuucaagcaguacgaguucaacagcccccccaacaaccaggugaugcugugcgagcccaccaucaucgagagaaacaucaccgagaucguguaccugaccaacaccaccaucgagaaggagaucugccccaagcccgccgaguacagaaacuggagcaagccccagugcgacaucaccggcuucgcccccuucagcaaggacaacagcaucagacugagcgccggcggcgacaucugggugaccagagagcccuacgugagcugcgaccccgacaagugcuaccaguucgcccugggccagggcaccacccugaacaacgugcacagcaacaacaccgugagagacagaacccccuacagaacccugcugaugaacgagcugggcgugcccuuccaccugggcaccaagcaggugugcaucgccuggagcagcagcagcugccacgacggcaaggccuggcugcacgugugcaucaccggcgacgacaagaacgccaccgccagcuucaucuacaacggcaagcugguggacagcguggugagcuggagcaaggagauccugagaacccaggagagcgagugcgugugcaucaacggcaccugcaccguggugaugaccgacggcagcgccagcggcaaggccgacaccaagauccuguucaucgaggagggcaagaucgugcacaccagcacccugagcggcagcgcccagcacguggaggagugcagcugcuaccccagauaccccggcgugagaugcgugugcagagacaacuggaagggcagcaacagacccaucguggacaucaacaucaaggaccacagcaucgugagcagcuacgugugcagcggccuggugggcgacacccccagaaagaacgacagcagcagcagcagccacugccuggaccccaacaacgaggagggcggccacggcgugaagggcugggccuucgacgacggcaacgacguguggaugggcagaaccaucaacgagaccagcagacugggcuacgagaccuucaaggugaucgagggcuggagcaaccccaagagcaagcugcagaucaacagacaggugaucguggacagaggcgacagaagcggcuacagcggcaucuucagcguggagggcaagagcugcaucaacagaugcuucuacguggagcugaucagaggcagaaaggaggagaccgaggugcuguggaccagcaacagcaucgugguguucugcggcaccagcggcaccuacggcaccggcagcuggcccgacggcgccgaccugaaccugaugcccaucuga

SEQ ID NO: 183038 - RNA, 1410 nt, Artificial Sequence
  derived and/or modified CDS sequence (opt4) from neuraminidase__InfluenzaA__AFN19494
augaaccccaaccagaagaucaucaccaucggcagcgugagccugaccaucagcaccaucugcuucuucaugcagaucgccauccugaucaccaccgugacccugcacuucaagcaguacgaguucaacagcccccccaacaaccaggugaugcugugcgagcccaccaucaucgagagaaacaucaccgagaucguguaccugaccaacaccaccaucgagaaggagaucugccccaagcuggccgaguacagaaacuggagcaagccccagugcgacaucaccggcuucgcccccuucagcaaggacaacagcaucagacugagcgccggcggcgacaucugggugaccagagagcccuacgugagcugcgaccccgacaagugcuaccaguucgcccugggccagggcaccacccugaacaacaugcacagcaacaacaccgugagagacagaacccccuacagaacccugcugaugaacgagcugggcgugcccuuccaccugggcaccaagcaggugugcaucgccuggagcagcagcagcugccacgacggcaaggccuggcugcacgugugcaucaccggcgacgacaagaacgccaccgccagcuucaucuacaacggcagacugguggacagcguggugagcuggagcaaggagauccugagaacccaggagagcgagugcgugugcaucaacggcaccugcaccguggugaugaccgacggcagcgccagcggcaaggccgacaccaagauccuguucaucgaggagggcaagaucgugcacaccagcacccugagcggcagcgcccagcacguggaggagugcagcugcuaccccagauaccccggcgugagaugcgugugcagagacaacuggaagggcagcaacagacccaucguggacaucaacaucaaggaccacagcaucgugagcagcuacgugugcagcggccuggugggcgacacccccagaaagaacgacagcagcagcagcagccacugccuggaccccaacaacgaggagggcggccacggcgugaagggcugggccuucgacgacggcaacgacguguggaugggcagaaccaucaacgagaccagcagacugggcuacgagaccuucaaggugaucgagggcuggagcaaccccaagagcaagcugcagaucaacagacaggugaucguggacagaggcaacagaagcggcuacagcggcaucuucagcguggagggcaagagcugcaucaacagaugcuucuacguggagcugaucagaggcagaaaggaggagaccgaggugcuguggaccagcaacagcaucgugguguucugcggcaccagcggcaccuacggcaccggcagcuggcccgacggcgccgaccugaaccugaugcccaucuga

SEQ ID NO: 183039 - RNA, 1410 nt, Artificial Sequence; identical to SEQ ID NO: 181847
  derived and/or modified CDS sequence (opt4) from neuraminidase__InfluenzaA__AFN19496

SEQ ID NO: 183040 - RNA, 1410 nt, Artificial Sequence
  derived and/or modified CDS sequence (opt4) from neuraminidase__InfluenzaA__AFN19498
augaaccccaaccagaagaucaucaccaucggcagcgugagccugaccaucagcaccaucugcuucuucaugcagaucgccauccugaucaccaccgugacccugcacuucaagcaguacgaguucaacagcccccccaacaaccaggugaugcugugcgagcccaccaucaucgagagaaacaucaccgagaucguguaccugaccaacaccaccaucgagaaggagaucugccccaagcuggccgaguacagaaacuggagcaagccccagugcgacaucaccggcuucgcccccuucagcaaggacaacagcaucagacugagcgccggcggcgacaucugggugaccagagagcccuacgugagcugcgaccccgacaagugcuaccaguucgcccugggccagggcaccacccugaacaacgugcacagcaacaacaccgugagagacagaacccccuacagaacccugcugaugaacgagcugggcgugcccuuccaccugggcaccaagcaggugugcaucgccuggagcagcagcagcugccacgacggcaaggccuggcugcacgugugcaucaccggcgacgacaagaacgccaccgccagcuucaucuacaacggcaagcugguggacagcguggugagcuggagcaaggagauccugagaacccaggagagcgagugcgugugcaucaacggcaccugcaccguggugaugaccgacggcagcgccagcggcaaggccgacaccaagauccuguucaucgaggagggcaagaucgugcacaccagcacccugagcggcagcgcccagcacguggaggagugcagcugcuaccccagauaccccggcgugagaugcgugugcagagacaacuggaagggcagcaacagacccaucguggacaucaacaucaaggaccacagcaucgugagcagcuacgugugcagcggccuggugggcgacacccccagaaagaacgacagcagcagcagcagccacugccuggaccccaacaacgaggagggcggccacggcgugaagggcugggccuucgacgacggcaacgacguguggaugggcagaaccaucaacgagaccagcagacugggcuacgagaccuucaaggugaucgagggcuggagcaaccccaagagcaagcugcagaucaacagacaggugaucguggacagaggcaacagaagcggcuacagcggcaucuucagcguggagggcaagagcugcaucaacagaugcuucuacguggagcugaucagaggcagaaccgaggagaccgaggugcuguggaccagcaacagcaucgugguguucugcggcaccagcggcaccuacggcaccggcagcuggcccgacggcgccgaccugaaccugaugcccaucuga

SEQ ID NO: 183041 - RNA, 1410 nt, Artificial Sequence; identical to SEQ ID NO: 182990
  derived and/or modified CDS sequence (opt4) from neuraminidase__InfluenzaA__AFN19500

SEQ ID NO: 183042 - RNA, 1410 nt, Artificial Sequence; identical to SEQ ID NO: 182982
  derived and/or modified CDS sequence (opt4) from neuraminidase__InfluenzaA__AFN19502

SEQ ID NO: 183043 - RNA, 1410 nt, Artificial Sequence; identical to SEQ ID NO: 179578
  derived and/or modified CDS sequence (opt4) from neuraminidase__InfluenzaA__AFN19504

SEQ ID NO: 183044 - RNA, 1410 nt, Artificial Sequence; identical to SEQ ID NO: 179578
  derived and/or modified CDS sequence (opt4) from neuraminidase__InfluenzaA__AFN19506

SEQ ID NO: 183045 - RNA, 1410 nt, Artificial Sequence; identical to SEQ ID NO: 182990
  derived and/or modified CDS sequence (opt4) from neuraminidase__InfluenzaA__AFN19508

SEQ ID NO: 183046 - RNA, 1410 nt, Artificial Sequence; identical to SEQ ID NO: 182982
  derived and/or modified CDS sequence (opt4) from neuraminidase__InfluenzaA__AFN19510

SEQ ID NO: 183047 - RNA, 1410 nt, Artificial Sequence; identical to SEQ ID NO: 182982
  derived and/or modified CDS sequence (opt4) from neuraminidase__InfluenzaA__AFN19512

SEQ ID NO: 183048 - RNA, 1410 nt, Artificial Sequence; identical to SEQ ID NO: 182982
  derived and/or modified CDS sequence (opt4) from neuraminidase__InfluenzaA__AFN19516

SEQ ID NO: 183049 - RNA, 1410 nt, Artificial Sequence; identical to SEQ ID NO: 182990
  derived and/or modified CDS sequence (opt4) from neuraminidase__InfluenzaA__AFN19518

SEQ ID NO: 183050 - RNA, 1410 nt, Artificial Sequence; identical to SEQ ID NO: 182990
  derived and/or modified CDS sequence (opt4) from neuraminidase__InfluenzaA__AFN19520

SEQ ID NO: 183051 - RNA, 1410 nt, Artificial Sequence; identical to SEQ ID NO: 182982
  derived and/or modified CDS sequence (opt4) from neuraminidase__InfluenzaA__AFN19522

SEQ ID NO: 183052 - RNA, 1410 nt, Artificial Sequence
  derived and/or modified CDS sequence (opt4) from neuraminidase__InfluenzaA__AFN19524
augaaccccaaccagaagaucaucaccaucggcagcgugagccugaccaucagcaccaucugcuucuucaugcagaucgccauccugaucaccaccgugacccugcacuucaagcaguacgaguucaacagcccccccaacaaccaggugaugcugugcgagcccaccaucaucgagagaaacaucaccgagaucguguaccugaccaacaccaccaucgagaaggagaucugccccaagcccgccgaguacagaaacuggagcaagccccagugcgacaucaccggcuucgcccccuucagcaaggacaacagcaucagacugagcgccggcggcgacaucugggugaccagagagcccuacgugagcugcgaccccgacaagugcuaccaguucgcccugggccagggcaccacccugaacaacgugcacagcaacaacaccgugagagacagaacccccuacagaacccugcugaugaacgagcugggcgugcccuuccaccugggcaccaagcaggugugcaucgccuggagcagcagcagcugccacgacggcaaggccuggcugcacgugugcaucaccggcgacgacaagaacgccaccgccagcuucaucuacaacggcagacugguggacagcguggugagcuggagcaaggagauccugagaacccaggagagcgagugcgugugcaucaacggcaccugcaccguggugaugaccgacggcagcgccagcggcaaggccgacaccaagauccuguucaucgaggagggcaagaucgugcacaccagcacccugagcggcagcgcccagcacguggaggagugcagcugcuaccccagauaccccggcgugagaugcgugugcagagacaacuggaagggcagcaacagacccaucguggacaucaacaucaaggaccacagcaucgugagcagcuacgugugcagcggccuggugggcgacacccccagaaagaacgacagcagcagcagcagccacugccuggaccccaacaacgaggagggcggccacggcgugaagggcugggccuucgacgacggcaacgacguguggaugggcagaaccaucaacgagaccagcagacugggcuacgagaccuucaaggugaucgagggcuggagcaaccccaagagcaagcugcagaucaacagacaggugaucguggacagaggcgacagaagcggcuacagcggcaucuucagcguggagggcaagagcugcaucaacagaugcuucuacguggagcugaucagaggcagaaaggaggagaccgaggugcuguggaccagcaacagcaucgugguguucugcggcaccagcggcaccuacggcaccggcagcuggcccgacggcgccgaccugagccugaugcccaucuga

SEQ ID NO: 183053 - RNA, 1410 nt, Artificial Sequence
  derived and/or modified CDS sequence (opt4) from neuraminidase__InfluenzaA__AFN19526
augaaccccaaccagaagaucaucaccaucggcagcgugagccugaccaucagcaccaucugcuucuucaugcagaucgccauccugaucaccaccgugacccugcacuucaagcagugcgaguucaacagcccccccaacaaccaggugaugcugugcgagcccaccaucaucgagagaaacaucaccgagaucguguaccugaccaacaccaccaccgagaaggagaucugccccaagcccgccgaguacagaaacuggagcaagccccagugcgacaucaccggcuucgcccccuucagcaaggacaacagcaucagacugagcgccggcggcgacaucugggugaccagagagcccuacgugagcugcgaccccgacaagugcuaccaguucgcccugggccagggcaccacccugaacaacgugcacagcaacaacaccgugagagacagaacccccuacagaacccugcugaugaacgagcugggcgugcccuuccaccugggcaccaagcaggugugcaucgccuggagcagcagcagcugccacgacggcaaggccuggcugcacgugugcaucaccggcgacgacaagaacgccaccgccagcuucaucuacaacggcagacugguggacagcguggugagcuggagcaaggagauccugagaacccaggagagcgagugcgugugcaucaacggcaccugcaccguggugaugaccgacggcagcgccagcggcaaggccgacaccaagauccuguucaucgaggagggcaagaucgugcacaccagcacccugagcggcagcgcccagcacguggaggagugcagcugcuaccccagauaccccggcgugagaugcgugugcagagacaacuggaagggcagcaacagacccaucguggacaucaacaucaaggaccacagcaucgugagcagcuacgugugcagcggccuggugggcgacacccccagaaagaccgacagcagcagcagcagccacugccuggaccccaacaacgaggagggcggccacggcgugaagggcugggccuucgacgacggcaacgacguguggaugggcagaaccaucaacgagaccagcagacugggcuacgagaccuucaaggugaucgagggcuggagcaaccccaagagcaagcugcagaucaacagacaggugaucguggacagaggcgacagaagcggcuacagcggcaucuucagcguggagggcaagagcugcaucaacagaugcuucuacguggagcugaucagaggcagaaaggaggagaccgaggugcuguggaccagcaacagcaucgugguguucugcggcaccagcggcaccuacggcaccggcagcuggcccgacggcgccgaccugaaccugaugcccaucuga

SEQ ID NO: 183054 - RNA, 1410 nt, Artificial Sequence
  derived and/or modified CDS sequence (opt4) from neuraminidase__InfluenzaA__AFN19528
augaaccccaaccagaagaucaucaccaucggcagcgugagccugaccaucagcaccaucugcuucuucaugcagaucgccauccugaucaccaccgugacccugcacuucaagcaguacgaguucaacagcccccccaacaaccaggugaugcugugcgagcccaccaucaucgagagaaacaugaccgagaucguguaccugaccaacaccaccaucgagaaggagaucugccccaagcccgccgaguacagaaacuggagcaagccccagugcgacaucaccggcuucgcccccuucagcaaggacaacagcaucagacugagcgccggcggcgacaucugggugaccagagagcccuacgugagcugcgaccccgacaagugcuaccaguucgcccugggccagggcaccacccugaacaacgugcacagcaacaacaccgugagagacagaacccccuacagaacccugcugaugaacgagcugggcgugcccuuccaccugggcaccaagcaggugugcaucgccuggagcagcagcagcugccacgacggcaaggccuggcugcacgugugcaucaccggcgacgacaagaacgccaccgccagcuucaucuacaacggcagacugguggacagcguggugagcuggagcaaggagauccugagaacccaggagagcgagugcgugugcaucaacggcaccugcaccguggugaugaccgacggcagcgccagcggcaagagcgacaccaagauccuguucaucgaggagggcaagaucgugcacaccagcacccugagcggcagcgcccagcacguggaggagugcagcugcuaccccagauaccccggcgugagaugcgugugcagagacaacuggaagggcagcaacagacccaucguggacaucaacaucaaggaccacagcaucgugagcagcuacgugugcagcggccuggugggcgacacccccagaaagaacgacagcagcagcagcagccacugccuggaccccaacaacgaggagggcggccacggcgugaagggcugggccuucgacgacggcaacgacguguggaugggcagaaccaucaacgagaccagcagacugggcuacgagaccuucaaggugaucgagggcuggagcaaccccaagagcaagcugcagaucaacagacaggugaucguggacagaagcgacagaagcggcuacagcggcaucuucagcguggagggcaagagcugcaucaacagaugcuucuacguggagcugaucagaggcagaaaggaggagaccgaggugcuguggaccagcaacagcaucgugguguucugcggcaccagcggcaccuacggcaccggcagcuggcccgacggcgccgaccugaaccugaugcccaucuga

SEQ ID NO: 183055 - RNA, 1410 nt, Artificial Sequence; identical to SEQ ID NO: 183018
  derived and/or modified CDS sequence (opt4) from neuraminidase__InfluenzaA__AFN19530

SEQ ID NO: 183056 - RNA, 1410 nt, Artificial Sequence; identical to SEQ ID NO: 182982
  derived and/or modified CDS sequence (opt4) from neuraminidase__InfluenzaA__AFN19532

SEQ ID NO: 183057 - RNA, 1410 nt, Artificial Sequence; identical to SEQ ID NO: 183018
  derived and/or modified CDS sequence (opt4) from neuraminidase__InfluenzaA__AFN19534

SEQ ID NO: 183058 - RNA, 1410 nt, Artificial Sequence; identical to SEQ ID NO: 182982
  derived and/or modified CDS sequence (opt4) from neuraminidase__InfluenzaA__AFN19536

SEQ ID NO: 183059 - RNA, 1410 nt, Artificial Sequence; identical to SEQ ID NO: 182982
  derived and/or modified CDS sequence (opt4) from neuraminidase__InfluenzaA__AFN19538

SEQ ID NO: 183060 - RNA, 1410 nt, Artificial Sequence; identical to SEQ ID NO: 182982
  derived and/or modified CDS sequence (opt4) from neuraminidase__InfluenzaA__AFN19544

SEQ ID NO: 183061 - RNA, 1410 nt, Artificial Sequence
  derived and/or modified CDS sequence (opt4) from neuraminidase__InfluenzaA__AFN19546
augaaccccaaccagaagaucaucaccaucggcagcgugagccugaccaucagcaccaucugcuucuucaugcagaucgccauccugaucaccaccgugacccugcacuucaagcaguacgaguucaacagcccccccaacaaccaggugaugcugugcgagcccaccaucaucgagagaaacaucaccgagaucguguaccugaccaacaccaccaucgagaaggagaucugccccaagcccgccgaguacagaaacuggagcaagccccagugcggcaucaccggcuucgcccccuucagcaaggacaacagcaucagacugagcgccggcggcgacaucugggugaccagagagcccuacgugagcugcgaccccgacaagugcuaccaguucgcccugggccagggcaccacccugaacaacgugcacagcaacaacaccgugagagacagaacccccuacagaacccugcugaugagcgagcugggcgugcccuuccaccugggcaccaagcaggugugcaucgccuggagcagcagcagcugccacgacggcaaggccuggcugcacgugugcaucaccggcgacgacaagaacgccaccgccagcuucaucuacaacggcagacugguggacagcguggugagcuggagcaaggagauccugagaacccaggagagcgagugcgugugcaucaacggcaccugcaccguggugaugaccgacggcagcgccagcggcaaggccgacaccaagauccuguucaucgaggagggcaagaucgugcacaccagcacccugagcggcagcgcccagcacguggaggagugcagcugcuaccccagauaccccggcgugagaugcgugugcagagacaacuggaagggcagcaacagacccaucguggacaucaacaucaaggaccacagcaucgugagcagcuacgugugcagcggccuggugggcgacacccccagaaagaacgacagcagcagcagcagccacugccuggaccccaacaacgaggagggcggccacggcgugaagggcugggccuucgacgacggcaacgacguguggaugggcagaaccaucaacgagaccagcagacugggcuacgagaccuucaaggugaucgagggcuggagcaaccccaagagcaagcugcagaucaacagacaggugaucguggacagaggcgacagaagcggcuacagcggcaucuucagcguggagggcaagagcugcaucaacagaugcuucuacguggagcugaucagaggcagaaaggaggagaccgaggugcuguggaccagcaacagcaucgugguguucugcggcaccagcggcaccuacggcaccggcagcuggcccgacggcgccgaccugaaccugaugcccaucuga

SEQ ID NO: 183062 - RNA, 1410 nt, Artificial Sequence
  derived and/or modified CDS sequence (opt4) from neuraminidase__InfluenzaA__AFN19548
augaaccccaaccagaagaucaucaccaucggcagcgugagccugaccaucagcaccaucugcuucuucaugcagaucgccauccugaucaccaccgugacccugcacuucaagcaguacgaguucaacagcccccccaacaaccaggugaugcugugcgagcccaccaucaucgagagaaacaucaccgagaucguguaccugaccaacaccaccaucgagaaggagaucugccccaagcccgccgaguacagaaacuggagcaagccccagugcgacaucaccggcuucgcccccuucagcaaggacaacagcaucagacugagcgccggcggcgacaucugggugaccagagagcccuacgugagcugcgaccccgacaagugcuaccaguucgcccugggccagggcaccacccugaacaacgugcacagcaacaacaccgugagagacagaacccccuacagaacccugcugaugaacgagcugggcgugcccuuccaccugggcaccaagcaggugugcaucgccuggagcagcagcagcugccacgacggcaaggccuggcugcacgugugcaucaccggcgacgacaagaacgccaccgccagcuucaucuacaacggcagacugguggacagcguggugagcuggagcaaggagauccugagaacccaggagagcgagugcgugugcaucaacggcaccugcaccguggugaugaccgacggcagcgccagcggcaaggccgacaccaagauccuguucaucgaggagggcaagaucgugcacaccagcacccugagcggcagcgcccagcacguggaggagugcagcugcuaccccagauaccccggcgugagaugcgugugcagagacaacuggaagggcagcaacagacccaucguggacaucaacaucaaggaccacagcaucgugagcagcuacgugugcagcggccuggugggcgacacccccagaaagaacgacagcuucagcagcagccacugccuggaccccaacaacgaggagggcggccacggcgugaagggcugggccuucgacgacggcaacgacguguggaugggcagaaccaucaacgagaccagcagacugggcuacgagaccuucaaggugaucgagggcuggagcaaccccaagagcaagcugcagaucaacagacaggugaucguggacagaggcgacagaagcggcuacagcggcaucuucagcguggagggcaagagcugcaucaacagaugcuucuacguggagcugaucagaggcagaaaggaggagaccgaggugcuguggaccagcaacagcaucgugguguucugcggcaccagcggcaccuacggcaccggcagcuggcccgacggcgccgaccugaaccugaugcccaucuga

SEQ ID NO: 183063 - RNA, 1410 nt, Artificial Sequence
  derived and/or modified CDS sequence (opt4) from neuraminidase__InfluenzaA__AFN19550
augaaccccaaccagaagaucaucaccaucggcagcgugagccugaccaucagcaccaucugcuucuucaugcagaucgccauccugaucaccaccgugacccugcacuucaagcaguacgaguucaacagcccccccaacaaccaggugaugcugugcgagcccaccaucaucgagagaaacaucaccgagaucguguaccugaccaacaccaccaucgagaaggagaucugccccaagcuggccgaguacagaaacuggagcaagccccagugcgacaucaccggcuucgcccccuucagcaaggacaacagcaucagacugagcgccggcggcgacaucugggugaccagagagcccuacgugagcugcgaccccgacaagugcuaccaguucgcccugggccagggcaccacccugaacaacgugcacagcaacaacaccgugagagacagaacccccuacagaacccugcugaugaacgagcugggcgugcccuuccaccugggcaccaagcaggugugcaucgccuggagcagcagcagcugccacgacggcaaggccuggcugcacgugugcaucaccggcgacgacaagaacgccaccgccagcuucaucuacaacggcagacugguggacagcguggugagcuggagcaaggagauccugagaacccaggagagcgagugcgugugcaucaacggcaccugcaccguggugaugaccgacggcagcgccagcggcgaggccgacaccaagauccuguucaucgaggagggcaagaucauccacaccagcacccugagcggcagcgcccagcacguggaggagugcagcugcuaccccagauaccccggcgugagaugcgugugcagagacaacuggaagggcagcaacagacccaucguggacaucaacaucaaggaccacagcaucgugagcagcuacgugugcagcggccuggugggcgacacccccagaaagaacgacagcagcagcagcagccacugccuggaccccaacaacgaggagggcggccacggcgugaagggcugggccuucgacgacggcaacgacguguggaugggcagaaccaucaacgagaccagcagacugggcuacgagaccuucaaggugaucgagggcuggagcaaccccaagagcaagcugcagaucaacagacaggugaucguggacagaggcaacagaagcggcuacagcggcaucuucagcguggagggcaagagcugcaucaacagaugcuucuacguggagcugaucagaggcagaaaggaggagaccgaggugcuguggaccagcaacagcaucgugguguucugcggcaccagcggcaccuacggcaccggcagcuggcccgacggcgccgaccugaaccugaugcccaucuga

SEQ ID NO: 183064 - RNA, 1410 nt, Artificial Sequence; identical to SEQ ID NO: 182982
  derived and/or modified CDS sequence (opt4) from neuraminidase__InfluenzaA__AFN19552

SEQ ID NO: 183065 - RNA, 1410 nt, Artificial Sequence; identical to SEQ ID NO: 182206
  derived and/or modified CDS sequence (opt4) from neuraminidase__InfluenzaA__AFN19554

SEQ ID NO: 183066 - RNA, 1410 nt, Artificial Sequence; identical to SEQ ID NO: 182206
  derived and/or modified CDS sequence (opt4) from neuraminidase__InfluenzaA__AFN19556

SEQ ID NO: 183067 - RNA, 1410 nt, Artificial Sequence
  derived and/or modified CDS sequence (opt4) from neuraminidase__InfluenzaA__AFN19558
augaaccccaaccagaagaucaucaccaucggcagcgugagccugaccaucagcaccaucugcuucuucaugcagaucgccauccugaucaccaccgugacccugcacuucaagcaguacgaguucaacagcccccccaacaaccaggugaugcugugcgagcccaccaucaucgagagaaacaucaccgagaucguguaccugaccaacaccaccaucgagaaggagaucugccccaagcccgccgaguacagaaacuggagcaagccccagugcgacaucaccggcuucgcccccuucagcaaggacaacagcaucagacugagcgccggcggcgacaucugggugaccagagagcccuacgugagcugcgaccccgacaagugcuaccaguucgcccugggccagggcaccacccugaacaacgugcacagcaacaacaccgugagagacagaacccccuacagaacccugcugaugaacgagcugggcgugcccuuccaccugggcaccaagcaggugugcaucgccuggagcagcagcagcugccacgacggcaaggccuggcugcacgugugcaucaccggcgacgacaagaacgccaccgccagcuucaucuacaacggcagacugguggacagcguggugagcuggagcaaggagauccugagaacccaggagagcgagugcgugugcaucaacggcaccugcaccguggugaugaccgacggcagcgccagcggcaaggccgacaccaagauccuguucaucgaggagggcaagaucgugcacaccagcacccugagcggcagcgcccagcacguggaggagugcagcugcuaccccagauaccccggcgugagaugcgugugcagagacaacuggaagggcagcaacagacccaucguggacaucaacaucaaggaccacagcaucgugagcagcuacgugugcagcggccuggugggcgacacccccagaaagaacgacagcagcagcagcagccacugccuggaccccaacaacgaggagggcggccacggcgugaagggcugggccuucgacgacggcaacgacguguggaugggcagaaccaucaacgagaccagcagacugggcuacgagaccuucaaggugaucgagggcuggagcaaccccaagagcaagcugcagaugaacagacaggugaucguggacagaggcgacagaagcggcuacagcggcaucuucagcguggagggcaagagcugcaucaacagaugcuucuacguggagcugaucagaggcagaaaggaggagaccgaggugcuguggaccagcaacagcaucgugguguucugcggcaccagcggcaccuacggcaccggcagcuggcccgacggcgccgaccugaaccugaugcccaucuga

SEQ ID NO: 183068 - RNA, 1410 nt, Artificial Sequence
  derived and/or modified CDS sequence (opt4) from neuraminidase__InfluenzaA__AFN19560
augaaccccaaccagaagaucaucaccaucggcagcgugagccugaccaucagcaccaucugcuucuucaugcagaucgccauccugaucaccaccgugacccugcacuucaagcaguacgaguucaacagcccccccaacaaccaggugaugcugugcgagcccaccaucaucgagagaaacaucaccgagaucguguaccugaccaacaccaccaucgagaaggagaucugccccaagcccgccgaguacagaaacuggagcaagccccagugcggcaucaccggcuucgcccccuucagcaaggacaacagcaucagacugagcgccggcggcgacaucugggugaccagagagcccuacgugagcugcgaccccgacaagugcuaccaguucgcccugggccagggcaccacccugaacaacgugcacagcaacaacaccgugagagacagaacccccuacagaacccugcugaugaacgagcugggcgugcccuuccaccugggcaccaagcaggugugcaucgccuggagcagcagcagcugccacgacggcaaggccuggcugcacgugugcaucaccggcgacgacaagaacgccaccgccagcuucaucuacaacggcagacugguggacagcguggugagcuggagcaaggagauccugagaacccaggagagcgagugcgugugcaucaacggcaccugcaccguggugaugaccgacggcagcgccagcggcaaggccgacaccaagauccuguucaucgaggagggcaagaucgugcacaccagcacccugagcggcagcgcccagcacguggaggagugcagcugcuaccccagauaccccggcgugagaugcgugugcagagacaacuggaagggcagcaacagacccaucguggacaucaacaucaaggaccacagcaucgugagcagcuacgugugcagcggccuggugggcgacacccccagaaagaacgacagcagcagcagcagccacugccuggaccccaacaacgagggcggcggccacggcgugaagggcugggccuucgacgacggcaacgacguguggaugggcagaaccaucaacgagaccagcagacugggcuacgagaccuucaaggugaucgagggcuggagcaaccccaagagcaagcugcagaucaacagacaggugaucguggacagaggcgacagaagcggcuacagcggcaucuucagcguggagggcaagagcugcaucaacagaugcuucuacguggagcugaucagaggcagaaaggaggagaccgaggugcuguggaccagcaacagcaucgugguguucugcggcaccagcggcaccuacggcaccggcagcuggcccgacggcgccgaccugaaccugaugcccaucuga

SEQ ID NO: 183069 - RNA, 1410 nt, Artificial Sequence; identical to SEQ ID NO: 183029
  derived and/or modified CDS sequence (opt4) from neuraminidase__InfluenzaA__AFN19562

SEQ ID NO: 183070 - RNA, 1410 nt, Artificial Sequence
  derived and/or modified CDS sequence (opt4) from neuraminidase__InfluenzaA__AFN19564
augaaccccaaccagaagaucaucaccaucggcagcgugagccugaccaucagcaccaucugcuucuucaugcagaucgccauccugaucaccaccgugacccugcacuucaagcaguacgaguucaacagcccccccaacaaccaggugaugcugugcgagcccaccaucaucgagagaaacaucaccgagaucguguaccugaccaacaccaccaucgagaaggagaucugccccaagcccgccgaguacagaaacuggagcaagccccagugcggcaucaccggcuucgcccccuucagcaaggacaacagcaucagacugagcgccggcggcgacaucugggugaccagagagcccuacgugagcugcgaccccgacaagugcuaccaguucgcccugggccagggcaccacccugaacaacgugcacagcaacaacaccgugagagacagaacccccuacagaacccugcugaugaacgagcugggcgugcccuuccaccugggcaccaagcaggugugcaucgccuggagcagcagcagcugccacgacggcaaggccuggcugcacgugugcaucaccggcgacgacaagaacgccaccgccagcuucaucuacaacggcagacugguggacagcguggugagcuggagcaaggagauccugagaacccaggagagcgagugcgugugcaucaacggcaccugcaccguggugaugaccgacggcagcgccagcggcaaggccgacaccaagauccuguucaucgaggagggcaagaucgugcacaccagcacccugagcggcagcgcccagcacguggaggagugcagcugcuaccccagauaccccggcgugagaugcgugugcagagacaacuggaagggcagcaacagacccaucguggacaucaacaucaaggaccacagcaucgugagcagcuacgugugcagcggccuggugggcgacacccccagaaagaccgacagcagcagcagcagccacugccuggaccccaacaacgaggagggcggccacggcgugaagggcugggccuucgacgacggcaacgacguguggaugggcagaaccaucaacgagaccagcagacugggcuacgagaccuucaaggugaucgagggcuggagcaaccccaagagcaagcugcagaucaacagacaggugaucguggacagaggcgacagaagcggcuacagcggcaucuucagcguggagggcaagagcugcaucaacagaugcuucuacguggagcugaucagaggcagaaaggaggagaccgaggugcuguggaccagcaacagcaucgugguguucugcggcaccagcggcaccuacggcaccggcagcuggcccgacggcgccgaccugaaccugaugcccaucuga

SEQ ID NO: 183071 - RNA, 1410 nt, Artificial Sequence
  derived and/or modified CDS sequence (opt4) from neuraminidase__InfluenzaA__AFN19566
augaaccccaaccagaagaucaucaccaucggcagcgugagccugaccaucagcaccaucugcuucuucaugcagaucgccauccugaucaccaccgugacccugcacuucaagcaguacgaguucaacagcccccccaacaaccaggugaugcugugcgagcccaccaucaucgagagaaacaucaccgagaucguguaccugaccaacaccaccaucgagaaggagaucugccccaagcccgccgaguacagaaacuggagcaagccccagugcggcaucaccggcuucgcccccuucagcaaggacaacagcaucagacugagcgccggcggcgacaucugggugaccagagagcccuacgugagcugcgaccccgacaagugcuaccaguucgcccugggccagggcaccacccugaacaacgugcacagcaacaacaccgugagagacagaacccccuacagaacccugcugaugaacgagcugggcgugcccuuccaccugggcaccaagcaggugugcaucgccuggagcagcagcagcugccacgacggcaaggccuggcugcacgugugcaucaccggcgacgacaagaacgccaccgccagcuucaucuacaacggcagacugguggacagcguggugagcuggagcaacgagauccugagaacccaggagagcgagugcgugugcaucaacggcaccugcaccguggugaugaccgacggcagcgccagcggcaaggccgacaccaagauccuguucaucgaggagggcaagaucgugcacaccagcacccugagcggcagcgcccagcacguggaggagugcagcugcuaccccagauaccccggcgugagaugcgugugcagagacaacuggaagggcagcaacagacccaucguggacaucaacaucaaggaccacagcaucgugagcagcuacgugugcagcggccuggugggcgacacccccagaaagaacgacagcagcagcagcagccacugccuggaccccaacaacgaggagggcggccacggcgugaagggcugggccuucgacgacggcaacgacguguggaugggcagaaccaucaacgagaccagcagacugggcuacgagaccuucaaggugaucgagggcuggagcaaccccaagagcaagcugcagaucaacagacaggugaucguggacagaggcgacagaagcggcuacagcggcaucuucagcguggagggcaagagcugcaucaacagaugcuucuacguggagcugaucagaggcagaaaggaggagaacgaggugcuguggaccagcaacagcaucgugguguucugcggcaccagcggcaccuacggcaccggcagcuggcccgacggcgccgaccugaaccugaugcccaucuga

SEQ ID NO: 183072 - RNA, 1410 nt, Artificial Sequence
  derived and/or modified CDS sequence (opt4) from neuraminidase__InfluenzaA__AFN19568
augaaccccaaccagaagaucaucaccaucggcagcgugagccugaccaucagcaccaucugcuucuucaugcagaucgccauccugaucaccaccgugacccugcacuucaagcaguacgaguucaacagcccccccaacaaccaggugaugcugugcgagcccaccaucaucgagagaaacaucaccgagaucguguaccugaccaacaccaccaucgagaaggagaucugccccaagcccgccgaguacagaaacuggagcaagccccagugcggcaucaccggcuucgcccccuucagcaaggacaacagcaucagacugagcgccggcggcgacaucugggugaccagagagcccuacgugagcugcgaccccgacaagugcuaccaguucgcccugggccagggcaccacccugaacaacgugcacagcaacaacaccgugagagacagaacccccuacagaacccugcugaugaacgagcugggcgugcccuuccaccugggcaccaagcaggugugcaucgccuggagcagcagcagcugccacgacggcaaggccuggcugcacgugugcaucaccggcgacgacaagaacgccaccgccagcuucaucuacaacggcagacugguggacagcguggugagcuggagcaaggagauccugagaacccaggagagcgagugcgugugcaucaacggcaccugcaccguggugaugaccgacggcagcgccagcggcaaggccgacaccaagauccuguucaucgaggagggcaagaucgugcacaccagcacccugagcggcagcgcccagcacguggaggagugcagcugcuaccccagauaccccggcgugagaugcgugugcagagacaacuggaagggcagcaacagacccaucguggacaucaacaucaaggaccacagcaucgugagcagcuacgugugcagcggccuggugggcgacacccccagaaagaacgacagcagcagcagcagccacugccuggaccccaacaacgaggagggcggccacggcgugaagggcugggccuucgacgacggcaacgacguguggaugggcagaaccaucaacgagaccagcagacugggcuacgagaccuucaaggugaucgagggcuggagcaaccccaagagcaagcugcaggugaacagacaggugaucguggacagaggcgacagaagcggcuacagcggcaucuucagcguggagggcaagagcugcaucaacagaugcuucuacguggagcugaucagaggcagaaaggaggagaucgaggugcuguggaccagcaacagcaucgugguguucugcggcaccagcggcaccuacggcaccggcagcuggcccgacggcgccgaccugaaccugaugcccaucuga

SEQ ID NO: 183073 - RNA, 1410 nt, Artificial Sequence
  derived and/or modified CDS sequence (opt4) from neuraminidase__InfluenzaA__AFN19570
augaaccccaaccagaagaucaucaccaucggcagcgugagccugaccaucagcaccaucugcuucuucaugcagaucgccauccugaucaccaccgugacccugcacuucaagcaguacgaguucaacuacccccccaacaaccaggugaugcugugcgagcccaccaucaucgagagaaacaucaccgagaucguguaccugaccaacaccaccaucgagaaggagaucugccccaagcccgccgaguacagaaacuggagcaagccccagugcggcaucaccggcuucgcccccuucagcaaggacaacagcaucagacugagcgccggcggcgacaucugggugaccagagagcccuacgugagcugcgaccccgacaagugcuaccaguucgcccugggccagggcaccacccugaacaacaugcacagcaacaacaccgugagagacagaacccccuacagaacccugcugaugaacgagcugggcgugcccuuccaccugggcaccaagcaggugugcaucgccuggagcagcagcagcugccacgacggcaaggccuggcugcacgugugcaucaccggcgacgacaagaacgccaccgccagcuucaucuacaacggcagacugguggacagcguggugagcuggagcaacgagauccugagaacccaggagagcgagugcgugugcaucaacggcaccugcaccguggugaugaccgacggcagcgccagcggcaaggccgacaccaagauccuguucaucgaggagggcaagaucgugcacaccagcacccugagcggcagcgcccagcacguggaggagugcagcugcuaccccagauaccccggcgugagaugcgugugcagagacaacuggaagggcagcaacagacccaucguggacaucaacaucaaggaccacagcaucgugagcagcuacgugugcagcggccuggugggcgacacccccagaaagaacgacagcagcagcagcagccacugccuggaccccaacaacgaggagggcggccacggcgugaagggcugggccuucgacgacggcaacgacguguggaugggcagaaccaucaacgagaccagcagacugggcuacgagaccuucaaggugaucgagggcuggagcaaccccaagagcaagcugcagaucaacagacaggugaucguggacagaggcgacagaagcggcuacagcggcaucuucagcguggagggcaagagcugcaucaacagaugcuucuacguggagcugaucagaggcagaaaggaggagaacgaggugcuguggaccagcaacagcaucgugguguucugcggcaccagcggcaccuacggcaccggcagcuggcccgacggcgccgaccugaaccugaugcccaucuga

SEQ ID NO: 183074 - RNA, 1410 nt, Artificial Sequence
  derived and/or modified CDS sequence (opt4) from neuraminidase__InfluenzaA__AFN19572
augaaccccaaccagaagaucaucaccaucggcagcgugagccugaccaucagcaccaucugcuucuucaugcagaucgccauccugaucaccaccgugacccugcacuucaagcaguacgaguucaacagcccccccaacaaccaggugaugcugugcgagcccaccaucaucgagagaaacaucaccgagaucguguaccugaccaacaccaccaucgagaaggagaucugccccaagcccgccgaguacagaaacuggagcaagccccagugcgacaucaccggcuucgcccccuucagcaaggacaacagcaucagaaucagcgccggcggcgacaucugggugaccagagagcccuacgugagcugcgaccccgacaagugcuaccaguucgcccugggccagggcaccacccugaacaacgugcacagcaacaacaccgugagagacagaacccccuacagaacccugcugaugaacgagcugggcgugcccuuccaccugggcaccaagcaggugugcaucgccuggagcagcagcagcugccacgacggcaaggccuggcugcacgugugcaucaccggcgacgacaagaacgccaccgccagcuucaucuacaacggcaagcugguggacagcguggugagcuggagcaaggagauccugagaacccaggagagcgagugcgugugcaucaacggcaccugcaccguggugaugaccgacggcagcgccagcggcaaggccgacaccaagauccuguucaucgaggagggcaagaucgugcacaccagcacccugagcggcagcgcccagcacguggaggagugcagcugcuaccccagauaccccggcgugagaugcgugugcagagacaacuggaagggcagcaacagacccaucguggacaucaacaucaaggaccacagcaucgugagcagcuacgugugcagcggccuggugggcgacacccccagaaagaacgacagcagcagcagcagccacugccuggaccccaacaacgaggagggcggccacggcgugaagggcugggccuucgacgacggcaacgacguguggaugggcagaaccaucaacgagaccagcagacugggcuacgagaccuucaaggugaucgagggcuggagcaaccccaagagcaagcugcagaucaacagacaggugaucguggacagaggcgacagaagcggcuacagcggcaucuucagcguggagggcaagagcugcaucaacagaugcuucuacguggagcugaucagaggcagaaaggaggagaccgaggugcuguggaccagcaacagcaucgugguguucugcggcaccagcggcaccuacggcaccggcagcuggcccgacggcgccgaccugaaccugaugcccaucuga

SEQ ID NO: 183075 - RNA, 1410 nt, Artificial Sequence
  derived and/or modified CDS sequence (opt4) from neuraminidase__InfluenzaA__AFN19574
augaaccccaaccagaagaucaucaccaucggcagcgugagccugaccaucagcaccaucugcuucuucaugcagaucgccauccugaucaccaccgugacccugcacuucaagcaguacgaguucaacagcccccccaacaaccaggugaugcugugcgagcccaccaucaucgagagaaacaucaccgagaucguguaccugaccaacaccaccaucgagaaggagaucugccccaagcuggccgaguacagaaacuggagcaagccccagugcgacaucaccggcuucgcccccuucagcaaggacaacagcaucagacugagcgccggcggcgacaucugggugaccagagagcccuacgugagcugcgaccccaacaagugcuaccaguucgcccugggccagggcaccacccugaacaacgugcacagcaacaacaccgugagagacagaacccccuacagaacccugcugaugaacgagcugggcgugcccuuccaccugggcaccaagcaggugugcaucgccuggagcagcagcagcugccacgacggcaaggccuggcugcacgugugcaucaccggcgacgacaagaacgccaccgccagcuucaucuacaacggcagacugguggacagcguggugagcuggagcaagaagauccugagaacccaggagagcgagugcgugugcaucaacggcaccugcaccguggugaugaccgacggcagcgccagcggcaaggccgacaccaagauccuguucaucgaggagggcaagaucgugcacaccagcacccugagcggcagcgcccagcacguggaggagugcagcugcuaccccagauaccccggcgugagaugcgugugcagagacaacuggaagggcagcaacagacccaucguggacaucaacaugaaggaccacagcaucgugagcagcuacgugugcagcggccuggugggcgacacccccagaaagaacgacagcagcagcagcagccacugcuucgaccccaacgacgaggagggcggccacggcgugaagggcugggccuucgacgacggcaacgacguguggaugggcagaaccaucagcgagaagagcagacugggcuacgagaccuucaaggugaucgagggcuggagcaaccccaagagcaagcugcagaucaacagacaggugaucguggacagaggcgacagaagcggcuacagcggcaucuucagcguggagggcaagagcugcaucaacagaugcuucuacguggagcugaucagaggcagcaaggaggagaccgaggugcuguggaccagcaacagcaucgugguguucugcggcaccagcggcaccuacggcaccggcagcuggcccgacggcgccgacaucaaccugaugcccaucuga

SEQ ID NO: 183076 - RNA, 1410 nt, Artificial Sequence
  derived and/or modified CDS sequence (opt4) from neuraminidase__InfluenzaA__AFN19576
augaaccccaaccagaagaucaucaccaucggcagcgugagccugaccaucagcaccaucugcuucuucaugcagaucgccauccugaucaccaccgugacccugcacuucaagcaguacgaguucaacagcccccccaacaaccagaugaugcugugcgagcccaccaucaucgagagaaacaucaccgagaucguguaccugaccaacaccaccaucgagaaggagaucugccccaagcccgccgaguacagaaacuggagcaagccccagugcgacaucaccggcuucgcccccuucagcaaggacaacagcaucagacugagcgccggcggcgacaucugggugaccagagagcccuacgugagcugcgaccccgacaagugcuaccaguucgcccugggccagggcaccacccugaacaacgugcacagcaacaacaccgugagagacagaacccccuacagaacccugcugaugaacgagcugggcgugcccuuccaccugggcaccaagcaggugugcaucgccuggagcagcagcagcugccacgacggcaaggccuggcugcacgugugcaucaccggcgacgacaagaacgccaccgccagcuucaucuacaacggcagacugguggacagcguggugagcuggagcaaggagauccugagaacccaggagagcgagugcgugugcaucaacggcaccugcaccguggugaugaccgacggcagcgccagcggcaaggccgacaccaagauccuguucaucgaggagggcaagaucgugcacaccagcacccugagcggcagcgcccagcacguggaggagugcagcugcuaccccagauaccccggcgugagaugcgugugcagagacaacuggaagggcagcaacagacccaucguggacaucaacaucaaggaccacagcaucgugagcagcuacgugugcagcggccuggugggcgacacccccagaaagaacgacagcagcagcagcagccacugccuggaccccaacaacgaggagggcggccacggcgugaagggcugggccuucgacgacggcaacgacguguggaugggcagaaccaucaacgagaccagcagacugggcuacgagaccuucaaggugaucgagggcuggagcaaccccaagagcaagcugcagaucaacagacaggugaucguggacagaggcgacagaagcggcuacagcggcaucuucagcguggagggcaagagcugcaucaacagaugcuucuacguggagcugaucagaggcagaaaggaggagaccgaggugcuguggaccagcaacagcaucgugguguucugcggcaccagcggcaccuacggcaccggcagcuggcccgacggcgccgaccugaaccugaugcccaucuga

SEQ ID NO: 183077 - RNA, 1410 nt, Artificial Sequence; identical to SEQ ID NO: 182982
  derived and/or modified CDS sequence (opt4) from neuraminidase__InfluenzaA__AFN19578

SEQ ID NO: 183078 - RNA, 1410 nt, Artificial Sequence; identical to SEQ ID NO: 182982
  derived and/or modified CDS sequence (opt4) from neuraminidase__InfluenzaA__AFN19582

SEQ ID NO: 183079 - RNA, 1410 nt, Artificial Sequence; identical to SEQ ID NO: 182982
  derived and/or modified CDS sequence (opt4) from neuraminidase__InfluenzaA__AFN19584

SEQ ID NO: 183080 - RNA, 1410 nt, Artificial Sequence; identical to SEQ ID NO: 182982
  derived and/or modified CDS sequence (opt4) from neuraminidase__InfluenzaA__AFN19588

SEQ ID NO: 183081 - RNA, 1410 nt, Artificial Sequence; identical to SEQ ID NO: 182982
  derived and/or modified CDS sequence (opt4) from neuraminidase__InfluenzaA__AFN19590

SEQ ID NO: 183082 - RNA, 1410 nt, Artificial Sequence; identical to SEQ ID NO: 183018
  derived and/or modified CDS sequence (opt4) from neuraminidase__InfluenzaA__AFN19592

SEQ ID NO: 183083 - RNA, 1410 nt, Artificial Sequence; identical to SEQ ID NO: 182982
  derived and/or modified CDS sequence (opt4) from neuraminidase__InfluenzaA__AFN19594

SEQ ID NO: 183084 - RNA, 1410 nt, Artificial Sequence; identical to SEQ ID NO: 182990
  derived and/or modified CDS sequence (opt4) from neuraminidase__InfluenzaA__AFN19596

SEQ ID NO: 183085 - RNA, 1410 nt, Artificial Sequence; identical to SEQ ID NO: 182990
  derived and/or modified CDS sequence (opt4) from neuraminidase__InfluenzaA__AFN19600

SEQ ID NO: 183086 - RNA, 1410 nt, Artificial Sequence
  derived and/or modified CDS sequence (opt4) from neuraminidase__InfluenzaA__AFN19602
augaaccccaaccagaagaucaucaccaucggcagcgugagccugacccugagcaccaucugcuucuucaugcagaucgccauccugaucaccaccgugacccugcacuucaagcaguacgaguucaacagcccccccaacaaccaggugaugcugugcgagcccaccaucaucgagagaaacaugaccgagaucguguaccugaccaacaccaccaucgagaaggagaucugccccaagcccgccgaguacagaaacuggagcaagccccagugcgacaucaccggcuucgcccccuucagcaaggacaacagcaucagacugagcgccggcggcgacaucugggugaccagagagcccuacgugagcugcgaccccgacaagugcuaccaguucgcccugggccagggcaccacccugaacaacgugcacagcaacaacaccgugagagacagaacccccuacagaacccugcugaugaacgagcugggcgugcccuuccaccugggcaccaagcaggugugcaucgccuggagcagcagcagcugccacgacggcaaggccuggcugcacgugugcaucaccggcgacgacaagaacgccaccgccagcuucaucuacaacggcagacugguggacagcguggugagcuggagcaaggagauccugagaacccaggagagcgagugcgugugcaucaacggcaccugcaccguggugaugaccgacggcagcgccagcggcaaggccgacaccaagauccuguucaucgaggagggcaagaucgugcacaccagcacccugagcggcagcgcccagcacguggaggagugcagcugcuaccccagauaccccggcgugagaugcgugugcagagacaacuggaagggcagcaacagacccaucguggacaucaacaucaaggaccacagcaucgugagcagcuacgugugcagcggccuggugggcgacacccccagaaagaacgacagcagcagcagcagccacugccuggaccccaacaacgaggagggcggccacggcgugaagggcugggccuucgacgacggcaacgacguguggaugggcagaaccaucaacgagaccagcagacugggcuacgagaccuucaaggugaucgagggcuggagcaaccccaagagcaagcugcagaucaacagacaggugaucguggacagaagcgacagaagcggcuacagcggcaucuucagcguggagggcaagagcugcaucaacagaugcuucuacguggagcugaucagaggcagaaaggaggagaccgaggugcuguggaccagcaacagcaucgugguguucugcggcaccagcggcaccuacggcaccggcagcuggcccgacggcgccgaccugaaccugaugcccaucuga

SEQ ID NO: 183087 - RNA, 1410 nt, Artificial Sequence; identical to SEQ ID NO: 182982
  derived and/or modified CDS sequence (opt4) from neuraminidase__InfluenzaA__AFN19604

SEQ ID NO: 183088 - RNA, 1410 nt, Artificial Sequence; identical to SEQ ID NO: 182982
  derived and/or modified CDS sequence (opt4) from neuraminidase__InfluenzaA__AFN19606

SEQ ID NO: 183089 - RNA, 1410 nt, Artificial Sequence; identical to SEQ ID NO: 182982
  derived and/or modified CDS sequence (opt4) from neuraminidase__InfluenzaA__AFN19608

SEQ ID NO: 183090 - RNA, 1410 nt, Artificial Sequence; identical to SEQ ID NO: 182982
  derived and/or modified CDS sequence (opt4) from neuraminidase__InfluenzaA__AFN19610

SEQ ID NO: 183091 - RNA, 1410 nt, Artificial Sequence; identical to SEQ ID NO: 182990
  derived and/or modified CDS sequence (opt4) from neuraminidase__InfluenzaA__AFN19612

SEQ ID NO: 183092 - RNA, 1410 nt, Artificial Sequence; identical to SEQ ID NO: 182206
  derived and/or modified CDS sequence (opt4) from neuraminidase__InfluenzaA__AFN19614

SEQ ID NO: 183093 - RNA, 1410 nt, Artificial Sequence
  derived and/or modified CDS sequence (opt4) from neuraminidase__InfluenzaA__AFN19618
augaaccccaaccagaagaucaucaccaucggcagcgugagccugaccaucagcaccaucugcuucuucaugcagaucgccauccugaucaccaccgugacccugcacuucaagcaguacgaguucaacagcccccccaacaaccaggugaugcugugcgagcccaccaucaucgagagaaacaucaccgagaucguguaccugaccaacaccaccaucgagaaggagaucugccccaagcccgccgaguacagaaacuggagcaagccccagugcggcaucaccggcuucgcccccuucagcaaggacaacagcaucagacugagcgccggcggcgacaucugggugaccagagagcccuacgugagcugcgaccccgacaagugcuaccaguucgcccugggccagggcaccacccugaacaacgugcacagcaacaacaccgugagagacagaacccccuacagaacccugcugaugaacgagcugggcgugcccuuccaccugggcaccaagcaggugugcaucgccuggagcagcagcagcugccacgacggcaaggccuggcugcacgugugcaucaccggcgacgacaagaacgccaccgccagcuucaucuacaacggcagacugguggacagcguggugagcuggagcaacgagauccugagaacccaggagagcgagugcgugugcaucaacggcaccugcaccguggugaugaccgacggcagcgccagcggcaaggccgacaccaagauccuguucaucgaggagggcaagaucgugcacaccagcacccugagcggcagcgcccagcacguggaggagugcagcugcuaccccagauaccccggcgugagaugcgugugcagagacaacuggaagggcagcaacagacccaucguggacaucaacaucaaggaccacagcaucgugagcagcuacgugugcagcggccuggugggcgacacccccagaaagaacgacagcagcagcagcagccacugccuggaccccaacaacgaggagggcggccacggcgugaagggcugggccuucgacgacggcaacgacguguggaugggcagaaccaucaacgagaccagcagacugggcuacgagaccuucaaggugaucgagggcuggagcaaccccaagagcaagcugcagaucaacagacaggugaucguggacagaggcgacagaagcggcuacagcggcaucuucagcguggagggcaagagcugcaucaacagaugcuucuacguggagcugaucagaggcagaaaggaggagaccgaggugcuguggaccagcaacagcaucgugguguucugcggcaccagcggcaccuacggcaccggcagcuggcccgacggcgccgaccugaaccugaugcccaucuga

SEQ ID NO: 183094 - RNA, 1410 nt, Artificial Sequence; identical to SEQ ID NO: 182982
  derived and/or modified CDS sequence (opt4) from neuraminidase__InfluenzaA__AFN19620

SEQ ID NO: 183095 - RNA, 1410 nt, Artificial Sequence; identical to SEQ ID NO: 183018
  derived and/or modified CDS sequence (opt4) from neuraminidase__InfluenzaA__AFN19624

SEQ ID NO: 183096 - RNA, 1410 nt, Artificial Sequence; identical to SEQ ID NO: 182982
  derived and/or modified CDS sequence (opt4) from neuraminidase__InfluenzaA__AFN19630

SEQ ID NO: 183097 - RNA, 1410 nt, Artificial Sequence
  derived and/or modified CDS sequence (opt4) from neuraminidase__InfluenzaA__AFN19632
augaaccccaaccagaagaucaucaccaucggcagcgugagccugaccaucagcaccaucugcuucuucaugcagaucgccauccugaucaccaccgugacccugcacuucaagcaguacgaguucaacagcccccccaacaaccaggugaugcugugcgagcccaccaucaucgagagaaacaucaccgagaucguguaccugaccaacaccaccaucgagaaggagaucugccccaagcccaccgaguacagaaacuggagcaagccccagugcgacaucaccggcuucgcccccuucagcaaggacaacagcaucagacugagcgccggcggcgacaucugggugaccagagagcccuacgugagcugcgaccccgacaagugcuaccaguucgcccugggccagggcaccacccugaacaacgugcacagcaacaacaccgugagagacagaacccccuacagaacccugcugaugaacgagcugggcgugcccuuccaccugggcaccaagcaggugugcaucgccuggagcagcagcagcugccacgacggcaaggccuggcugcacgugugcaucaccggcgacgacaagaacgccaccgccagcuucaucuacaacggcagacugguggacagcguggugagcuggagcaaggagauccugagaacccaggagagcgagugcgugugcaucaacggcaccugcaccguggugaugaccgacggcagcgccagcggcaaggccgacaccaagauccuguucaucgaggagggcaagaucgugcacaccagcacccugagcggcagcgcccagcacguggaggagugcagcugcuaccccagauaccccggcgugagaugcgugugcagagacaacuggaagggcagcaacagacccaucguggacaucaacaucaaggaccacagcaucgugagcagcuacgugugcagcggccuggugggcgacacccccagaaagaacgacagcagcagcagcagccacugccuggaccccaacaacgaggagggcggccacggcgugaagggcugggccuucgacgacggcaacgacguguggaugggcagaaccaucaacgagaccagcagacugggcuacgagaccuucaaggugaucgagggcuggagcaaccccaagagcaagcugcagaucaacagacaggugaucguggacagaggcgacagaagcggcuacagcggcaucuucagcguggagggcaagagcugcaucaacagaugcuucuacguggagcugaucagaggcagaaaggaggagaccgaggugcuguggaccagcaacagcaucgugguguucugcggcaccagcggcaccuacggcaccggcagcuggcccgacggcgccgaccugaaccugaugcccaucuga

SEQ ID NO: 183098 - RNA, 1410 nt, Artificial Sequence
  derived and/or modified CDS sequence (opt4) from neuraminidase__InfluenzaA__AFN19634
augaaccccaaccagaagaucaucaccaucggcagcgugagccugaccaucagcaccaucugcuucuucaugcagaucgccauccugaucaccaccgugacccugcacuucaagcaguacgaguucaacagcccccccaacaaccaggugaugcugugcgagcccaccaucaucgagagaaacaucaccgagaucguguaccugaccaacaccaccaucgagaaggagaucugccccaagcccgccgaguacagaaacuggagcaagccccagugcgacaucaccggcuucgcccccuucagcaaggacaacagcaucagacugagcgccggcggcgacaucugggugaccagagagcccuacgugagcugcgaccccgacaagugcuaccaguucgcccugggccagggcaccacccugaacaacgugcacagcaacaacaccgugagagacagaaccagcuacagaacccugcugaugaacgagcugggcgugcccuuccaccugggcaccaagcaggugugcaucgccuggagcagcagcagcugccacgacggcaaggccuggcugcacgugugcaucaccggcgacgacaagaacgccaccgccagcuucaucuacaacggcagacugguggacagcguggugagcuggagcaaggagauccugagaacccaggagagcgagugcgugugcaucaacggcaccugcaccguggugaugaccgacggcagcgccagcggcaaggccgacaccaagauccuguucaucgaggagggcaagaucgugcacaccagcacccugagcggcagcgcccagcacguggaggagugcagcugcuaccccagauaccccggcgugagaugcgugugcagagacaacuggaagggcagcaacagacccaucguggacaucaacaucaaggaccacagcaucgugagcagcuacgugugcagcggccuggugggcgacacccccagaaagaacgacagcagcagcagcagccacugccuggaccccaacaacgaggagggcggccacggcgugaagggcugggccuucgacgacggcaacgacguguggaugggcagaaccaucaacgagaccagcagacugggcuacgagaccuucaaggugaucgagggcuggagcaaccccaagagcaagcugcagaucaacagacaggugaucguggacagaggcgacagaagcggcuacagcggcaucuucagcguggagggcaagagcugcaucaacagaugcuucuacguggagcugaucagaggcagaaaggaggagaccgaggugcuguggaccagcaacagcaucgugguguucugcggcaccagcggcaccuacggcaccggcagcuggcccgacggcgccgaccugaaccugaugcccaucuga

SEQ ID NO: 183099 - RNA, 1410 nt, Artificial Sequence
  derived and/or modified CDS sequence (opt4) from neuraminidase__InfluenzaA__AFN19636
augaaccccaaccagaagaucaucaccaucggcagcgugagccugaccaucagcaccaucugcuucuucaugcagaucgccauccugaucaccaccgugacccugcacuucaagcaguacgaguucaacagcccccccaacaaccaggugaugcugugcgagcccaccaucaucgagagaaacaucaccgagaucguguaccugaccaacaccaucaucgagaaggagaucugccccaagcccaccgaguacagaaacuggagcaagccccagugcgacaucaccggcuucgcccccuucagcaaggacaacagcaucagacugagcgccggcggcgacaucugggugaccagagagcccuacgugagcugcgaccccgacaagugcuaccaguucgcccugggccagggcaccacccugaacaacgugcacagcaacaacaccgugagagacagaacccccuacagaacccugcugaugaacgagcugggcgugcccuuccaccugggcaccaagcaggugugcaucgccuggagcagcagcagcugccacgacggcaaggccuggcugcacgugugcaucaccggcgacgacaagaacgccaccgccagcuucaucuacaacggcagacugguggacagcguggugagcuggagcaaggagauccugagaacccaggagagcgagugcgugugcaucaacggcaccugcaccguggugaugaccgacggcagcgccagcggcaaggccgacaccaagauccuguucaucgaggagggcaagaucgugcacaccagcacccugagcggcagcgcccagcacguggaggagugcagcugcuaccccagauaccccggcgugagaugcgugugcagagacaacuggaagggcagcaacagacccaucguggacaucaacaucaaggaccacagcaucgugagcagcuacgugugcagcggccuggugggcgacacccccagaaagaacgacagcagcagcagcagccacugccuggaccccaacaacgaggagggcggccacggcgugaagggcugggccuucgacgacggcaacgacguguggaugggcagaaccaucaacgagaccagcagacugggcuacgagaccuucaaggugaucgagggcuggagcaaccccaagagcaagcugcagaucaacagacaggugaucguggacagaggcgacagaagcggcuacagcggcaucuucagcguggagggcaagagcugcaucaacagaugcuucuacguggagcugaucagaggcagaaaggaggagaccgaggugcuguggaccagcaacagcaucgugguguucugcggcaccagcggcaccuacggcaccggcagcuggcccgacggcgccgaccugaaccugaugcccaucuga

SEQ ID NO: 183100 - RNA, 1410 nt, Artificial Sequence; identical to SEQ ID NO: 183099
  derived and/or modified CDS sequence (opt4) from neuraminidase__InfluenzaA__AFN19638

SEQ ID NO: 183101 - RNA, 1410 nt, Artificial Sequence; identical to SEQ ID NO: 182982
  derived and/or modified CDS sequence (opt4) from neuraminidase__InfluenzaA__AFN19640

SEQ ID NO: 183102 - RNA, 1410 nt, Artificial Sequence
  derived and/or modified CDS sequence (opt4) from neuraminidase__InfluenzaA__AFN19642
augaaccccaaccagaagaucaucaccaucggcagcgugagccugaccaucagcaccaucugcuucuucaugcagaucgccauccugaucaccaccgugacccugcacuucaagcaguacgaguucaacagcccccccaacaaccaggugaugcugugcgagcccaccaucaucgagagaaacaugaccgagaucguguaccugaccaacaccaccaucgagaaggagaucugccccaagcccgccgaguacagaaacuggagcaagccccagugcgacaucaccggcuucgcccccuucagcaaggacaacagcaucagacugagcgccggcggcgacaucugggugaccagagagcccuacgugagcugcgaccccgacaagugcuaccaguucgcccugggccagggcaccacccugaacaacgugcacagcaacaacaccgugagcgacagaacccccuacagaacccugcugaugaacgagcugggcgugcccuuccaccugggcaccaagcaggugugcaucgccuggagcagcagcagcugccacgacggcaaggccuggcugcacgugugcaucaccggcgacgacaagaacgccaccgccagcuucaucuacaacggcagacugguggacagcguggugagcuggagcaaggagauccugagaacccaggagagcgagugcgugugcaucaacggcaccugcaccguggugaugaccgacggcagcgccagcggcaaggccgacaccaagauccuguucaucgaggagggcaagaucgugcacaccagcacccugagcggcagcgcccagcacguggaggagugcagcugcuaccccagauaccccggcgugagaugcgugugcagagacaacuggaagggcagcaacagacccaucguggacaucaacaucaaggaccacagcaucgugagcagcuacgugugcagcggccuggugggcgacacccccagaaagaacgacagcagcagcagcagccacugccuggaccccaacaacgaggagggcggccacggcgugaagggcugggccuucgacgacggcaacgacguguggaugggcagaaccaucaacgagaccagcagacugggcuacgagaccuucaaggugaucgagggcuggagcaaccccaagagcaagcugcagaucaacagacaggugaucguggacagaagcgacagaagcggcuacagcggcaucuucagcguggagggcaagagcugcaucaacagaugcuucuacguggagcugaucagaggcagaaaggaggagaccgaggugcuguggaccagcaacagcaucgugguguucugcggcaccagcggcaccuacggcaccggcagcuggcccgacggcgccgaccugaaccugaugcccaucuga

SEQ ID NO: 183103 - RNA, 1410 nt, Artificial Sequence; identical to SEQ ID NO: 183099
  derived and/or modified CDS sequence (opt4) from neuraminidase__InfluenzaA__AFN19644

SEQ ID NO: 183104 - RNA, 1410 nt, Artificial Sequence
  derived and/or modified CDS sequence (opt4) from neuraminidase__InfluenzaA__AFN19646
augaaccccaaccagaagaucaucaccaucggcagcgugagccugaccaucagcaccaucugcuucuucauccagaucgccauccugaucaccaccgugacccugcacuucaagcaguacgaguucaacagcccccccaacaaccaggugaugcugugcgagcccaccaucaucgagagaaacaucaccgagaucguguaccugaccaacaccaccaucgagaaggagaucugccccaagcccgccgaguacagaaacuggagcaagccccagugcgacaucaccggcuucgcccccuucagcaaggacaacagcaucagacugagcgccggcggcgacaucugggugaccagagagcccuacgugagcugcgaccccgacaagugcuaccaguucgcccugggccagggcaccacccugaacaacgugcacagcaacaacaccgugagagacagaacccccuacagaacccugcugaugaacgagcugggcgugcccuuccaccugggcaccaagcaggugugcaucgccuggagcagcagcagcugccacgacggcaaggccuggcugcacgugugcaucaccggcgacgacaagaacgccaccgccagcuucaucuacaacggcagacugguggacagcguggugagcuggagcaaggagauccugagaacccaggagagcgagugcgugugcaucaacggcaccugcaccguggugaugaccgacggcagcgccagcggcaaggccgacaccaagauccuguucaucgaggagggcaagaucgugcacaccagcacccugagcggcagcgcccagcacguggaggagugcagcugcuaccccagauaccccggcgugagaugcgugugcagagacaacuggaagggcagcaacagacccaucguggacaucaacaucaaggaccacagcaucgugagcagcuacgugugcagcggccuggugggcgacacccccagaaagaacgacagcagcagcagcagccacugccuggaccccaacaacgaggagggcggccacggcgugaagggcugggccuucgacgacggcaacgacguguggaugggcagaaccaucaacgagaccagcagacugggcuacgagaccuucaaggugaucgagggcuggagcaaccccaagagcaagcugcagaucaacagacaggugaucgugaacagaagcgacagaagcggcuacagcggcaucuucagcguggagggcaagagcugcaucaacagaugcuucuacguggagcugaucagaggcagaaaggaggagaccgaggugcuguggaccagcaacagcaucgugguguucugcggcaccagcggcaccuacggcaccggcagcuggcccgacggcgccgaccugaaccugaugcccaucuga

SEQ ID NO: 183105 - RNA, 1410 nt, Artificial Sequence; identical to SEQ ID NO: 182982
  derived and/or modified CDS sequence (opt4) from neuraminidase__InfluenzaA__AFN19648

SEQ ID NO: 183106 - RNA, 1410 nt, Artificial Sequence; identical to SEQ ID NO: 183018
  derived and/or modified CDS sequence (opt4) from neuraminidase__InfluenzaA__AFN19650

SEQ ID NO: 183107 - RNA, 1410 nt, Artificial Sequence
  derived and/or modified CDS sequence (opt4) from neuraminidase__InfluenzaA__AFN19652
augaaccccaaccagaagaucaucaccaucggcagcgugagccugaccaucagcaccaucugcuucuucaugcagaucgccauccugaucaccaccgugacccugcacuucaagcaguacgaguucaacagcccccccaacaaccaggugaugcugugcgagcccaccaucaucgagagaaacaucaccgaggugguguaccugaccaacaccaccaucgagaaggagaucugccccaagcccgccgaguacagaaacuggagcaagccccagugcgacaucaccggcuucgcccccuucagcaaggacaacagcaucagacugagcgccggcggcgacaucugggugaccagagagcccuacgugagcugcgaccccgacaagugcuaccaguucgcccugggccagggcaccacccugaacaacgugcacagcaacaacaccgugagagacagaacccccuacagaacccugcugaugaacgagcugggcgugcccuuccaccugggcaccaagcaggugugcaucgccuggagcagcagcagcugccacgacggcaaggccuggcugcacgugugcaucaccggcgacgacaagaacgccaccgccagcuucaucuacaacggcagacugguggacagcguggugagcuggagcaaggagauccugagaacccaggagagcgagugcgugugcaucaacggcaccugcaccguggugaugaccgacggcagcgccagcggcaaggccgacaccaagauccuguucaucgaggagggcaagaucgugcacaccagcacccugagcggcagcgcccagcacguggaggagugcagcugcuaccccagauaccccggcgugagaugcgugugcagagacaacuggaagggcagcaacagacccaucguggacaucaacaucaaggaccacagcaucgugagcagcuacgugugcagcggccuggugggcgacacccccagaaagaacgacagcagcagcagcagccacugccuggaccccaacaacgaggagggcggccacggcgugaagggcugggccuucgacgacggcaacgacguguggaugggcagaaccaucaacgagaccagcagacugggcuacgagaccuucaaggugaucgagggcuggagcaaccccaagagcaagcugcagaucaacagacaggugaucguggacagaggcgacagaagcggcuacagcggcaucuucagcguggagggcaagagcugcaucaacagaugcuucuacguggagcugaucagaggcagaaaggaggagaccgaggugcuguggaccagcaacagcaucgugguguucugcggcaccagcggcaccuacggcaccggcagcuggcccgacggcgccgaccugaaccugaugcccaucuga

SEQ ID NO: 183108 - RNA, 1410 nt, Artificial Sequence
  derived and/or modified CDS sequence (opt4) from neuraminidase__InfluenzaA__AFN19654
augaaccccaaccagaagaucaucaccaucggcagcgugagccugaccaucagcaccaucugcuucuucaugcagaucgccauccugaucaccaccgugacccugcacuucaagcaguacgaguucaacagcccccccaacaaccaggugaugcugugcgagcccaccaucaucgagagaaacaucaccgagaucguguaccugaccaacaccaccaucgagaaggagaccugccccaagcccaccgaguacagaaacuggagcaagccccagugcgacaucaccggcuucgcccccuucagcaaggacaacagcaucagacugagcgccggcggcgacaucugggugaccagagagcccuacgugagcugcgaccccgacaagugcuaccaguucgcccugggccagggcaccacccugaacaacgugcacagcaacaacaccgugagagacagaacccccuacagaacccugcugaugaacgagcugggcgugcccuuccaccugggcaccaagcaggugugcaucgccuggagcagcagcagcugccacgacggcaaggccuggcugcacgugugcaucaccggcgacgacaagaacgccaccgccagcuucaucuacaacggcagacugguggacagcguggugagcuggagcaaggagauccugagaacccaggagagcgagugcgugugcaucaacggcaccugcaccguggugaugaccgacggcagcgccagcggcaaggccgacaccaagauccuguucaucgaggagggcaagaucgugcacaccagcacccugagcggcagcgcccagcacguggaggagugcagcugcuaccccagauaccccggcgugagaugcgugugcagagacaacuggaagggcagcaacagacccaucguggacaucaacaucaaggaccacagcaucgugagcagcuacgugugcagcggccuggugggcgacacccccagaaagaacgacagcagcagcagcagccacugccuggaccccaacaacgaggagggcggccacggcgugaagggcugggccuucgacgacggcaacgacguguggaugggcagaaccaucaacgagaccagcagacugggcuacgagaccuucaaggugaucgagggcuggagcaaccccaagagcaagcugcagaucaacagacaggugaucguggacagaggcgacagaagcggcuacagcggcaucuucagcguggagggcaagagcugcaucaacagaugcuucuacguggagcugaucagaggcagaaaggaggagaccgaggugcuguggaccagcaacagcaucgugguguucugcggcaccagcggcaccuacggcaccggcagcuggcccgacggcgccgaccugaaccugaugcccaucuga

SEQ ID NO: 183109 - RNA, 1410 nt, Artificial Sequence; identical to SEQ ID NO: 182982
  derived and/or modified CDS sequence (opt4) from neuraminidase__InfluenzaA__AFN19656

SEQ ID NO: 183110 - RNA, 1410 nt, Artificial Sequence; identical to SEQ ID NO: 182206
  derived and/or modified CDS sequence (opt4) from neuraminidase__InfluenzaA__AFN19658

SEQ ID NO: 183111 - RNA, 1410 nt, Artificial Sequence; identical to SEQ ID NO: 183099
  derived and/or modified CDS sequence (opt4) from neuraminidase__InfluenzaA__AFN19660

SEQ ID NO: 183112 - RNA, 1410 nt, Artificial Sequence; identical to SEQ ID NO: 182206
  derived and/or modified CDS sequence (opt4) from neuraminidase__InfluenzaA__AFN19662

SEQ ID NO: 183113 - RNA, 1410 nt, Artificial Sequence
  derived and/or modified CDS sequence (opt4) from neuraminidase__InfluenzaA__AFN19664
augaaccccaaccagaagaucaucaccaucggcagcgugagccugaccaucagcaccaucugcuucuucaugcagaucgccauccugaucaccaccgugacccugcacuucaagcaguacgaguucaacagcccccccaacaaccaggugaugcugugcgagcccaccaucaucgagagaaacaucaccgagaucguguaccugaccaacaacaccaucgagaaggagaucugccccaagcccgccgaguacagaaacuggagcaagccccagugcggcaucaccggcuucgcccccuucagcaaggacaacagcaucagacugagcgccggcggcgacaucugggugaccagagagcccuacgugagcugcgaccccgacaagugcuaccaguucgcccugggccagggcaccacccugaacaacgugcacagcaacaacaccgugagagacagaacccccuacagaacccugcugaugaacgagcugggcgugcccuuccaccugggcaccaagcaggugugcaucgccuggagcagcagcagcugccacgacggcaaggccuggcugcacgugugcaucaccggcgacgacaagaacgccaccgccagcuucaucuacaacggcagacugguggacagcguggugagcuggagcaaggagauccugagaacccaggagagcgagugcgugugcaucaacggcaccugcaccguggugaugaccgacggcagcgccagcggcaaggccgacaccaagauccuguucaucgaggagggcaagaucgugcacaccagcacccugagcggcagcgcccagcacguggaggagugcagcugcuaccccagauaccccggcgugagaugcgugugcagagacaacuggaagggcagcaacagacccaucguggacaucaacaucaaggaccacagcaucgugagcagcuacgugugcagcggccuggugggcgacacccccagaaagaacgacagcagcagcagcagccacugccuggaccccaacaacgaggagggcggccacggcgugaagggcugggccuucgacgacggcaacgacguguggaugggcagaaccaucaacgagaccagcagacugggcuacgagaccuucaaggugaucgagggcuggagcaaccccaagagcaagcugcagaucaacagacaggugaucguggacagaggcgacagaagcggcuacagcggcaucuucagcguggagggcaagagcugcaucaacagaugcuucuacguggagcugaucagaggcagaaaggaggagaccgaggugcuguggaccagcaacagcaucgugguguucugcggcaccagcggcaccuacggcaccggcagcuggcccgacggcgccgaccugaaccugaugcccaucuga

SEQ ID NO: 183114 - RNA, 1410 nt, Artificial Sequence
  derived and/or modified CDS sequence (opt4) from neuraminidase__InfluenzaA__AFN19666
augaaccccaaccagaagaucaucaccaucggcagcgugagccugaccaucagcaccaucugcuucuucaugcagaucgccauccugaucaccaccgugacccugcacuucaagcaguacgaguucaacagcccccccaacaaccaggugaugcugugcgagcccaccaucaucgagagaaacaugaccgagaucguguaccugaccaacaccaccaucgagaaggagaucugccccaagcccgccgaguacagaaacuggagcaagccccagugcgacaucaccggcuucgcccccuucagcaaggacaacagcaucagacugagcgccggcggcgacaucugggugaccagagagcccuacgugagcugcgaccccgacaagugcuaccaguucgcccugggccagggcaccacccugaacaacgugcacagcaacaacaccgugagagacagaacccccuacagaacccugcugaugaacgagcugggcgugcccuuccaccugggcaccaagcaggugugcaucgccuggagcagcagcagcugccacgacggcaaggccuggcugcacgugugcaucaccggcgacgacaagaacgccaccgccagcuucaucuacaacggcagacugguggacagcguggugagcuggagcaaggagauccugagaacccaggagagcgagugcgugugcaucaacggcaccugcaccguggugaugaccgacggcagcgccagcggcaaggccgacaccaagauccuguucaucgaggagggcaagaucgugcacaccagcacccugagcggcagcgcccagcacguggaggagugcagcugcuaccccagauaccccggcgugagaugcgugugcagagacaacuggaagggcagcaacagacccaucguggacaucaacaucaaggaccacagcaucgugagcagcuacgugugcagcggccuggugggcgacacccccagaaagaacgacagcagcagcagcagccacugccuggaccccaacaacgaggagggcggccacggcgugaagggcugggccuucgacgacggcaacgacguguggaugggcagaaccaucaacgagaccagcagacugggcuacgagaccuucaaggugaucgagggcuggagcaaccccaagagcaagcugcagaucaacagacaggugaucgugaacagaagcgacagaagcggcuacagcggcaucuucagcguggagggcaagagcugcaucaacagaugcuucuacguggagcugaucagaggcagaaaggaggagaccgaggugcuguggaccagcaacagcaucgugguguucugcggcaccagcggcaccuacggcaccggcagcuggcccgacggcgccgaccugaaccugaugcccaucuga

SEQ ID NO: 183115 - RNA, 1410 nt, Artificial Sequence
  derived and/or modified CDS sequence (opt4) from neuraminidase__InfluenzaA__AFN19668
augaaccccaaccagaagaucaucaccaucggcagcgugagccugaccaucagcaccaucugcuucuucaugcagaucgccauccugaucaccaccgugacccugcacuucaagcaguacgaguucaacagcccccccaacaaccaggugaugcugugcgagcccaccaucaucgagagaaacaugaccgagaucguguaccugaccaacaccaccaucgagaaggagaucugccccaagcccgccgaguacagaaacuggagcaagccccagugcgacaucaccggcuucgcccccuucagcaaggacaacagcaucagacugagcgccggcggcgacaucugggugaccagagagcccuacgugagcugcgaccccgacaagugcuaccaguucgcccugggccagggcaccacccugaacaacgagcacagcaacaacaccgugagagacagaacccccuacagaacccugcugaugaacgagcugggcgugcccuuccaccugggcaccaagcaggugugcaucgccuggagcagcagcagcugccacgacggcaaggccuggcugcacgugugcaucaccggcgacgacaagaacgccaccgccagcuucaucuacaacggcagacugguggacagcguggugagcuggagcaaggagauccugagaacccaggagagcgagugcgugugcaucaacggcaccugcaccguggugaugaccgacggcagcgccagcggcaaggccgacaccaagauccuguucaucgaggagggcaagaucgugcacaccagcacccugagcggcagcgcccagcacguggaggagugcagcugcuaccccagauaccccggcgugagaugcgugugcagagacaacuggaagggcagcaacagacccaucguggacaucaacaucaaggaccacagcaucgugagcagcuacgugugcagcggccuggugggcgacacccccagaaagaacgacagcagcagcagcagccacugccuggaccccaacaacgaggagggcggccacggcgugaagggcugggccuucgacgacggcaacgacguguggaugggcagaaccaucaacgagaccagcagacugggcuacgagaccuucaaggugaucgagggcuggagcaaccccaagagcaagcugcagaucaacagacaggugaucguggacagaagcgacagaagcggcuacagcggcaucuucagcguggagggcaagagcugcaucaacagaugcuucuacguggagcugaucagaggcagaaaggaggagaccgaggugcuguggaccagcaacagcaucgugguguucugcggcaccagcggcaccuacggcaccggcagcuggcccgacggcgccgaccugaaccugaugcccaucuga

SEQ ID NO: 183116 - RNA, 1410 nt, Artificial Sequence; identical to SEQ ID NO: 183018
  derived and/or modified CDS sequence (opt4) from neuraminidase__InfluenzaA__AFN19670

SEQ ID NO: 183117 - RNA, 1410 nt, Artificial Sequence; identical to SEQ ID NO: 182206
  derived and/or modified CDS sequence (opt4) from neuraminidase__InfluenzaA__AFN19673

SEQ ID NO: 183118 - RNA, 1410 nt, Artificial Sequence; identical to SEQ ID NO: 182982
  derived and/or modified CDS sequence (opt4) from neuraminidase__InfluenzaA__AFN19675

SEQ ID NO: 183119 - RNA, 1410 nt, Artificial Sequence
  derived and/or modified CDS sequence (opt4) from neuraminidase__InfluenzaA__AFN19677
augaaccccaaccagaagaucaucaccaucggcagcgugagccugaccaucagcaucaucugcuucuucaugcagaucgccauccugaucaccaccgugacccugcacuucaagcaguacgaguucaacagcccccccaacaaccaggugaugcugugcgagcccaccaucaucgagagaaacaucaccgagaucguguaccugaccaacaccaccaucgagaaggagaucugccccaagcccgccgaguacagaaacuggagcaagccccagugcgacaucaccggcuucgcccccuucagcaaggacaacagcaucagacugagcgccggcggcgacaucugggugaccagagagcccuacgugagcugcgaccccgacaagugcuaccaguucgcccugggccagggcaccacccugaacaacgugcacagcaacaacaccgugagagacagaacccccuacagaacccugcugaugaacgagcugggcgugcccuuccaccugggcaccaagcaggugugcaucgccuggagcagcagcagcugccacgacggcaaggccuggcugcacgugugcaucaccggcgacgacaagaacgccaccgccagcuucaucuacaacggcagacugguggacagcguggugagcuggagcaaggagauccugagaacccaggagagcgagugcgugugcaucaacggcaccugcaccguggugaugaccgacggcagcgccagcggcaaggccgacaccaagauccuguucaucgaggagggcaagaucgugcacaccagcacccugagcggcagcgcccagcacguggaggagugcagcugcuaccccagauaccccggcgugagaugcgugugcagagacaacuggaagggcagcaacagacccaucguggacaucaacaucaaggaccacagcaucgugagcagcuacgugugcagcggccuggugggcgacacccccagaaagaacgacagcagcagcagcagccacugccuggaccccaacaacgaggagggcggccacggcgugaagggcugggccuucgacgacggcaacgacguguggaugggcagaaccaucaacgagaccagcagacugggcuacgagaccuucaaggugaucgagggcuggagcaaccccaagagcaagcugcagaucaacagacaggugaucguggacagaggcgacagaagcggcuacagcggcaucuucagcguggagggcaagagcugcaucaacagaugcuucuacguggagcugaucagaggcagaaaggaggagaccgaggugcuguggaccagcaacagcaucgugguguucugcggcaccagcggcaccuacggcaccggcagcuggcccgacggcgccgaccugaaccugaugcccaucuga

SEQ ID NO: 183120 - RNA, 1410 nt, Artificial Sequence; identical to SEQ ID NO: 183018
  derived and/or modified CDS sequence (opt4) from neuraminidase__InfluenzaA__AFN19683

SEQ ID NO: 183121 - RNA, 1410 nt, Artificial Sequence; identical to SEQ ID NO: 182982
  derived and/or modified CDS sequence (opt4) from neuraminidase__InfluenzaA__AFN19685

SEQ ID NO: 183122 - RNA, 1410 nt, Artificial Sequence; identical to SEQ ID NO: 182982
  derived and/or modified CDS sequence (opt4) from neuraminidase__InfluenzaA__AFN19687

SEQ ID NO: 183123 - RNA, 1410 nt, Artificial Sequence; identical to SEQ ID NO: 182982
  derived and/or modified CDS sequence (opt4) from neuraminidase__InfluenzaA__AFN19689

SEQ ID NO: 183124 - RNA, 1410 nt, Artificial Sequence; identical to SEQ ID NO: 182206
  derived and/or modified CDS sequence (opt4) from neuraminidase__InfluenzaA__AFN19691

SEQ ID NO: 183125 - RNA, 1410 nt, Artificial Sequence
  derived and/or modified CDS sequence (opt4) from neuraminidase__InfluenzaA__AFN19693
augaaccccaaccagaagaucaucaccaucggcagcgugagccugaccaucagcaccaucugcuucuucaugcagaucgccauccugaucaccaccgugacccugcacuucaagcaguacgaguucaacagcccccccaacaaccaggugaugcugugcgagcccaccaucaucgagagaaacaucaccgagaucguguaccugaccaacaccaccaucgagaaggagaucugccccaagcuggccgaguacagaaacuggagcaagccccagugcgacaucaccggcuucgcccccuucagcaaggacaacagcaucagacugagcgccggcggcgacaucugggugaccagagagcccuacgugagcugcgaccccgacaagugcuaccaguucgcccugggccagggcaccacccugaacaacgugcacagcaacaacaccgugagagacagaacccccuacagaacccugcugaugaacgagcugggcgugcccuuccaccugggcaccaagcaggugugcaucgccuggagcagcagcagcugccacgacggcaaggccuggcugcacgugugcaucaccggcgacgacaagaacgccaccgccagcuucaucuacaacggcagacugguggacagcguggugagcuggagcaaggacauccugagaacccaggagagcgagugcgugugcaucaacggcaccugcgccguggugaugaccgacggcagcgccagcggcaaggccgacaccaagauccuguucaucgaggagggcaagaucgugcacaccagcacccugagcggcagcgcccagcacguggaggagugcagcugcuaccccagauaccccggcgugagaugcgugugcagagacaacuggaagggcagcaacagacccaucguggacaucaacaucaaggaccacagcaucgugagcagcuacgugugcagcggccuggugggcgacacccccagaaagaacgacagcagcagcagcagcaacugccuggaccccaacaacgaggagggcggccacggcgugaagggcugggccuucgacgacggcaacgacguguggaugggcagaaccaucaacgagaccagcagacugggcuacgagaccuucaaggugaucgagggcuggagcaaccccaagagcaagcugcagaucaacagacaggugaucguggacagaggcaacagaagcggcuacagcggcaucuucagcguggagggcaagaacugcaucaacagaugcuucuacguggagcugaucagaggcagaaaggaggagaccgaggugcuguggaccagcaacagcaucgugguguucugcggcaccagcggcaccuacggcaccggcagcuggcccgacggcgccgaccugaaccugaugcccaucuga

SEQ ID NO: 183126 - RNA, 1410 nt, Artificial Sequence
  derived and/or modified CDS sequence (opt4) from neuraminidase__InfluenzaA__AFN19697
augaaccccaaccagaagaucaucaccaucggcagcgugagccugaccaucagcaccaucugcuucuucaugcagaucgccauccugaucaccaccgugacccugcacuucaagcaguacgaguucaacagcccccccaacaaccaggugaugcugugcgagcccaccaucaucgagagaaacaucaccgagaucguguaccugaccaacaccaccaucgagaaggagaucugccccaagcccgccgaguacagaaacuggagcaagccccagugcggcaucaccggcuucgcccccuucagcaaggacaacagcaucagacugagcgccggcggcgacaucugggugaccagagagcccuacgugagcugcgaccccgacaagugcuaccaguucgcccugggccagggcaccacccugaacaacgugcacagcaacaacaccgugagagacagaacccccuacagaacccugcugaugaacgagcugggcgugcccuuccaccugggcaccaagcaggugugcaucgccuggagcagcagcagcugccacgacggcaaggccuggcugcacgugugcaucaccggcgacgacaagaacgccaccgccagcuucaucuacaacggcagacugguggacagcguggugagcuggagcaaggagacccugagaacccaggagagcgagugcgugugcaucaacggcaccugcaccguggugaugaccgacggcagcgccagcggcaaggccgacaccaagauccuguucaucgaggagggcaagaucgugcacaccagcacccugagcggcagcgcccagcacguggaggagugcagcugcuaccccagauaccccggcgugagaugcgugugcagagacaacuggaagggcagcaacagacccaucguggacaucaacaucaaggaccacagcaucgugagcagcuacgugugcagcggccuggugggcgacacccccagaaagaacgacagcagcagcagcagccacugccuggaccccaacaacgaggagggcggccacggcgugaagggcugggccuucgacgacggcaacgacguguggaugggcagaaccaucaacgagaccagcagacugggcuacgagaccuucaaggugaucgagggcuggagcaaccccaagagcaagcugcagaucaacagacaggugaucguggacagaggcgacagaagcggcuacagcggcaucuucagcguggagggcaagagcugcaucaacagaugcuucuacguggagcugaucagaggcagaaaggaggagaccgaggugcuguggaccagcaacagcaucgugguguucugcggcaccagcggcaccuacggcaccggcagcuggcccgacggcgccgaccugaaccugaugcccaucuga

SEQ ID NO: 183127 - RNA, 1410 nt, Artificial Sequence; identical to SEQ ID NO: 182982
  derived and/or modified CDS sequence (opt4) from neuraminidase__InfluenzaA__AFN19699

SEQ ID NO: 183128 - RNA, 1410 nt, Artificial Sequence; identical to SEQ ID NO: 183018
  derived and/or modified CDS sequence (opt4) from neuraminidase__InfluenzaA__AFN19701

SEQ ID NO: 183129 - RNA, 1410 nt, Artificial Sequence
  derived and/or modified CDS sequence (opt4) from neuraminidase__InfluenzaA__AFN19703
augaaccccaaccagaagaucaucaccaucggcagcgugagccugaccaucagcaccaucugcuucuucaugcagaucgccauccugaucaccaccgugacccugcacuucaagcaguacgaguucaacagcccccccaacaaccaggugaugcugugcgagcccaccaucaucgagagaaacaucaccgagaucguguaccugaccaacaccaccaucgagaaggagaucugccccaagcccgccgaguacagaaacuggagcaagccccagugcggcaucaccggcuucgcccccuucagcaaggacaacagcaucagacugagcgccggcggcgacaucugggugaccagagagcccuacgugagcugcgaccccgacaagugcuaccaguucgcccugggccagggcaccacccuggacaacgugcacagcaacaacaccgugagagacagaacccccuacagaacccugcugaugaacgagcugggcgugcccuuccaccugggcaccaagcaggugugcaucgccuggagcagcagcagcugccacgacggcaaggccuggcugcacgugugcaucaccggcgacgacaagaacgccaccgccagcuucaucuacaacggcagacugguggacagcguggugagcuggagcaaggagauccugagaacccaggagagcgagugcgugugcaucaacggcaccugcaccguggugaugaccgacggcagcgccagcggcaaggccgacaccaagauccuguucaucgaggagggcaagaucgugcacaccagcacccugagcggcagcgcccagcacguggaggagugcagcugcuaccccagauaccccggcgugagaugcgugugcagagacaacuggaagggcagcaacagacccaucguggacaucaacaucaaggaccacagcaucgugagcagcuacgugugcagcggccuggugggcgacacccccagaaagaacgacagcagcagcagcagccacugccuggaccccaacaacgaggagggcggccacggcgugaagggcugggccuucgacgacggcaacgacguguggaugggcagaaccaucaacgagaccagcagacugggcuacgagaccuucaaggugaucgagggcuggagcaaccccaagagcaagcugcagaucaacagacaggugaucguggacagaggcgacagaagcggcuacagcggcaucuucagcguggagggcaagagcugcaucaacagaugcuucuacguggagcugaucagaggcagaaaggaggagaccgaggugcuguggaccagcaacagcaucgugguguucugcggcaccagcggcaccuacggcaccggcagcuggcccgacggcgccgaccugaaccugaugcccaucuga

SEQ ID NO: 183130 - RNA, 1410 nt, Artificial Sequence; identical to SEQ ID NO: 180317
  derived and/or modified CDS sequence (opt4) from neuraminidase__InfluenzaA__AFN19711

SEQ ID NO: 183131 - RNA, 1410 nt, Artificial Sequence
  derived and/or modified CDS sequence (opt4) from neuraminidase__InfluenzaA__AFN19721
augaaccccaaccagaagaucaucaccaucggcagcgugugcaugaccaucggcauggccaaccugauccugcagaucggcaacaucaucagcaucuggaucagccacagcauccagcugggcaaccagagccagaucgagaccugcaaccagagcgugaucaccuacgagaacaacaccugggugaaccagaccuacgugaacaucagcaacaccaacuucgccgccggccagagcguggugagcgugaagcuggccggcaacagcagccugugccccgugagcggcugggccaucuacagcaaggacaacagcaucagaaucggcagcaagggcgacguguucgugaucagagagcccuucaucagcugcagccccauggagugcagaaccuucuuccugacccagggcgcccugcugaacgacaagcacagcaacggcaccaucaaggacagaagccccuacagaacccugaugagcugccccaucggcgaggugcccagccccuacaacagcagauucgagagcguggccuggagcgccagcgccugccacgacggcaucaacuggcugaccaucggcaucagcggccccgacaacggcgccguggccgugcugaaguacaacggcaucaucaccgacaccaucaagagcuggagaaacaacauccugagaacccaggagagcgagugcgccugcgugaacggcagcugcuucaccaucaugaccgacggccccagcgacggccaggccagcuacaagaucuucagaaucgagaagggcaagaucgugaagagcguggagaugaacgcccccaacuaccacuacgaggagugcagcugcuaccccgacagcagcgagaucaccugcgugugcagagacaacuggcacggcagcaacagacccugggugagcuucaaccagaaccuggaguaccagaucggcuacaucugcagcggcaucuucggcgacaaccccagacccaacgacaagaccggcagcugcggccccgugagcagcaacggcgccaacggcgugaagggcuucagcuucaaguacggcaacggcguguggaucggcagaaccaagagcaucagcagcagaaagggcuucgagaugaucugggaccccaacggcuggaccggcaccgacaacaacuucagcaucaagcaggacaucgugggcaucaacgaguggagcggcuacagcggcagcuucgugcagcaccccgagcugaccggccuggacugcaucagacccugcuucuggguggagcugaucagaggcagacccaaggagaacaccaucuggaccagcggcagcagcaucagcuucugcggcgugaacagcgacaccgugggcuggagcuggcccgacggcgccgagcugcccuucaccaucgacaaguga

SEQ ID NO: 183132 - RNA, 1410 nt, Artificial Sequence; identical to SEQ ID NO: 181138
  derived and/or modified CDS sequence (opt4) from neuraminidase__InfluenzaA__AFN19731

SEQ ID NO: 183133 - RNA, 1410 nt, Artificial Sequence; identical to SEQ ID NO: 180317
  derived and/or modified CDS sequence (opt4) from neuraminidase__InfluenzaA__AFN19737

SEQ ID NO: 183134 - RNA, 1410 nt, Artificial Sequence
  derived and/or modified CDS sequence (opt4) from neuraminidase__InfluenzaA__AFN19747
augaaccccaaccagaagaucaucaccaucggcagcgugugcaugaccaucggcauggccaaccugauccugcagaucggcaacaucaucagcaucuggaucagccacagcauccagcugggcaaccagaaccagaucgagaccugcaaccagagcgugaucacccacgagaacaacaccugggugaaccagaccuacgugaacaucagcaacaccaacuucgccgccggccagagcguggugagcgugaagcuggccggcaacagcagccugugccccgugagcggcugggccaucuacagcaaggacaacagcaucagaaucggcagcaagggcgacguguucgugaucagagagcccuucaucagcugcagcccccuggagugcagaaccuucuuccugacccagggcgcccugcugaacgacaagcacagcaacggcaccaucaaggacagaagccccuacagaacccugaugagcugccccaucggcgaggugcccagccccuacaacagcagauucgagagcguggccuggagcgccagcgccugccacgacggcaucaacuggcugaccaucggcaucagcggccccgacaacggcgccguggccgugcugaaguacaacggcaucaucaccgacaccaucaagagcuggagaaacaacauccugagaacccaggagagcgagugcgccugcgugaacggcagcugcuucaccgugaugaccgacggccccagcgacggccaggccagcuacaagaucuucagaaucgagaagggcaagaucgugaagagcguggagaugaacgcccccaacuaccacuacgaggagugcagcugcuaccccgacagcagcgagaucaccugcgugugcagagacaacuggcacggcgccaacagacccugggugagcuucaaccagaaccuggaguaccagaucggcuacaucugcagcggcaucuucggcgacaaccccagacccaacgacaagaccggcagcugcggccccgugagcagcaacggcgccaacggcgugaagggcuucagcuucaaguacggcaacggcguguggaucggcagaaccaagagcaucagcagcagaaacggcuucgagaugaucugggaccccaacggcuggaccggcaccgacaacaacuucagcaucaagcaggacaucgugggcaucaacgaguggagcggcuacagcggcagcuucgugcagcaccccgagcugaccggccuggacugcaucagacccugcuucuggguggagcugaucagaggcagacccaaggagaacaccaucuggaccagcggcagcagcaucagcuucugcggcgugaacagcgacaccgugggcuggagcuggcccgacggcgccgagcugcccuucaccaucgacaaguga

SEQ ID NO: 183135 - RNA, 1410 nt, Artificial Sequence; identical to SEQ ID NO: 180317
  derived and/or modified CDS sequence (opt4) from neuraminidase__InfluenzaA__AFN19749

SEQ ID NO: 183136 - RNA, 1410 nt, Artificial Sequence; identical to SEQ ID NO: 180317
  derived and/or modified CDS sequence (opt4) from neuraminidase__InfluenzaA__AFN19759

SEQ ID NO: 183137 - RNA, 1410 nt, Artificial Sequence
  derived and/or modified CDS sequence (opt4) from neuraminidase__InfluenzaA__AFN19769
augaaccccaaccagaagaucaucaccaucggcagcgugugcaugaccaucggcauggccaaccugauccugcagaucggcaacaucaucagcaucuggaucagccacagcauccagcugggcaaccagagccagaucgagaccugcaaccagagcgugaucaccuacgagaacaacaccugggugaaccagaccuacgugaacaucagcaacaccaacuucgccgccggccagagcguggugagcgugaagcuggccggcaacagcagccugugccccgugagcggcugggccaucuacagcaaggacaacagcaucagaaucggcagcaagggcgacguguucgugaucagagagcccuucaucagcugcagcccccuggagugcagaaccuucuuccugacccagggcgcccugcugaacgacaagcacagcaacggcaccaucaaggacagaagccccuacagaacccugaugagcugccccaucggcgaggugcccagccccuacaacagcagauucgagagcguggccuggagcgccagcgccugccacgacggcaucaacuggcugaccaucggcaucagcggccccgacaacagagccguggccgugcugaaguacaacggcaucaucaccgacaccaucaagagcuggagaaacaacauccugagaacccaggagagcgagugcgccugcgugaacggcagcugcuucaccaucaugaccgacggccccagcgacggccaggccagcuacaagaucuucagaaucgagaagggcaagaucgugaagagcguggagaugaacgcccccaacuaccacuacgaggagugcagcugcuaccccgacagcagcgagaucaccugcgugugcagagacaacuggcacggcagcaacagacccugggugagcuucaaccagaaccuggaguaccagaucggcuacaucugcagcggcaucuucggcgacaaccccagacccaacgacaagaccggcagcugcggccccgugagcagcaacggcgccaacggcgugaagggcuucagcuucaaguacggcaacggcguguggaucggcagaaccaagagcaucagcagcagaaagggcuucgagaugaucugggaccccaacggcuggaccggcaccgacaacaacuucagcaucaagcaggacaucgugggcaucaacgaguggagcggcuacagcggcagcuucgugcagcaccccgagcugaccggccuggacugcaucagacccugcuucuggguggagcugaucagaggcagacccaaggagaacaccaucuggaccagcggcagcagcaucagcuucugcggcgugaacagcgacaccgugggcuggagcuggcccgacggcgccgagcugcccuucaccaucgacaaguga

SEQ ID NO: 183138 - RNA, 1410 nt, Artificial Sequence; identical to SEQ ID NO: 180317
  derived and/or modified CDS sequence (opt4) from neuraminidase__InfluenzaA__AFN19783

SEQ ID NO: 183139 - RNA, 1410 nt, Artificial Sequence; identical to SEQ ID NO: 181018
  derived and/or modified CDS sequence (opt4) from neuraminidase__InfluenzaA__AFN19793

SEQ ID NO: 183140 - RNA, 1410 nt, Artificial Sequence; identical to SEQ ID NO: 180317
  derived and/or modified CDS sequence (opt4) from neuraminidase__InfluenzaA__AFN19807

SEQ ID NO: 183141 - RNA, 1410 nt, Artificial Sequence
  derived and/or modified CDS sequence (opt4) from neuraminidase__InfluenzaA__AFN19809
augaaccccaaccagaagaucaucaccaucggcagcgugugcaugaucaucggcauggccaaccugaugcugcagaucggcaacaucaucagcaucuggaucagccacagcauccagcugggcaaccagaaccagaucgagaccugcaaccagagcgugaucaccuacgagaacaacaccugggugaaccagaccuacgugaacaucagcaacaccaacuucgccgccggccagagcgugaucagcgugaagcuggccggcaacagcagccugugccccgugagcggcugggccaucuacagcaaggacaacagcaucagaaucggcagcaagggcgacguguucgugaucagagagcccuucaucagcugcagcccccuggagugcagaaccuucuuccugacccagggcgcccugcugaacgacaagcacagcaacggcaccaucaaggacagaagccccuacagaacccugaugagcugccccaucggcgaggugcccagccccuacaacagcagauucgagagcguggccuggagcgccagcgccugccacgacggcaucaacuggcugaccaucggcaucagcggccccgacaacggcgccguggccgugcugaaguacaacggcaucaucaccgacaccaucaagagcuggagaaacaacauccugagaacccaggagagcgagugcgccugcgugaacggcagcugcuucaccgugaugaccgacggccccagcgacggccaggccagcuacaagaucuucagaaucgagaagggcaagaucgugaagagcguggagaugaacgcccccaacuaccacuacgaggagugcagcugcuaccccgacagcagcgagaucaccugcgugugcagagacaacuggcacggcagcaacagacccugggugagcuucaaccagaaccuggaguaccagaucggcuacaucugcagcggcaucuucggcgacaaccccagacccaacgacaagaccggcagcugcggccccgugagcaccaacggcgccaacggcgugaagggcuucagcuucaaguacggcaacggcguguggaucggcagaaccaagagcaucagcagcagaaacggcuucgagaugaucugggaccccaacggcuggaccggcaccgacaacaaguucagcaucaagcaggacaucgugggcaucaacgaguggagcggcuacagcggcagcuucgugcagcaccccgagcugaccggccuggacugcaucagacccugcuucuggguggagcugaucagaggcagacccaaggagaacaccaucuggaccagcggcagcagcaucagcuucugcggcgugaacagcgacaccgugggcuggagcuggcccgacggcgccgagcugcccuucaccaucgacaaguga

SEQ ID NO: 183142 - RNA, 1410 nt, Artificial Sequence; identical to SEQ ID NO: 181140
  derived and/or modified CDS sequence (opt4) from neuraminidase__InfluenzaA__AFN19815

SEQ ID NO: 183143 - RNA, 1410 nt, Artificial Sequence
  derived and/or modified CDS sequence (opt4) from neuraminidase__InfluenzaA__AFN19833
augaaccccaaccagaagaucaucaccaucggcagcgugugcaugaccaucggcauggccaaccugauccugcagaucggcaacaucaucagcaucuggaucagccacagcauccagcugggcaaccagagccagaucgagaccugcaaccagagcgugaucaccuacgagaacaacaccugggugaaccagaccuacgugaacaucagcaacaccaacuucgccgccggccagagcguggugagcgugaagcuggccggcaacagcagccugugccccgugagcggcugggccaucuacagcaaggacaacagcaucagaaucggcagcaagggcgacguguucgugaucagagagcccuucaucagcugcagcccccuggagugcagaaccuucuuccugacccagggcgcccugcugaacgacaagcacagcaacggcaccaucaaggacagaagccccuacagaacccugaugagcugccccaucggcgaggugcccagccccuacaacagcagauucgagagcguggccuggagcgccagcgccugccacgacggcaucaacuggcugaccaucggcaucagcggccccgacaacggcgccguggccgugcugaaguacaacggcaucaucaccgacaccaucaagagcuggaagaacaacauccugagaacccaggagagcgagugcgccugcgugaacggcagcugcuucaccaucaugaccgacggccccagcgacggccaggccagcuacaagaucuucagaaucgagaagggcaagaucgugaagagcguggagaugaacgcccccaacuaccacuacgaggagugcagcugcuaccccgacagcagcgagaucaccugcgugugcagagacaacuggcacggcagcaacagacccugggugagcuucaaccagaaccuggaguaccagaucggcuacaucugcagcggcaucuucggcgacaaccccagacccaacgacaagaccggcagcugcggccccgugagcagcaacggcgccaacggcgugaagggcuucagcuucaaguacggcaacggcguguggaucggcagaaccaagagcaucagcagcagaaagggcuucgagaugaucugggaccccaacggcuggaccggcaccgacaacaacuucagcaucaagcaggacaucgugggcaucaacgaguggagcggcuacagcggcagcuucgugcagcaccccgagcugaccggccuggacugcaucagacccugcuucuggguggagcugaucagaggcagacccaaggagaacaccaucuggaccagcggcagcagcaucagcuucugcggcgugaacagcgacaccgugggcuggagcuggcccgacggcgccgagcugcccuucaccaucgacaaguga

SEQ ID NO: 183144 - RNA, 1410 nt, Artificial Sequence; identical to SEQ ID NO: 180776
  derived and/or modified CDS sequence (opt4) from neuraminidase__InfluenzaA__AFN19851

SEQ ID NO: 183145 - RNA, 1410 nt, Artificial Sequence; identical to SEQ ID NO: 180317
  derived and/or modified CDS sequence (opt4) from neuraminidase__InfluenzaA__AFN19857

SEQ ID NO: 183146 - RNA, 1410 nt, Artificial Sequence
  derived and/or modified CDS sequence (opt4) from neuraminidase__InfluenzaA__AFN19867
augaaccccaaccagaagaucaucaccaucggcagcgugugcaugaccaucggcauggccaaccugauccugcagaucggcaacaucaucagcaucuggaucagccacagcauccagaucggcaaccagaaccagaucgagaccugcaaccagagcgugaucaccuacgagaacaacaccugggugaaccagaccuacgugaacaucagcaacaccaacuucgccgccggccagagcguggugagcgugaagcuggccggcaacagcagccugugccccgugagcggcugggccaucuacagcaaggacaacagcaucagaaucggcagcaagggcgacguguucgugaucagagagcccuucaucagcugcagcccccuggagugcagaaccuucuuccugacccagggcgcccugcugaacgacaagcacagcaacggcaccaucaaggacagaagccccuacagaacccugaugagcugccccaucggcgaggugcccagccccuacaacagcagauucgagagcguggccuggagcgccagcgccugccacgacggcaucaacuggcugaccaucggcaucagcggccccgacaacggcgccguggccgugcugaaguacaacggcaucaucaccgacaccaucaagagcuggagaaacaacauccugagaacccaggagagcgagugcgccugcgugaacggcagcugcuucaccaucaucaccgacggccccagcgacggccaggccagcuacaagaucuucagaaucgagaagggcaagaucgugaagagcguggagaugaacgcccccaacuaccacuacgaggagugcagcugcuaccccgacagcagcgagaucaccugcgugugcagagacaacuggcacggcagcaacagacccugggugagcuucaaccagaaccuggaguaccagaucggcuacaucugcagcggcaucuucggcgacaaccccagacccaacgacaagaccggcagcugcggccccgugagcagcaacggcgccaacggcgugaagggcuucagcuucaaguacggcaacggcguguggaucggcagaaccaagagcaucagcagcagaaagggcuucgagaugaucugggaccccaacggcuggaccggcaccgacaacaacuucagcaucaagcaggacaucgugggcaucaacgaguggagcggcuacagcggcagcuucgugcagcaccccgagcugaccggccuggacugcaucagacccugcuucuggguggagcugaucagaggcagacccaaggagaacaccaucuggaccagcggcagcagcaucagcuucugcggcgugaacagcgacaccgugggcuggagcuggcccgacggcgccgagcugcccuucaccaucgacaaguga

SEQ ID NO: 183147 - RNA, 1410 nt, Artificial Sequence; identical to SEQ ID NO: 180769
  derived and/or modified CDS sequence (opt4) from neuraminidase__InfluenzaA__AFN19877

SEQ ID NO: 183148 - RNA, 1410 nt, Artificial Sequence; identical to SEQ ID NO: 180317
  derived and/or modified CDS sequence (opt4) from neuraminidase__InfluenzaA__AFN19887

SEQ ID NO: 183149 - RNA, 1410 nt, Artificial Sequence
  derived and/or modified CDS sequence (opt4) from neuraminidase__InfluenzaA__AFN19897
augaaccccaaccagaagaucaucaccaucggcagcgugugcaugaccaucggcauggccaaccugauccugcagaucggcaacaucaucagcaucuggaucagccacagcauccagcugggcaaccagagccagaucgagaccugcaaccagagcgugaucaccuacgagaacaacaccugggugaaccagaccuacgugaacaucagcaacaccaacuucgccgccggccagagcguggugagcgugaagcuggccggcaacagcagccugugccccgugagcggcugggccaucuacagcaaggacaacagcaucagaaucggcagcaagggcgacguguucgugaucagagagcccuucaucagcugcagcccccuggagugcagaaccuucuuccugacccagggcgcccugcugaacgacaagcacagcaacggcaccaucaaggacagaagccccuacagaacccugaugagcugccccaucggcgaggugcccagccccugcaacagcagauucgagagcguggccuggagcgccagcgccugccacgacggcaucaacuggcugaccaucggcaucagcggccccgacaacggcgccguggccgugcugaaguacaacggcaucaucaccgacaccaucaagagcuggagaaacaacauccugagaacccaggagagcgagugcgccugcgugaacggcagcugcuucaccaucaugaccgacggccccagcgacggccaggccagcuacaagaucuucagaaucgagaagggcaagaucgugaagagcguggagaugaacgcccccaacuaccacuacgaggagugcagcugcuaccccgacagcagcgagaucaccugcgugugcagagacaacuggcacggcagcaacagacccugggugagcuucaaccagaaccuggaguaccagaucggcuacaucugcagcggcaucuucggcgacaaccccagacccaacgacaagaccggcagcugcggccccgugagcagcaacggcgccaacggcgugaagggcuucagcuucaaguacggcaacggcguguggaucggcagaaccaagagcaucagcagcagaaagggcuucgagaugaucugggaccccaacggcuggaccggcaccgacaacaacuucagcaucaagcaggacaucgugggcaucaacgaguggagcggcuacagcggcagcuucgugcagcaccccgagcugaccggccuggacugcaucagacccugcuucuggguggagcugaucagaggcagacccaaggagaacaccaucuggaccagcggcagcagcaucagcuucugcggcgugaacagcgacaccgugggcuggagcuggcccgacggcgccgagcugcccuucaccaucgacaaguga

SEQ ID NO: 183150 - RNA, 1410 nt, Artificial Sequence; identical to SEQ ID NO: 180317
  derived and/or modified CDS sequence (opt4) from neuraminidase__InfluenzaA__AFN19907

SEQ ID NO: 183151 - RNA, 1410 nt, Artificial Sequence; identical to SEQ ID NO: 180776
  derived and/or modified CDS sequence (opt4) from neuraminidase__InfluenzaA__AFN19917

SEQ ID NO: 183152 - RNA, 1410 nt, Artificial Sequence
  derived and/or modified CDS sequence (opt4) from neuraminidase__InfluenzaA__AFN19923
augaaccccaaccagaagaucaucaccaucggcagcgugugcaugaccaucggcauggccaaccugauccugcagaucggcaacaucaucagcaucuggaucagccacagcauccagcugggcaaccagagccagaucgagaccugcaaccagaacgugaucaccuacgagaacaacaccugggugaaccagaccuacgugaacaucagcaacaccaacuucgccgccggccagagcguggugagcgugaagcuggccggcaacagcagccugugccccgugagcggcugggccaucuacagcaaggacaacagcaucagaaucggcagcaagggcgacguguucgugaucagagagcccuucaucagcugcagcccccuggagugcagaaccuucuuccugacccagggcgcccugcugaacgacaagcacagcaacggcaccaucaaggacagaagccccuacagaacccugaugagcugccccaucggcgaggugcccagccccuacaacagcagauucgagagcguggccuggagcgccagcgccugccacgacggcaucaacuggcugaccaucggcaucagcggccccgacaacggcgccguggccgugcugaaguacaacggcaucaucaccgacaccaucaagagcuggagaaacaacauccugagaacccaggagagcgagugcgccugcgugaacggcagcugcuucaccaucaugaccgacggccccagcgacggccaggccagcuacaagaucuucagaaucgagaagggcaagaucgugaagagcguggagaugaacgcccccaacuaccacuacgaggagugcagcugcuaccccgacagcagcgagaucaccugcgugugcagagacaacuggcacggcagcaacagacccugggugagcuucaaccagaaccuggaguaccagaucggcuacaucugcagcggcaucuucggcgacaaccccagacccaacgacaagaccggcagcugcggccccgugagcagcaacggcgccaacggcgugaagggcuucagcuucaaguacggcaacggcguguggaucggcagaaccaagagcaucagcagcagaaagggcuucgagaugaucugggaccccaacggcuggaccggcaccgacaacaacuucagcaucaagcaggacaucgugggcaucaacgaguggagcggcuacagcggcagcuucgugcagcaccccgagcugaccggccuggacugcaucagacccugcuucuggguggagcugaucagaggcagacccaaggagaacaccaucuggaccagcggcagcagcaucagcuucugcggcgugaacagcgacaccgugggcuggagcuggcccgacggcgccgagcugcccuucaccaucgacaaguga

SEQ ID NO: 183153 - RNA, 1410 nt, Artificial Sequence; identical to SEQ ID NO: 180317
  derived and/or modified CDS sequence (opt4) from neuraminidase__InfluenzaA__AFN19933

SEQ ID NO: 183154 - RNA, 1410 nt, Artificial Sequence; identical to SEQ ID NO: 180776
  derived and/or modified CDS sequence (opt4) from neuraminidase__InfluenzaA__AFN19943

SEQ ID NO: 183155 - RNA, 1410 nt, Artificial Sequence
  derived and/or modified CDS sequence (opt4) from neuraminidase__InfluenzaA__AFN19953
augaaccccaaccagaagaucaucaccaucggcagcgugugcaugaccaucggcauggccaaccugauccugcagaucggcaacaucaucagcaucuggaucagccacagcauccagcugggcaaccagagccagaucgagaccugcaaccagagagugaucaccuacgagaacaacaccugggugaaccagaccuacgugaacaucagcaacaccaacuucgccgccggccagagcguggugagcgugaagcuggccggcaacagcagccugugccccgugagcggcugggccaucuacagcaaggacaacagcaucagaaucggcagcaagggcgacguguucgugaucagagagcccuucaucagcugcagcccccuggagugcagaaccuucuuccugacccagggcgcccugcugaacgacaagcacagcaacggcaccaucaaggacagaagccccuacagaacccugaugagcugccccaucggcgaggugcccagccccuacaacagcagauucgagagcguggccuggagcgccagcgccugccacgacggcaucaacuggcugaccaucggcaucagcggccccgacaacggcgccguggccgugcugaaguacaacggcaucaucaccgacaccaucaagagcuggagaaacaacauccugagaacccaggagagcgagugcgccugcgugaacggcagcugcuucaccaucaugaccgacggccccagcgacggccaggccagcuacaagaucuucagaaucgagaagggcaagaucgugaagagcguggagaugaacgcccccaacuaccacuacgaggagugcagcugcuaccccgacagcagcgagaucaccugcgugugcagagacaacuggcacggcagcaacagacccugggugagcuucaaccagaaccuggaguaccagaucggcuacaucugcagcggcaucuucggcgacaaccccagacccaacgacaagaccggcagcugcggccccgugagcagcaacggcgccaacggcgugaagggcuucagcuucaaguacggcaacggcguguggaucggcagaaccaagagcaucagcagcagaaagggcuucgagaugaucugggaccccaacggcuggaccggcaccgacaacaacuucagcaucaagcaggacaucguggagaucaacgaguggagcggcuacagcggcagcuucgugcagcaccccgagcugaccggccuggacugcaucagacccugcuucuggguggagcugaucagaggcagacccaaggagaacaccaucuggaccagcggcagcagcaucagcuucugcggcgugaacagcgacaccgugggcuggagcuggcccgacggcgccgagcugcccuucaccaucgacaaguga

SEQ ID NO: 183156 - RNA, 1410 nt, Artificial Sequence
  derived and/or modified CDS sequence (opt4) from neuraminidase__InfluenzaA__AFN19967
augaaccccaaccagaagaucaucaccaucggcagcgugugcaugaccaucggcauggccaaccugauccugcagaucggcaacaucaucagcaucuggaucagccacagcauccagcugggcaaccagagccagaucgagaccugcaaccagagcgugaucaccuacgagaacaacaccugggugaaccagaccuacgugaacaucagcaacaccaacuucgccgccggccagagcguggugagcgugaagcuggccggcaacagcagccugugccccgugagcggcugggccaucuacagcaaggacaacagcaucagaaucggcagcaagggcgacguguucgugaucagagagcccuucaucagcugcagcccccuggagugcagaaccuucuuccugacccagggcgcccugcugaacgacaagcacagcaacggcaccaucaaggacagaagccccuacagaacccugaugagcugccccaucggcgaggugcccagccccuacaacagcagauucgagagcguggccuggagcgccagcgccugccacgacggcaucaacuggcugaccaucggcaucagcggccccgacaacggcgccguggccgugcugaaguacaacggcaucaucaccgacaccaucaagagcuggagaagcaacauccugagaacccaggagagcgagugcgccugcgugaacggcagcugcuucaccaucaugaccgacggccccagcgacggccaggccagcuacaagaucuucagaaucgagaagggcaagaucgugaagagcguggagaugaacgcccccaacuaccacuacgaggagugcagcugcuaccccgacagcagcgagaucaccugcgugugcagagacaacuggcacggcagcaacagacccugggugagcuucaaccagaaccuggaguaccagaucggcuacaucugcagcggcaucuucggcgacaaccccagacccaacgacaagaccggcagcugcggccccgugagcagcaacggcgccaacggcgugaagggcuucagcuucaaguacggcaacggcguguggaucggcagaaccaagagcaucagcagcagaaagggcuucgagaugaucugggaccccaacggcuggaccggcaccgacaacaacuucagcaucaagcaggacaucgugggcaucaacgaguggagcggcuacagcggcagcuucgugcagcaccccgagcugaccggccuggacugcaucagacccugcuucuggguggagcugaucagaggcagacccaaggagaacaccaucuggaccagcggcagcagcaucagcuucugcggcgugaacagcgacaccgugggcuggagcuggcccgacggcgccgagcugcccuucaccaucgacaaguga

SEQ ID NO: 183157 - RNA, 1410 nt, Artificial Sequence
  derived and/or modified CDS sequence (opt4) from neuraminidase__InfluenzaA__AFN19973
augaaccccaaccagaagaucaucaccaucggcagcgugugcaugaccaucggcauggccaaccugauccugcagaucggcaacaucaucagcaucuggaucagccacagcauccagcugggcaaccagagccagaucgagaccugcaaccagagcgugaucaccuacgagaacaacaccugggugaaccagaccuacgugaacaucagcaacaccaacuucgccgccggccagagcguggugagcgugaagcuggccggcaacagcagccugugccccgugagcggcugggccaucuacagcaaggacaacagcaucagaaucggcagcaagggcgacguguucgugaucagagagcccuucaucagcugcagcccccuggagugcagaaccuucuuccugacccagggcgcccugcugaacgacaagcacagcaacggcaccaucaaggacagaagccccuacagaacccugaugagcugccccaucggcgaggugcccagccccuacaacagcagauucgagagcguggccuggagcgccagcgccugccacgacggcaucaacuggcugaccaucggcaucagcggccccgacaacggcgccguggccgugcugaaguacaacggcaucaucaccgacaccaucaagagcuggagaaacaacauccugagaacccaggagagcgagugcgccugcgugaacggcagcugcuucaccaucaugaccgacggcagcagcgacggccaggccagcuacaagaucuucagaaucgagaagggcaagaucgugaagagcguggagaugaacgcccccaacuaccacuacgaggagugcagcugcuaccccgacagcagcgagaucaccugcgugugcagagacaacuggcacggcagcaacagacccugggugagcuucaaccagaaccuggaguaccagaucggcuacaucugcagcggcaucuucggcgacaaccccagacccaacgacaagaccggcagcugcggccccgugagcagcaacggcgccaacggcgugaagggcuucagcuucaaguacggcaacggcguguggaucggcagaaccaagagcaucagcagcagaaagggcuucgagaugaucugggaccccaacggcuggaccggcaccgacaacaacuucagcaucaagcaggacaucgugggcaucaacgaguggagcggcuacagcggcagcuucgugcagcaccccgagcugaccggccuggacugcaucagacccugcuucuggguggagcugaucagaggcagacccaaggagaacaccaucuggaccagcggcagcagcaucagcuucugcggcgugaacagcgacaccgugggcuggagcuggcccgacggcgccgagcugcccuucaccaucgacaaguga

SEQ ID NO: 183158 - RNA, 1410 nt, Artificial Sequence; identical to SEQ ID NO: 180317
  derived and/or modified CDS sequence (opt4) from neuraminidase__InfluenzaA__AFN19979

SEQ ID NO: 183159 - RNA, 1410 nt, Artificial Sequence
  derived and/or modified CDS sequence (opt4) from neuraminidase__InfluenzaA__AFN19985
augaaccccaaccagaagaucaucaccaucggcagcgugugcaugaccaucggcauggccaaccugauccugcagaucggcaacaucaucagcaucuggaucagccacagcauccagcugggcaaccagagccagaucgagaccugcaaccagagcgugaucaccuacgagaacaacaccugggugaaccagaccuacgugaacaucagcaacaccaacuucgccgccggccagagcguggugagcgugaagcuggccggcaacagcagccugugccccgugagcggcugggccaucuacagcaaggacaacagcaucagaaucggcagcaagggcgacguguucgugaucagagagcccuucaucagcugcagcccccuggagugcagaaccuucuuccugacccagggcgcccugcugaacgacaagcacagcaacggcaccaucaaggacagaagccccuacagaacccugaugagcugccccaucggcgaggugcccagccccuacaacagcagauucgagagcguggccuggagcgccagcgccugccacgacggcaucaacuggcugaccaucggcaucagcggccccgacaacggcgccguggccgugcugaaguacaacggcaucaucaccgacaccaucaagagcuggagaaacaacauccugagaacccaggagagcgagugcgccugcgugaacggcagcugcuucaccaucaugaccgacggccccagcgacggccaggccagcuacaagaucuucagaaucgagaagggcaagaucgugaagagcguggagaugaacgcccccaacuaccacuacgaggagugcagcugcuaccccgacagcagcgagaucaccugcgugugcagagacaacuggcacggcagcaacagacccugggugagcuucaaccagaaccuggaguaccagaucggcuacaucugcagcggcaucuucggcgacaaccccagacccaacgacaagaccggcagcugcggccccgugagcagcaacggcgccaacggcgugaagggcuucagcuucaaguacggcaacggcguguggaucggcagaaccaagagcgugagcagcagaaagggcuucgagaugaucugggaccccaacggcuggaccggcaccgacaacaacuucagcaucaagcaggacaucgugggcaucaacgaguggagcggcuacagcggcagcuucgugcagcaccccgagcugaccggccuggacugcaucagacccugcuucuggguggagcugaucagaggcagacccaaggagaacaccaucuggaccagcggcagcagcaucagcuucugcggcgugaacagcgacaccgugggcuggagcuggcccgacggcgccgagcugcccuucaccaucgacaaguga

SEQ ID NO: 183160 - RNA, 1410 nt, Artificial Sequence
  derived and/or modified CDS sequence (opt4) from neuraminidase__InfluenzaA__AFN19995
augaaccccaaccagaagaucaucaccaucggcagcgugugcaugaccaucggcauggccaaccugauccugcagaucggcaacaucaucagcaucuggaucagccacagcauccagcugggcaaccagagccagaccgagaccugcaaccagagcgugaucaccuacgagaacaacaccugggugaaccagaccuacgugaacaucagcaacaccaacuucgccgccggccagagcguggugagcgugaagcuggccggcaacagcagccugugccccgugagcggcugggccaucuacagcaaggacaacagcaucagaaucggcagcaagggcgacguguucgugaucagagagcccuucaucagcugcagcccccuggagugcagaaccuucuuccugacccagggcgcccugcugaacgacaagcacagcaacggcaccaucaaggacagaagccccuacagaacccugaugagcugccccaucggcgaggugcccagccccuacaacagcagauucgagagcguggccuggagcgccagcgccugccacgacggcaucaacuggcugaccaucggcaucagcggccccgacaacggcgccguggccgugcugaaguacaacggcaucaucaccgacaccaucaagagcuggagaaacaacauccugagaacccaggagagcgagugcgccugcgugaacggcagcugcuucaccaucaugaccgacggccccagcgacggccaggccagcuacaagaucuucagaaucgagaagggcaagaucgugaagagcguggagaugaacgcccccaacuaccacuacgaggagugcagcugcuaccccgacagcagcgagaucaccugcgugugcagagacaacuggcacggcagcaacagacccugggugagcuucaaccagaaccuggaguaccagaucggcuacaucugcagcggcaucuucggcgacaaccccagacccaacgacaagaccggcagcugcggccccgugagcagcaacggcgccaacggcgugaagggcuucagcuucaaguacggcaacggcguguggaucggcagaaccaagagcaucagcagcagaaagggcuucgagaugaucugggaccccaacggcuggaccggcaccgacaacaacuucagcaucaagcaggacaucgugggcaucaacgaguggagcggcuacagcggcagcuucgugcagcaccccgagcugaccggccuggacugcaucagacccugcuucuggguggagcugaucagaggcagacccaaggagaacaccaucuggaccagcggcagcagcaucagcuucugcggcgugaacagcgacaccgugggcuggagcuggcccgacggcgccgagcugcccuucaccaucgacaaguga

SEQ ID NO: 183161 - RNA, 1410 nt, Artificial Sequence; identical to SEQ ID NO: 180317
  derived and/or modified CDS sequence (opt4) from neuraminidase__InfluenzaA__AFN20001

SEQ ID NO: 183162 - RNA, 1410 nt, Artificial Sequence
  derived and/or modified CDS sequence (opt4) from neuraminidase__InfluenzaA__AFN20013
augaaccccaaccagaagaucaucaccaucggcagcgugugcaugaccaucggcauggccaaccugauccugcagaucggcaacaucaucagcaucuggaucagccacagcauccagcugggcaaccagagccagaucgagaccugcaaccagagcgugaucaccuacgagaacaacaccugggugaaccagaccuacgugaacaucagcaacaccaacuucgccgccggccagagcguggugagcgugaagcuggccggcaacagcagccugugccccgugagcggcugggccaucuacagcaaggacaacagcaucagaaucggcagcaagggcgacguguucgugaucagagagcccuucaucagcugcagcccccuggagugcagaaccuucuuccugacccagggcgcccugcugaacgacaagcacagcaacggcaccaucaaggacagaagccccuacagaacccugaugagcugccccaucggcgaggugcccagccccuacaacagcagauucgagagcguggccuggagcgccagcgccugccacgacggcaucaacuggcugaccaucggcaucagcggccccgacaacggcgccguggccgugcugaaguacaacggcaucaucaccgacaccaucaagagcuggagaaacaacauccugagaacccaggagagcgagugcgccugcgugaacggcagcugcuucaccaucaugaccgacggccccagcgacggccaggccagcuacaagaucuucagaaucgagaagggcaagaucgugaagagcguggagaugaacgcccccaacuaccacuacgaggagugcagcugcuaccccgacagcagcgagaucaccugcgugugcagagacaacuggcacggcagcaacagacccugggugagcuucaaccagaaccuggaguaccagaucggcuacaucugcagcggcaucuucggcgacaaccccagacccaacgacaagaccggcagcugcgaccccgugagcagcaacggcgccaacggcgugaagggcuucagcuucaaguacggcaacggcguguggaucggcagaaccaagagcaucagcagcagaaagggcuucgagaugaucugggaccccaacggcuggaccggcaccgacaacaacuucagcaucaagcaggacaucgugggcaucaacgaguggagcggcuacagcggcagcuucgugcagcaccccgagcugaccggccuggacugcaucagacccugcuucuggguggagcugaucagaggcagacccaaggagaacaccaucuggaccagcggcagcagcaucagcuucugcggcgugaacagcgacaccgugggcuggagcuggcccgacggcgccgagcugcccuucaccaucgacaaguga

SEQ ID NO: 183163 - RNA, 1410 nt, Artificial Sequence
  derived and/or modified CDS sequence (opt4) from neuraminidase__InfluenzaA__AFN20020
augaaccccaaccagaagaucaucaccaucggcagcgugugcaugaccaucggcauggccaaccugauccugcagaucggcaacaucaucagcaucuggaucagccacagcauccagcugggcaaccagagccagaucgagaccugcaaccagagcgugaucaccuacgagaacaacaccugggugaaccagaccuacgugaacaucagcaacaccaacuucgccgccggccagagcguggugagcgugaagcuggccggcaacagcagccugugccccgugagcggcugggccaucuacagcaaggacaacagcaucagaaucggcagcaagggcgacguguucgugaucagagagcccuucaucagcugcagcccccuggagugcagaaccuucuuccugacccagggcgcccugcugaacgacaagcacagcaacggcaccaucaaggacagaagccccuacagaacccugaugagcugccccaucggcgaggugcccagccccuacaacagcagauucgagagcguggccuggagcgccagcgccugccacgacggcaucaacuggcugaccaucggcaucagcggccccgacaacggcgccguggccgugcugaaguacaacggcaucaucaccgacaccaucaagagcuggagaaacaacauccugagaacccaggagagcgagugcgccugcgugaacggcagcugcuucaccaucaugaccgacggccccagcgacggccaggccagcuacaagaucuucagaaucgagaagggcaagaucgugaagagcguggagaugaacgcccccaacuaccacuacgaggagugcagcugcuaccccgacagcagcgagaucaccugcgugugcagagacaacuggcacggcagcaacagacccugggugagcuucaaccagaaccuggaguaccagaucggcuacaucugcagcggcaucuucggcgacaaccccagacccaacgacaagaccggcagcugcggccccgugagcagcaacggcgccaacggcgugaagggcuucagcuucaaguacggcaacggcguguggaucggcagaaccaagagcaucagcagcagaaagggcuucgagaugaucugggaccccaacggcuggaccggcaccgacaacaacuucagcaucaagcaggacaucgugggccugaacgaguggagcggcuacagcggcagcuucgugcagcaccccgagcugaccggccuggacugcaucagacccugcuucuggguggagcugaucagaggcagacccaaggagaacaccaucuggaccagcggcagcagcaucagcuucugcggcgugaacagcgacaccgugggcuggagcuggcccgacggcgccgagcugcccuucaccaucgacaaguga

SEQ ID NO: 183164 - RNA, 1410 nt, Artificial Sequence; identical to SEQ ID NO: 180317
  derived and/or modified CDS sequence (opt4) from neuraminidase__InfluenzaA__AFN20022

SEQ ID NO: 183165 - RNA, 1410 nt, Artificial Sequence
  derived and/or modified CDS sequence (opt4) from neuraminidase__InfluenzaA__AFN20035
augaaccccaaccagaagaucaucaccaucggcagcgugugcaugaccaucggcaucgccaaccugauccugcagaucggcaacaucaucagcaucuggaucagccacagcauccagcugggcaaccagagccagaucgagaccugcaaccagagcgugaucaccuacgagaacaacaccugggugaaccagaccuacgugaacaucagcaacaccaacuucgccgccggccagagcguggugagcgugaagcuggccggcaacagcagccugugccccgugagcggcugggccaucuacagcaaggacaacagcaucagaaucggcagcaagggcgacguguucgugaucagagagcccuucaucagcugcagcccccuggagugcagaaccuucuuccugacccagggcgcccugcugaacgacaagcacagcaacggcaccaucaaggacagaagccccuacagaacccugaugagcugccccaucggcgaggugcccagccccuacaacagcagauucgagagcguggccuggagcgccagcgccugccacgacggcaucaacuggcugaccaucggcaucagcggccccgacaacggcgccguggccgugcugaaguacaacggcaucaucaccgacaccaucaagagcuggagaaacaacauccugagaacccaggagagcgagugcgccugcgugaacggcagcugcuucaccaucaugaccgacggccccagcgacggccaggccagcuacaagaucuucagaaucgagaagggcaagaucgugaagagcguggagaugaacgcccccaacuaccacuacgaggagugcagcugcuaccccgacagcagcgagaucaccugcgugugcagagacaacuggcacggcagcaacagacccugggugagcuucaaccagaaccuggaguaccagaucggcuacaucugcagcggcaucuucggcgacaaccccagacccaacgacaagaccggcagcugcggccccgugagcagcaacggcgccaacggcgugaagggcuucagcuucaaguacggcaacggcguguggaucggcagaaccaagagcaucagcagcagaaagggcuucgagaugaucugggaccccaacggcuggaccggcaccgacaacaacuucagcaucaagcaggacaucgugggcaucaacgaguggagcggcuacagcggcagcuucgugcagcaccccgagcugaccggccuggacugcaucagacccugcuucuggguggagcugaucagaggcagacccaaggagaacaccaucuggaccagcggcagcagcaucagcuucugcggcgugaacagcgacaccgugggcuggagcuggcccgacggcgccgagcugcccuucaccaucgacaaguga

SEQ ID NO: 183166 - RNA, 1410 nt, Artificial Sequence; identical to SEQ ID NO: 180317
  derived and/or modified CDS sequence (opt4) from neuraminidase__InfluenzaA__AFN20041

SEQ ID NO: 183167 - RNA, 1410 nt, Artificial Sequence; identical to SEQ ID NO: 180317
  derived and/or modified CDS sequence (opt4) from neuraminidase__InfluenzaA__AFN20047

SEQ ID NO: 183168 - RNA, 1410 nt, Artificial Sequence; identical to SEQ ID NO: 181140
  derived and/or modified CDS sequence (opt4) from neuraminidase__InfluenzaA__AFN20063

SEQ ID NO: 183169 - RNA, 1410 nt, Artificial Sequence
  derived and/or modified CDS sequence (opt4) from neuraminidase__InfluenzaA__AFN20077
augaaccccaaccagaagaucaucaccaucggcagcgugugcaugaccaucggcauggccaaccugauccugcagaucggcaacaucaucagcaucuggaucagccacagcauccagcugggcaaccagagccagaucgagaccugcaaccagagcgugaucaccuacgagaacaacaccugggugaaccagaccuacgugaacaucagcaacaccaacuucgccgccggccagagcguggugagcgugaagcuggccggcaacagcagccugugccccgugagcggcugggccaucuacagcaaggacaacagcaucagaaucggcagcaagggcgacguguucgugaucagagagcccuucaucagcugcagcccccuggagugcagaaccuucuuccugacccagggcgcccugcugaacgacaagcacagcaacggcaccaucaaggacagaagccccuacagaacccugaugagcugccccaucggcgaggugcccagccccuacaacagcagauucgagagcguggccuggagcgccagcgccugccacgacggcaucaacuggcugaccaucggcaucagcggccccgacaacggcgccguggccgugcugaaguacaacggcaucaucaccgacaccaucaagagcuggagaaacaacauccugagaacccaggagagcgagugcgccugcgugaacggcagcugcuucaccaucaugaccgacggccccagcgacggccaggccagcuacaagaucuucaagaucgagaagggcaagaucgugaagagcguggagaugaacgcccccaacuaccacuacgaggagugcagcugcuaccccgacagcagcgagaucaccugcgugugcagagacaacuggcacggcagcaacagacccugggugagcuucaaccagaaccuggaguaccagaucggcuacaucugcagcggcaucuucggcgacaaccccagacccaacgacaagaccggcagcugcggccccgugagcagcaacggcgccaacggcgugaagggcuucagcuucaaguacggcaacggcguguggaucggcagaaccaagagcaucagcagcagaaagggcuucgagaugaucugggaccccaacggcuggaccggcaccgacaacaacuucagcaucaagcaggacaucgugggcaucaacgaguggagcggcuacagcggcagcuucgugcagcaccccgagcugaccggccuggacugcaucagacccugcuucuggguggagcugaucagaggcagacccaaggagaacaccaucuggaccagcggcagcagcaucagcuucugcggcgugaacagcgacaccgugggcuggagcuggcccgacggcgccgagcugcccuucaccaucgacaaguga

SEQ ID NO: 183170 - RNA, 1410 nt, Artificial Sequence; identical to SEQ ID NO: 180317
  derived and/or modified CDS sequence (opt4) from neuraminidase__InfluenzaA__AFN20083

SEQ ID NO: 183171 - RNA, 1410 nt, Artificial Sequence
  derived and/or modified CDS sequence (opt4) from neuraminidase__InfluenzaA__AFN20094
augaaccccaaccagaagaucaucaccaucggcagcgugugcaugaccaucggcauggccaaccugauccugcagaucggcaacaucaucagcaucuggaucagccacagcauccagcugggcaaccagagccagaucgagaccugcaaccagagcgugaucaucuacgagaacaacaccugggugaaccagaccuacgugaacaucagcaacaccaacuucgccgccggccagagcguggugagcgugaagcuggccggcaacagcagccugugccccgugagcggcugggccaucuacagcaaggacaacagcaucagaaucggcagcaagggcgacguguucgugaucagagagcccuucaucagcugcagcccccuggagugcagaaccuucuuccugacccagggcgcccugcugaacgacaagcacagcaacggcaccaucaaggacagaagccccuacagaacccugaugagcugccccaucggcgaggugcccagccccuacaacagcagauucgagagcguggccuggagcgccagcgccugccacgacggcaucaacuggcugaccaucggcaucagcggccccgacaacggcgccguggccgugcugaaguacaacggcaucaucaccgacaccaucaagagcuggagaaacaacauccugagaacccaggagagcgagugcgccugcgugaacggcagcugcuucaccaucaugaccgacggccccagcgacggccaggccagcuacaagaucuucagaaucgagaagggcaagaucgugaagagcguggagaugaacgcccccaacuaccacuacgaggagugcagcugcuaccccgacagcagcgagaucaccugcgugugcagagacaacuggcacggcagcaacagacccugggugagcuucaaccagaaccuggaguaccagaucggcuacaucugcagcggcaucuucggcgacaaccccagacccaacgacaaggccggcagcugcggccccgugagcagcaacggcgccaacggcgugaagggcuucagcuucaaguacggcaacggcguguggaucggcagaaccaagagcaucagcagcagaaagggcuucgagaugaucugggaccccaacggcuggaccggcaccgacaacaacuucagcaucaagcaggacaucgugggcaucaacgaguggagcggcuacagcggcagcuucgugcagcaccccgagcugaccggccuggacugcaucagacccugcuucuggguggagcugaucagaggcagacccaaggagaacaccaucuggaccagcggcagcagcaucagcuucugcggcgugaacagcgacaccaugggcuggagcuggcccgacggcgccgagcugcccuucaccaucgacaaguga

SEQ ID NO: 183172 - RNA, 1410 nt, Artificial Sequence; identical to SEQ ID NO: 180776
  derived and/or modified CDS sequence (opt4) from neuraminidase__InfluenzaA__AFN20100

SEQ ID NO: 183173 - RNA, 1410 nt, Artificial Sequence
  derived and/or modified CDS sequence (opt4) from neuraminidase__InfluenzaA__AFN20114
augaaccccaaccagaagaucaucaccaucggcagcgugugcaugaccaucggcauggccaaccugauccugcagaucggcaacaucaucagcaucuggaucagccacagcauccagcugggcaaccagaaccagaucgagaccugcaaccagagcgugaucaccuacgagaacaacaccugggugaaccagaccuacgugaacaucagcaacaccaacuucgccgccggccagagcguggugagcgugaagcuggccggcaacagcagccugugccccgugagcggcugggccaucuacagcaaggacaacagcaucagaaucggcagcaagggcgacguguucgugaucagagagcccuucaucagcugcagcccccuggagugcagaaccuucuuccugacccagggcgcccugcugaacgacaagcacagcaacggcaccaucaaggacagaagccccuacagaacccugaugagcugccccaucggcgaggugcccagccccuacaacagcagauucgagagcguggccuggagcgccagcgccugccacgacggcaucaacuggcugaccaucggcaucagcggccccgacaacggcgccguggccgugcugaaguacaacggcaucaucaccgacaccaucaagagcuggagaaacaacauccugagaacccaggagagcgagugcgccugcgugaacggcagcugcuucaccgugaugaccgacggccccagcgacggccaggccagcuacaagaucuucaagaucgagaagggcaagaucgugaagagcguggagaugaacgcccccaacuaccacuacgaggagugcagcugcuaccccgacagcagcgagaucaccugcgugugcagagacaacuggcacggcagcaacagacccugggugagcuucaaccagaaccuggaguaccagaucggcuacaucugcagcggcaucuucggcgacaaccccagacccaacgacaagaccggcagcugcagccccgugagcagcaacggcgccaacggcgugaagggcuucagcuucaaguacggcaacggcguguggaucggcagaaccaagagcaccagcagcagaaacggcuucgagaugaucugggaccccaacggcuggaccggcaccgacaacagcuucagcaugaagcaggacaucgugggcaucaacgaguggagcggcuacagcggcagcuucgugcagcaccccgagcugaccggccuggacugcaucagacccugcuucuggguggagcugaucagaggcagacccaaggagaacaccguguggaccagcggcagcagcaucagcuucugcggcgugaacagcgacaccgugggcuggagcuggcccgacggcgccgagcugcccuucaccaucgacaaguga

SEQ ID NO: 183174 - RNA, 1410 nt, Artificial Sequence
  derived and/or modified CDS sequence (opt4) from neuraminidase__InfluenzaA__AFN20128
augaaccccaaccagaagaucaucaccaucggcagcgugugcaugaccaucggcauggccaaccugauccugcagaucggcaacaucaucagcaucuggaucagccacagcauccagcugggcaaccagagccagaucgagaccugcaaccagagcgugaucaccuacgagaacaacaccugggugaaccagaccuacgugaacaucagcaacaccaacuucgccgccggccagagcguggugagcgugaagcuggccggcaacagcagccugugccccgugagcggcugggccaucuacagcaaggacaacagcaucagaaucggcagcaagggcgacguguucgugaucagagagcccuucaucagcugcagcccccuggagugcagaaccuucuuccugacccagggcgcccugcugaacgacaagcacagcaacggcaccaucaaggacagaagccccuacagaacccugaugagcugccccaucggcgaggugcccagccccuacaacagcagauucgagagcguggccuggagcgccagcgccugccacgacggcaucaacuggcugaccaucggcaucagcggccccgacaacggcgccguggccgugcugaaguacaacggcaucaucaccgacaccaucagaagcuggagaaacaacauccugagaacccaggagagcgagugcgccugcgugaacggcagcugcuucaccaucaugaccgacggccccagcgacggccaggccagcuacaagaucuucagaaucgagaagggcaagaucaucaagagcguggagaugaacgcccccaacuaccacuacgaggagugcagcugcuaccccgacagcagcgagaucaccugcgugugcagagacaacuggcacggcagcaacagacccugggugagcuucaaccagaaccuggaguaccagaucggcuacaucugcagcggcaucuucggcgacaaccccagaagcaacgacaagaccggcagcugcggccccgugagcagcaacggcgccaacggcgugaagggcuucagcuucaaguacggcaacggcguguggaucggcagaaccaagagcaucagcagcagaaagggcuucgagaugaucugggaccccaacggcuggaccggcaccgacaacaacuucagcaucaagcaggacaucgugggcaucaacgaguggagcggcuacagcggcagcuucgugcagcaccccgagcugaccggccuggacugcaucagacccugcuucuggguggagcugaucagaggcagacccaaggagaacaccaucuggaccagcggcagcagcaucagcuucugcggcgugaacagcgacaccgugggcuggagcuggcccgacggcgccgagcugcccuucaccaucgacaaguga

SEQ ID NO: 183175 - RNA, 1410 nt, Artificial Sequence; identical to SEQ ID NO: 180317
  derived and/or modified CDS sequence (opt4) from neuraminidase__InfluenzaA__AFN87935

SEQ ID NO: 183176 - RNA, 1410 nt, Artificial Sequence
  derived and/or modified CDS sequence (opt4) from neuraminidase__InfluenzaA__AFN87937
augaaccccaaccagaagaucaucaccaucggcagcgugugcaugaccaucggcauggccaaccugauccugcagaucggcaacaucaucagcaucuggaucagccacagcauccagcugggcaaccagaaccagaucgagaccugcaaccagagcgugaucaccuacgagaacaacaccugggugaaccagaccuacgugaacaucagcaacaccaacuucgccgccggccagagcguggugagcgugaagcuggccggcaacagcagccugugccccgugagcggcugggccaucuacagcaaggacaacagcaucagaaucggcagcaagggcgacguguucgugaucagagagcccuucaucagcugcagcccccuggagugcagaaccuucuuccugacccagggcgcccugcugaacgacaagcacagcaacggcaccaucaaggacagaagccccuacagaacccugaugagcugccccaucggcgaggugcccagccccuacaacagcagauucgagagcguggccuggagcgccagcgccugccacgacggcaucaacuggcugaccaucggcaucagcggccccgacaacggcgccguggccgugcugaaguacaacggcaucaucaccgacaccaucaagagcuggagaaacaacauccugagaacccaggagagcgagugcgccugcgugaacggcagcugcuucaccgugaugaccgacggccccagcgacggccaggccagcuacaagaucuucaagaucgagaagggcaagaucgugaagagcguggagaugaacgcccccaacuaccacuacgaggagugcagcugcuaccccgacagcagcgagaucaccugcgugugcagagacaacuggcacggcagcaacagacccugggugagcuucaaccagaaccuggaguaccagaucggcuacaucugcagcggcaucuucggcgacaaccccagacccaacgacaagaccggcagcugcggccccgugagcagcaacggcgccaacggcgugaagggcuucagcuucaaguacggcaacggcguguggaucggcagaaccaagagcaccagcagcagaaacggcuucgagaugaucugggaccccaacggcuggaccggcaccgacaacagcuucagcaugaagcaggacaucgugggcaucaacgaguggagcggcuacagcggcagcuucgugcagcaccccgagcugaccggccuggacugcaucagacccugcuucuggguggagcugaucagaggcagacccaaggagaacaccguguggaccagcggcagcagcaucagcuucugcggcgugaacagcgacaccgugggcuggagcuggcccgacggcgccgagcugcccuucaccaucgacaaguga

SEQ ID NO: 183177 - RNA, 1410 nt, Artificial Sequence
  derived and/or modified CDS sequence (opt4) from neuraminidase__InfluenzaA__AFN87940
augaaccccaaccagaagaucaucaccaucggcagcgugugcaugaccaucggcauggccaaccugauccugcagaucggcaacaucaucagcaucuggaucagccacagcauccagcugggcaaccagaaccagaucgagaccugcaaccagagcgugaucaccuacgagaacaacaccugggugaaccagaccuacgugaacaucagcaacaccaacuucgccgccggccagagcguggugagcgugaagcuggccggcaacagcagccugugccccgugagcggcugggccaucuacagcaaggacaacagcaucagaaucggcagcaagggcgacguguucgugaucagagagcccuucaucagcugcagcccccuggagugcagaaccuucuuccugacccagggcgcccugcugaacgacaagcacagcaacggcaccaucaaggacagaagccccuacagaacccugaugagcugccccaucggcgaggugcccagccccuacaacagcagauucgagagcguggccuggagcgccagcgccugccacgacggcaucaacuggcugaccaucggcaucagcggccccgacaacggcgccguggccgugcugaaguacaacggcaucaucaccgacaccaucaagagcuggagaaacaacauccugagaacccaggagagcgagugcgccugcgugaacggcagcugcuucaccgugaugaccgacggccccagcgacggccaggccagcuacaagaucuucaagaucgagaagggcaagaucgugaagagcguggagaugaacgcccccaacuaccacuacgaggagugcagcugcuaccccgacagcagcgagaucaccugcgugugcagagacaacuggcacggcagcaacagacccugggugagcuucaaccagaaccuggaguaccagaucggcuacaucugcagcggcaucuucggcgacaaccccagacccaacgacaagaccggcagcugcggccccgugagcagcaacggcgccaacggcgugaagggcuucagcuucaaguacggcaacggcguguggaucggcagaaccaagagcaccagcagcagaaacggcuucgagaugaucugggaccccaacggcuggaccggcaccgacaacagcuucagcaucaagcaggacaucgugggcaucaacgaguggagcggcuacagcggcagcuucgugcagcaccccgagcugaccggccuggacugcaucagacccugcuucuggguggagcugaucagaggcagacccaaggagaacaccaucuggaccagcggcagcagcaucagcuucugcggcgugaacagcgacaccgugggcuggagcuggcccgacggcgccgagcugcccuucaccaucgacaaguga

SEQ ID NO: 183178 - RNA, 1410 nt, Artificial Sequence; identical to SEQ ID NO: 176798
  derived and/or modified CDS sequence (opt4) from neuraminidase__InfluenzaA__AFN87942

SEQ ID NO: 183179 - RNA, 1410 nt, Artificial Sequence; identical to SEQ ID NO: 183176
  derived and/or modified CDS sequence (opt4) from neuraminidase__InfluenzaA__AFN87944

SEQ ID NO: 183180 - RNA, 1410 nt, Artificial Sequence
  derived and/or modified CDS sequence (opt4) from neuraminidase__InfluenzaA__AFN87946
augaaccccaaccagaagaucaucaccaucggcagcgugugcaugaccaucggcauggccaaccugacccugcagaucggcaacaucaucagcaucuggaucagccacagcauccagcugggcaaccagaaccagaucgagaccugcaaccagagcgugaucaacuacgagaacaacaccugggugaaccagaccuacgugaacaucagcaacaccaacuucgccgccggccagagcguggugagcgugaagcuggccggcaacagcagccugugccccgugagcggcugggccaucuacagcaaggacaacagcaucagaaucggcagcaagggcgacguguucgugaucagagagcccuucgugagcugcagcccccuggagugcagaaccuucuuccugacccagggcgcccugcugaacgacaagcacagcaacggcaccaucaaggacagaagccccuacagaacccugaugagcugccccaucggcgaggugcccagccccuacaacagcagauucgagagcguggccuggagcgccagcgccugccacgacggcaucaacuggcugaccaucggcaucagcggccccgacaacggcgccguggccgugcugaaguacaacggcaucaucaccgacaccaucaagagcuggagaaacaacauccugagaacccaggagagcgagugcgccugcgugaacggcagcugcuucaccgugaugaccgacggccccagcgacggccaggccagcuacaagaucuucagaaucgagaagggcaagaucgugaagagcguggagaugaacgcccccaacuaccacuacgaggagugcagcugcuaccccgacagcagcgaggugaccugcgugugcagagacaacuggcacggcagcaacagacccugggugagcuucaaccagaaccuggaguaccagaucggcuacaucugcagcggcaucuucggcgacaaccccagacccaacgacaagaccggcagcugcggccccgugagcagcaacggcgccaacggcgugaagggcuucagcuucaaguacggcaacggcguguggaucggcagaaccaagagcaucagcagcagaaacggcuucgagaugaucugggaccccaacggcuggaccggcaccgacaacaacuucagcaucaagcaggacaucgugggcaucaacgaguggagcggcuacagcggcagcuucgugcagcaccccgagcugaccggccuggacugcaucagacccugcuucuggguggagcugaucagaggcagacccaaggagaacaccaucuggaccagcggcagcagcaucagcuucugcggcgugaacagcgacaccgugggcuggagcuggcccgacggcgccgagcugcccuucaccaucgacaaguga

SEQ ID NO: 183181 - RNA, 1410 nt, Artificial Sequence
  derived and/or modified CDS sequence (opt4) from neuraminidase__InfluenzaA__AFN87948
augaaccccaaccagaagaucaucaccaucggcagcgugugcaugaccaucggcauggccaaccugauccugcagaucggcaacaucaucagcaucuggaucagccacagcauccagcugggcaaccagaaccagaucgagaccugcaaccagagcgugaucaccuacgagaacaacaccugggugaaccagaccuacgugaacaucagcaacaccaacuucgccgccggccagagcguggugagcgugaagcuggccggcaacagcagccugugccccgugagcggcugggccaucuacagcaaggacaacagcaucagaaucggcagcaagggcgacguguucgugaucagagagcccuucaucagcugcagcccccuggagugcagaaccuucuuccugacccagggcgcccugcugaacgacaagcacagcaacggcaccaucaaggacagaagccccuacagaacccugaugagcugccccaucggcgaggugcccagccccuacaacagcagauucgagagcguggccuggagcgccagcgccugccacgacggcaucaacuggcugaccaucggcaucagcggccccgacaacggcgccguggccgugcugaaguacaacggcaucaucaccgacaccaucaagagcuggagaaacaacauccugagaacccaggagagcgagugcgccugcgugaacggcagcugcuucaccgugaugaccgacggccccagcgacggccaggccagcuacaagaucuucaagaucgagaagggcaagaucgugaagagcguggagaugaacgcccccaacuaccacuacgaggagugcagcugcuaccccgacagcagcgagaucaccugcgugugcagagacaacuggcacggcagcaacagacccugggugagcuucaaccagaaccuggaguaccagaucggcuacaucugcagcggcaucuucggcgacaaccccagacccaacgacaagaccggcagcugcggccccgugagcagcaacggcgccaacggcgugaagggcuucagcuucaaguacggcaacggcguguggaucggcagaaccaagagcaccagcagcagaaacggcuucgagaugaucugggaccccaacggcuggaccggcaccgacaacagcuucagcaucaagcaggacaucgugggcaucaacgaguggagcggcuacagcggcagcuucgugcagcaccccgagcugaccggccuggacugcaucagacccugcuucuggguggagcugaucagaggcagacccaaggagaacaccaucuggaccagcggcagcagcaucagcuucugcggcgugaacagcgacaucgugggcuggagcuggcccgacggcgccgagcugcccuucaccaucgacaaguga

SEQ ID NO: 183182 - RNA, 1410 nt, Artificial Sequence
  derived and/or modified CDS sequence (opt4) from neuraminidase__InfluenzaA__AFN87950
augaaccccaaccagaagaucaucaccaucggcagcgugugcaugaccaucggcauggccaaccugauccugcagaucggcaacaucaucagcaucuggaucagccacagcauccagcugggcaaccagagccagaucgagaccugcaaccagagcgugaucaccuacgagaacaacaccugggugaaccagaccuacgugaacaucagcaacaccaacuucgccgccggccagagcguggugagcgugaagcuggccggcaacagcagccugugccccgugagcggcugggccaucuacagcaaggacaacagcaucagaaucggcagcaagggcgacguguucgugaucagagagcccuucaucagcugcagcccccuggagugcagaaccuucuuccugacccagggcgcccugcugaacgacaagcacagcaacggcaccaucaaggacagaagccccuacagaacccugaugagcugccccaucggcgaggugcccagccccuacaacagcagauucgagagcguggccuggagcgccagcgccugccacgacggcaucaacuggcugaccaucggcaucagcggccccgacaacggcgccguggccgugcugaaguacaacggcaucaucaccgacaccaucaagagcuggagaaacaacauccugagaacccaggagagcgagugcgccugcgugaacggcagcugcuucaccgugaugaccgacggccccagcgacggccaggccagcuacaagaucuucagaaucgagaagggcaagaucgugaagagcguggagaugaacgcccccaacuaccacuacgaggagugcagcugcuaccccgacagcagcgagaucaccugcgugugcagagacaacuggcacggcagcaacagacccugggugagcuucaaccagaaccugaaguaccagaucggcuacaucugcagcggcaucuucggcgacaaccccagacccaacgacaagaccggcagcugcggccccgugagcagcaacggcgccaacggcgugaagggcuucagcuucaaguacggcaacggcguguggaucggcagaaccaagagcaucagcagcagaaagggcuucgagaugaucugggaccccaacggcuggaccggcaccgacaacaacuucagcaucaagcaggacaucaucggcaucaacgaguggagcggcuacagcggcagcuucgugcagcaccccgagcugaccggccuggacugcaucagacccugcuucuggguggagcugaucagaggcagacccaaggagaacaccaucuggaccagcggcagcagcaucagcuucugcggcgugaacagcgacaccgugggcuggagcuggcccgacggcgccgagcugcccuucaccaucgacaaguga

SEQ ID NO: 183183 - RNA, 1410 nt, Artificial Sequence; identical to SEQ ID NO: 180769
  derived and/or modified CDS sequence (opt4) from neuraminidase__InfluenzaA__AFN87952

SEQ ID NO: 183184 - RNA, 1410 nt, Artificial Sequence
  derived and/or modified CDS sequence (opt4) from neuraminidase__InfluenzaA__AFN87954
augaaccccaaccagaagaucaucaccaucggcagcgugugcaugaccaucggcauggccaaccugauccugcagaucggcaacaucaucagcaucuggaucagccacagcauccagcugggcaaccagaaccagaucgagaccugcaaccagagcgugaucaccuacgagaacaacaccugggugaaccagaccuacgugaacaucagcaacaccaacuucgccgccggccagagcguggugagcgugaagcuggccggcaacagcagccugugccccgugagcggcugggccaucuacagcaaggacaacagcaucagaaucggcagcaagggcgacguguucgugaucagagagcccuucaucagcugcagcccccuggagugcagaaccuucuuccugacccagggcgcccugcugaacgacaagcacagcaacggcaccaucaaggacagaagccccuacagaacccugaugagcugccccaucggcgaggugcccagccccuacaacagcagauucgagagcguggccuggagcgccagcgccugccacgacggcaucaacuggcugaccaucggcaucagcggccccgacaacggcgccguggccgugcugaaguacaacggcaucaucaccgacaccaucaagagcuggagaaacaacauccugagaacccaggagagcgagugcgccugcgugaacggcagcugcuucaccgugaugaccgacggccccagcgacggccaggccagcuacaagaucuucagaaucgagaagggcaagaucgugaagagcguggagaugaacgcccccaacuaccacuacgaggagugcagcugcuaccccgacagcagcgagaucaccugcgugugcagagacaacuggcacggcagcaacagacccugggugagcuucaaccagaaccuggaguaccagaucggcuacaucugcagcggcaucuucggcgacaaccccagacccaacgacaagaccggcagcugcggccccgugagcagcaacggcgccaacggcgugaagggcuucagcuucaaguacggcaacggcguguggaucggcagaaccaagagcaucagcagcagaaagggcuucgagaugaucugggaccccaacggcuggaccggcaccgacaacaacuucagcaucaagcaggacaucgugggcaucaacgaguggagcggcuacagcggcagcuucgugcagcaccccgagcugaccggccuggacugcaucagacccugcuucuggguggagcugaucagaggcagacccaaggagaacaccaucuggaccagcggcagcagcaucagcuucugcggcgugaacagcgacaccaugggcuggagcuggcccgacggcgccgagcugcccuucaccaucgacaaguga

SEQ ID NO: 183185 - RNA, 1410 nt, Artificial Sequence
  derived and/or modified CDS sequence (opt4) from neuraminidase__InfluenzaA__AFN87956
augaaccccaaccagaagaucaucaccaucggcagcgugugcaugaccaucggcauggccaaccugauccugcagaucggcaacaucaucagcaucuggaucagccacagcauccagcugggcaaccagagccagaucgagaccugcaaccagagcgugaucaccuacgagaacaacaccugggugaaccagaccuacgugaacaucagcaacaccaacuucgccgccggccagagcguggugagcgugaagcuggugggcaacagcagccugugccccgugagcggcugggccaucuacagcaaggacaacagcaucagaaucggcagcaagggcgacguguucgugaucagagagcccuucaucagcugcagcccccuggagugcagaaccuucuuccugacccagggcgcccugcugaacgacaagcacagcaacggcaccaucaaggacagaagccccuacagaacccugaugagcugccccaucggcgaggugcccagccccuacaacagcagauucgagagcguggccuggagcgccagcgccugccacgacggcaucaacuggcugaccaucggcaucagcggccccgacaacggcgccguggccgugcugaaguacaacggcaucaucaccgacaccaucaagagcuggagaaacaacauccugagaacccaggagagcgagugcgccugcgugaacggcagcugcuucaccaucaugaccgacggccccagcgacggccaggccagcuacaagaucuucagaaucgagaagggcaagaucgugaagagcguggagaugaacgcccccaacuaccacuacgaggagugcagcugcuaccccgacagcagcgagaucaccugcgugugcagagacaacuggcacggcagcaacagacccugggugagcuucaaccagaaccuggaguaccagaucggcuacaucugcagcggcaucuucggcgacaaccccagacccaacgacaagaccggcagcugcggccccgugagcagcaacggcgccaacggcgugaagggcuucagcuucaaguacggcaacggcguguggaucggcagaaccaagagcaucagcagcagaaagggcuucgagaugaucugggaccccaacggcuggaccggcaccgacaacaacuucagcaucaagcaggacaucgugggcaccaacgaguggagcggcuacagcggcagcuucgugcagcaccccgagcugaccggccuggacugcaucagacccugcuucuggguggagcugaucagaggcagacccaaggagaacaccaucuggaccagcggcagcagcaucagcuucugcggcgugaacagcgacaccgugggcuggagcuggcccgacggcgccgagcugcccuucaccaucgacaacuga

SEQ ID NO: 183186 - RNA, 1410 nt, Artificial Sequence
  derived and/or modified CDS sequence (opt4) from neuraminidase__InfluenzaA__AFN87958
augaaccccaaccagaagaucaucaccaucggcagcgugugcaugaccaucggcauggccaaccugauccugcagaucggcaacaucaucagcaucuggaucagccacagcauccagcugggcaaccagaaccagaucgagaccugcaaccagagcgugaucaccuacgagaacaacaccugggugaaccagaccuacgugaacaucagcaacaccaacuucgccgccggccagagcguggugagcgugaagcuggccggcaacagcagccugugccccgugagcggcugggccaucuacagcaaggacaacagcaucagaaucggcagcaagggcgacguguucgugaucagagagcccuucaucagcugcagcccccuggagugcagaaccuucuuccugacccagggcgcccugcugaacgacaagcacagcaacggcaccaucaaggacagaagccccuacagaacccugaugagcugccccaucggcgaggugcccagccccuacaacagcagauucgagagcguggccuggagcgccagcgccugccacgacggcaucaacuggcugaccaucggcaucagcggccccgacaacggcgccguggccgugcugaaguacaacggcaucaucaccgacaccaucaagagcuggagaaacaacauccugagaacccaggagagcgagugcgccugcgugaacggcagcugcuucaccgugaugaccgacggccccagcgacggccaggccagcuacaagaucuucaagaucgagaagggcaagaucgugaagagcguggagaugaacgcccccaacuaccacuacgaggagugcagcugcuaccccgacagcagcgagaucaccugcgugugcagagacaacuggcacggcagcaacagacccugggugagcuucaaccagaaccuggaguaccagaucggcuacaucugcagcggcaucuucggcgacaaccccagacccaacgacaagaccggcagcugcggccccgccagcagcaacggcgccaacggcgugaagggcuucagcuucaaguacggcaacggcguguggaucggcagaaccaagagcaccagcagcagaaacggcuucgagaugaucugggaccccaacggcuggaccggcaccgacaacagcuucagcaugaagcaggacaucgugggcaucaacgaguggagcggcuacagcggcagcuucgugcagcaccccgagcugaccggccuggacugcaucagacccugcuucuggguggagcugaucagaggcagacccaaggagaacaccguguggaccagcggcagcagcaucagcuucugcggcgugaacagcgacaccgugggcuggagcuggcccgacggcgccgagcugcccuucaccaucgacaaguga

SEQ ID NO: 183187 - RNA, 1410 nt, Artificial Sequence
  derived and/or modified CDS sequence (opt4) from neuraminidase__InfluenzaA__AFN87960
augaaccccaaccagaagaucaucaccaucggcagcgugugcaugaccaucggcauggccaaccugauccugcagaucggcaacaucaucagcaucuggaucagccacagcauccagcugggcaaccagagccagaucgagaccugcaaccagagcgugaucaccuacgagaacaacaccugggugaaccagaccuacgugaacaucagcaacaccaacuucgccgccggccagagcguggugagcgugaagcuggccggcaacagcagccugugccccgugagcggcugggccaucuacagcaaggacaacagcaucagaaucggcagcaagggcgacguguucgugaucagagagcccuucaucagcugcagcccccuggagugcagaaccuucuuccugacccagggcgcccugcugaacgacaagcacagcaacggcaccaucaaggacagaagccccuacagaacccugaugagcugccccaucggcgaggugcccagccccuacaacagcagauucgagagcguggccuggagcgccagcgccugccacgacggcaucaacuggcugaccaucggcaucagcggccccgacaacggcgccguggccgugcugaaguacaacggcaucaucaccgacaccaucaagagcuggagaaacaacauccugagaacccaggagagcgagugcgccugcgugaacggcagcugcuucaccaucaugaccgacggccccagcgacggccaggccagcuacaagaucuucagaaucgagaagggcaagaucgugaagagcguggagaugaacgcccccaacuaccacuacgaggagugcagcugcuaccccgacagcagcgagaucaccugcgugugcagagacaacuggcacggcagcaacagacccugggugagcuucaaccagaaccuggaguaccagaucggcuacaucugcagcggcaucuucggcgacaaccccagacccaacgacaagaccggcagcugcggccccgugagcagcaacggcgccaacggcgugaagggcuucagcuucaaguacggcaacggcguguggaucggcagaaccaagagcaucagcagcagaaagggcuucgagaugaucugggaccccaacggcuggaccggcaccgacaacaacuucagcaucaagcaggacaucgugggcaucaacgaguggagcggcuacagcggcagcuucgugcagcaccccgagcugaccggccuggacugcaucagacccugcuucuggaucgagcugaucagaggcagacccaaggagaacaccaucuggaccagcggcagcagcaucagcuucugcggcgugaacagcgacaccgugggcuggagcuggcccgacggcgccgagcugcccuucaccaucgacaaguga

SEQ ID NO: 183188 - RNA, 1413 nt, Artificial Sequence
  derived and/or modified CDS sequence (opt4) from neuraminidase__InfluenzaA__AFO64805
augaaccccaaccagaagaucaucaccaucggcagcaucagcaucgccaucggcaucaucagccugaugcugcagaucggcaacaucaucagcaucugggccagccacagcauccagaccggcagccagaaccacaccggcaucugcaaccagagaaucaucaccuacgagaacagcaccugggugaaccacaccuacgugaacaucaacaacaccaacgugguggccggcaaggacaagaccagcgugacccuggccggcaacagcagccugugcagcaucagcggcugggccaucuacaccaaggacaacagcaucagaaucggcagcaagggcgacguguucgugaucagagagcccuucaucagcugcagccaccuggagugcagaaccuucuuccugacccagggcgcccugcugaacgacaagcacagcaacggcaccgugaaggacagaagccccuacagagcccugaugagcugcccccugggcgaggcccccagccccuacaacagcaaguucgagagcguggccuggagcgccagcgccugccacgacggcaugggcuggcugaccaucggcaucagcggccccgacaacggcgccguggccgugcugaaguacaacggcaucaucaccgagaccaucaagagcuggaagaagagaauccugagaacccaggagagcgagugcgugugcgugaacggcagcugcuucaccaucaugaccgacggccccaacaacggcgccgccagcuacaagaucuucaagaucgagaagggcaaggugaccaagagcaucgagcugaacgcccccaacagccacuacgaggagugcagcugcuaccccgacaccggcaccgugaugugcgugugcagagacaacuggcacggcagcaacagacccugggugagcuucaaccagaaccuggacuaccagaucggcuacaucugcagcggcguguucggcgacaaccccagacccaaggacggcgagggcagcugcaaccccgugaccguggacggcgccgacggcgugaagggcuucagcuacaaguacggcaacggcguguggaucggcagaaccaagagcaacagacugagaaagggcuucgagaugaucugggaccccaacggcuggaccgacaccgacagcgacuucagcgugaagcaggacgugguggccaucaccgacuggagcggcuacagcggcagcuucgugcagcaccccgagcugaccggccuggacugcaucagacccugcuucuggguggagcuggugagaggccugcccagagagaacaccaccaucuggaccagcggcagcagcaucagcuucugcggcgugaacagcgacaccgccaacuggagcuggcccgacggcgccgagcugcccuucaccaucgacaaguga

SEQ ID NO: 183189 - RNA, 1413 nt, Artificial Sequence
  derived and/or modified CDS sequence (opt4) from neuraminidase__InfluenzaA__AFO64816
augaaccccaaccagaagaucaucaccaucggcagcaucugcauggccaucggcaucaucagccugauccugcagaucggcaacaucgugagcaucuggaucagccacagcauccagaccggcagccagaacuacaccggcaucugcaaccagagaaucaucaccuacgagaacagcaccugggugaaccagaccuacgugaacaucaacaacaccaacgugguggccggccaggacaccaccagcguggcccuggccggcaacagcagccugugccccaucagcggcugggccaucuacagcaaggacaacagcaucagaaucggcagcaagggcgacguguucgugaucagagagcccuucaucagcugcagccaccuggagugcagaaccuucuuccugacccagggcgcccugcugaacgacaagcacagcaacggcaccgugaaggacagaagccccuacagagcccugaugagcugccccaucggcgaggcccccagccccuacaacagcagauucgagagcguggccuggagcgccagcgccugccacgacggcaugggcuggcugaccaucggcaucagcggccccgacgacggcgccguggccgugcugaaguacaacggcaucaucaccgagaccaucaagagcuggagaagaagaauccugagaacccaggagagcgagugcgugugcgugaacggcagcugcuucaccaucaugaccgacggccccaacaacggccccgccagcuacaagaucuucaagaucgagaagggcaaggugaccaagagcaucgagcuggacgcccccaacagccacuacgaggagugcagcugcuaccccgacgccggcaccgugaugugcgugugcagagacaacuggcacggcagcaacagacccugggugagcuucaaccagaaccuggacuaccagaucggcuacaucugcagcggcguguucggcgacaaccccagacccaaggacggcaagggcagcugcgaccccgugaccguggacggcgccgacggcgugaagggcuucagcuacagauacggcaacggcguguggaucggcagaaccaagagcaacagcagcagaagaggcuucgagaugaucugggaccccaacggcuggaccgacaccgacagcaaguuccuggugaagcaggacgugguggccaugaccgacuggagcggcuacagcggcagcuucgugcagcaccccgagcugaccggccuggacugcaugagacccugcuucuggguggagcugaucagaggcagacccagagagaacaccaccaucuggaccagcggcagcagcaucagcuucugcggcgugaacggcgacaccgccaacuggagcuggcccgacggcgccgagcugcccuucaccaucgacaaguga

SEQ ID NO: 183190 - RNA, 1413 nt, Artificial Sequence
  derived and/or modified CDS sequence (opt4) from neuraminidase__InfluenzaA__AFO64827
augaaccccaaccagaagaucaucaccaucggcagcaucagcauggccaucggcaucaucagccugauccugcagaucggcaacaucaucagcaucugggugagccacagcauccagaccggcagccagaaccacaccggcaucugcaaccagagaaucaucaccuacgagaacagcaccugggugaaccagaccuacgugaacaucaacaacaccaacgugaucgccggcaaggacaagaccagcgugacccuggccggcaacagcagccugugccccaucagaggcugggccaucuacaccaaggacaacagcaucagaaucggcagcaagggcgacguguucgugaucagagagcccuucaucagcugcagccaccuggagugcagaaccuucuuccugacccagggcgcccugcugaacgacaagcacagcaacggcaccgugaaggacagaagccccuacagagcccugaugagcugcccccugggcgaggcccccagccccuacaacagcagauucgagagcguggccuggagcgccagcgccugccacgacggcaugggcuggcugaccaucggcaucagcggccccgacgacggcgccguggccgugcugaaguacaacggcaucaucaccgagaccaucaagagcuggaagaagagaauccugagaacccaggagagcgagugcgugugcgugaacggcagcugcuucaccaucaugaccgacggccccagcaacggcgccgccagcuacagaaucuucaagaucgagaagggcaaggugaccaagagcaucgagcuggacgcccccaacagccacuacgaggagugcagcugcuaccccgacaccggcaccgugaugugcgugugcagagacaacuggcacggcagcaacagacccugggugagcuucaaccagaaccuggacuaccagaucggcuacaucugcagcggcguguucggcgacaaccccagacccaaggacggcaagggcagcugcgaccccgugaccguggacggcgccgacggcgugaagggcuucagcuacagauacggcaacggcguguggaucggcagaaccaagagcaacagauucagaaagggcuucgagaugaucugggaccccaacggcuggaccgacaccgacagcgacuuccuggugaagcaggacgugguggccaugaccgacuggagcggcuacagcggcagcuucgugcagcaccccgagcugaccggccuggacugcaugagacccugcuucuggguggagcuggugagaggcagacccagagagaacaccaccaucuggaccagcggcagcagcaucagcuucugcggcgugaacagcgacaccgccaacuggagcuggcccgacggcgccgagcugcccuucaccaucgacaaguga

SEQ ID NO: 183191 - RNA, 1413 nt, Artificial Sequence
  derived and/or modified CDS sequence (opt4) from neuraminidase__InfluenzaA__AFO64838
augaaccccaaccagaagaucaucaccaucggcagcaucagcauggccaucggcaucaucagccugauccugcagaucggcaacaucaucagcaucugggccagccacagcauccagaccggcagccagaaccacaccggcaucugcaaccagagaaucaucaccuacgagaacagcaccugggugaaccagaccuacgugaacaucaacaacaccaacgugguggccggcaaggacaagaccagcgugacccuggccggcaacagcagccugugccccaucagaggcugggccaucuacaccaaggacaacagcaucagaaucggcagcaagggcgacguguucgugaucagagagcccuucaucagcugcagccaccuggagugcagaaccuucuuccugacccagggcgcccugcugaacgacaagcacagcaacggcaccgugaaggacagaagccccuacagagcccugaugagcugcccccugggcgaggcccccagccccuacaacagcagauucgagagcguggccuggagcgccagcgccugccacgacggcaugggcuggcugaccaucggcaucagcggccccgacaacggcgccguggccgugcugaaguacaacggcaucaucaccgagaccaucaagagcuggaagaagagaauccugagaacccaggagagcgagugcgugugcgugaacggcagcugcuucaccaucaugaccgacggccccagcaacggcgccgccagcuacagaaucuucaagaucgagaagggcagagugaccaagagcaucgagcuggacgcccccaacuaccacuacgaggagugcagcugcuaccccgacaccggcaccgugaugugcgugugcagagacaacuggcacggcagcaacagacccugggugagcuucaaccagaaccuggacuaccagaucggcuacaucugcagcggcguguucggcgacaaccccagacccaaggacggcgagggcagcugcaaccccgugaccguggacggcgccgacggcgugaagggcuucagcuacagauacggcaacggcguguggaucggcagaaccaagagcaacagacugagaaagggcuucgagaugaucugggaccccaacggcuggaccgacaccgacagcgacuucagcaugaagcaggacgugguggccaugaccgacuggagcggcuacagcggcagcuucgugcagcaccccgagcugaccggccuggacugcaugagacccugcuucuggguggagcuggugagaggccugcccagagagaacaccaccaucuggaccagcggcagcagcaucagcuucugcggcgugaacagcgacaccgccaacuggagcuggcccgacggcgccgagcugcccuucaccaucgacaaguga

SEQ ID NO: 183192 - RNA, 1413 nt, Artificial Sequence
  derived and/or modified CDS sequence (opt4) from neuraminidase__InfluenzaA__AFO64849
augaaccccaaccagaagaucaucaccaucggcagcaucagcauggccaucggcaucaucagccugauccugcagaucggcaacaucaucagcaucugggccagccacagcauccagaccggcagccagaaccacaccggcaucugcaaccagagaaucaucaccuacgagaacagcaccugggugaaccagaccuacgugaacaucaacaacaccaacgugguggccggcaaggacaagaccagcgugacccuggccggcaacagcagccugugccccaucagaggcugggccaucuacaccaaggacaacagcaucagaaucggcagcaagggcgacguguucgugaucagagagcccuucaucagcugcagccaccuggagugcagaaccuucuuccugacccagggcgcccugcugaacgacaagcacagcaacggcaccgugaaggacagaagccccuacagagcccugaugagcugcccccugggcgaggcccccagccccuacaacagcagauucgagagcguggccuggagcgccagcgccugccacgacggcaugggcuggcugaccaucggcaucagcggccccgacaacggcgccguggccgugcugaaguacaacggcaucaucaccgagaccaucaagagcuggaagaagcagauccugagaacccaggagagcgagugcgugugcgugaacggcagcugcuucaccaucaugaccgacggccccagcaacggcgccgccagcuacagaaucuucaagaucgagaagggcaagaucaccaagagcaucgagcuggacgcccccaacagccacuacgaggagugcagcugcuaccccgacaccggcaccgugaugugcgugugcagagacaacuggcacggcagcaacagacccugggugagcuucaaccagaaccuggacuaccagaucggcuacaucugcagcggcguguucggcgacaaccccagacccaaggacggcgagggcagcugcaaccccgugaccguggacggcgccgacggcgugaagggcuucagcuacagauacggcaacggcguguggaucggcagaaccaagagcaacagacugagaaagggcuucgagaugaucugggaccccaacggcuggaccgacaccgacagcgacuucagcgugaagcaggacgugguggccaugaccgacuggagcggcuacagcggcagcuucgugcagcaccccgagcugaccggccuggacugcaugagacccugcuucuggguggagcuggugagaggcagacccagagagaacgccaccaucuggaccagcggcagcagcaucagcuucugcggcgugaacagcgacaccgccaacuggagcuggcccgacggcgccgagcugcccuucaccaucgacaaguga

SEQ ID NO: 183193 - RNA, 1413 nt, Artificial Sequence; identical to SEQ ID NO: 175028
  derived and/or modified CDS sequence (opt4) from neuraminidase__InfluenzaA__AFO64860

SEQ ID NO: 183194 - RNA, 1413 nt, Artificial Sequence
  derived and/or modified CDS sequence (opt4) from neuraminidase__InfluenzaA__AFO64871
augaaccccaaccagaagaucaucaccaucggcagcaucagcaucgccaucggcaucaucagccugauccugcagaucggcaacaucaucagcaucugggccagccacagcauccagaccggcagccagaaccacaccggcgugugcaaccagagaaucaucaccuacgagaacagcaccugggugaaccagaccuacgugaacaucaacaacaccaacgugguggccggcaaggacaagaccagcaugacccuggccggcaacagcagccugugccccaucagaggcugggccaucuacaccaaggacaacagcaucagaaucggcagcaagggcgacguguucgugaucagagagcccuucaucagcugcagccaccuggagugcagaaccuucuuccugacccagggcgcccugcugaacgacaagcacagcaacggcaccgugaaggacagaagccccuacagagcccugaugagcugcccccugggcgaggcccccagccccuacaacagcagauucgagagcguggccuggagcgccagcgccugccacgacggccugggcuggcugaccaucggcaucagcggccccgacaacggcgccguggccgugcugaaguacaacggcaucaucaccgagaccaucaagagcuggaagaagagaauccugagaacccaggagagcgagugcgugugcaugaacggcagcugcuucaccaucaugaccgacggccccagcaacggcgccgccagcuacagaaucuucaagaucgagaagggcagagugaccaagagcaucgagcuggacgcccccaacuaccacuacgaggagugcagcugcuaccccgacaccggcaccgugaugugcgugugcagagacaacuggcacggcagcaacagacccugggugagcuucaaccagaaccuggacuaccagaucggcuacaucugcagcggcguguucggcgacaaccccagacccaaggacggcgagggcagcugcaaccccgugaccguggacggcgccgacggcgugaagggcuucagcuacagauacggcaacggcguguggaucggcagaaccaagagcaacagacugagaaagggcuucgagaugaucugggaccccaacggcuggaccgacaccgacagcgacuucagcaugagacaggacaucguggccaugaccgacuggagcggcuacagcggcagcuucgugcagcaccccgagcugaccggccuggacugcaugagacccugcuucuggguggagcuggugagaggccugcccagagagaacaccaccaucuggaccagcggcagcagcaucagcuucugcggcgugaacagcgacaccgccaacuggagcuggcccgacggcgccgagcugcccuucaccaucgacaaguga

SEQ ID NO: 183195 - RNA, 1413 nt, Artificial Sequence
  derived and/or modified CDS sequence (opt4) from neuraminidase__InfluenzaA__AFO64882
augaaccccaaccagaagaucaucaccaucggcagcaucagcaucgccaucggcaucaucagccugaugcugcagaucggcaacaucaucagcaucugggccagccacagcauccagaccggcagccagaaccacaccggcaucugcaaccagagaaucaucaccuacgagaacagcaccugggugaaccacaccuacgugaacaucaacaacaccaacgugguggccggcaaggacaagaccagcgugacccuggccggcaacagcagccugugcagcaucagcggcugggccaucuacaccaaggacaacagcaucagaaucggcagcaagggcgacguguucgugaucagagagcccuucaucagcugcagccaccuggagugcagaaccuucuuccugacccagggcgcccugcugaacgacaagcacagcaacggcaccgugaaggacagaagccccuacagagcccugaugagcugcccccugggcgaggcccccagccccuacaacagcaaguucgagagcguggccuggagcgccagcgccugccacgacggcaugggcuggcugaccaucggcaucagcggccccgacaacggcgccguggccgugcugaaguacaacggcaucaucaccgagaccaucaagagcuggaagaagagaauccugagaacccaggagagcgagugcgugugcgugaacggcagcugcuucaccaucaugaccgacggccccagcaacggcgccgccagcuacaagaucuucaagaucgagaagggcaaggugaccaagagcaucgagcugaacgcccccaacagccacuacgaggagugcagcugcuaccccgacaccggcaccgugaugugcgugugcagagacaacuggcacggcagcaacagacccugggugagcuucaaccagaaccuggacuaccagaucggcuacaucugcagcggcguguucggcgacaaccccagacccaaggacggcgagggcagcugcaaccccgugaccguggacggcgccgacggcgugaagggcuucagcuacaaguacggcaacggcguguggaucggcagaaccaagagcaacagacugagaaagggcuucgagaugaucugggaccccaacggcuggaccgacaccgacagcgacuucagcgugaagcaggacgugguggccaucaccgacuggagcggcuacagcggcagcuucgugcagcaccccgagcugaccggccuggacugcaucagacccugcuucuggguggagcuggugagaggcagacccagagagaacaccaccaucuggaccagcggcagcagcaucagcuucugcggcgugaacagcgacaccgccaacuggagcuggcccgacggcgccgagcugcccuucaccaucgacaaguga

SEQ ID NO: 183196 - RNA, 1413 nt, Artificial Sequence
  derived and/or modified CDS sequence (opt4) from neuraminidase__InfluenzaA__AFO64893
augaaccccaaccagaagaucaucaccaucggcagcaucagcguggccaucggcaucaucagccugaugcugcagaucggcaacaucaucagcaucugggccagccacagcauccagaccggcagccagaaccacaccggcaucugcaaccagagaaucaucaccuacgagaacagcaccugggugaaccacaccuacgugaacaucaacaacaccaacgugguggccggcaaggacaagaccagcgugacccuggccggcaacagcagccugugcagcaucagcggcugggccaucuacaccaaggacaacagcaucagaaucggcagcaagggcgacguguucgugaucagagagcccuucaucagcugcagccaccuggagugcagaaccuucuuccugacccagggcgcccugcugaacgacaagcacagcaacggcaccgugaaggacagaagccccuacagagcccugaugagcugcccccugggcgaggcccccagccccuacaacagcaaguucgagagcguggccuggagcgccagcgccugccacgacggcaugggcuggcugaccaucggcaucagcggccccgacaacggcgccguggccgugcugaaguacaacggcaucaucaccgagaccaucaagagcuggaagaagagaauccugagaacccaggagagcgagugcgugugcgugaacggcagcugcuucaccaucaugaccgacggccccagcgacggcgccgccagcuacaagaucuucaagaucgagaagggcaaggugaccaagagcaucgagcugaacgcccccaacagccacuacgaggagugcagcugcuaccccgacaccggcaccgugaugugcgugugcagagacaacuggcacggcagcaacagacccugggugagcuucaaccagaaccuggacuaccagaucggcuacaucugcagcggcguguucggcgacaaccccagacccaaggacggcgagggcagcugcaaccccgugaccguggacggcgccgacggcgugaagggcuucagcuacaaguacggcaacggcguguggaucggcagaaccaagagcaacagauucagaaagggcuucgagaugaucugggaccccaacggcuggaccgacaccgacagcgacuucagcgugaagcaggacgugguggccaucaccgacuggagcggcuacagcggcagcuucgugcagcaccccgagcugaccggccuggacugcaucagacccugcuucuggguggagcuggugagaggcagacccagagagaacaccaccaucuggaccagcggcagcagcaucagcuucugcggcgugaacagcgacaccgccaacuggagcuggcccgacggcgccgagcugcccuucaccaucgacaaguga

SEQ ID NO: 183197 - RNA, 1413 nt, Artificial Sequence
  derived and/or modified CDS sequence (opt4) from neuraminidase__InfluenzaA__AFO64904
augaaccccaaccagaagaucaucaccaucggcagcaucagcguggccaucggcaucaucagccugauccugcagaucggcaacaucaucagcaugugggccagccacagcauccagaccggcagccagaacuacaccggcaucugcaaccagagaaucaucaccuacgagaacaacaccugggugaaccagaccuacgugaacaucaacaacaccaacgugguggccggcaaggacaagaucagcaugacccuggccggcaacagcagccugugccccaucagaggcugggccaucuacaccaaggacaacagcaucagaaucggcagcaagggcgacguguucgugaucagagagcccuucaucagcugcagccaccuggagugcagaaccuucuuccugacccagggcgcccugcugaacgacaagcacagcaacggcaccgugaaggacagaagccccuacagagcccugaugagcugcccccugggcgaggcccccagccccuacaacagcagauucgagagcguggccuggagcgccagcgccugccacgacggccugggcuggcugaccaucggcaucagcggccccgacaacggcgccguggccgugcugaaguacaacggcaucaucaccgagaccaucaagagcuggaagaagcagauccugagaacccaggagagcgagugcgugugcgugaacggcagcugcuucaccaucaugaccgacggccccagcaacagagccgccagcuacagaaucuucaagaucgagaagggcagagugaccaagagcaucgagcuggacgcccccaacuaccacuacgaggagugcagcugcuaccccgacaccggcaccgugaugugcgugugcagagacaacuggcacggcagcaacagacccugggugagcuucaaccagaaccuggacuaccagaucggcuacaucugcagcggcguguucggcgacaaccccagacccaaggacggcgagggcagcugcaaccccgugaccguggacggcgccgacggcgugaagggcuucagcuacaaguacggcaacggcguguggaucggcagaaccaagagcaacagacugagaaagggcuucgagaugaucugggaccccaacggcuggaccgacaccgacagcgacuucagcaugaagcaggacgugguggccaugaccgacuggagcggcuacagcggcagcuucgugcagcaccccgagcugaccggccuggacugcaugagacccugcuucuggguggagcuggugagaggccugcccagagagaacaccaccaucuggaccagcggcagcagcaucagcuucugcggcgugaacagcgagaccgccaacuggagcuggcccgacggcgccgagcugcccuucaccaucgacaaguga

SEQ ID NO: 183198 - RNA, 1413 nt, Artificial Sequence
  derived and/or modified CDS sequence (opt4) from neuraminidase__InfluenzaA__AFO65019
augaaccccaaccagaagaucaucaccaucggcagcaucagcaucgccaucggcaucaucagccugaugcugcagaucggcaacaucaucagcaucugggccagccacagcauccagaccggcagccagaaccacaccggcaucugcaaccagagaaucaucaccuacgagaacagcaccugggugaaccacaccuacgugaacaucaacaacaccaacgugguggccggcaaggacaagaccagcgugacccuggccggcaacagcagccugugcagcaucagcggcugggccaucuacaccaaggacaacagcaucagaaucggcagcaagggcgacguguucgugaucagagagcccuucaucagcugcagccaccuggagugcagaaccuucuuccugacccagggcgcccugcugaacgacaagcacagcaacggcaccgugaaggacagaagccccuacagagcccugaugagcugcccccugggcgaggcccccagccccuacaacagcaaguucgagagcguggccuggagcgccagcgccugccacgacggcaugggcuggcugaccaucggcaucagcggccccgacaacggcgccguggccgugcugaaguacaacggcaucaucaccgagaccaucaagagcuggaagaagagaauccugagaacccaggagagcgagugcgugugcgugaacggcagcugcuucaccaucaugaccgacggccccagcaacggcgccgccagcuacaagaucuucaagaucgagaagggcaaggugaccaagagcaucgagcugaacgcccccaacagccacuacgaggagugcagcugcuaccccgacaccggcaccgugaugugcgugugcagagacaacuggcacggcagcaacagacccugggugagcuucaaccagaaccuggacuaccagaucggcuacaucugcagcggcguguucggcgacaaccccagacccaaggacggcgagggcagcugcaaccccgugaccgccgacggcgccgacggcgugaagggcuucagcuacaaguacggcaacggcguguggaucggcagaaccaagagcaacagacugagaaagggcuucgagaugaucugggaccccaacggcuggaccgacaccgacagcgacuucagcgugaagcaggacgugguggccaucaccgacuggagcggcuacagcggcagcuucgugcagcaccccgagcugaccggccuggacugcaucagacccugcuucuggguggagcuggugagaggcagacccagagagaacaccaccaucuggaccagcggcagcagcaucagcuucugcggcgugaacagcgacaccgccaacuggagcuggcccgacggcgccgagcugcccuucaccaucgacaaguga

SEQ ID NO: 183199 - RNA, 1413 nt, Artificial Sequence; identical to SEQ ID NO: 176513
  derived and/or modified CDS sequence (opt4) from neuraminidase__InfluenzaA__AFO65030

SEQ ID NO: 183200 - RNA, 1413 nt, Artificial Sequence
  derived and/or modified CDS sequence (opt4) from neuraminidase__InfluenzaA__AFO65041
augaaccccaaccagaagaucaucaccaucggcagcaucagcaucgccaucggcaucaucagccugaugcugcagaucggcaacaucaucagcaucugggccagccacagcauccagaccggcagccagaaccacaccggcgugugcaaccagagaaucaucaccuacgagaacagcaccugggugaaccacaccuacgugaacaucaacaacaccaacgugguggccggcaaggacaagaccagcgugacccuggccggcaacagcagccugugcagcaucagcggcugggccaucuacaccaaggacaacagcaucagaaucggcagcaagggcgacguguucgugaucagagagcccuucaucagcugcagccaccuggagugcagaaccuucuuccugacccagggcgcccugcugaacgacaagcacagcaacggcaccgugaaggacagaagccccuacagagcccugaugagcugcccccugggcgaggcccccagccccuacaacagcaaguucgagagcguggccuggagcgccagcgccugccacgacggcaugggcuggcugaccaucggcaucagcggccccgacaacggcgccguggccgugcugaaguacaacggcaucaucaccgagaccaucaagagcuggaagaagcagauccugagaacccaggagagcgagugcgugugcgugaacggcagcugcuucaccaucaugaccgacggccccagcaacggcgccgccagcuacaagaucuucaagaucgagaagggcaaggugaccaagagcaucgagcugaacgcccccaacuuccacuacgaggagugcagcugcuaccccgacaccggcaccgugaugugcgugugcagagacaacuggcacggcagcaacagacccugggugagcuucaaccagaaccuggacuaccagaucggcuacaucugcagcggcguguucggcgacaaccccagacccaaggacggcgagggcagcugcaaccccgugaccguggacggcgccaacggcgugaagggcuucagcuacaaguacggcaacggcguguggaucggcagaaccaagagcaacagacugagaaagggcuucgagaugaucugggaccccaacggcuggaccgacaccgacagcgacuucagcgugaagcaggacgugguggccaucaccgacuggagcggcuacagcggcagcuucgugcagcaccccgagcugaccggccuggacugcaucagacccugcuucuggguggagcuggugagaggccugcccagagagaacaccaccaucuggaccagcggcagcagcaucagcuucugcggcgugaacagcgacaccgccaacuggagcuggcccgacggcgccgagcugcccuucaccaucgacaaguga

SEQ ID NO: 183201 - RNA, 1413 nt, Artificial Sequence
  derived and/or modified CDS sequence (opt4) from neuraminidase__InfluenzaA__AFO65052
augaaccccaaccagaagaucaucaccaucggcagcaucagcaucgccaucggcaucaucagccugaugcugcagaucggcaacaucaucagcaucugggccagccacagcauccagaccggcagccagaaccacaccggcgugugcaaccagagaaucaucaccuacgagaacagcaccugggugaaccacaccuacgugaacaucaacaacaccaacgugaucgccggcaaggacaagaccagcaugacccuggccggcaacagcagccugugcagcaucagcggcugggccaucuacaccaaggacaacagcaucagaaucggcagcaagggcgacguguucgugaucagagagcccuucaucagcugcagccaccuggagugcagaaccuucuuccugacccagggcgcccugcugaacgacaagcacagcaacggcaccgugaaggacagaagccccuacagagcccugaugagcugcccccugggcgaggcccccagccccuacaacagcaaguucgagagcguggccuggagcgccagcgccugcaacgacggcaugggcuggcugaccaucggcaucagcggccccgacaacggcgccguggccgugcugaaguacaacggcaucaucaccgagaccaucaagagcuggaagaagcagauccugagaacccaggagagcgagugcgugugcgugaacggcagcugcuucaccaucaugaccgacggccccagcaacggcgccgccagcuacaagaucuucaagaucgagaagggcaaggugaccaagagcaucgagcugaacgcccccaacuuccacuacgaggagugcagcugcuaccccgacaccggcaccgugaugugcgugugcagagacaacuggcacggcagcaacagacccugggugagcuucaaccagaaccuggacuaccagaucggcuacaucugcagcggcguguucggcgacaaccccagacccaaggacggcgagggcagcugcaaccccgugaccguggacggcgccaacggcgugaagggcuucagcuacaaguacggcaacggcguguggaucggcagaaccaagagcaacagacugagaaagggcuucgagaugaucugggaccccaacggcuggaccgacaccgacagcgacuucagcgugaagcaggacgugguggccaucaccgacuggagcggcuacagcggcagcuucgugcagcaccccgagcugaccggccuggacugcaucagacccugcuucuggguggagcuggugagaggccugcccagagagaacaccaccaucuggaccagcggcagcagcaucagcuucugcggcgugaacagcgacaccgccaacuggagcuggcccgacggcgccgagcugcccuucaccaucgacaaguga

SEQ ID NO: 183202 - RNA, 1413 nt, Artificial Sequence; identical to SEQ ID NO: 174888
  derived and/or modified CDS sequence (opt4) from neuraminidase__InfluenzaA__AFO66139

SEQ ID NO: 183203 - RNA, 1413 nt, Artificial Sequence
  derived and/or modified CDS sequence (opt4) from neuraminidase__InfluenzaA__AFO66150
augaaccccaaccagaagaucaucaccaucggcagcaucagcguggccaucggcaucaucagccugauccugcagaucggcaacaucaucagcaucugggccagccacagcauccagaccggcagccagaacuacaccggcaucugcaaccagagaaucaucaccuacgagaacagaaccugggugaaccagaccuacgugaacaucaacaacaccaacgugguggccggcaaggacaagaccagcaugacccuggccggcaacagcagccugugccccaucagaggcugggccaucuacaccaaggacaacagcaucagaaucggcagcaagggcgacguguucgugaucagagagcccuucaucagcugcagccaccuggagugcagaaccuucuuccugacccagggcgcccugcugaacgacaagcacagcaacggcaccaucaaggacagaagccccuucagagcccugaugagcugcccccugggcgaggcccccagccccuacaacagcagauucgagagcguggccuggagcgccagcgccugccacgacggccugggcuggcugaccaucggcaucagcggccccgacaacggcgccguggccgugcugaaguacaacggcaucaucaccgagaccaucaagagcuggaagaagcagauccugagaacccaggagagcgagugcgugugcgugaacggcagcugcuucaccaucaugaccgacggccccagcaacagagccgccagcuacagaaucuucaagaucgagaagggcagagugaccaagagcaucgagcuggacgcccccaacuaccacuacgaggagugcagcugcuaccccgacaccggcaccgugaugugcgugugcagagacaacuggcacggcagcaacagacccugggugagcuucaaccagaaccuggacuaccagaucggcuacaucugcagcggcguguucggcgacaaccccagacccaaggacggcgagggcagcugcaaccccgugaccguggacggcgccgacggcgugaagggcuucagcuacagauacggcaacggcguguggaucggcagaaccaagagcaacagaaucagaaagggcuucgagaugaucugggaccccaacggcuggaccgacaccgacagcgacuucagcaugaagcaggacgugguggccaugaccgacuggagcggcuacagcggcagcuucgugcagcaccccgagcugaccggccuggacugcaugagacccugcuucuggguggagcuggugagaggccugcccagagagaacaccaccaucuggaccagcggcagcagcaucagcuucugcggcgugaacagcgagaccgccaacuggagcuggcccgacggcgccgagcugcccuucaccaucgacaaguga

SEQ ID NO: 183204 - RNA, 1413 nt, Artificial Sequence
  derived and/or modified CDS sequence (opt4) from neuraminidase__InfluenzaA__AFO66161
augaaccccaaccagaagaucaucaccaucggcagcaucagcaucgccaucggcaucaucagccugaugcugcagaucggcaacaucaucagcaucugggccagccacagcauccagaccggcagccagaaccacaccggcgugugcaaccagagaaucaucaccuacgagaacagcaccugggugaaccacaccuacgugaacaucaacaacaccaacgugaucgccggcaaggacaagaccagcgugacccuggccggcaacagcagccugugcagcaucagcggcugggccaucuacaccaaggacaacagcaucagaaucggcagcaagggcgacguguucgugaucagagagcccuucaucagcugcagccaccuggagugcagaaccuucuuccugacccagggcgcccugcugaacgacaagcacagcaacggcaccgugaaggacagaagccccuacagagcccugaugagcugcccccugggcgaggcccccagccccuacaacagcaaguucgagagcguggccuggagcgccagcgccugccacgacggcaugggcuggcugaccaucggcaucagcggccccgacaacggcgccguggccgugcugaaguacaacggcaucaucaccgagaccaucaagagcuggaagaagcagauccugagaacccaggagagcgagugcgugugcgugaacggcagcugcuucaccaucaugaccgacggccccagcaacggcgccgccagcuacaagaucuucaagaucgagaagggcaaggugaccaagagcaucgagcugaacgcccccaacuuccacuacgaggagugcagcugcuaccccgacaccggcaccgugaucugcgugugcagagacaacuggcacggcagcaacagacccugggugagcuucaaccagaaccuggacuaccagaucggcuacaucugcagcggcguguucggcgacaaccccagacccaaggacggcgagggcagcugcaaccccgugaccguggacggcgccaacggcgugaagggcuucagcuacaaguacggcaacggcguguggaucggcagaaccaagagcaacagacugagaaagggcuucgagaugaucugggaccccaacggcuggaccgacaccgacagcgacuucagcgugaagcaggacgugguggccaucaccgacuggagcggcuacagcggcagcuucgugcagcaccccgagcugaccggccuggacugcaucagacccugcuucuggguggagcuggugagaggccugcccaaggagaacaccaccaucuggaccagcggcagcagcaucagcuucugcggcgugaacagcgacaccgccaacuggagcuggcccgacggcgccgagcugcccuucaccaucgacaaguga

SEQ ID NO: 183205 - RNA, 1413 nt, Artificial Sequence
  derived and/or modified CDS sequence (opt4) from neuraminidase__InfluenzaA__AFO66172
augaaccccaaccagaagaucaucaccaucggcagcaucagcaucgccaucggcaucaucagccugaugcugcagaucggcaacaucaucagcaucugggccagccacagcauccagaccggcagccagaaccacaccggcaucugcaaccagagaaucaucaccuacgagaacagcaccugggugaaccacaccuacgugaacaucaacaacaccaacgugguggccggcaaggacaagaccagcgugacccuggccggcaacagcagccugugcagcaucagcggcugggccaucuacaccaaggacaacagcaucagaaucggcagcaagggcgacguguucgugaucagagagcccuucaucagcugcagccaccuggagugcagaaccuucuuccugacccagggcgcccugcugaacgacaagcacagcaacggcaccgugaaggacagaagccccuacagagcccugaugagcugcccccugggcgaggcccccagccccuacaacagcaaguucgagagcguggccuggagcgccagcgccugccacgacggcaugggcuggcugaccaucggcaucagcggccccgacaacggcgccguggccgugcugaaguacaacggcaucaucaccgagaccaucaagagcuggaagaagagaauccugagaacccaggagagcgagugcgugugcaugaacggcagcugcuucaccaucaugaccgacggccccagcaacggcgccgccagcuacaagaucuucaagaucgagaagggcaaggugaccaagagcaucgagcugaacgcccccaacuuccacuacgaggagugcagcugcuaccccgacaccggcaccgugaugugcgugugcagagacaacuggcacggcagcaacagacccugggugagcuucaaccagaaccuggacuaccagaucggcuacaucugcagcggcguguucggcgacaaccccagacccaaggacggcgagggcagcugcaaccccgugaccguggacggcgccgacggcgugaagggcuucagcuacaaguacggcaacggcguguggaucggcagaaccaagagcaacagacugagaaagggcuucgagaugaucugggaccccaacggcuggaccgacaccgacagcgacuucagcgugaagcaggacgugguggccaucaccgacuggagcggcuacagcggcagcuucgugcagcaccccgagcugaccggccuggacugcaucagacccugcuucuggguggagcuggugagaggccugcccagagagaacaccaccaucuggaccagcggcagcagcaucagcuucugcggcgugaacagcgacaccgccaacuggagcuggcccgacggcgccgagcugcccuucaccaucgacaaguga

SEQ ID NO: 183206 - RNA, 1413 nt, Artificial Sequence; identical to SEQ ID NO: 174990
  derived and/or modified CDS sequence (opt4) from neuraminidase__InfluenzaA__AFO66183

SEQ ID NO: 183207 - RNA, 1413 nt, Artificial Sequence
  derived and/or modified CDS sequence (opt4) from neuraminidase__InfluenzaA__AFO66194
augaaccccaaccagaagaucaucaccaucggcagcaucagcaucgccaucggcaucaucagccugaugcugcagaucggcaacaucaucagcaucugggccagccacagcauccagaccggcagccagaaccacaccggcgugugcaaccagagaaucaucaccuacgagaacagcaccugggugaaccacaccuacgugaacaucaacaacaccaacgugaucgccggcaaggacaagaccagcgugacccuggccggcaacagcagccugugcagcaucagcggcugggccaucuacaccaaggacaacagcaucagaaucggcagcaagggcgacguguucgugaucagagagcccuucaucagcugcagccaccuggagugcagaaccuucuuccugacccagggcgcccugcugaacgacaagcacagcaacggcaccgugaaggacagaagccccuacagagcccugaugagcugcccccugggcgaggcccccagccccuacaacagcaaguucgagagcguggccuggagcgccagcgccugccacgacggcaugggcuggcugaccaucggcaucagcggccccgacaacggcgccguggccgugcugaaguacaacggcaucaucaccgagaccaucaagagcuggaagaagcagauccugagaacccaggagagcgagugcgugugcgugaacggcagcugcuucaccaucaugaccgacggccccagcaacggcgccgccagcuacaagaucuucaagaucgagaagggcaaggugaccaagagcaucgagcugaacgcccccaacuuccacuacgaggagugcagcugcuaccccgacaccggcaccgugaugugcgugugcagagacaacuggcacggcagcaacagacccugggugagcuucaaccagaaccuggacuaccagaucggcuacaucugcagcggcguguucggcgacaaccccagacccaaggacggcgagggcagcugcaaccccgugaccguggacggcgccaacggcgugaagggcuucagcuacaaguacggcaacggcguguggaucggcagaaccaagagcaacagacugagaaagggcuucgagaugaucugggaccccaacggcuggaccgacaccgacagcgacuucagcgugaagcaggacaucguggccaucaccgacuggagcggcuacagcggcagcuucgugcagcaccccgagcugaccggccuggacugcaucagacccugcuucuggguggagcuggugagaggccugcccaaggagaacaccaccaucuggaccagcggcagcagcaucagcuucugcggcgugaacagcgacaccgccaacuggagcuggcccgacggcgccgagcugcccuucaccaucgacaaguga

SEQ ID NO: 183208 - RNA, 1410 nt, Artificial Sequence; identical to SEQ ID NO: 176615
  derived and/or modified CDS sequence (opt4) from neuraminidase__InfluenzaA__AFO66205

SEQ ID NO: 183209 - RNA, 1413 nt, Artificial Sequence; identical to SEQ ID NO: 174475
  derived and/or modified CDS sequence (opt4) from neuraminidase__InfluenzaA__AFO66216

SEQ ID NO: 183210 - RNA, 1413 nt, Artificial Sequence; identical to SEQ ID NO: 174446
  derived and/or modified CDS sequence (opt4) from neuraminidase__InfluenzaA__AFO66227

SEQ ID NO: 183211 - RNA, 1413 nt, Artificial Sequence
  derived and/or modified CDS sequence (opt4) from neuraminidase__InfluenzaA__AFO66238
augaaccccaaccagaagaucaucaccaucggcagcaucagcaucgccaucggcaucaucagccugaugcugcagaucggcaacaucaucagcaucugggccagccacagcauccagaccggcagccagaaccacaccggcaucugcaaccagagaaucaucaccuacgagaacagcaccugggugaaccacaccuacgugaacaucaacaacaccaacgugguggccggcaaggacaagaccagcgugacccuggccggcaacagcagccugugcagcaucagcggcugggccaucuacaccaaggacaacagcaucagaaucggcagcaagggcgacguguucgugaucagagagcccuucaucagcugcagccaccuggagugcagaaccuucuuccugacccagggcgcccugcugaacgacaagcacagcaacggcaccgugaaggacagaagccccuacagagcccugaugagcugcccccugggcgaggcccccagccccuacaacagcaaguucgagagcguggccuggagcgccagcgccugccacgacggcaugggcuggcugaccaucggcaucagcggccccgacaacggcgccguggccgugcugaaguacaacggcaucaucaccgagaccaucaagagcuggaagaagcagauccugagaacccaggagagcgagugcgugugcaugaacggcagcugcuucaccaucaugaccgacggccccagcaacggcgccgccagcuacaagaucuucaagaucgagaagggcaaggugaccaagagcaucgagcugaacgcccccaacuuccacuacgaggagugcagcugcuaccccgacaccggcaccgugaugugcgugugcagagacaacuggcacggcagcaacagacccugggugagcuucaaccagaaccuggacuaccagaucggcuacaucugcagcggcguguucggcgacaaccccagacccaaggacggcgagggcagcugcaaccccgugaccguggacggcgccgacggcgugaagggcuucagcuacaaguacggcaacggcguguggaucggcagaaccaagagcaacagacugagaaagggcuucgagaugaucugggaccccaacggcuggaccaacaccgacagcgacuucagcgugaagcaggacgugguggccaucaccgacuggagcggcuacagcggcagcuucgugcagcaccccgagcugaccggccuggacugcaucagacccugcuucuggguggagcuggugagaggccugcccagagagaacaccaccaucuggaccagcggcagcagcaucagcuucugcggcgugaacagcgacaccgccaacuggagcuggcccgacggcgccgagcugcccuucaccaucgacaaguga

SEQ ID NO: 183212 - RNA, 1413 nt, Artificial Sequence
  derived and/or modified CDS sequence (opt4) from neuraminidase__InfluenzaA__AFO66249
augaaccccaaccagaagaucaucaccaucggcagcaucagcaucgccaucggcaucaucagccugaugcugcagaucggcaacaucaucagcaucugggccagccacagcauccagaccggcagccagaaccacaccggcaucugcaaccagagaaucaucaccuacgagaacagcaccugggugaaccacaccuacgugaacaucaacaacaccaacgugguggccggcaaggacaagaccagcgugacccuggccggcaacagcagccugugcagcaucagcggcugggccaucuacaccaaggacaacagcaucagaaucggcagcaagggcgacguguucgugaucagagagcccuucaucagcugcagccaccuggagugcagaaccuucuuccugacccagggcgcccugcugaacgacaagcacagcaacggcaccgugaaggacagaagccccuacagagcccugaugagcugcccccugggcgaggcccccagccccuacaacagcaaguucgagagcguggccuggagcgccagcgccugccacgacggcaugggcuggcugaccaucggcaucagcggccccgacaacggcgccguggccgugcugaaguacaacggcaucaucaccggcaccaucaagagcuggaagaagcagauccugagaacccaggagagcgagugcgugugcaugaacggcagcugcuucaccaucaugaccgacggccccagcaacggcgccgccagcuacaagaucuucaagaucgagaagggcaaggugaccaagagcaucgagcugaacgcccccaacuuccacuacgaggagugcagcugcuaccccgacaccggcaccgugaugugcgugugcagagacaacuggcacggcagcaacagacccugggugagcuucaaccagaaccuggacuaccagaucggcuacaucugcagcggcguguucggcgacaaccccagacccaaggacggcgagggcagcugcaaccccgugaccguggacggcgccgacggcgugaagggcuucagcuacaaguacggcaacggcguguggaucggcagaaccaagagcaacagacugagaaagggcuucgagaugaucugggaccccaacggcuggaccaacaccgacagcgacuucagcgugaagcaggacgugguggccaucaccgacuggagcggcuacagcggcagcuucgugcagcaccccgagcugaccggccuggacugcaucagacccugcuucuggguggagcuggugagaggccugcccagagagaacaccaccaucuggaccagcggcagcagcaucagcuucugcggcgugaacagcgacaccgccaacuggagcuggcccgacggcgccgagcugcccuucaccaucgacaaguga

SEQ ID NO: 183213 - RNA, 1413 nt, Artificial Sequence
  derived and/or modified CDS sequence (opt4) from neuraminidase__InfluenzaA__AFP33330
augaaccccaaccagaagaucaucaccaucggcagcaucagcguggccaucggcaucaucagccugauccugcagaucggcaacaucaucagcaucugggccagccacagcauccaggccggcagccagaacuacaccggcaucugcaaccagaagaucaucaccuacgagaacagaaccugggugaaccagaccuacgugaacaucaacaacaccaacgugguggccggcaaggacaagaccagcaugacccuggccggcaacagcagccugugccccaucagaggcugggccaucuacaccaaggacaacagcaucagaaucggcagcaagggcgacguguucgugaucagagagcccuucaucagcugcagccaccuggagugcagaaccuucuuccugacccagggcgcccugcugaacgacaagcacagcaacggcaccaucaaggacagaagccccuucagagcccugaugagcugcccccugggcgaggcccccagccccuacaacagcagauucgagagcguggccuggagcgccagcgccugccacgacggccugggcuggcugaccaucggcaucagcggccccgacaacggcgccguggccgugcugaaguacaacggcaucaucaccgagaccaucaagagcuggaagaagcagauccugagaacccaggagagcgagugcgugugcgugaacggcagcugcuucaccaucaugaccgacggccccagcaacagagccgccagcuacagaaucuucaagaucgagaagggcagagugaccaagagcaucgagcuggacgcccccaacuaccacuacgaggagugcagcugcuaccccgacaccggcaccgugaugugcgugugcagagacaacuggcacggcagcaacagacccugggugagcuucaaccagaaccuggacuaccagaucggcuacaucugcagcggcguguucggcgacaaccccagacccaaggacggcgagggcagcugcaaccccgugaccguggacggcgccgacggcgugaagggcuucagcuacagauacggcaacggcguguggaucggcagaaccaagagcaacagacugagaaagggcuucgagaugaucugggaccccaacggcuggaccgacaccgacagcgacuucagcaugaagcaggacgugguggccaugaccgacuggagcggcuacagcggcagcuucgugcagcaccccgagcugaccggccuggacugcaugagacccugcuucuggguggagcuggugagaggccugcccagagagaacaccaccaucuggaccagcggcagcagcaucagcuucugcggcgugaacagcgagaccgccaacuggagcuggcccgacggcgccgagcugcccuucaccaucgacaaguga

SEQ ID NO: 183214 - RNA, 1413 nt, Artificial Sequence
  derived and/or modified CDS sequence (opt4) from neuraminidase__InfluenzaA__AFP33331
augaaccccaaccagaagaucaucaccaucggcagcaucagcaucgccaucggcaucaucagccugaugcugcagaucggcaacaucaucagcaucugggccagccacagcauccagaccggcagccagaaccacaccggcaucugcaaccagagaaucaucaccuacgagaacagcaccugggugaaccacaccuacgugaacaucaacaacaccaacgugaucgccggcaaggacaagaccagcgugacccuggccggcaacagcagccugugcagcaucagcggcugggccaucuacaccaaggacaacagcaucagaaucggcagcaagggcgacguguucgugaucagagagcccuucaucagcugcagccaccuggagugcagaaccuucuuccugacccagggcgcccugcugaacgacaagcacagcaacggcaccgugaaggacagaagccccuacagagcccugaugagcugcccccugggcgaggcccccagccccuacaacagcaaguucgagagcguggccuggagcgccagcgccugccacgacggcaugggcuggcugaccaucggcaucagcggccccgacaacggcgccguggccgugcugaaguacaacggcaucaucaccgagaccaucaagagcuggaagaagagaauccugagaacccaggagagcgagugcgugugcgugaacggcagcugcuucaccaucaugaccgacggccccagcaacggcgccgccagcuacaagaucuucaagaucgagaagggcaaggugaccaagagcaucgagcugaacgcccccaacuuccacuacgaggagugcagcugcuaccccgacaccggcaccgugaugugcgugugcagagacaacuggcacggcagcaacagacccugggugagcuucaaccagaaccuggacuaccagaucggcuacaucugcagcggcguguucggcgacaaccccagacccaaggacggcgagggcagcugcaaccccgugaccguggacggcgccgacggcgugaagggcuucagcuacaaguacggcaacggcguguggaucggcagaaccaagagcaacagacugagaaagggcuucgagaugaucugggaccccaacggcuggaccgacaccgacagcgacuucagcgugaagcaggacgugguggccaucaccgacuggagcggcuacagcggcagcuucgugcagcaccccgagcugaccggccuggacugcaucagacccugcuucuggguggagcuggugagaggccugcccagagagaacaccaccaucuggaccagcggcagcagcaucagcuucugcggcgugaacagcgacaccgccaacuggagcuggcccgacggcgccgagcugcccuucaccaucgacaaguga

SEQ ID NO: 183215 - RNA, 1410 nt, Artificial Sequence; identical to SEQ ID NO: 181203
  derived and/or modified CDS sequence (opt4) from neuraminidase__InfluenzaA__AFQ32576

SEQ ID NO: 183216 - RNA, 1410 nt, Artificial Sequence
  derived and/or modified CDS sequence (opt4) from neuraminidase__InfluenzaA__AFQ37282
augaaccccaaccagaagaucaucaccaucggcagcgugugcaugaccaucggcauggccaaccugauccugcagaucggcaacaucaucagcaucuggaucagccacagcauccagcugggcaaccagaaccagaucgagaccugcaaccagagcgugaucaccuacgagaacaacaccugggugaaccagaccuacgugaacaucagcaacaccaacuucgccgccggccagagcguggugagcgugaagcuggccggcaacagcagccugugccccgugagcggcugggccaucuacagcaaggacaacagcaucagaaucggcagcaagggcgacguguucgugaucagagagcccuucaucagcugcagcccccuggagugcagaaccuucuuccugacccagggcgcccugcugaacgacaagcacagcaacggcaccaucaaggacagaagccccuacagaacccugaugagcugccccaucggcgaggugcccagccccuacaacagcagauucgagagcguggccuggagcgccagcgccugccacgacggcaucaacuggcugaccaucggcaucagcggccccgacaacggcgccguggccgugcugaaguacaacggcaucaucaccgacaccaucaagagcuggagaaacaacauccugagaacccaggagagcgagugcgccugcgugaacggcagcugcuucaccgugaugaccgacggccccagcgacggccaggccagcuacaagaucuucagaaucgagaagggcaagaucgugaagagcguggagaugaacgcccccaacuaccacuacgaggagugcagcugcuaccccgacagcagcgagaucaccugcgugugcagagacaacuggcacggcagcaacagacccugggugagcuucaaccagaaccuggaguaccagaucggcuacaucugcagcggcaucuucggcgacaaccccagacccaacgacaagaccggcagcugcggccccgugagcagcaacggcgccaacggcgugaagggcuucagcuucaaguacggcaacggcguguggaucggcagaaccaagagcaucagcagcagaaacggcuucgagaugaucugggaccccaacggcuggaccggcaccgacaacaacuucagcaucaagcaggacaucgugggcaucaacgaguggagcggcuacagcggcagcuucgugcagcaccccgagcugaccggccuggacugcaucagacccugcuucuggguggagcugaucagaggcagacccaaggagaacaccaucuggaccggcggcagcagcaucagcuucugcggcgugaacagcgacaccgugggcuggagcuggcccgacggcgccgagcugcccuucaccaucgacaaguga

SEQ ID NO: 183217 - RNA, 1410 nt, Artificial Sequence
  derived and/or modified CDS sequence (opt4) from neuraminidase__InfluenzaA__AFQ55691
augaaccccaaccagaagaucaucaccaucggcguggugaacaccacccugagcaccaucgcccugcugaucggcgugggcaaccugguguucaacaccgugauccacgagaagaucggcgaccaccagaccgugacccaccccaccaccaccacccccgccauccccaacugcagcgacaccaucaucaccuacaacaacaccaucaucaacaacaucaccaccaccaucaucaccgaggccgagagacccuucaagagcccccugccccugugccccuucagaggcuucuuccccuuccacaaggacaacgccaucagacugggcgagaacaaggacgugaucgugaccagagagcccuacgugagcugcgacaacgacaacugcuggagcuucgcccuggcccagggcgcccugcugggcaccaagcacagcaacggcaccaucaaggacagaacccccuacagaagccugaucagauuccccaucggcaccgcccccgugcugggcaacuacaaggagaucugcaucgccuggagcagcagcagcugcuucgacggcaaggaguggaugcacgugugcaugaccggcaacgacaacgacgccagcgcccagaucaucuacgccggcaagaugaccgacagcaucaagagcuggagaaaggacauccugagaacccaggagagcgagugccagugcaucgacggcaccugcgugguggccgugaccgacggccccgccgccagcagcgccgaccacagaaucuacuggaucagagagggcaagaucaucaaguacgaggacgugcccaagaccaagauccagcaccuggaggagugcagcugcuacguggacguggacguguacugcaucugcagagacaacuggaagggcagcaacagacccuggaugagaaucaacaacgagaccauccuggagaccggcuacgugugcagcaaguuccacagcgacacccccagacccgccgaccccagcaccgugagcugcgacagccccagcaacgugaacggcggccccggcgugaagggcuucggcuucaaggccggcaacgacguguggcugggcagaaccgugagcaccagcggcagaagcggcuucgagaucaucaaggugaccgagggcuggaucaacagccccaaccacgccaagagcaucacccagacccugaugagcaacaacgacuggagcggcuacagcggcagcuucaucaucaagaccaaggacugcuuccagcccugcuucuacguggagcugaucagaggcagacccaacaagaacgacgacgugagcuggaccagcaacagcaucgugaccuucugcggccuggacaacgagcccggcagcggcaacuggcccgacggcagcaacaucggcuucaugcccaaguga

SEQ ID NO: 183218 - RNA, 1410 nt, Artificial Sequence
  derived and/or modified CDS sequence (opt4) from neuraminidase__InfluenzaA__AFR68156
augaaccccaaccagaagaucaucaccaucggcagcgugugcaugaccaucggcauggccaaccugauccugcagaucggcaacaucaucagcaucuggaucagccacagcauccagcugagaaaccagagccagaucgagaccugcaaccagagcgugaucaccuacgagaacaacaccugggugaaccagaccuacgugaacaucagcaacaccaacuucgccgccggccagagcguggugagcgugaagcuggccggcaacagcagccugugccccgugagcggcugggccaucuacagcaaggacaacagcaucagaaucggcagcaagggcgacguguucgugaucagagagcccuucaucagcugcagcccccuggagugcagaaccuucuuccugacccagggcgcccugcugaacgacaagcacagcaacggcaccaucaaggacagaagccccuacagaacccugaugagcugccccaucggcgaggugcccagccccuacaacagcagauucgagagcguggccuggagcgccagcgccugccacgacggcaucaacuggcugaccaucggcaucagcggccccgacaacggcgccguggccgugcugaaguacaacggcaucaucaccgacaccaucaagagcuggagaaacaacauccugagaacccaggagagcgagugcgccugcgugaacggcagcugcuucaccaucaugaccgacggccccagcgacggccaggccagcuacaagaucuucagaaucgagaagggcaagaucgugaagagcguggagaugaacgcccccaacuaccacuacgaggagugcagcugcuaccccgacagcagcgagaucaccugcgugugcagagacaacuggcacggcagcaacagacccugggugagcuucaaccagaaccuggaguaccagaucggcuacaucugcagcggcaucuucggcgacaaccccagacccaacgacaagaccggcagcugcggccccgugagcagcaacggcgccaacggcgugaagggcuucagcuucaaguacggcaacggcguguggaucggcagaaccaagagcaucagcagcagaaagggcuucgagaugaucugggaccccaacggcuggaccggcaccgacaacaacuucagcaucaagcaggacaucgugggcaucaacgaguggagcggcuacagcggcagcuucgugcagcaccccgagcugaccggccuggacugcaucagacccugcuucuggguggagcugaucagaggcagacccaaggagaacaccaucuggaccagcggcagcagcaucagcuucugcggcgugaacagcgacaccgugggcuggagcuggcccgacggcgccgagcugcccuucaccaucgacaaguga

SEQ ID NO: 183219 - RNA, 1410 nt, Artificial Sequence; identical to SEQ ID NO: 183218
  derived and/or modified CDS sequence (opt4) from neuraminidase__InfluenzaA__AFR68166

SEQ ID NO: 183220 - RNA, 1410 nt, Artificial Sequence
  derived and/or modified CDS sequence (opt4) from neuraminidase__InfluenzaA__AFR68176
augaaccccaaccagaagaucaucaccaucggcagcgugagccugaccaucagcaccaucugcuucuucaugcagaucgccauccugaucaccaccgugacccugcacuucaagcaguacgaguucaacagcccccccaacaaccaggugaugcugugcgagcccaccaucaucgagagaaacaucaccgagaucguguaccugaccaacaccaccaucgagaaggagaucugccccaagcuggccgaguacagaaacuggagcaagccccagugcgacaucaccggcuucgcccccuucagcaaggacaacagcaucagacugagcgccggcggcgacaucugggugaccagagagcccuacgugagcugcgaccccgacaagugcuaccaguucgcccugggccagggcaccacccugaacaacgugcacagcaacaacaccgugagagacagaacccccuacagaacccugcugaugaacgagcugggcgugcccuuccaccugggcaccaagcaggugugcaucgccuggagcagcagcagcugccacgacggcaaggccuggcugcacgugugcaucaccggcgacgacaagaacgccaccgccagcuucaucuacaacggcagacugguggacagcguggccagcuggagcaaggacauccugagaacccaggagagcgagugcgugugcaucaacggcaccugcgccguggugaugaccgacggcagcgccagcggcaaggccgacaccaagauccuguucaucaaggagggcaagaucgugcacaccagcacccugagcggcagcgcccagcacguggaggagugcagcugcuaccccagauaccccggcgugagaugcgugugcagagacaacuggaagggcagcaacagacccaucguggacaucaacaucaaggaccacagcaucgugagcagcuacgugugcagcggccuggugggcgacacccccagaaagaacgacagcagcagcagcggccacugccuggaccccaacaacgaggagggcggccacggcgugaagggcugggccuucgacgacggcaacgacguguggaugggcagaaccaucaacgagaccagcagacugggcuacgagaccuucaaggugaucgagggcuggagcaaccccaagagcaagcugcagaucaacagacaggugaucguggacagaggcaacagaagcggcuacagcggcaucuucagcguggagggcaagaacugcaucaacagaugcuucuacguggagcugaucagaggcagaaaggaggagaccgaggugcuguggaccagcaacagcaucgugguguucugcggcaccagcggcaccuacggcaccggcagcuggcccgacggcgccgaccugaaccugaugcccaucuga

SEQ ID NO: 183221 - RNA, 1410 nt, Artificial Sequence; identical to SEQ ID NO: 176798
  derived and/or modified CDS sequence (opt4) from neuraminidase__InfluenzaA__AFR84677

SEQ ID NO: 183222 - RNA, 1410 nt, Artificial Sequence; identical to SEQ ID NO: 177685
  derived and/or modified CDS sequence (opt4) from neuraminidase__InfluenzaA__AFR84687

SEQ ID NO: 183223 - RNA, 1410 nt, Artificial Sequence; identical to SEQ ID NO: 176788
  derived and/or modified CDS sequence (opt4) from neuraminidase__InfluenzaA__AFR84696

SEQ ID NO: 183224 - RNA, 1410 nt, Artificial Sequence; identical to SEQ ID NO: 176798
  derived and/or modified CDS sequence (opt4) from neuraminidase__InfluenzaA__AFR84706

SEQ ID NO: 183225 - RNA, 1410 nt, Artificial Sequence; identical to SEQ ID NO: 176788
  derived and/or modified CDS sequence (opt4) from neuraminidase__InfluenzaA__AFR84716

SEQ ID NO: 183226 - RNA, 1410 nt, Artificial Sequence; identical to SEQ ID NO: 176788
  derived and/or modified CDS sequence (opt4) from neuraminidase__InfluenzaA__AFR84726

SEQ ID NO: 183227 - RNA, 1410 nt, Artificial Sequence; identical to SEQ ID NO: 176788
  derived and/or modified CDS sequence (opt4) from neuraminidase__InfluenzaA__AFR84736

SEQ ID NO: 183228 - RNA, 1410 nt, Artificial Sequence; identical to SEQ ID NO: 176788
  derived and/or modified CDS sequence (opt4) from neuraminidase__InfluenzaA__AFR84746

SEQ ID NO: 183229 - RNA, 1410 nt, Artificial Sequence; identical to SEQ ID NO: 176788
  derived and/or modified CDS sequence (opt4) from neuraminidase__InfluenzaA__AFR84756

SEQ ID NO: 183230 - RNA, 1410 nt, Artificial Sequence; identical to SEQ ID NO: 176788
  derived and/or modified CDS sequence (opt4) from neuraminidase__InfluenzaA__AFR84766

SEQ ID NO: 183231 - RNA, 1410 nt, Artificial Sequence; identical to SEQ ID NO: 176788
  derived and/or modified CDS sequence (opt4) from neuraminidase__InfluenzaA__AFR84776

SEQ ID NO: 183232 - RNA, 1410 nt, Artificial Sequence; identical to SEQ ID NO: 176788
  derived and/or modified CDS sequence (opt4) from neuraminidase__InfluenzaA__AFR84786

SEQ ID NO: 183233 - RNA, 1410 nt, Artificial Sequence; identical to SEQ ID NO: 176788
  derived and/or modified CDS sequence (opt4) from neuraminidase__InfluenzaA__AFR84796

SEQ ID NO: 183234 - RNA, 1410 nt, Artificial Sequence; identical to SEQ ID NO: 176798
  derived and/or modified CDS sequence (opt4) from neuraminidase__InfluenzaA__AFR84806

SEQ ID NO: 183235 - RNA, 1410 nt, Artificial Sequence; identical to SEQ ID NO: 176788
  derived and/or modified CDS sequence (opt4) from neuraminidase__InfluenzaA__AFR84816

SEQ ID NO: 183236 - RNA, 1410 nt, Artificial Sequence; identical to SEQ ID NO: 176798
  derived and/or modified CDS sequence (opt4) from neuraminidase__InfluenzaA__AFR84826

SEQ ID NO: 183237 - RNA, 1410 nt, Artificial Sequence
  derived and/or modified CDS sequence (opt4) from neuraminidase__InfluenzaA__AFR84836
augaaccccaaccagaagaucaucaccaucggcagcgugugcaugaccaucggcauggccaaccugauccugcagaucggcaacaucaucagcaucuggaucagccacagcauccagcugggcaaccagaaccagaucgagaccugcaaccagagcgugaucaccuacgagaacaacaccugggugaaccagaccuacgugaacaucagcaacaccaacuucgccgccggccagagcguggugagcgugaagcuggccggcaacagcagccugugccccgugggcggcugggccaucuacagcaaggacaacagcgugagaaucggcagcaagggcgacguguucgugaucagagagcccuucaucagcugcagcccccuggagugcagaaccuucuuccugacccagggcgcccugcugaacgacaagcacagcaacggcaccaucaaggacagaagccccuacagaacccugaugagcugccccaucggcgaggugcccagccccuacaacagcagauucgagagcguggccuggagcgccagcgccugccacgacggcaucaacuggcugaccaucggcaucagcggccccgacaacggcgccguggccgugcugaaguacaacggcaucaucaccgacaccaucaagagcuggagaaacaacauccugagaacccaggagagcgagugcgccugcgugaacggcagcugcuucaccgugaugaccgacggccccagcaacggccaggccagcuacaagaucuucagaaucgagaagggcaagaucgugaagagcguggagaugaacgcccccaacuaccacuacgaggagugcagcugcuaccccgacagcagcgagaucaccugcgugugcagagacaacuggcacggcagcaacagacccugggugagcuucaaccagaaccuggaguaccagaucggcuacaucugcagcggcaucuucggcgacaaccccagacccaacgacaagaccggcagcugcggccccgugagcagcaacggcgccaacggcgugaagggcuucagcuucaaguacggcaacggcguguggaucggcagaaccaagagcaucagcagcagaaacggcuucgagaugaucugggaccccaacggcuggaccgagaccgacaacaacuucagcaucaagcaggacaucgugggcaucaacgaguggagcggcuacagcggcagcuucgugcagcaccccgagcugaccggccuggacugcaucagacccugcuucuggguggagcugaucagaggcagacccaaggagaacaccaucuggaccagcggcagcagcaucagcuucugcggcgugaacagcgacaccgugggcuggagcuggcccgacggcgccgagcugcccuucaccaucgacaaguga

SEQ ID NO: 183238 - RNA, 1410 nt, Artificial Sequence; identical to SEQ ID NO: 177602
  derived and/or modified CDS sequence (opt4) from neuraminidase__InfluenzaA__AFR84846

SEQ ID NO: 183239 - RNA, 1410 nt, Artificial Sequence; identical to SEQ ID NO: 176798
  derived and/or modified CDS sequence (opt4) from neuraminidase__InfluenzaA__AFR84856

SEQ ID NO: 183240 - RNA, 1410 nt, Artificial Sequence
  derived and/or modified CDS sequence (opt4) from neuraminidase__InfluenzaA__AFR84866
augaaccccaaccagaagaucaucaccaucggcagcgugugcaugaccaucggcauggccaaccugauccugcagaucggcaacaucaucagcaucuggaucagccacagcauccagcugggcaaccagaaccagaucgagaccugcaaccagagcgugaucaccuacgagaacaacaccugggugaaccagaccuacgugaacaucagcaacaccaacuucgccgccggccagagcguggugagcgugaagcuggccggcaacagcagccugugccccgugagcggcugggccaucuacagcaaggacaacagcaucagaaucggcagcaagggcgacguguucgugaucagagagcccuucaucagcugcagcccccuggagugcagaaccuucuuccugacccagggcgcccugcugaacgacaagcacagcaacggcaccaucaaggacagaagccccuucagaacccugaugagcugccccaucggcgaggugcccagccccuacaacagcagauucgagagcguggccuggagcgccagcgccugccacgacggcaucaacuggcugaccaucggcaucagcggccccgacaacggcgccguggccgugcugaaguacaacggcaucaucaccgacaccaucaagagcuggagaaacaacauccugagaacccaggagagcgagugcgccugcgugaacggcagcugcuucaccgugaugaccgacggccccagcgacggccaggccagcuacaagaucuucagaaucgagaagggcaagaucgugaagagcguggagaugaacgcccccaacuaccacuacgaggagugcagcugcuaccccgacagcagcgagaucaccugcgugugcagagacaacuggcacggcagcaacagacccugggugagcuucaaccagaaccuggaguaccagaucggcuacaucugcagcggcaucuucggcgacaaccccagacccaacgacaagaccggcagcugcggccccgugagcagcaacggcgccaacggcgugaagggcuucagcuucaaguacggcaacggcguguggaucggcagaaccaagagcaucagcagcagaaacggcuucgagaugaucugggaccccaacggcuggaccggcaccgacaacaacuucagcaucaagcaggacaucgugggcaucaacgaguggagcggcuacagcggcagcuucgugcagcaccccgagcugaccggccuggacugcaucagacccugcuucuggguggagcugaucagaggcagacccaaggagaacaccaucuggaccagcggcagcagcaucagcuucugcggcgugaacagcgacaccgugggcuggagcuggcccgacggcgccgagcugcccuucaccaucgacaaguga

SEQ ID NO: 183241 - RNA, 1410 nt, Artificial Sequence; identical to SEQ ID NO: 177506
  derived and/or modified CDS sequence (opt4) from neuraminidase__InfluenzaA__AFR84876

SEQ ID NO: 183242 - RNA, 1410 nt, Artificial Sequence; identical to SEQ ID NO: 177602
  derived and/or modified CDS sequence (opt4) from neuraminidase__InfluenzaA__AFR84895

SEQ ID NO: 183243 - RNA, 1410 nt, Artificial Sequence; identical to SEQ ID NO: 177602
  derived and/or modified CDS sequence (opt4) from neuraminidase__InfluenzaA__AFR84905

SEQ ID NO: 183244 - RNA, 1410 nt, Artificial Sequence; identical to SEQ ID NO: 177602
  derived and/or modified CDS sequence (opt4) from neuraminidase__InfluenzaA__AFR84915

SEQ ID NO: 183245 - RNA, 1410 nt, Artificial Sequence; identical to SEQ ID NO: 177602
  derived and/or modified CDS sequence (opt4) from neuraminidase__InfluenzaA__AFR84925

SEQ ID NO: 183246 - RNA, 1353 nt, Artificial Sequence
  derived and/or modified CDS sequence (opt4) from neuraminidase__InfluenzaA__AFU83119
augaaccccaaccagaagaucaucaccaucggcagcgugagccugaccaucgccaccgugugcuuccugaugcagaucgccauccuggccaccaccgugacccugcacuucaagcagaacgagugcagcauccccagcagcaaccagguggugcccugcgagcccaucaucguggagagaaacgugaccgaguacagagacuggagcaagccccagugccagaucaccggcuucgcccccuucagcaaggacaacagcaucagacugagcgccggcggcgacaucugggugaccagagagcccuacgugagcugcagccccgacaagugcuaccaguucgcccugggccagggcaccacccuggacaacaagcacagcaacggcaccauccacgacagaaucccccacagaacccugcugaugaacgagcugggcgugcccuuccaccugggcaccaagcaggugugcaucgccuggagcagcagcagcugccacgacggcagagccuggcugcacgugugcgugaccggcgacgacagaaacgccaccgccagcuucaucuacgacggcgugcugguggacagcaucggcagcuggagccagaacauccugagaacccaggagagcgagugcgugugcaucaacggcaccugcaccguggugaugaccgacggcagcgccagcggcagagccgacaccagaauccuguucaucaaggagggcaagaucgugcacgugagcccccugagcggcagcgcccagcacaucgaggagugcagcugcuaccccagauaccccgacgugagaugcgugugcagagacaacuggaagggcagcaacagacccaucaucgacaucagcauggccgacuacggcaucgacagcagcuacgugugcagcggccuggugggcgacacccccagaaacgacgacagcagcagcaacagcaacugcaaggaccccaacaacgagagaggcaaccccggcgugaagggcugggccuucgacuacggcaacgacguguggaugggcagaaccaucagcaaggacagcagaagcggcuacgagaccuucagagugaucggcggcuggaccaucgccaacagcaagagccaggugaacagacaggugaucguggacaacaacaacuggagcggcuacagcggcaucuucagcguggagggcaagagcugcaucaacagaugcuucuacguggagcugaucagaggcagaccccaggagaccagagugugguggaccagcaacagcaucguggccuucugcggcaccagcggcaccuacggcaccggcagcuggcccgacggcgccaacaucaacuucaugcccaucuga

SEQ ID NO: 183247 - RNA, 1410 nt, Artificial Sequence
  derived and/or modified CDS sequence (opt4) from neuraminidase__InfluenzaA__AFV53208
augaaccccaaccagaagaucaucaccaucggcagcgugagccugaccaucgccaccgugugcuuccugauccagaucgccauccuggugaccaccgugacccugcacuucaagcagcacgagugcgacagccccgccagcaaccaggugaugcccugcgagcccaucaucaucgagagaaacaucaccgagaucguguaccugaacaacaccaccaucgagaaggagaucugccccaaggugguggaguacagaaacuggagcaagccccagugccagaucaccggcuucgcccccuucagcaaggacaacagcaucagacugagcgccggcggcgacaucugggugaccagagagcccuacgugagcugcgaccccggcaagugcuaccaguucgcccugggccagggcaccacccuggacaacaagcacagcaacgacaccauccacgacagaaucccccacagaacccugcugaugaacgagcugggcgugcccuuccaccugggcaccagacaggugugcaucgccuggagcagcagcagcugccacgacggcaaggccuggcugcacgugugcaucaccggcgacgacaagaacgccaccgccagcuucaucuacgacggcagacugauggacagcaucggcagcuggagccagaacauccugagaacccaggagagcgagugcgugugcaucaacggcaccugcaccguggugaugaccgacggcagcgccagcggcagagccgacaccagaauccuguucaucgaggagggcaagaucgugcacaucagcccccugagcggcagcgcccagcacguggaggagugcagcugcuaccccagauaccccggcgugagaugcaucugcagagacaacuggaagggcagcaacagacccgugaucgacaucaacauggaggacuacagcaucgacagcagcuacgugugcagcggccuggugggcgacacccccagaaacgacgacagaagcagcaacagcaacugcagaaaccccaacaacgagagaggcaaccagggcgugaagggcugggccuucgacaacggcgacgacguguggaugggcagaaccaucagcaaggaccugagaagcggcuacgagaccuucaaggugaucggcggcuggagcacccccaacagcaagagccagaucaacagacaggugaucguggacagcgacaacagaagcggcuacagcggcaucuucagcguggagggcaagagcugcaucaacagaugcuucuacguggagcugaucagaggcagaaagcaggagaccagagugugguggaccagcaacagcaucgugguguucugcggcaccagcggcaccuacggcaccggcagcuggcccgacggcgccaacaucaacuucaugcccaucuga

SEQ ID NO: 183248 - RNA, 1410 nt, Artificial Sequence
  derived and/or modified CDS sequence (opt4) from neuraminidase__InfluenzaA__AFV53219
augaaccccaaccagaagaccaucaccaucggcagcgugagccugaccaucgccaccgugugcuuccugaugcagaucgccauccuggccaccaccgugacccugcacuucaagcagcacgagugcgacagccccgccagcaaccaggugaugcccugcgagcccaucaucaucgagagaaacaucaccgagaucguguaccugaacaacaccaccaucgagaaggagaucugccccgaggugguggaguacagaaacuggagcaagccccagugccagaucaccggcuucgcccccuucagcaaggacaacagcaucagacugagcgccggcggcgacaucugggugaccagagagcccuacgugagcugcgaccccggcaagugcuaccaguucgcccugggccagggcaccacccuggacaacaagcacagcaacggcaccauccacgacagaaucccccacagaacccugcugaugaacgagcugggcgugcccuuccaccugggcaccaagcaggugugcguggccuggagcagcagcagcugccacgacggcaaggccuggcugcacgugugcgugaccggcgacgacagaaacgccaccgccagcuucaucuacgacggcagacugguggacagcaucggcagcuggagccagaacauccugagaacccaggagagcgagugcgugugcaucaacggcaccugcaccguggugaugaccgacggcagcgccagcggcagagccgacaccagaauccuguucaucaaggagggcaagaucgugcacaucagcccccugagcggcagcgcccagcacaucgaggagugcagcugcuaccccagauaccccgacgugagaugcaucugcagagacaacuggaagggcagcaacagacccgugaucgacaucaacauggaggacuacagcaucgacagcagcuacgugugcagcggccuggugggcgacacccccagaaacgacgacagcagcagcaacagcaacugcagagaccccaacaacgagagaggcaaccccggcgugaagggcugggccuucgacaacggcgacgacguguggaugggcagaaccaucaacaaggagagcagaagcggcuacgagaccuucaaggugaucggcggcuggagcacccccaacagcaagagccaggugaacagacaggugaucguggacaacaacaacuggagcggcuacagcggcaucuucagcguggagggcaagagcugcaucaacagaugcuucuacguggagcugaucagaggcagaccccaggagaccagagugugguggaccagcaacagcaucgugguguucugcggcaccagcggcaccuacggcaccggcagcuggcccgacggcgccaacaucaacuucaugcccaucuga

SEQ ID NO: 183249 - RNA, 1410 nt, Artificial Sequence
  derived and/or modified CDS sequence (opt4) from neuraminidase__InfluenzaA__AFV53230
augaaccccaaccagaagaucaucaccaucggcagcgugagccugaccaucgccaccgugugcuuccugaugcagaucgccauccuggugaccaccgugacccugcacuucaagcagcacgagugcgacagccccgccagcaaccaggugaugcccugcgagcccaucaucaucgagagaaacaucaccgagaucguguaccugaacaacaccaccaucgagaaggagaucugccccaaggugguggaguacagaaacuggagcaagccccagugcaagaucaccggcuucgcccccuucagcaaggacaacagcaucagacugagcgccggcggcgacaucugggugaccagagagcccuacgugagcugcgaccccggcaagugcuaccaguucgcccugggccagggcaccacccuggacaacaagcacagcaacgacaccauccacgacagaaucccccacagaacccugcugaugaacgagcugggcgugcccuuccaccugggcaccagacaggugugcaucgccuggagcagcagcagcugccacgacggcaaggccuggcugcacgugugcgugaccggcgacgacaagaacgccaccgccagcuucaucuacgacggcagacugguggacagcaucggcagcuggagccagaacauccugagaacccaggagagcgagugcgugugcaucaacggcaccugcaccguggugaugaccgacggcagcgccagcggcagagccgacaccaagauccuguucaucgaggagggcaagaucgugcacaucagcccccugagcggcagcgcccagcacguggaggagugcagcugcuaccccagauaccccgacgugagaugcaucugcagagacaacuggaagggcagcaacagacccgugguggacaucagcauggaggacuacagcaucgacagcagcuacgugugcagcggccuggugggcgacacccccagaaacgacgacagaagcagcaacagcaacugcagaaaccccaacaacgagagaggcaaccagggcgugaagggcugggccuucgacaacggcgacgacguguggaugggcagaaccaucagcaaggaccugagaagcggcuacgagaccuucaaggugaucggcggcuggagcacccccaacagcaagagccagaucaacagacaggugaucguggacagcgacaacagaagcggcuacagcggcaucuucagcguggagggcaagagcugcaucaacagaugcuucuacguggagcugaucagaggcagaaagcaggagaccagagugugguggaccagcaacagcaucgugguguucugcggcaccagcggcaccuacggcaccggcagcuggcccgacggcgccaacaucaaccugaugcccaucuga

SEQ ID NO: 183250 - RNA, 1410 nt, Artificial Sequence; identical to SEQ ID NO: 176465
  derived and/or modified CDS sequence (opt4) from neuraminidase__InfluenzaA__AFV53241

SEQ ID NO: 183251 - RNA, 1410 nt, Artificial Sequence; identical to SEQ ID NO: 174151
  derived and/or modified CDS sequence (opt4) from neuraminidase__InfluenzaA__AFV53252

SEQ ID NO: 183252 - RNA, 1413 nt, Artificial Sequence
  derived and/or modified CDS sequence (opt4) from neuraminidase__InfluenzaA__AFV53263
augaaccccaaccagaagaucaucaccaucggcagcaucugcauggccaucggcaccaucagccugauccugcagaucggcaacaucaucagcaucuggaucagccacagcauccagaccggcagccagaaccacaccggcaucugcaaccagagaaucaucaccuacgagaacaacaccugggugaaccagaccuacgugaacaucagcaacaccaacgugguggccggcaaggacaccaccagcaugauccuggccggcaacagcagccugugccccaucagaggcugggccaucuacagcaaggacaacagcaucagaaucggcagcaagggcgacguguucgugaucagagagcccuucaucagcugcagccaccuggagugcagaaccuucuuccugacccagggcgcccugcugaacgacaagcacagcaacggcaccgugaaggacagaagccccuacagagcccugaugagcugccccaucggcgaggcccccagccccuacaacagcagauucgagagcguggccuggagcgccagcgccugccacgacggcaugggcuggcugaccaucggcaucagcggccccgacgacggcgccguggccgugcugaaguacaacggcaucaucaccgagaucaucaagagcuggagaaagcagauccugagaacccaggagagcgagugcgugugcgugaacggcagcugcuucaccaucaugaccgacggccccagcaacagacccgccagcuacagaaucuucaagaucgagaagggcaagaucaccaagagcaucgagcuggacgcccccaacagccacuacgaggagugcagcugcuaccccgacaccggcaaggugaugugcgugugcagagacaacuggcacggcagcaacagacccugggugagcuucaaccagaaccuggacuaccagaucggcuacaucugcagcggcguguucggcgacaaccccagacccaaggacggcaagggcagcugcgaccccgugaacguggacggcgccgacggcgugaagggcuucagcuacagauacggcaacggcguguggaucggcagaaccaagagcaacagcagcagaaagggcuucgagaugaucugggaccccaacggcuggaccaacaccgacggcaacuucagcgugaagcaggacgugguggccaugaccgacuggagcggcuacagcggcagcuucgugcagcaccccgagcugaccggccuggacugcaucagacccugcuucuggguggagcugaucagaggcagacccagagaggagaccaccaucuggaccagcggcagcagcaucagcuucugcggcgugaacagcgacaccgugaacuggagcuggcccgacggcgccgagcugcccuucaccaucgacaaguga

SEQ ID NO: 183253 - RNA, 1410 nt, Artificial Sequence
  derived and/or modified CDS sequence (opt4) from neuraminidase__InfluenzaA__AFV53274
augaaccccaaccagaagaucaucaccaucggcagcgugagccugaucaucgccaccgugugcuuccugaugcagaucgccauccuggugaccaccgugacccugcacuucaagcagcacgagugcgacagccccgccagcaaccaggugaugcccugcgagcccaucaucaucgagagaaacaucaccgagaucguguaccugaacaacaccaccaucgagaaggagaucugccccaaggugguggaguacagaaacuggagcaagccccagugccagaucaccggcuucgcccccuucagcaaggacaacagcaucagacugagcgccggcggcgacaucugggugaccagagagcccuacgugagcugcgaccccggcaagugcuaccaguucgcccugggccagggcaccacccuggacaacaagcacagcaacgacaccauccacgacagaaucccccacagaacccugcugaugaacgagcugggcgugcccuuccaccugggcaccagacaggugugcguggccuggagcagcagcagcugccacgacggcaaggccuggcugcacgugugcgugaccggcgacgacaagaacgccaccgccagcuucaucuacgacggcagacugguggacagcaucggcagcuggagccagaacauccugagaacccaggagagcgagugcgugugcaucaacggcaccugcaccguggugaugaccgacggcagcgccagcggcagagccgacaccagaauccuguucaucgaggagggcaagaucgugcacaucagcccccugagcggcagcgcccagcacguggaggagugcagcugcuaccccagauaccccgacgugagaugcaucugcagagacaacuggaagggcagcaacagacccgugaucgacaucaacauggaggacuacagcaucgacagcagcuacgugugcagcggccuggugggcgacacccccagaaacgacgacagaagcagcaacagcaacugcagaaaccccaacaacgagagaggcaaccccggcgugaagggcugggccuucgacaacggcgacgacguguggaugggcagaaccaucagcaaggaccugagaagcggcuacgagaccuucaaggugaucggcggcuggagcacccccaacagcaagagccagaucaacagacaggugaucguggacagcaacaacuggagcggcuacagcggcaucuucagcguggagggcaagagcugcaucaacagaugcuucuacguggagcugaucagaggcagacagcaggagaccagagugugguggaccagcaacagcaucgugguguucugcggcaccagcggcaccuacggcaccggcagcuggcccgacggcgccaacaucaacuucaugcccaucuga

SEQ ID NO: 183254 - RNA, 1410 nt, Artificial Sequence
  derived and/or modified CDS sequence (opt4) from neuraminidase__InfluenzaA__AFV53285
augaaccccaaccagaagaucaucaccaucggcagcgugagccugaccaucgccaccgugugcuuccugaugcagaucgccauccuggccaccaccgugacccugcacuucaagcagcacgagugcgacagccccgccagcaaccaggugaugcccugcgagcccaucaucaucgagagaaacaucaccgagaucguguaccugaacaacaccaccaucgagaaggagaucugccccgaggugguggaguacagaaacuggagcaagccccagugccagaucaccggcuucgcccccuucagcaaggacaacagcaucagacugagcgccggcggcgacaucugggugaccagagagcccuacgugagcugcgaccccggcaagugcuaccaguucgcccugggccagggcaccacccuggacaacaagcacagcaacggcaccauccacgacagaaucccccacagaacccugcugaugaacgagcugggcgugcccuuccaccugggcaccaagcaggugugcguggccuggagcagcagcagcugccacgacggcaaggccuggcugcacgugugcgugaccggcgacgacagaaacgccaccgccagcuucaucuacgacggcagacugguggacagcaucggcagcuggagccagaacauccugagaacccaggagagcgagugcgugugcaucaacggcaccugcaccguggugaugaccgacggcagcgccagcggcagagccgacaccagaauccuguucaucaaggagggcaagaucgugcacaucagcccccugagcggcagcgcccagcacaucgaggagugcagcugcuaccccagacaccccgacgugagaugcaucugcagagacaacuggaagggcagcaacagacccgugaucaacaucaacauggaggacuacagcaucgacagcagcuacgugugcagcggccuggugggcgacacccccagaaacgacgacagcagcagcaacagcaacugcagagaccccaacaacgagagaggcaaccccggcgugaagggcugggccuucgacaacggcgacgacguguggaugggcagaaccaucaacaaggacagcagaagcggcuacgagaccuucaaggugaucggcggcuggagcacccccaacagcaagagccaggugaacagacaggugaucguggacaacaacaacuggagcggcuacagcggcaucuucagcguggagggcaagagcugcaucaacagaugcuucuacguggagcugaucagaggcagaccccaggagaccagagugugguggaccagcaacagcaucgugguguucugcggcaccagcggcaccuacggcaccggcagcuggcccgacggcgccaacaucaacuucaugcccaucuga

SEQ ID NO: 183255 - RNA, 1410 nt, Artificial Sequence
  derived and/or modified CDS sequence (opt4) from neuraminidase__InfluenzaA__AFV53296
augaaccccaaccagaagaucaucaucaucggcagcgugagccugaccaucgccaccgugugcuuccugaugcagaucgccauccuggugaccaccgugacccugcacuucaagcagcacgagugcgacagccccgccagcaaccaggugaugcccugcgagcccaucaucaucgagagaaacaucaccgagaucguguaccugaacaacaccaccaucgagaaggagaucugccccgaggugguggaguacagaaacuggagcaagccccagugccagaucaccggcuucgcccccuucagcaaggacaacagcaucagacugagcgccggcggcgacaucugggugaccagagagcccuacgugagcugcgaccccagcaagugcuaccaguucgcccugggccagggcaccacccuggacaacaagcacagcaacgacaccauccacgacagaaucccccacagaacccugcugaugaacgagcugggcgugcccuuccaccugggcaccagacaggugugcguggccuggagcagcagcagcugccacgacggcaaggccuggcugcacgugugcgugaccggcgacgacaagaacgccaccgccagcuucaucuacgacggcagacugguggacagcaucggcagcuggagccagaacauccugagaacccaggagagcgagugcgugugcaucaacggcaccugcaccguggugaugaccgacggcagcgccagcggcagagccgacaccagaauccuguucaucgaggagggcaagaucgugcacaucagcccccugagcggcagcgcccagcacguggaggagugcagcugcuaccccagauaccccgacgugagaugcaucugcagagacaacuggaagggcagcaacagacccgugaucgacaucaacauggaggacuacagcaucgacagcagcuacgugugcagcggccuggugggcgacacccccagaaacgacgacagaagcagcaacagcaacugcagagaccccaacaacgagagaggcaaccccggcgugaagggcugggccuucgacaacggcgacgacguguggaugggcagaaccaucagcaaggaccugagaagcggcuacgagaccuucaaggugaucggcggcuggagcacccccaacagcaagagccagaucaacagacaggugaucguggacagcaacaacuggagcggcuacagcggcaucuucagcguggagggcaagagcugcaucaacagaugcuucuacguggagcugaucagaggcagacagcaggagaccagagugugguggaccagcaacagcaucgugguguucugcggcaccagcggcaccuacggcaccggcagcuggcccgacggcgccaacaucaacuucaugcccaucuga

SEQ ID NO: 183256 - RNA, 1410 nt, Artificial Sequence
  derived and/or modified CDS sequence (opt4) from neuraminidase__InfluenzaA__AFV53307
augaaccccaaccagaagaucaucaccaucggcagcgugagccugaccaucgccaccgugugcuuccugaugcagaucgccauccuggccaccaccgugacccugcacuucaagcagcacgagugcgacagccccgccagcaaccaggugaugcccugcgagcccaucaucaucgagagaaacaucaccgagaucguguaccugaacaacaccaccaucgagaaggagaucugccccgaggugguggaguacagaaacuggagcaagccccagugccagaucaccggcuucgcccccuucagcaaggacaacagcaucagacugagcgccggcggcgacaucugggugaccagagagcccuacgugagcugcgaccccggcaagugcuaccaguucgcccugggccagggcaccacccuggacaacaagcacagcaacggcaccauccacgacagaaucccccacagaacccugcugaugaacgagcugggcgugcccuuccaccugggcaccaagcaggugugcguggccuggagcagcagcagcugccacgacggcaaggccuggcugcacgugugcgugaccggcgacgacagaaacgccaccgccagcuucaucuacgacggcagacugguggacagcaucggcagcuggagccagaacauccugagaacccaggagagcgagugcgugugcaucaacggcaccugcaccguggugaugaccgacggcagcgccagcggcagagccgacaccagaauccuguucaucaaggagggcaagaucgugcacaucagcccccugagcggcagcgcccagcacguggaggagugcagcugcuaccccagauaccccgacgugagaugcaucugcagagacaacuggaagggcagcaacagacccgugaucgacaucaacauggaggacuacagcaucgacagcagcuacgugugcagcggccuggugggcgacacccccagaaacgacgacagcagcagcaacagcaacugcagagaccccaacaacgagagaggcaaccccggcgugaagggcugggccuucgacaacggcgacgacguguggaugggcagaaccaucaacaaggacagcagaagcggcuacgagaccuucaaggugaucggcggcuggagcacccccaacagcaagagccaggugaacagacaggugaucguggacaacaacaacuggagcggcuacagcggcaucuucagcguggagggcaagagcugcaucaacagaugcuucuacguggagcugaucagaggcagaccccaggagaccagagugugguggaccagcaacagcaucgugguguucugcggcaccagcggcaccuacggcaccggcagcuggcccgacggcgccaacaucaacuucaugcccaucuga

SEQ ID NO: 183257 - RNA, 1410 nt, Artificial Sequence
  derived and/or modified CDS sequence (opt4) from neuraminidase__InfluenzaA__AFV53317
augaaccccaaccagaagaucaucaccaucggcagcgugagccugaccaucgccaccgugugcuuccugaugcagaucgccauccuggccaccaccgugacccugcacuucaagcagcacgagugcgacagccccgccagcaaccaggugaugcccugcgagcccaucaucaucgagagaaacaucaccgagaucguguaccugaacaacaccaccaucgagaaggagaucugccccgaggugguggaguacagaaacuggagcaagccccagugccagaucaccggcuucgcccccuucagcaaggacaacagcaucagacugagcgccggcggcgacaucugggugaccagagagcccuacgugagcugcgaccccggcaagugcuaccaguucgcccugggccagggcaccacccuggacaacaagcacagcaacggcaccauccacgacagaagcccccacagaacccugcugaugaacgagcugggcgugcccuuccaccugggcaccaagcaggugugcgccgccuggagcagcagcagcugccacgacggcaaggccuggcugcacgugugcgugaccggcgacgacagaaacgccaccgccagcuucaucuacgacggcagacugguggacagcaucggcagcuggagccagaacauccugagaacccaggagagcgagugcgugugcaucaacggcaccugcaccguggugaugaccgacggcagcgccagcggcagagccgacaccagaauccuguucaucaaggagggcaagaucgugcacaucggcccccugagcggcagcgcccagcacaucgaggagugcagcugcuaccccagauaccccgacgugagaugcaucugcagagacaacuggaagggcagcaacagacccgugaucgacaucaacauggaggacuacagcaucgacagcagcuacgugugcagcggccuggugggcgacacccccagaaacgacgacagcagcagcaacagcaacugcagagaccccaacaacgagagaggcaaccccggcgugaagggcugggccuucgacaacggcgacgacguguggaugggcagaaccaucagcaaggaccugagaagcggcuacgagaccuucaaggugaucggcggcuggagcacccccaacagcaagagccaggugaacagacaggugaucguggacaacaacaacuggagcggcuacagcggcaucuucagcguggagggcaagagcugcaucaacagaugcuucuacguggagcugaucagaggcagaccccaggagaccagagugugguggaccagcaacagcaucgugguguucugcggcaccagcggcaccuacggcaccggcagcuggcccgacggcgccaacaucaacuucaugcccaucuga

SEQ ID NO: 183258 - RNA, 1410 nt, Artificial Sequence
  derived and/or modified CDS sequence (opt4) from neuraminidase__InfluenzaA__AFV53328
augaaccccaaccagaagaucaucaccaucggcagcgugagccugaccaucgccaccgugugcuuccugaugcacaucgccauccuggccaccaccgugacccugcacuucaagcagcacgagugcgacagccccgccagcaaccaggccaugcccugcgagcccaucaucaucgagagaaacaucaccgagaucguguaccugaacaacaccaccaucgagaaggagaucugccccgaggugguggaguacagaaacuggagcaagccccagugccagaucaccggcuucgcccccuucagcaaggacaacagcaucagacugagcgccggcggcgacaucugggugaccagagagcccuacgugagcugcgaccccggcaagugcuaccaguucgcccugggccagggcaccacccuggacaacaagcacagcaacggcaccauccacgacagaaucccccacagaacccugcugaugaacgagcugggcgugcccuuccaccugggcaccaagcaggugugcguggccuggagcagcagcagcugccacgacggcaaggccuggcugcacgugugcaucaccggcgacgacagaaacgccaccgccagcuucaucuacgacggcagacugguggacagcaucggcagcuggagccagaacauccugagaacccaggagagcgagugcgugugcaucaacggcaccugcaccguggugaugaccgacggcagcgccagcggcagagccgacaccagaauccuguucaucaaggagggcaagaucgugcacaucagcccccugagcggcagcgcccagcacaucgaggagugcagcugcuaccccagauaccccgacgugagaugcaucugcagagacaacuggaagggcagcaacagacccgugaucgacaucaacauggaggacuacagcaucgacagcagcuacgugugcagcggccuggugggcgacacccccagaaacgacgacagcagcagcaacagcaacugcagagaccccaacaacgagagaggcaaccccggcgugaagggcugggccuucgacaacggcgacgacguguggaugggcagaaccaucagcaaggaccugagaagcggcuacgagaccuucaaggugaucggcggcuggagcacccccaacagcaagagccaggugaacagacaggugaucguggacaacaacaacuggagcggcuacagcggcaucuucagcguggagggcaagagcugcaucaacagaugcuucuacguggagcugaucagaggcagaccccaggagaccagagugugguggaccagcaacagcaucgugguguucugcggcaccagcggcaccuacggcaccggcagcuggcccgacggcgccaacaucaacuucaugcccaucuga

SEQ ID NO: 183259 - RNA, 1410 nt, Artificial Sequence
  derived and/or modified CDS sequence (opt4) from neuraminidase__InfluenzaA__AFV53339
augaaccccaaccagaagaucaucaccaucggcagcgccagccugaccaucgccaccgugugcuuccugaugcagaucgccauccuggugaccaccgugacccugcacuucaagcagcacgagugcgacagccccgccagcaaccaggugaugcccugcgagcccaucaucaucgagagaaacaucaccgagaucguguaccugaacaacaccaccaucgagaaggagaucugccccaaggugguggaguacagaaacuggagcaagccccagugcaagaucaccggcuucgcccccuucagcaaggacaacagcaucagacugagcgccggcggcgacaucugggugaccagagagcccuacgugagcugcgaccccggcaagugcuaccaguucgcccugggccagggcaccacccuggacaacaagcacagcaacgacaccauccacgacagaaucccccacagaacccugcugaugaacgagcugggcgugcccuuccaccugggcaccagacaggugugcaucgccuggagcagcagcagcugccacgacggcaaggccuggcugcacgugugcgugaccggcgacgacaagaacgccaccgccagcuucaucuacgacggcagacugguggacagcaucggcagcuggagccagaacauccugagaacccaggagagcgagugcgugugcaucaacggcaccugcaccguggugaugaccgacggcagcgccagcggcagagccgacaccagaauccuguucaucgaggagggcaagaucgugcacaugagcccccugagcggcagcgcccagcacguggaggagugcagcugcuaccccagauaccccgacgugagaugcaucugcagagacaacuggaagggcagcaacagacccgugguggacaucaacauggaggacuacagcaucgacagcagcuacgugugcagcggccuggugggcgacacccccagaaacgacgacagaagcagcaacagcaacugcagaaaccccaacaacgagaagggcaaccagggcgugaagggcugggccuucgacaacggcgacgacguguggaugggcagaaccaucagcaaggaccugagaagcggcuacgagaccuucaaggugaucggcggcuggagcacccccaacagcaagagccagaucaacagacaggugaucguggacagcgacaacagaagcggcuacagcggcaucuucagcguggagggcaagagcugcaucaacagaugcuucuacguggagcugaucagaggcagaaagcaggagaccagagugugguggaccagcaacagcaucgugguguucugcggcaccagcggcaccuacggcaccggcagcuggcccgacggcgccaacaucaaccugaugcccaucuga

SEQ ID NO: 183260 - RNA, 1410 nt, Artificial Sequence; identical to SEQ ID NO: 176798
  derived and/or modified CDS sequence (opt4) from neuraminidase__InfluenzaA__AFX96367

SEQ ID NO: 183261 - RNA, 1410 nt, Artificial Sequence; identical to SEQ ID NO: 176798
  derived and/or modified CDS sequence (opt4) from neuraminidase__InfluenzaA__AFX96386

SEQ ID NO: 183262 - RNA, 1410 nt, Artificial Sequence; identical to SEQ ID NO: 177152
  derived and/or modified CDS sequence (opt4) from neuraminidase__InfluenzaA__AFX96401

SEQ ID NO: 183263 - RNA, 1410 nt, Artificial Sequence; identical to SEQ ID NO: 177152
  derived and/or modified CDS sequence (opt4) from neuraminidase__InfluenzaA__AFX96411

SEQ ID NO: 183264 - RNA, 1410 nt, Artificial Sequence; identical to SEQ ID NO: 177152
  derived and/or modified CDS sequence (opt4) from neuraminidase__InfluenzaA__AFX96421

SEQ ID NO: 183265 - RNA, 1410 nt, Artificial Sequence; identical to SEQ ID NO: 177152
  derived and/or modified CDS sequence (opt4) from neuraminidase__InfluenzaA__AFX96431

SEQ ID NO: 183266 - RNA, 1410 nt, Artificial Sequence; identical to SEQ ID NO: 177152
  derived and/or modified CDS sequence (opt4) from neuraminidase__InfluenzaA__AFX96441

SEQ ID NO: 183267 - RNA, 1410 nt, Artificial Sequence; identical to SEQ ID NO: 177152
  derived and/or modified CDS sequence (opt4) from neuraminidase__InfluenzaA__AFX96451

SEQ ID NO: 183268 - RNA, 1410 nt, Artificial Sequence; identical to SEQ ID NO: 177152
  derived and/or modified CDS sequence (opt4) from neuraminidase__InfluenzaA__AFX96461

SEQ ID NO: 183269 - RNA, 1410 nt, Artificial Sequence; identical to SEQ ID NO: 176798
  derived and/or modified CDS sequence (opt4) from neuraminidase__InfluenzaA__AFX96471

SEQ ID NO: 183270 - RNA, 1410 nt, Artificial Sequence; identical to SEQ ID NO: 176798
  derived and/or modified CDS sequence (opt4) from neuraminidase__InfluenzaA__AFX96481

SEQ ID NO: 183271 - RNA, 1410 nt, Artificial Sequence; identical to SEQ ID NO: 176798
  derived and/or modified CDS sequence (opt4) from neuraminidase__InfluenzaA__AFX96491

SEQ ID NO: 183272 - RNA, 1410 nt, Artificial Sequence; identical to SEQ ID NO: 176798
  derived and/or modified CDS sequence (opt4) from neuraminidase__InfluenzaA__AFX96501

SEQ ID NO: 183273 - RNA, 1410 nt, Artificial Sequence; identical to SEQ ID NO: 176798
  derived and/or modified CDS sequence (opt4) from neuraminidase__InfluenzaA__AFX96511

SEQ ID NO: 183274 - RNA, 1410 nt, Artificial Sequence
  derived and/or modified CDS sequence (opt4) from neuraminidase__InfluenzaA__AFX96521
augaaccccaaccagaagaucaucaccaucggcagcgugugcaugaccaucggcauggccaaccugauccugcagaucggcaacaucaucagcaucuggaucagccacagcauccagcugggcaaccagaaccagaucgagaccugcaaccagagcgugaucaccuacgagaacaacaccugggugaaccagaccuacgugaacaucagcaacaccaacuucgccgccagacagagcguggugagcgugaagcuggccggcaacagcagccugugccccgugagcggcugggccaucuacagcaaggacaacagcaucagaaucggcagcaagggcgacguguucgugaucagagagcccuucaucagcugcagcccccuggagugcagaaccuucuuccugacccagggcgcccugcugaacgacaagcacagcaacggcaccaucaaggacagaagccccuacagaacccugaugagcugccccaucggcgaggugcccagccccuacaacagcagauucgagagcguggccuggagcgccagcgccugccacgacggcaucaacuggcugaccaucggcaucagcggccccgacaacggcgccguggccgugcugaaguacaacggcaucaucaccgacaccaucaagagcuggagaaacaacauccugagaacccaggagagcgagugcgccugcgugaacggcagcugcuucaccgugaugaccgacggccccagcgacggccaggccagcuacaagaucuucagaaucgagaagggcaagaucgugaagagcguggagaugaacgcccccaacuaccacuacgaggagugcagcugcuaccccgacagcagcgagaucaccugcgugugcagagacaacuggcacggcagcaacagacccugggugagcuucaaccagaaccuggaguaccagaucggcuacaucugcagcggcaucuucggcgacaaccccagacccaacgacaagaccggcagcugcggccccgugagcagcaacggcgccaacggcgugaagggcuucagcuucaaguacggcaacggcguguggaucggcagaaccaagagcaucagcagcagaaacggcuucgagaugaucugggaccccaacggcuggaccggcaccgacaacaacuucagcaucaagcaggacaucgugggcaucaacgaguggagcggcuacagcggcagcuucgugcagcaccccgagcugaccggccuggacugcaucagacccugcuucuggguggagcugaucagaggcagacccaaggagaacaccaucuggaccagcggcagcagcaucagcuucugcggcgugaacagcgacaccgugggcuggagcuggcccgacggcgccgagcugcccuucaccaucgacaaguga

SEQ ID NO: 183275 - RNA, 1410 nt, Artificial Sequence; identical to SEQ ID NO: 176798
  derived and/or modified CDS sequence (opt4) from neuraminidase__InfluenzaA__AFX96531

SEQ ID NO: 183276 - RNA, 1410 nt, Artificial Sequence; identical to SEQ ID NO: 176798
  derived and/or modified CDS sequence (opt4) from neuraminidase__InfluenzaA__AFX96541

SEQ ID NO: 183277 - RNA, 1410 nt, Artificial Sequence; identical to SEQ ID NO: 176798
  derived and/or modified CDS sequence (opt4) from neuraminidase__InfluenzaA__AFX96551

SEQ ID NO: 183278 - RNA, 1410 nt, Artificial Sequence; identical to SEQ ID NO: 181322
  derived and/or modified CDS sequence (opt4) from neuraminidase__InfluenzaA__AFX96561

SEQ ID NO: 183279 - RNA, 1410 nt, Artificial Sequence; identical to SEQ ID NO: 176798
  derived and/or modified CDS sequence (opt4) from neuraminidase__InfluenzaA__AFX96571

SEQ ID NO: 183280 - RNA, 1410 nt, Artificial Sequence; identical to SEQ ID NO: 176798
  derived and/or modified CDS sequence (opt4) from neuraminidase__InfluenzaA__AFX96581

SEQ ID NO: 183281 - RNA, 1410 nt, Artificial Sequence; identical to SEQ ID NO: 176798
  derived and/or modified CDS sequence (opt4) from neuraminidase__InfluenzaA__AFX96591

SEQ ID NO: 183282 - RNA, 1410 nt, Artificial Sequence; identical to SEQ ID NO: 176798
  derived and/or modified CDS sequence (opt4) from neuraminidase__InfluenzaA__AFX96601

SEQ ID NO: 183283 - RNA, 1410 nt, Artificial Sequence; identical to SEQ ID NO: 176798
  derived and/or modified CDS sequence (opt4) from neuraminidase__InfluenzaA__AFX96611

SEQ ID NO: 183284 - RNA, 1410 nt, Artificial Sequence; identical to SEQ ID NO: 176798
  derived and/or modified CDS sequence (opt4) from neuraminidase__InfluenzaA__AFX96621

SEQ ID NO: 183285 - RNA, 1410 nt, Artificial Sequence; identical to SEQ ID NO: 176798
  derived and/or modified CDS sequence (opt4) from neuraminidase__InfluenzaA__AFX96631

SEQ ID NO: 183286 - RNA, 1410 nt, Artificial Sequence
  derived and/or modified CDS sequence (opt4) from neuraminidase__InfluenzaA__AFX96641
augaaccccaaccagaagaucaucaccaucggcagcgugugcaugaccaucggcauggccaaccugauccugcagaucggcaacaucaucagcaucuggaucagccacagcauccagcugggcaaccagaaccagaucgagaccugcaaccagagcgugaucaccuacgagaacaacaccugggugaaccagaccuacgugaacaucagcaacaccaacuucgccgccggccagagcguggugagcgugaagcuggccggcaacagcagccugugccccgugagcggcugggccaucuacagcaaggacaacagcaucagaaucggcagcaagggcgacguguucgugaucagagagcccuucaucagcugcagcccccuggagugcagaaccuucuuccugacccagggcgcccugcugaacgacaagcacagcaacggcaccaucaaggacagaagccccuacagaacccugaugagcugccccaucggcgaggugcccagccccuacaacagcaaguucgagagcguggccuggagcgccagcgccugccacgacggcaucaacuggcugaccaucggcaucagcggccccgacaacggcgccguggccgugcugaaguacaacggcaucaucaccgacaccaucaagagcuggagaaacaacauccugagaacccaggagagcgagugcgccugcgugaacggcagcugcuucaccgugaugaccgacggccccagcgacggccaggccagcuacaagaucuucagaaucgagaagggcaagaucgugaagagcguggagaugaacgcccccaacuaccacuacgaggagugcagcugcuaccccgacagcagcgagaucaccugcgugugcagagacaacuggcacggcagcaacagacccugggugagcuucaaccagaaccuggaguaccagaucggcuacaucugcagcggcaucuucggcgacaaccccagacccaacgacaagaccggcagcugcggccccgugagcagcaacggcgccaacggcgugaagggcuucagcuucaaguacggcaacggcguguggaucggcagaaccaagagcaucagcagcagaaacggcuucgagaugaucugggaccccaacggcuggaccggcaccgacaacaacuucagcaucaagcaggacaucgugggcaucaacgaguggagcggcuacagcggcagcuucgugcagcaccccgagcugaccggccuggacugcaucagacccugcuucuggguggagcugaucagaggcagacccaaggagaacaccaucuggaccagcggcagcagcaucagcuucugcggcgugaacagcgacaccgugggcuggagcuggcccgacggcgccgagcugcccuucaccaucgacaaguga

SEQ ID NO: 183287 - RNA, 1410 nt, Artificial Sequence; identical to SEQ ID NO: 176798
  derived and/or modified CDS sequence (opt4) from neuraminidase__InfluenzaA__AFX96651

SEQ ID NO: 183288 - RNA, 1410 nt, Artificial Sequence; identical to SEQ ID NO: 176798
  derived and/or modified CDS sequence (opt4) from neuraminidase__InfluenzaA__AFX96661

SEQ ID NO: 183289 - RNA, 1410 nt, Artificial Sequence; identical to SEQ ID NO: 176798
  derived and/or modified CDS sequence (opt4) from neuraminidase__InfluenzaA__AFX96671

SEQ ID NO: 183290 - RNA, 1410 nt, Artificial Sequence; identical to SEQ ID NO: 176798
  derived and/or modified CDS sequence (opt4) from neuraminidase__InfluenzaA__AFX96681

SEQ ID NO: 183291 - RNA, 1410 nt, Artificial Sequence; identical to SEQ ID NO: 176798
  derived and/or modified CDS sequence (opt4) from neuraminidase__InfluenzaA__AFX96691

SEQ ID NO: 183292 - RNA, 1410 nt, Artificial Sequence
  derived and/or modified CDS sequence (opt4) from neuraminidase__InfluenzaA__AFX96701
augaaccccaaccagaagaucaucaccaucggcagcgugugcaugaccaucggcauggccaaccugauccugcagaucggcaacaucaucagcaucuggaucagccacagcauccagcugggcaaccagaaccagaucgagaccugcaaccagagcaucaucaccuacgagaacaacaccugggugaaccagaccuacgugaacaucagcaacaccaacuucgccgccggccagagcguggugagcgugaagcuggccggcaacagcagccugugccccgugagcggcugggccaucuacagcaaggacaacagcaucagaaucggcagcaagggcgacguguucgugaucagagagcccuucaucagcugcagcccccuggagugcagaaccuucuuccugacccagggcgcccugcugaacgacaagcacagcaacggcaccaucaaggacagaagccccuacagaacccugaugagcugccccaucggcgaggugcccagccccuacaacagcagauucgagagcguggccuggagcgccagcgccugccacgacggcaucaacuggcugaccaucggcaucagcggccccgacaacggcgccguggccgugcugaaguacaacggcaucaucaccgacaccaucaagagcuggagaaacaacauccugagaacccaggagagcgagugcgccugcgugaacggcagcugcuucaccgugaugaccgacggccccagcgacggccaggccagcuacaagaucuucagaaucgagaagggcaagaucgugaagagcguggagaugaacgcccccaacuaccacuacgaggagugcagcugcuaccccgacagcagcgagaucaccugcgugugcagagacaacuggcacggcagcaacagacccugggugagcuucaaccagaaccuggaguaccagaucggcuacaucugcagcggcaucuucggcgacaaccccagacccaacgacaagaccggcagcugcggccccgugagcuucaacggcgccaacggcgugaagggcuucagcuucaaguacggcaacggcguguggaucggcagaaccaagagcaucagcagcagaaacggcuucgagaugaucugggaccccaacggcuggaccggcaccgacaacaacuucagcaucaagcaggacaucgugggcaucaacgaguggagcggcuacagcggcagcuucgugcagcaccccgagcugaccggccuggacugcaucagacccugcuucuggguggagcugaucagaggcagacccaaggagaacaccaucuggaccagcggcagcaucaucagcuucugcggcgugaacagcgacaccgugggcuggagcuggcccgacggcgccgagcugcccuucaccaucgacaaguga

SEQ ID NO: 183293 - RNA, 1410 nt, Artificial Sequence; identical to SEQ ID NO: 176798
  derived and/or modified CDS sequence (opt4) from neuraminidase__InfluenzaA__AFX96711

SEQ ID NO: 183294 - RNA, 1410 nt, Artificial Sequence
  derived and/or modified CDS sequence (opt4) from neuraminidase__InfluenzaA__AFX96721
augaaccccaaccagaagaucaucaccaucggcagcgugugcaugaccaucggcauggccaaccugauccugcagaucggcaacaucaucagcaucuggaucagccacagcauccagcugggcaaccagaaccagaucgagaccugcaaccagagcgugaucaccuacgagaacaacaccugggugaaccagaccuacgugaacaucagcaacaccaacuucgccgccggccagagcguggugagcgugaagcuggccggcaacagcagccugugccccgugagcggcugggccaucuacagcaaggacaacagcaucagaaucggcagcaagggcgacguguucgugaucagagagcccuucaucagcugcagcccccuggagugcagaaccuucuuccugacccagggcgcccugcugaacgacaagcacagcaacggcaccaucaaggacagaagccccuacagaacccugaugagcugccccaucggcgaggugcccagccccuacaacagcagauucgagagcguggccuggagcgccagcgccugccacgacggcaucaacuggcugaccaucggcaucagcggccccgacaacggcgccguggccgugcugaaguacaacggcaucaucaccgacaccaucaagagcuggagaaacaacauccugagaacccaggagagcgagugcgccugcgugaacggcagcugcuucaccgugaugaccgacggccccagcgacggccaggccagcuacaagaucuucagaaucgagaagggcaagaucgugaagagcguggagaugaacgcccccaacuaccacuacgaggagugcagcugcuaccccgacagcagcgagaucaccugcgugugcagagacaacuggcacggcagcaacagacccugggugagcuucaaccagaaccuggaguaccagaucggcuacaucugcagcggcaucuucggcgacaaccccagacccaacgacaagaccggcagcugcggccccgugagcagcaacggcgccaacggcgugaagggcuucagcuucaaguacggcaacggcguguggaucggcagaaccaagagcaucagcagcagaaacggcuucgagaugaucugggaccccaacggcuggaccggcaccgacaacaacuucagcaucaagcaggacaucgugggcaucaacgaguggagcggcuacagcggcagcuucgugcagcaccccgagcugaccggccuggacugcaucagacccugcuucuggguggagcugaucagaggcagacccaaggagaacaccguguggaccagcggcagcagcaucagcuucugcggcgugaacagcgacaccgugggcuggagcuggcccgacggcgccgagcugcccuucaccaucgacaaguga

SEQ ID NO: 183295 - RNA, 1410 nt, Artificial Sequence; identical to SEQ ID NO: 183294
  derived and/or modified CDS sequence (opt4) from neuraminidase__InfluenzaA__AFX96731

SEQ ID NO: 183296 - RNA, 1410 nt, Artificial Sequence; identical to SEQ ID NO: 176798
  derived and/or modified CDS sequence (opt4) from neuraminidase__InfluenzaA__AFX96741

SEQ ID NO: 183297 - RNA, 1410 nt, Artificial Sequence; identical to SEQ ID NO: 176798
  derived and/or modified CDS sequence (opt4) from neuraminidase__InfluenzaA__AFX96751

SEQ ID NO: 183298 - RNA, 1410 nt, Artificial Sequence; identical to SEQ ID NO: 177816
  derived and/or modified CDS sequence (opt4) from neuraminidase__InfluenzaA__AFX96761

SEQ ID NO: 183299 - RNA, 1410 nt, Artificial Sequence; identical to SEQ ID NO: 176798
  derived and/or modified CDS sequence (opt4) from neuraminidase__InfluenzaA__AFX96771

SEQ ID NO: 183300 - RNA, 1410 nt, Artificial Sequence
  derived and/or modified CDS sequence (opt4) from neuraminidase__InfluenzaA__AFX96791
augaaccccaaccagaagaucaucaccaucggcagcgugugcaugaccaucggcauggccaaccugauccugcaggugggcaacaucaucagcaucuggaucagccacagcauccagcugggcaaccagaaccagaucgagaccugcaaccagagcgugaucaccuacgagaacaacaccugggugaaccagaccuacgugaacaucagcaacaccaacuucgccgccggccagagcguggugagcgugaagcuggccggcaacagcagccugugccccgugagcggcugggccaucuacagcaaggacaacagcaucagaaucggcagcaagggcgacguguucgugaucagagagcccuucaucagcugcagcccccuggagugcagaaccuucuuccugacccagggcgcccugcugaacgacaagcacagcaacggcaccaucaaggacagaagccccuacagaacccugaugagcugccccaucggcgaggugcccagccccuacaacagcagauucgagagcguggccuggagcgccagcgccugccacgacggcaucaacuggcugaccaucggcaucagcggccccgacaacggcgccguggccgugcugaaguacaacggcaucaucaccgacaccaucaagagcuggagaaacaacauccugagaacccaggagagcgagugcgccugcaucaacggcagcugcuucaccgugaugaccgacggccccagcgacggccaggccagcuacaagaucuucagaaucgagaagggcaagaucgugaagagcguggagaugaacgcccccaacuaccacuacgaggagugcagcugcuaccccgacagcagcgagaucaccugcgugugcagagacaacuggcacggcagcaacagacccugggugagcuucaaccagaaccuggaguaccagaucggcuacaucugcagcggcaucuucggcgacaaccccagacccaacgacaagaccggcagcugcggccccgugagcagcaacggcgccaacggcgugaagggcuucagcuucaaguacggcaacggcguguggaucggcagaaccaagagcaucagcagcagaaacggcuucgagaugaucugggaccccaacggcuggaccggcaccgacaacaacuucagcaucaagcaggacaucgugggcaucaacgaguggagcggcuacagcggcagcuucgugcagcaccccgagcugaccggccuggacugcaucagacccugcuucuggguggagcugaucagaggcagacccaaggagaacaccaucuggaccagcggcagcagcaucagcuucugcggcgugaacagcgacaccgugggcuggagcuggcccgacggcgccgagcugcccuucaccaucgacaaguga

SEQ ID NO: 183301 - RNA, 1410 nt, Artificial Sequence; identical to SEQ ID NO: 183300
  derived and/or modified CDS sequence (opt4) from neuraminidase__InfluenzaA__AFX96801

SEQ ID NO: 183302 - RNA, 1410 nt, Artificial Sequence
  derived and/or modified CDS sequence (opt4) from neuraminidase__InfluenzaA__AFX96811
augaaccccaaccagaagaucaucaccaucggcagcgugugcaugaccaucggcauggccaaccugauccugcagaucggcaacaucaucagcaucuggaucagccacagcauccagcugggcaaccagaaccagaucgagaccugcaaccagagcgugaucaccuacgagaacaacaccugggugaaccagaccuacgugaacaucagcaacaccaacuucgccgccggccagagcguggugagcgugagacuggccggcaacagcagccugugccccgugagcggcugggccaucuacagcaaggacaacagcaucagaaucggcagcaagggcgacguguucgugaucagagagcccuucaucagcugcagcccccuggagugcagaaccuucuuccugacccagggcgcccugcugaacgacaagcacagcaacggcaccaucaaggacagaagccccuacagaacccugaugagcugccccaucggcgaggugcccagccccuacaacagcagauucgagagcguggccuggagcgccagcgccugccacgacggcaucaacuggcugaccaucggcaucagcggccccgacaacggcgccguggccgugcugaaguacaacggcaucaucaccgacaccaucaagagcuggagaaacaacauccugagaacccaggagagcgagugcgccugcgugaacggcagcugcuucaccgugaugaccgacggccccagcgacggccaggccagcuacaagaucuucagaaucgagaagggcaagaucgugaagagcguggagaugaacgcccccaacuaccacuacgaggagugcagcugcuaccccgacagcagcgagaucaccugcgugugcagagacaacuggcacggcagcaacagacccugggugagcuucaaccagaaccuggaguaccagaucggcuacaucugcagcggcaucuucggcgacaaccccagacccaacgacaagaccggcagcugcggccccgugagcagcaacggcgccaacggcgugaagggcuucagcuucaaguacggcaacggcguguggaucggcagaaccaagagcaucagcagcagaaacggcuucgagaugaucugggaccccaacggcuggaccggcaccgacaacaacuucagcaucaagcaggacaucgugggcaucaacgaguggagcggcuacagcggcagcuucgugcagcaccccgagcugaccggccuggacugcaucagacccugcuucuggguggagcugaucagaggcagacccaaggagaacaccaucuggaccagcggcagcagcaucagcuucugcggcgugaacagcgacaccgugggcuggagcuggcccgacggcgccgagcugcccuucaccaucgacaaguga

SEQ ID NO: 183303 - RNA, 1410 nt, Artificial Sequence; identical to SEQ ID NO: 176798
  derived and/or modified CDS sequence (opt4) from neuraminidase__InfluenzaA__AFX96821

SEQ ID NO: 183304 - RNA, 1410 nt, Artificial Sequence; identical to SEQ ID NO: 183300
  derived and/or modified CDS sequence (opt4) from neuraminidase__InfluenzaA__AFX96831

SEQ ID NO: 183305 - RNA, 1410 nt, Artificial Sequence
  derived and/or modified CDS sequence (opt4) from neuraminidase__InfluenzaA__AFX96841
augaaccccaaccagaagaucaucaccaucggcagcgugugcaugaccaucggcauggccaaccugauccugcagaucggcaacaucaucagcaucuggaucagccacagcauccagcugggcaaccagaaccagaucgagaccugcaaccagagcgugaucaccuacgagaacaacaccugggugaaccagaccuacgugaacaucagcaacaccaacuucgccgccggccagagcguggugagcgugagacuggccggcaacagcagccugugccccgugagcggcugggccaucuacagcaaggacaacagcaucagaaucggcagcaagggcgacguguucgugaucagagagcccuucaucagcugcagcccccuggagugcagaaccuucuuccugacccagggcgcccugcugaacgacaagcacagcaacggcaccaucaaggacagaagccccuacagaacccugaugagcugccccaucggcgaggugcccagccccuacaacagcagauucgagagcguggccuggagcgccagcgccugccacgacggcaucaacuggcugaccaucggcaucagcggccccgacaacggcgccguggccgugcugaaguacaacggcaucaucaccgacaccaucaagagcuggagaaacaacauccugagaacccaggagagcgagugcgccugcgugaacggcagcugcuucaccgugaugaccgacggccccagcgacggccaggccagcuacaagaucuucagaaucgagaagggcaagaucgugaagagcguggagaugaacgcccccaacuacuacuacgaggagugcagcugcuaccccgacagcagcgagaucaccugcgugugcagagacaacuggcacggcagcaacagacccugggugagcuucaaccagaaccuggaguaccagaucggcuacaucugcagcggcaucuucggcgacaaccccagacccaacgacaagaccggcagcugcggccccgugagcagcaacggcgccaacggcgugaagggcuucagcuucaaguacggcaacggcguguggaucggcagaaccaagagcaucagcagcagaaacggcuucgagaugaucugggaccccaacggcuggaccggcaccgacaacaacuucagcaucaagcaggacaucgugggcaucaacgaguggagcggcuacagcggcagcuucgugcagcaccccgagcugaccggccuggacugcaucagacccugcuucuggguggagcugaucagaggcagacccaaggagaacaccaucuggaccagcggcagcagcaucagcuucugcggcgugaacagcgacaccgugggcuggagcuggcccgacggcgccgagcugcccuucaccaucgacaaguga

SEQ ID NO: 183306 - RNA, 1410 nt, Artificial Sequence; identical to SEQ ID NO: 176798
  derived and/or modified CDS sequence (opt4) from neuraminidase__InfluenzaA__AFX96859

SEQ ID NO: 183307 - RNA, 1410 nt, Artificial Sequence; identical to SEQ ID NO: 176798
  derived and/or modified CDS sequence (opt4) from neuraminidase__InfluenzaA__AFX96907

SEQ ID NO: 183308 - RNA, 1410 nt, Artificial Sequence; identical to SEQ ID NO: 176798
  derived and/or modified CDS sequence (opt4) from neuraminidase__InfluenzaA__AFX96917

SEQ ID NO: 183309 - RNA, 1410 nt, Artificial Sequence; identical to SEQ ID NO: 176798
  derived and/or modified CDS sequence (opt4) from neuraminidase__InfluenzaA__AFX96927

SEQ ID NO: 183310 - RNA, 1410 nt, Artificial Sequence
  derived and/or modified CDS sequence (opt4) from neuraminidase__InfluenzaA__AFX96937
augaaccccaaccagaagaucaucaccaucggcagcgugugcaugaccaucggcauggccaaccugauccugcagaucggcaacaucaucagcaucuggaucagccacagcauccagcugggcaaccagaaccagaucgagaccugcaaccagagcgugaucaccuacgagaacaacaccugggugaaccagaccuacgugaacaucagcagcaccaacuucgccgccggccagagcguggugagcgugaagcuggccggcaacagcagccugugccccgugagcggcugggccaucuacagcaaggacaacagcaucagaaucggcagcaagggcgacguguucgugaucagagagcccuucaucagcugcagcccccuggagugcagaaccuucuuccugacccagggcgcccugcugaacgacaagcacagcaacggcaccaucaaggacagaagccccuacagaacccugaugagcugccccaucggcgaggugcccagccccuacaacagcagauucgagagcguggccuggagcgccagcgccugccacgacggcaucaacuggcugaccaucggcaucagcggccccgacaacggcgccguggccgugcugaaguacaacggcaucaucaccgacaccaucaagagcuggagaaacaacauccugagaacccaggagagcgagugcgccugcgugaacggcagcugcuucaccgugaugaccgacggccccagcgacggccaggccagcuacaagaucuucagaaucgagaagggcaagaucgugaagagcguggagaugaacgcccccaacuaccacuacgaggagugcagcugcuaccccgacagcagcgagaucaccugcgugugcagagacaacuggcacggcagcaacagacccugggugagcuucaaccagaaccuggaguaccagaucggcuacaucugcagcggcaucuucggcgacaaccccagacccaacgacaagaccggcagcugcggccccgugagcagcaacggcgccaacggcgugaagggcuucagcuucaaguacggcaacggcguguggaucggcagaaccaagagcaucagcagcagaaacggcuucgagaugaucugggaccccaacggcuggaccggcaccgacaacaacuucagcaucaagcaggacaucgugggcaucaacgaguggagcggcuacagcggcagcuucgugcagcaccccgagcugaccggccuggacugcaucagacccugcuucuggguggagcugaucagaggcagacccaaggagaacaccaucuggaccagcggcagcagcaucagcuucugcggcgugaacagcgacaccgugggcuggagcuggcccgacggcgccgagcugcccuucaccaucgacaaguga

SEQ ID NO: 183311 - RNA, 1410 nt, Artificial Sequence; identical to SEQ ID NO: 176788
  derived and/or modified CDS sequence (opt4) from neuraminidase__InfluenzaA__AFY23991

SEQ ID NO: 183312 - RNA, 1410 nt, Artificial Sequence; identical to SEQ ID NO: 176798
  derived and/or modified CDS sequence (opt4) from neuraminidase__InfluenzaA__AFY24001

SEQ ID NO: 183313 - RNA, 1410 nt, Artificial Sequence; identical to SEQ ID NO: 176798
  derived and/or modified CDS sequence (opt4) from neuraminidase__InfluenzaA__AFY24022

SEQ ID NO: 183314 - RNA, 1410 nt, Artificial Sequence; identical to SEQ ID NO: 176798
  derived and/or modified CDS sequence (opt4) from neuraminidase__InfluenzaA__AFY24043

SEQ ID NO: 183315 - RNA, 1410 nt, Artificial Sequence
  derived and/or modified CDS sequence (opt4) from neuraminidase__InfluenzaA__AFY24153
augaaccccaaccagaagaucaucaccaucggcagcgugagccugaccaucagcaccaucugcuucuucaugcagaucgccauccugaucaccaccgugacccugcacuucaagcaguacgaguucaacagcccccccaacaaccaggugaugcugugcgagcccaccaucaucgagagaaacaucaccgagaucguguaccugaccaacaccaccaucgagaaggagaucugccccaagcuggccgaguacagaaacuggagcaagccccagugcaacaucaccggcuucgcccccuucagcaaggacaacagcaucagacugagcgccggcggcgacaucugggugaccagagagcccuacgugagcugcgaccccgacaagugcuaccaguucgcccugggccagggcaccacccugaacaacgugcacagcaacgacaccgugcacgacagaacccccuacagaacccugcugaugaacgagcugggcgugcccuuccaccugggcaccaagcaggugugcaucgccuggagcagcagcagcugccacgacggcaaggccuggcugcacgugugcgugaccggcgacgacaagaacgccaccgccagcuucaucuacaacggcagacugguggacagcaucgugagcuggagcaaggagauccugagaacccaggagagcgagugcgugugcaucaacggcaccugcaccguggugaugaccgacggcagcgccagcggcaaggccgacaccaagauccuguucaucgaggagggcaagaucgugcacaccagcacccugagcggcagcgcccagcacguggaggagugcagcugcuaccccagauaccccggcgugagaugcgugugcagagacaacuggaagggcagcaacagacccaucguggacaucaacaucaccgacuacagcaucgugagcagcuacgugugcagcggccuggugggcgacacccccagaaagaacgacagcagcagcagcagccacugccuggaccccaacaacgaggagggcggccacggcgugaagggcugggccuucgacgacggcaacgacguguggaugggcagaaccaucagcgagaagcugagaagcggcuacgagaccuucaaggugaucgagggcuggagcaaccccaacagcaagcugcagaucaacagacaggugaucguggacagaggcaacagaagcggcuacagcggcaucuucagcguggagggcaagagcugcaucaacagaugcuucuacguggagcugaucagaggcagaaaggaggagaccgaggugcuguggaccagcaacagcaucgugguguucugcggcaccagcggcaccuacggcaccggcagcuggcccgacggcgccgacaucaaccugaugcccaucuga

SEQ ID NO: 183316 - RNA, 1410 nt, Artificial Sequence
  derived and/or modified CDS sequence (opt4) from neuraminidase__InfluenzaA__AFY24208
augaaccccaaccagaagaucaucaccaucggcagcgugagccugaccaucagcaccaucugcuucuucaugcagaucgccauccugaucaccaccgugacccugcacuucaagcaguacgaguucaacagcccccccaacaaccaggugaugcugugcgagcccaccaucaucgagagaaacaucaccgagaucguguaccugaccaacaccaccaucgagaaggagaucugccccaagcuggccgaguacagaaacuggagcaagccccagugcaacaucaccggcuucgcccccuucagcaaggacaacagcaucagacugagcgccggcggcgacaucugggugaccagagagcccuacgugagcugcgaccccgacaagugcuaccaguucgcccugggccagggcaccacccugaacaacgugcacagcaacgacaccgugcacaacagaacccccuacagaacccugcugaugaacgagcugggcgugcccuuccaccugggcaccaagcaggugugcaucgccuggagcagcagcagcugccacgacggcaaggccuggcugcacgugugcgugaccggcgacgacgagaacgccaccgccagcuucaucuacaacggcagacugguggacagcaucgugagcuggagcaagaagauccugagaacccaggagagcgagugcgugugcaucaacggcaccugcaccguggugaugaccgacggcagcgccagcggcaaggccgacaccaagauccuguucaucgaggagggcaagaucgugcacaccagcacccugagcggcagcgcccagcacguggaggagugcagcugcuaccccagauaccccggcgugagaugcgugugcagagacaacuggaagggcagcaacagacccaucguggacaucaacaucaaggacuacagcaucgugagcagcuacgugugcagcggccuggugggcgacacccccagaaagaacgacagcagcagcagcagccacugccuggaccccaacaacgaggagggcggccacggcgugaagggcugggccuucgacgacggcaacgacguguggaugggcagaaccaucagcgagagacugagaagcggcuacgagaccuucaaggugaucgagggcuggagcaaccccaacagcaagcugcagaucaacagacaggugaucguggacagaggcaacagaagcggcuacagcggcaucuucagcguggagggcaagagcugcaucaacagaugcuucuacguggagcugaucagaggcagaaagcaggagaccgaggugcuguggaccagcaacagcaucgugguguucugcggcaccagcggcaccuacggcaccggcagcuggcccgacggcgccgacaucaaccugaugcccaucuga

SEQ ID NO: 183317 - RNA, 1410 nt, Artificial Sequence; identical to SEQ ID NO: 175989
  derived and/or modified CDS sequence (opt4) from neuraminidase__InfluenzaA__AFY24219

SEQ ID NO: 183318 - RNA, 1410 nt, Artificial Sequence
  derived and/or modified CDS sequence (opt4) from neuraminidase__InfluenzaA__AGB12978
augaaccccaaccagagaaucaucaccaucggcagcgugugcaugaccaucggcauggccaaccugauccugcagaucggcaacaucaucagcaucuggaucagccacagcauccagcugggcaaccagaaccagaucgagaccugcaaccagagcgugaucaccuacgagaacaacaccugggugaaccagaccuacgugaacaucagcaacaccaacuucgccgccagacagagcguggugagcgugaagcuggccggcaacagcagccugugccccgugagcggcugggccaucuacagcaaggacaacagcaucagaaucggcagcaagggcgacguguucgugaucagagagcccuucaucagcugcagcccccuggagugcagaaccuucuuccugacccagggcgcccugcugaacgacaagcacagcaacggcaccaucaaggacagaagccccuacagaacccugaugagcugccccaucggcgaggugcccagccccuacaacagcagauucgagagcguggccuggagcgccagcgccugccacgacggcaucaacuggcugaccaucggcaucagcggccccgacaacggcgccguggccgugcugaaguacaacggcaucaucaccgacaccaucaagagcuggagaaacaacauccugagaacccaggagagcgagugcgccugcgugaacggcagcugcuucaccaucaugaccgacggccccagcgacggccaggccagcuacaagaucuucagaaucgagaagggcaagaucgugaagagcguggagaugaacgcccccaacuaccacuacgaggagugcagcugcuaccccgacagcagcgagaucaccugcgugugcagagacaacuggcacggcagcaacagacccugggugagcuucaaccagaaccuggaguaccagaucggcuacaucugcagcggcaucuucggcgacaaccccagacccaacgacaagaccggcagcugcggccccgugagcagcaacggcgccaacggcgugaagggcuucagcuucaaguacggcaacggcguguggaucggcagaaccaagagcaucagcagcagaaagggcuucgagaugaucugggaccccaacggcuggaccggcaccgacaacaacuucagcaucaagcaggacaucgugggcaucaacgaguggagcggcuacagcggcagcuucgugcagcaccccgagcugaccggccuggacugcaucagacccugcuucuggguggagcugaucagaggcagacccaaggagaacaccaucuggaccagcggcagcagcaucagcuucugcggcgugaacagcgacaccgugggcuggagcuggcccgacggcgccgagcugcccuucaccaucgacaaguga

SEQ ID NO: 183319 - RNA, 1410 nt, Artificial Sequence; identical to SEQ ID NO: 180317
  derived and/or modified CDS sequence (opt4) from neuraminidase__InfluenzaA__AGB12989

SEQ ID NO: 183320 - RNA, 1410 nt, Artificial Sequence; identical to SEQ ID NO: 180769
  derived and/or modified CDS sequence (opt4) from neuraminidase__InfluenzaA__AGB13009

SEQ ID NO: 183321 - RNA, 1410 nt, Artificial Sequence; identical to SEQ ID NO: 180769
  derived and/or modified CDS sequence (opt4) from neuraminidase__InfluenzaA__AGB13019

SEQ ID NO: 183322 - RNA, 1410 nt, Artificial Sequence; identical to SEQ ID NO: 180769
  derived and/or modified CDS sequence (opt4) from neuraminidase__InfluenzaA__AGB13029

SEQ ID NO: 183323 - RNA, 1410 nt, Artificial Sequence; identical to SEQ ID NO: 181018
  derived and/or modified CDS sequence (opt4) from neuraminidase__InfluenzaA__AGB13039

SEQ ID NO: 183324 - RNA, 1410 nt, Artificial Sequence; identical to SEQ ID NO: 180769
  derived and/or modified CDS sequence (opt4) from neuraminidase__InfluenzaA__AGB13051

SEQ ID NO: 183325 - RNA, 1410 nt, Artificial Sequence
  derived and/or modified CDS sequence (opt4) from neuraminidase__InfluenzaA__AGB13069
augaaccccaaccagaagaucaucaccaucggcagcaucugcaugaccaucggcauggccaaccugauccugcagaucggcaacaucaucagcaucuggaucagccacagcauccagcugggcaaccagaaccagaucgagaccugcaaccagagcgugaucaccuacgagaacaacaccugggugaaccagaccuacgugaacaucagcaacaccaacuucgccgccggccagagcguggugagcgugaagcuggccggcaacagcagccugugccccgugagcggcugggccaucuacagcaaggacaacagcaucagaaucggcagcaagggcgacguguucgugaucagagagcccuucaucagcugcagcccccuggagugcagaaccuucuuccugacccagggcgcccugcugaacgacaagcacagcaacggcaccaucaaggacagaagccccuacagaacccugaugagcugccccaucggcgaggugcccagccccuacaacagcagauucgagagcguggccuggagcgccagcgccugccacgacggcaucaacuggcugaccaucggcaucagcggccccgacaacggcgccguggccgugcugaaguacaacggcaucaucaccgacaccaucaagagcuggagaaacaacauccugagaacccaggagagcgagugcgccugcgugaacggcagcugcuucaccgugaugaccgacggccccagcgacggccaggccagcuacaagaucuucagaaucgagaagggcaagaucgugaagagcguggagaugaacgcccccaacuaccacuacgaggagugcagcugcuaccccgacagcagcgagaucaccugcgugugcagagacaacuggcacggcagcaacagacccuggaucagcuucaaccagaaccuggaguaccagaucggcuacaucugcagcggcaucuucggcgacaaccccagacccaacgacaagaccggcagcugcggccccgugagcagcaacggcgccaacggcgugaagggcuucagcuucaaguacggcaacggcguguggaucggcagaaccaagagcaucagcagcagaaacggcuucgagaugaucugggaccccaacggcuggaccggcaccgacaacaacuucagcaucaagcaggacaucgugggcaucaacgaguggagcggcuacagcggcagcuucgugcagcaccccgagcugaccggccuggacugcaucagacccugcuucuggguggagcugaucagaggcagacccaaggagaacaccaucuggaccagcggcagcagcaucagcuucugcggcgugaacagcgacaccgugggcuggagcuggcccgacggcgccgagcugcccuucaccaucgacaaguga

SEQ ID NO: 183326 - RNA, 1410 nt, Artificial Sequence
  derived and/or modified CDS sequence (opt4) from neuraminidase__InfluenzaA__AGB13074
augaaccccaaccagaagaucaucaccaucggcagcgugugcaugaccaucggcauggccaaccugauccugcagaucggcaacaucaucagcaucuggaucagccacagcauccagcugggcaaccagaaccagaucgagaccugcaaccagagcgugaucaccuacgagaacaacaccugggugaaccagaccuacgugaacaucagcaacaccaacuucgccgccggccagagcguggccagcgugaagcuggccggcaacagcagccugugccccgugagcggcugggccaucuacagcaaggacaacagcgugagaaucggcagcaagggcgacguguucgugaucagagagcccuucaucagcugcagcccccuggagugcagaaccuucuuccugacccagggcgcccugcugaacgacaagcacagcaacggcaccaucaaggacagaagccccuacagaacccugaugagcugccccaucggcgaggugcccagccccuacaacagcagauucgagagcguggccuggagcgccagcgccugccacgacggcaucaacuggcugaccaucggcaucagcggccccgacaacggcgccguggccgugcugaaguacaacggcaucaucaccgacaccaucaagagcuggagaaacaacauccugagaacccaggagagcgagugcgccugcgugaacggcagcugcuucaccgugaugaccgacggccccagcgacggccaggccagcuacaagaucuucagaaucgagaagggcaagaucgugaagagcguggagaugaacgcccccaacuaccacuacgaggagugcagcugcuaccccgacagcagcgagaucaccugcgugugcagagacaacuggcacggcagcaacagacccugggugagcuucaaccagaaccuggaguaccagaucggcuacaucugcagcggcaucuucggcgacaaccccagacccaacgacaagaccggcagcugcggccccgugagcagcaacggcgccaacggcgugaagggcuucagcuucaaguacggcaacggcguguggaucggcagaaccaagagcaucagcagcagaaacggcuucgagaugaucugggaccccaacggcuggaccggcaccgacaacaacuucagcaucaagcaggacaucgugggcaucaacgaguggagcggcuacagcggcagcuucgugcagcaccccgagcugaccggccuggacugcaucagacccugcuucuggguggagcugaucagaggcagacccaaggagaacaccaucuggaccagcggcagcagcaucagcuucugcggcgugaacagcgacaccgugggcuggagcuggcccgacggcgccgagcugcccuucaccaucgacaaguga

SEQ ID NO: 183327 - RNA, 1410 nt, Artificial Sequence
  derived and/or modified CDS sequence (opt4) from neuraminidase__InfluenzaA__AGB13115
augaaccccaaccagaagaucaucaccaucggcagcgugugcaugaccaucggcauggccaaccugauccugcagaucggcaacaucaucagcaucuggaucagccacagcauccagcugggcaaccagaaccagaucgagaccugcaaccagagcgugaucaccuacgagaacaacaccugggugaaccagaccuacgugaacaucagcaacaccaacuucgccgccggccagagcguggugagcgugaagcuggccggcaacagcagccugugccccgugagcggcugggccaucuacagcaaggacaacagcaucagaaucggcagcaagggcgacguguucgugcugagagagcccuucaucagcugcagcccccuggagugcagaaccuucuuccugacccagggcgcccugcugaacgacaagcacagcaacggcaccaucaaggacagaagccccuacagaacccugaugagcugccccaucggcgaggugcccagccccuacaacagcagauucgagagcguggccuggagcgccagcgccugccacgacggcaucaacuggcugaccaucggcaucagcggccccgacaacggcgccguggccgugcugaaguacaacggcaucaucaccgacaccaucaagagcuggagaaacaacauccugagaacccaggagagcgagugcgccugcgugaacggcagcugcuucaccaucaugaccgacggccccagcgacggccaggccagcuacaagaucuucagaaucgagaagggcaagaucgugaagagcguggagaugaacgcccccaacuaccacuacgaggagugcagcugcuaccccgacagcagcgagaucaccugcgugugcagagacaacuggagaggcagcaacagacccugggugagcuucaaccagaaccuggaguaccagaucggcuacaucugcagcggcaucuucggcgacaaccccagacccaacgacaagaccggcagcugcggccccgugagcagcaacggcgccaacggcgugaagggcuucagcuucaaguacggcaacggcguguggaucggcagaaccaagagcaucagcagcagaaagggcuucgagaugaucugggaccccaacggcuggaccggcaccgacaacaacuucagcaucaagcaggacaucgugggcaucaacgaguggagcggcuacagcggcagcuucgugcagcaccccgagcugaccggccuggacugcaucagacccugcuucuggguggagcugaucagaggcagacccaaggagaacaccaucuggaccagcggcagcagcaucagcuucugcggcgugaacagcgacaccgugggcuggagcuggcccgacggcgccgagcugcccuucaccaucgacaaguga

SEQ ID NO: 183328 - RNA, 1410 nt, Artificial Sequence; identical to SEQ ID NO: 180769
  derived and/or modified CDS sequence (opt4) from neuraminidase__InfluenzaA__AGB13133

SEQ ID NO: 183329 - RNA, 1410 nt, Artificial Sequence; identical to SEQ ID NO: 180317
  derived and/or modified CDS sequence (opt4) from neuraminidase__InfluenzaA__AGB13152

SEQ ID NO: 183330 - RNA, 1410 nt, Artificial Sequence; identical to SEQ ID NO: 180317
  derived and/or modified CDS sequence (opt4) from neuraminidase__InfluenzaA__AGB13162

SEQ ID NO: 183331 - RNA, 1410 nt, Artificial Sequence; identical to SEQ ID NO: 181140
  derived and/or modified CDS sequence (opt4) from neuraminidase__InfluenzaA__AGB13173

SEQ ID NO: 183332 - RNA, 1410 nt, Artificial Sequence
  derived and/or modified CDS sequence (opt4) from neuraminidase__InfluenzaA__AGB13183
augaaccccaaccagaagaucaucaccaucggcagcgugugcaugaccaucggcauggccaaccugauccugcagaucggcaacaucaucagcaucuggaucagccacagcauccagcugggcaaccagaaccagaucgagaccugcaaccagagcgugaucaccuacgagaacaacaccugggugaaccagaccuacgugaacaucagcaacaccaacuucgccgccggccagagcguggugagcgugaagcuggccggcaacagcagccugugccccgugagcggcugggccaucuacagcaaggacaacagcaucagaaucggcagcaagggcgacguguucgugaucagagagcccuucaucagcugcagcccccuggagugcagaaccuucuuccugacccagggcgcccugcugaacgacaagcacagcaacggcaccaucaaggacagaagccccuacagaacccugaugagcugccccaucggcgaggugcccagccccuacaacagcagauucgagagcguggccuggagcgccagcgccugccacgacggcaucaacuggcugaccaucggcaucagcggccaggacaacggcgccguggccgugcugaaguacaacggcaucaucaccgacaccaucaagagcuggagaaacaacauccugagaacccaggagagcgagugcgccugcgugaacggcagcugcuucaccaucaugaccgacggccccagcgacggccaggccagcuacaagaucuucagaaucgagaagggcaagaucgugaagagcguggagaugaacgcccccaacuaccacuacgaggagugcagcugcuaccccgacagcagcgagaucaccugcgugugcagagacaacuggcacggcagcaacagacccugggugagcuucaaccagaaccuggaguaccagaucggcuacaucugcagcggcaucuucggcgacaaccccagacccaacgacaagaccggcagcugcggccccgugagcagcaacggcgccaacggcgugaagggcuucagcuucaaguacggcaacggcguguggaucggcagaaccaagagcaucagcagcagaaagggcuucgagaugaucugggaccccaacggcuggaccggcaccgacaacaacuucagcaucaagcaggacaucgugggcaucaacgaguggagcggcuacagcggcagcuucgugcagcaccccgagcugaccggccuggacugcaucagacccugcuucuggguggagcugaucagaggcagacccaaggagaacaccaucuggaccagcggcagcagcaucagcuucugcggcgugaacagcgacaccgugggcuggagcuggcccgacggcgccgagcugcccuucaccaucgacaaguga

SEQ ID NO: 183333 - RNA, 1410 nt, Artificial Sequence; identical to SEQ ID NO: 180769
  derived and/or modified CDS sequence (opt4) from neuraminidase__InfluenzaA__AGB13193

SEQ ID NO: 183334 - RNA, 1410 nt, Artificial Sequence; identical to SEQ ID NO: 180836
  derived and/or modified CDS sequence (opt4) from neuraminidase__InfluenzaA__AGB13203

SEQ ID NO: 183335 - RNA, 1410 nt, Artificial Sequence; identical to SEQ ID NO: 180769
  derived and/or modified CDS sequence (opt4) from neuraminidase__InfluenzaA__AGB13213

SEQ ID NO: 183336 - RNA, 1410 nt, Artificial Sequence; identical to SEQ ID NO: 180769
  derived and/or modified CDS sequence (opt4) from neuraminidase__InfluenzaA__AGB13223

SEQ ID NO: 183337 - RNA, 1410 nt, Artificial Sequence; identical to SEQ ID NO: 180769
  derived and/or modified CDS sequence (opt4) from neuraminidase__InfluenzaA__AGB13233

SEQ ID NO: 183338 - RNA, 1410 nt, Artificial Sequence
  derived and/or modified CDS sequence (opt4) from neuraminidase__InfluenzaA__AGB13243
augaaccccaaccagaagaucaucaccaucggcagcgugugcaugaccaucggcauggccaaccugauccugcagaucggcaacaucaucagcaucuggaucagccacagcauccagcugggcaaccagaaccagaucgagaccugcaaccagagcgugaucaccuacgagaacaacaccugggugaaccagaccuacgugaacaucagcaacaccaacuucgccgccggccagagcguggugagcgugaagcuggccggcaacagcagccugugccccgugagcggcugggccaucuacagcaaggacaacagcaucagaaucggcagcaagggcgacguguucgugaucagagagcccuucaucagcugcagcccccuggagugcagaaccuucuuccugacccagggcgcccugcugaacgacaagcacagcaacggcaccaucaaggacagaagccccuacagaacccugaugagcugccccaucggcgaggugcccagccccuacaacagcagauucgagagcguggccuggagcgccagcgccugccacgacggcaucaacuggcugaccaucggcaucagcggccccgacaacggcgccguggccgugcugaaguacaacggcaucaucaccgacaccaucaagagcuggagaaacaacauccugagaacccaggagagcgagugcgccugcgugaacggcagcugcuucaccaucaugaccgacggccccagcgacggccaggccagcuacaagaucuucagaaucgagagaggcaagaucgugaagagcguggagaugaacgcccccaacuacuacuacgaggagugcagcugcuaccccgacagcagcgagaucaccugcgugugcagagacaacuggcacggcagcaacagacccugggugagcuucaaccagaaccuggaguaccagaucggcuacaucugcagcggcguguucggcgacaaccccagacccaacgacaagaccggcagcugcggccccgugagcagcaacggcgccaacggcgugaagggcuucagcuucaaguacggcaacggcguguggaucggcagaaccaagagcaucagcagcagaaagggcuucgagaugaucugggaccccaacggcuggaccggcaccgacaacaacuucagcaucaagcaggacaucgugggcaucaacgaguggagcggcuacagcggcagcuucgugcagcaccccgagcugaccggccuggacugcaucagacccugcuucuggguggagcugaucagaggcagacccaaggagaacaccaucuggaccagcggcagcagcaucagcuucugcggcgugaacagcgacaccgugggcuggagcuggcccgacggcgccgagcugcccuucaccaucgacaaguga

SEQ ID NO: 183339 - RNA, 1410 nt, Artificial Sequence; identical to SEQ ID NO: 180836
  derived and/or modified CDS sequence (opt4) from neuraminidase__InfluenzaA__AGB13253

SEQ ID NO: 183340 - RNA, 1410 nt, Artificial Sequence
  derived and/or modified CDS sequence (opt4) from neuraminidase__InfluenzaA__AGB13263
augaaccccaaccagaagaucaucaccaucggcagcgugugcaugaccaucggcauggccaaccugauccugcagaucggcaacaucaucagcaucuggaucagccacagcauccagcugggcaaccagaaccagaccgagaccugcaaccagagcgugaucaccuacgagaacaacaccugggugaaccagaccuacgugaacaucagcaacaccaacuucgccgccggccagagcguggugagcgugaagcuggccggcaacagcagccugugccccgugagcggcugggccaucuacagcaaggacaacagcaucagaaucggcagcaagggcgacguguucgugaucagagagcccuucaucagcugcagcccccuggagugcagaaccuucuuccugacccagggcgcccugcugaacgacaagcacagcaacggcaccaucaaggacagaagccccuacagaacccugaugagcugccccaucggcgaggugcccagccccuacaacagcagauucgagagcguggccuggagcgccagcgccugccacgacggcaucaacuggcugaccaucggcaucagcggccccgacaacggcgccguggccgugcugaaguacaacggcaucaucaccgacaccaucaagagcuggagaaacaacauccugagaacccaggagagcgagugcgccugcgugaacggcagcugcuucaccgugaugaccgacggccccagcgacggccaggccagcuacaagaucuucagaaucgagaagggcaagaucgugaagagcguggagaugaaggcccccaacuaccacuacgaggagugcagcugcuaccccgacagcagcgagaucaccugcgugugcagagacaacuggcacggcagcaacagacccugggugagcuucaaccagaaccuggaguacagaaucggcuacaucugcagcggcaucuucggcgacaaccccagacccaacgacaagaccggcagcugcggccccgugagcagcaacggcgccaacggcgugaagggcuucagcuucaaguacggcaacggcguguggaucggcagaaccaagagcaucagcagcagaaacggcuucgagaugaucugggaccccaacggcuggaccggcaccgacaacaacuucagcaucaagcaggacaucaucggcaucaacgaguggagcggcuacagcggcagcuucgugcagcaccccgagcugaccggccuggacugcaucagacccugcuucuggguggagcugaucagaggcagacccaaggagaacaccaucuggaccagcggcagcagcaucagcuucugcggcgugaacagcgacaccgugggcuggagcuggcccgacggcgccgagcugcccuucaccguggacaaguga

SEQ ID NO: 183341 - RNA, 1410 nt, Artificial Sequence; identical to SEQ ID NO: 180769
  derived and/or modified CDS sequence (opt4) from neuraminidase__InfluenzaA__AGB13273

SEQ ID NO: 183342 - RNA, 1410 nt, Artificial Sequence
  derived and/or modified CDS sequence (opt4) from neuraminidase__InfluenzaA__AGB13283
augaaccccaaccagaagaucaucaccaucggcagcgugugcaugaccaucggcauggccaaccugauccugcagaucggcaacaucaucagcaucuggaucagccacagcauccagcugggcaaccagaaccagaucgagaccugcaaccagagcgugaucaccuacgagaacaacaccugggugaaccagaccuacgugaacaucagcaacaccaacuucgccgccggccagagcguggugagcgugaagcuggccggcaacagcagccugugccccgugagcggcugggccaucuacagcaaggacaacagcaucagaaucggcagcaagggcgacguguucgugaucagagagcccuucaucagcugcagcccccuggagugcagaaccuucuuccugacccagggcgcccugcugaacgacaagcacagcaacggcaccaucaaggacagaagccccuacagaacccugaugagcugccccaucggcgaggugcccagccccuacaacagcagauucgagagcguggccuggagcgccagcgccugccacgacggcaucaacuggcugaccaucggcaucagcggccccgacaacggcgccguggccgugcugaaguacaacggcaucaucaccgacaccaucaagagcuggagaaacaacauccugagaacccaggagagcgagugcgccugcgugaacggcagcugcuucaccaucaugaccgacggccccagcgacggccaggccagcuacaagaucuucagaaucgagaagggcaagaucgugaagagcguggagaugaacgcccccaacuaccacuacgaggagugcagcugcuaccccgacagcagcgagaucaccugcgugugcagagacaacuggcacggcagcaacagacccugggugagcuucaaccagaaccuggaguaccagaucggcuacaucugcagcggcaucuucggcgacaaccccagacccaacgacaagaccggcagcugcggccccgugagcagcaacggcgccaacggcgugaagggcuucagcuucaaguacggcaacggcguguggaucggcagaaccaagagcaucagcagcagaagaggcuucgagaugaucugggaccccaacggcuggaccggcaccgacaacaacuucagcaucaagcaggacaucgugggcaucaacgaguggagcggcuacagcggcagcuucgugcagcaccccgagcugaccggccuggacugcaucagacccugcuucuggguggagcugaucagaggcagacccaaggagaacaccaucuggaccagcggcagcagcaucagcuucugcggcgugaacagcgacaccgugggcuggagcuggcccgacggcgccgagcugcccuucaccaucgacaaguga

SEQ ID NO: 183343 - RNA, 1410 nt, Artificial Sequence; identical to SEQ ID NO: 180769
  derived and/or modified CDS sequence (opt4) from neuraminidase__InfluenzaA__AGB13293

SEQ ID NO: 183344 - RNA, 1410 nt, Artificial Sequence; identical to SEQ ID NO: 180769
  derived and/or modified CDS sequence (opt4) from neuraminidase__InfluenzaA__AGB13303

SEQ ID NO: 183345 - RNA, 1410 nt, Artificial Sequence
  derived and/or modified CDS sequence (opt4) from neuraminidase__InfluenzaA__AGB13313
augaaccccaaccagaagaucaucaccaucggcagcgugugcaugaccaucggcauggccaaccugauccugcagaucggcaacaucaucagcaucuggaucagccacagcauccagcugggcaaccagaaccagaucgagaccugcaaccagagcgugaucaccuacgagaacaacaccugggugaaccagaccuacgugaacaucagcaacaccaacuucgccgccggccagagcguggugagcgccaagcuggccggcaacagcagccugugccccgugagcggcugggccaucuacagcaaggacaacagcaucagaaucggcagcaagggcgacguguucgugaucagagagcccuucaucagcugcagcccccuggagugcagaaccuucuuccugacccagggcgcccugcugaacgacaagcacagcaacggcaccaucaaggacagaagccccuacagaacccugaugagcugccccaucggcgaggugcccagccccuacaacagcagauucgagagcguggccuggagcgccagcgccugccacgacggcaucaacuggcugaccaucggcaucagcggccccgacaacggcgccguggccgugcugaaguacaacggcaucaucaccgacaccaucaagagcuggagaaacaacauccugagaacccaggagagcgagugcgccugcgugaacggcagcugcuucaccgugaugaccgacggccccagcgacggccaggccagcuacaagaucuucagaaucgagaagggcaagaucgugaagagcguggagaugaacgcccccaacuaccacuacgaggagugcagcugcuaccccgacagcagcgagaucaccugcgugugcagagacaacuggcacggcagcaacagacccugggugagcuucaaccagaaccuggaguaccagaucggcuacaucugcagcggcaucuucggcgacaaccccagacccaacgacaagaagggcagcugcggccccgugagcagcaacggcgccaacggcgugaagggcuucagcuucaaguacggcaacggcguguggaucggcagaaccaagagcaucagcagcagaaacggcuucgagaugaucugggaccccaacggcuggaccggcaccgacaacaacuucagcaucaagcaggacaucgugggcaucaacgaguggagcggcuacagcggcagcuucgugcagcaccccgagcugaccggccuggacugcaucagacccugcuucuggguggagcugaucagaggcagacccaaggagaacaccaucuggaccagcggcagcagcaucagcuucugcggcgugaacagcgacaccgugggcuggagcuggcccgacggcgccgagcugcccuucaccaucgacaaguga

SEQ ID NO: 183346 - RNA, 1410 nt, Artificial Sequence; identical to SEQ ID NO: 180769
  derived and/or modified CDS sequence (opt4) from neuraminidase__InfluenzaA__AGB13323

SEQ ID NO: 183347 - RNA, 1410 nt, Artificial Sequence
  derived and/or modified CDS sequence (opt4) from neuraminidase__InfluenzaA__AGB13333
augaaccccaaccagaagaucaucaccaucggcagcgugugcaugaccaucggcauggccaaccugauccugcagaucggcaacaucaucagcaucuggaucagccacagcauccagcugggcaaccagagccagaucgagaccugcaaccagagcgugaucaccuacgagaacaacaccugggugaaccagaccuacgugaacaucagcaacaccaacuucgccgccggccagagcgccgugagcgugaagcuggccggcaacagcagccugugccccgugagcggcugggccaucuacagcaaggacaacagcaucagaaucggcagcaagggcgacguguucgugaucagagagcccuucaucagcugcagcccccuggagugcagaaccuucuuccugacccagggcgcccugcugaacgacaagcacagcaacggcaccaucaaggacagaagccccuacagaacccugaugagcugccccaucggcgaggugcccagccccuacaacagcagauucgagagcguggccuggagcgccagcgccugccacgacggcaucaacuggcugaccaucggcaucagcggccccgacaacggcgccguggccgugcugaaguacaacggcaucaucaccgacaccaucaagagcuggagaaacaacauccugagaacccaggagagcgagugcgccugcgugaacggcagcugcuucaccaucaugaccgacggccccagcgacggccaggccagcuacaagaucuucagaaucgagaagggcaagaucgugaagagcguggagaugaacgcccccaacuaccacuacgaggagugcagcugcuaccccgacagcagcgagaucaccugcgugugcagagacaacuggcacggcagcaacagacccugggugagcuucaaccagaaccuggaguaccagaucggcuacaucugcagcggcaucuucggcgacaaccccagacccaacgacaagaccggcagcugcggccccgugagcagcaacggcgccaacggcgugaagggcuucagcuucaaguacggcaacggcguguggaucggcagaaccaagagcaucagcagcagaaagggcuucgagaugaucugggaccccaacggcuggaccggcaccgacaacaacuucagcaucaagcaggacaucgugggcaucaacgaguggagcggcuacagcggcagcuucgugcagcaccccgagcugaccggccuggacugcaucagacccugcuucuggguggagcugaucagaggcagacccaaggagaacaccaucuggaccagcggcagcagcaucagcuucugcggcgugaacagcgacaccgugggcuggagcuggcccgacggcgccgagcugcccuucaccaucgacaaguga

SEQ ID NO: 183348 - RNA, 1410 nt, Artificial Sequence; identical to SEQ ID NO: 180769
  derived and/or modified CDS sequence (opt4) from neuraminidase__InfluenzaA__AGB13343

SEQ ID NO: 183349 - RNA, 1410 nt, Artificial Sequence; identical to SEQ ID NO: 181018
  derived and/or modified CDS sequence (opt4) from neuraminidase__InfluenzaA__AGB13353

SEQ ID NO: 183350 - RNA, 1410 nt, Artificial Sequence
  derived and/or modified CDS sequence (opt4) from neuraminidase__InfluenzaA__AGB13363
augaaccccaaccagaagaucaucaccaucggcagcgugugcaugaccaucggcauggccaaccugauccugcagaucggcaacaucaucagcaucuggaucagccacagcauccagcugggcaaccagaaccagaucgagaccugcaaccagagcgugaucaccuacgagaacaacaccugggugaaccagaccuacgugaacaucagcaacaccaacuucgccgccggccagagcguggccagcgugaagcuggccggcaacagcagccugugcagcgugagcggcugggccaucuacagcaaggacaacagcaucagaaucggcagcaagggcgacguguucgugaucagagagcccuucaucagcugcagcccccuggagugcagaaccuucuuccugacccagggcgcccugcugaacgacaagcacagcaacggcaccaucaaggacagaagccccuacagaacccugaugagcugccccaucggcgaggugcccagccccuacaacagcagauucgagagcguggccuggagcgccagcgccugccacgacggcaucaacuggcugaccaucggcaucagcggccccgacaacggcgccguggccgugcugaaguacaacggcaucaucaccgacaccaucaagagcuggagaaacaacauccugagaacccaggagagcgagugcgccugcgugaacggcagcugcuucaccaucaugaccgacggccccagcgacggccaggccagcuacaagaucuucagaaucgagaagggcaagaucgugaagagcguggagaugaacgcccccaacuaccacuacgaggagugcagcugcuaccccgacagcagcgagaucaccugcgugugcagagacaacuggcacggcagcaacagacccugggugagcuucaaccagaaccuggaguaccagaucggcuacaucugcagcggcaucuucggcgacaaccccagacccaacgacaagaccggcagcugcggccccgugagcagcaacggcgccaacggcgugaagggcuucagcuucaaguacggcaacggcguguggaucggcagaaccaagagcaucagcagcagaaagggcuucgagaugaucugggaccccaacggcuggaccggcaccgacaacaacuucagcaucaagcaggacaucgugggcaucaacgaguggagcggcuacagcggcagcuucgugcagcaccccgagcugaccggccuggacugcaucagacccugcuucuggguggagcugaucagaggcagacccaaggagaacaccaucuggaccagcggcagcagcaucagcuucugcggcgugaacagcgacaccgugggcuggagcuggcccgacggcgccgagcugcccuucaccaucgacaaguga

SEQ ID NO: 183351 - RNA, 1410 nt, Artificial Sequence
  derived and/or modified CDS sequence (opt4) from neuraminidase__InfluenzaA__AGB13383
augaaccccaaccagaagaucaucaccaucggcagcgugugcaugaccaucggcauggccaaccugauccugcagaucggcaacaucaucagcaucuggaucagccacagcauccagcugggcaaccagaaccagaucgagaccugcaaccagagcgugaucaccuacgagaacaacaccugggugaaccagaccuacgugaacaucagcaacaccaacuucgccgccggccagagcguggugagcgugaagcuggccggcaacagcagccugugccccgugagcggcugggccaucuacagcaaggacaacagcaucagaaucggcagcaagggcgacguguucgugaucagagagcccuucaucagcugcagcccccuggagugcagaaccuucuuccugacccagggcgcccugcugaacgacaagcacagcaacggcaccaucaaggacagaagccccuacagaacccugaugagcugccccaucggcgaggugcccagccccuacaacagcagauucgagagcguggccuggagcgccagcgccugccacgacggcaucaacuggcugaccaucggcaucagcggccccgacaacggcgccguggccgugcugaaguacaacggcaucaucaccgacaccaucaagagcuggagaaacaacauccugagaacccaggagagcgagugcgccugcgugaacggcagcugcuucaccaucaugaccgacggccccagcgacggccaggccagcuacaagaucuucagaaucgagaagggcaagaucgugaagagcguggagaugaacgcccccaacuaccacuacgaggagugcagcugcuaccccgacagcagcgagaucaccugcgugugcagagacaacuggcacggcagcaacagacccugggugagcuucaaccagaaccuggaguaccagaucggcuacaucugcagcggcaucuucggcgacaaccccagacccaacgacaagaccggcagcugcggccccgugagcagcaacggcgccaacggcgugaagggcuucagcuucaaguacggcagcggcguguggaucggcagaaccaagagcaucagcagcagaaagggcuucgagaugaucugggaccccaacggcuggaccggcaccgacaacaacuucagcaucaagcaggacaucgugggcaucaacgaguggagcggcuacagcggcagcuucgugcagcaccccgagcugaccggccuggacugcaucagacccugcuucuggguggagcugaucagaggcagacccaaggagaacaccaucuggaccagcggcagcagcaucagcuucugcggcgugaacagcgacaccgugggcuggagcuggcccgacggcgccgagcugcccuucaccaucgacaaguga

SEQ ID NO: 183352 - RNA, 1410 nt, Artificial Sequence; identical to SEQ ID NO: 180317
  derived and/or modified CDS sequence (opt4) from neuraminidase__InfluenzaA__AGB13393

SEQ ID NO: 183353 - RNA, 1410 nt, Artificial Sequence; identical to SEQ ID NO: 181017
  derived and/or modified CDS sequence (opt4) from neuraminidase__InfluenzaA__AGB13403

SEQ ID NO: 183354 - RNA, 1410 nt, Artificial Sequence; identical to SEQ ID NO: 180317
  derived and/or modified CDS sequence (opt4) from neuraminidase__InfluenzaA__AGB13413

SEQ ID NO: 183355 - RNA, 1410 nt, Artificial Sequence; identical to SEQ ID NO: 180317
  derived and/or modified CDS sequence (opt4) from neuraminidase__InfluenzaA__AGB13423

SEQ ID NO: 183356 - RNA, 1410 nt, Artificial Sequence; identical to SEQ ID NO: 181017
  derived and/or modified CDS sequence (opt4) from neuraminidase__InfluenzaA__AGB13433

SEQ ID NO: 183357 - RNA, 1410 nt, Artificial Sequence; identical to SEQ ID NO: 181017
  derived and/or modified CDS sequence (opt4) from neuraminidase__InfluenzaA__AGB13443

SEQ ID NO: 183358 - RNA, 1410 nt, Artificial Sequence
  derived and/or modified CDS sequence (opt4) from neuraminidase__InfluenzaA__AGB13453
augaaccccaaccagaagaucaucaccaucggcagcgugugcaugaccaucggcauggccaaccugauccugcagaucggcaacaucaucagcaucuggaucagccacagcauccagcugggcaaccagagccagaucgagaccugcaaccagagcgugaucaccuacgagaacaacaccugggugaaccagaccuacgugaacaucagcaacaccaacuucgccgccggccagagcguggugagcgugaagcuggccggcaacagcagccugugccccgugagcggcugggccaucuacagcaaggacaacagcaucagaaucggcagcaagggcgacguguucgugaucagagagcccuucaucagcugcagcccccuggagugcagaaccuucuuccugacccagggcgcccugcugaacgacaagcacagcaacggcaccaucaaggacagaagccccuacagaacccugaugagcugccccaucggcgaggugcccagccccuacaacagcagauucgagagcguggccuggagcgccagcgccugccacgacggcaucaacuggcugaccaucggcaucagcggccccgacaacggcgccguggccgugcugaaguacaacggcaucaucaccgacaccaucaagagcuggagaaacaacauccugagaacccaggagagcgagugcgccugcgugaacggcagcugcuucaccaucaugaccgacggccccagcgacggccaggccagcuacaagaucuucagaaucgagaagggcaagaucgugaagagcguggagaugaacgcccccaacuaccacuacgaggagugcagcugcuaccccgacagcagcgagaucaccugcgugugcagagacaacuggcacggcagcaacagacccugggugagcuucaaccagaaccuggaguaccagaucggcuacaucugcagcggcaucuucggcgacaaccccagacccaacgacaagaccggcagcugcggccccgugagcagcaacggcgccaacggcgugaagggcuucagcuucaaguacggcaacggcguguggaucggcagaaccaagagcuucagcagcagaaagggcuucgagaugaucugggaccccaacggcuggaccggcaccgacaacaacuucagcaucaagcaggacaucgugggcaucaacgaguggagcggcuacagcggcagcuucgugcagcaccccgagcugaccggccuggacugcaucagacccugcuucuggguggagcugaucagaggcagacccaaggagaacaccaucuggaccagcggcagcagcaucagcuucugcggcgugaacagcgacaccgugggcuggagcuggcccgacggcgccgagcugcccuucaccaucgacaaguga

SEQ ID NO: 183359 - RNA, 1410 nt, Artificial Sequence; identical to SEQ ID NO: 180317
  derived and/or modified CDS sequence (opt4) from neuraminidase__InfluenzaA__AGB13463

SEQ ID NO: 183360 - RNA, 1410 nt, Artificial Sequence; identical to SEQ ID NO: 180769
  derived and/or modified CDS sequence (opt4) from neuraminidase__InfluenzaA__AGB13473

SEQ ID NO: 183361 - RNA, 1410 nt, Artificial Sequence
  derived and/or modified CDS sequence (opt4) from neuraminidase__InfluenzaA__AGB13483
augaaccccaaccagaagaucaucaccaucggcagcgugugcaugaccaucggcauggccaaccugauccugcagaucggcaacaucaucagcaucuggaucagccacagcauccagcugggcaaccagagccagaucgagaccugcaaccagagcgugaucaccuacgagaacaacaccugggugaaccagaccuacgugaacaucagcaacaccaacuucgccgccggccagagcguggugagcgugaagcuggccggcaacagcagccugugccccgugagcggcugggccaucuacagcaaggacaacagcaucagaaucggcagcaagggcgacguguucgugaucagagagcccuucaucagcugcagcccccuggagugcagaaccuucuuccugacccagggcgcccugcugaacgacaagcacagcaacggcaccaucaaggacagaagccccuacagaacccugaugagcugccccaucggcgaggugcccagccccuacaacagcagauucgagagcguggccuggagcgccagcgccugccacgacggcaucaacuggcugaccaucggcaucagcggccccgacaacggcgccguggccgugcugaaguacaacggcaucaucaccgacaccaucaagagcuggagaaacaacauccugagaacccaggagagcgagugcgccugcgugaacggcagcugcuucaccaucaugaccgacggccccagcgacggccaggccagcuacaagaucuucagaaucgagaagggcaagaucgugaagagcguggagaugaacgcccccaacuaccacuacgaggagugcagcugcuaccccgacagcagcgagaucaccugcgugugcagagacaacuggcacggcagcaacagacccugggugagcuucaaccagaaccuggaguaccagaucggcuacaucugcagcggcaucuucggcgacaaccccagacccaacgacaagaccggcagcugcggccccgugagcagcaacggcgccaacggcgugaagggcuucagcuucaaguacggcaacggcguguggaucggcagaaccaagagcaucagcagcagaaagggcuucgagaugaucugggaccccaacggcuggaccggcaccgacaacaacuucagcaucaagcaggacaucgugggcaucaacgaguggagcggcuacagcggcagcuucgugcagcaccccgagcugaccggccuggacugcaucagacccugcuucuggguggagcugaucagaggccagcccaaggagaacaccaucuggaccagcggcagcagcaucagcuucugcggcgugaacagcgacaccgugggcuggagcuggcccgacggcgccgagcugcccuucaccaucgacaaguga

SEQ ID NO: 183362 - RNA, 1410 nt, Artificial Sequence; identical to SEQ ID NO: 181054
  derived and/or modified CDS sequence (opt4) from neuraminidase__InfluenzaA__AGB13493

SEQ ID NO: 183363 - RNA, 1410 nt, Artificial Sequence; identical to SEQ ID NO: 180846
  derived and/or modified CDS sequence (opt4) from neuraminidase__InfluenzaA__AGB13503

SEQ ID NO: 183364 - RNA, 1410 nt, Artificial Sequence; identical to SEQ ID NO: 178260
  derived and/or modified CDS sequence (opt4) from neuraminidase__InfluenzaA__AGB13513

SEQ ID NO: 183365 - RNA, 1410 nt, Artificial Sequence; identical to SEQ ID NO: 181052
  derived and/or modified CDS sequence (opt4) from neuraminidase__InfluenzaA__AGB13523

SEQ ID NO: 183366 - RNA, 1410 nt, Artificial Sequence; identical to SEQ ID NO: 181052
  derived and/or modified CDS sequence (opt4) from neuraminidase__InfluenzaA__AGB13533

SEQ ID NO: 183367 - RNA, 1410 nt, Artificial Sequence; identical to SEQ ID NO: 180769
  derived and/or modified CDS sequence (opt4) from neuraminidase__InfluenzaA__AGB13543

SEQ ID NO: 183368 - RNA, 1410 nt, Artificial Sequence; identical to SEQ ID NO: 180769
  derived and/or modified CDS sequence (opt4) from neuraminidase__InfluenzaA__AGB13553

SEQ ID NO: 183369 - RNA, 1410 nt, Artificial Sequence
  derived and/or modified CDS sequence (opt4) from neuraminidase__InfluenzaA__AGB13563
augaaccccaaccagaagaucaucaccaucggcagcgugugcaugaccaucggcguggccaaccugauccugcagaucggcaacaucaucagcaucuggaucagccacagcauccagcugggcaaccagaaccagaucgagaccugcaaccagagcgugaucaccuacgagaacaacaccugggugaaccagaccuacgugaacaucagcaacaccaacuucgccgccggccagagcguggugagcgugaaccuggccggcaacagcagccugugccccgugagcggcugggccaucuacagcaaggacaacagcaucagaaucggcagcaagggcgacguguucgugaucagagagcccuucaucagcugcagcccccuggagugcagaaccuucuuccugacccagggcgcccugcugaacgacaagcacagcaacggcaccaucaaggacagaagccccuacagaacccugaugagcugccccaucggcgaggugcccagccccuacaacagcagauucgagagcguggccuggagcgccagcgccugccacgacggcaucaacuggcugaccaucggcaucagcggccccgacaacggcgccguggccgugcugaaguacaacggcaucaucaccgacaccaucaagagcuggagaaacaacauccugagaacccaggagagcgagugcgccugcgugaacggcagcugcuucaccaucaugaccgacggccccagcgacggccaggccagcuacaagaucuucagaaucgagaagggcaagaucgugaagagcguggagaugaacgcccccaacuaccacuacgaggagugcagcugcuaccccgacagcagcgagaucaccugcgugugcagagacaacuggcacggcagcaacagacccugggugagcuucaaccagaaccuggaguaccagaucggcuacaucugcagcggcaucuucggcgacaaccccagacccaacgacaagaccggcagcugcggccccgugagcagcaacggcgccaacggcgugaagggcuucagcuucaaguacggcaacggcguguggaucggcagaaccaagaacaucagcagcagaaagggcuucgagaugaucugggaccccaacggcuggaccggcaccgacaacaacuucagcaucaagcaggacaucgugggcaucaacgaguggagcggcuacagcggcagcuucgugcagcaccccgagcugaccggccuggacugcaucagacccugcuucuggguggagcugaucagaggcagacccaaggagaacaccaucuggaccagcggcagcagcaucagcuucugcggcgugaacagcgacaccgugggcuggagcuggcccgacggcgccgagcugcccuucaccaucgacaaguga

SEQ ID NO: 183370 - RNA, 1410 nt, Artificial Sequence; identical to SEQ ID NO: 180769
  derived and/or modified CDS sequence (opt4) from neuraminidase__InfluenzaA__AGB13573

SEQ ID NO: 183371 - RNA, 1410 nt, Artificial Sequence
  derived and/or modified CDS sequence (opt4) from neuraminidase__InfluenzaA__AGB13583
augaaccccaaccagaagaucaucaccaucggcagcgugugcaugaccaucggcauggccaaccugauccugcagaucggcaacaucaucagcaucuggaucagccacagcauccagcugggcaaccagaaccagaucgagaccugcaaccagagcgugaucaccuacgagaacaacaccugggugaaccagaccuacgugaacaucagcaacaccaacuucgccgccggccagagcgugggcagcgugaagcuggccggcaacagcagccugugccccgugagcggcugggccaucuacagcaaggacaacagcaucagaaucggcagcaagggcgacguguucgugaucagagagcccuucaucagcugcagcccccuggagugcagaaccuucuuccugacccagggcgcccugcugaacgacaagcacagcaacggcaccaucaaggacagaagccccuacagaacccugaugagcugccccaucggcgaggugcccagccccuacaacagcagauucgagagcguggccuggagcgccagcgccugccacgacggcaucaacuggcugaccaucggcaucagcggccccgacaacggcgccguggccgugcugaaguacaacggcaucaucaccgacaccaucaagagcuggagaaacaacauccugagaacccaggagagcgagugcgccugcgugaacggcagcugcuucaccaucaugaccgacggccccagcgacggccaggccagcuacaagaucuucagaaucgagaagggcaagaucgugaagagcguggagaugaacgcccccaacuaccacuacgaggagugcagcugcuaccccgacagcagcgagaucaccugcgugugcagagacaacuggcacggcagcaacagacccugggugagcuucaaccagaaccuggaguaccagaucggcuacaucugcagcggcaucuucggcgacaaccccagacccaacgacaagaccggcagcugcggccccgugagcagcaacggcgccaacggcgugaagggcuucagcuucaaguacggcaacggcguguggaucggcagaaccaagagcaucagcagcagaaagggcuucgagaugaucugggaccccaacggcuggaccggcaccgacaacaacuucagcaucaagcaggacaucgugggcaucaacgaguggagcggcuacagcggcagcuucgugcagcaccccgagcugaccggccuggacugcaucagacccugcuucuggguggagcugaucagaggcagacccaaggagaacaccaucuggaccagcggcagcagcaucagcuucugcggcgugaacagcgacaccgugggcuggagcuggcccgacggcgccgagcugcccuucaccaucgacaaguga

SEQ ID NO: 183372 - RNA, 1410 nt, Artificial Sequence; identical to SEQ ID NO: 180769
  derived and/or modified CDS sequence (opt4) from neuraminidase__InfluenzaA__AGB13593

SEQ ID NO: 183373 - RNA, 1410 nt, Artificial Sequence; identical to SEQ ID NO: 180769
  derived and/or modified CDS sequence (opt4) from neuraminidase__InfluenzaA__AGB13603

SEQ ID NO: 183374 - RNA, 1410 nt, Artificial Sequence; identical to SEQ ID NO: 180769
  derived and/or modified CDS sequence (opt4) from neuraminidase__InfluenzaA__AGB13613

SEQ ID NO: 183375 - RNA, 1410 nt, Artificial Sequence; identical to SEQ ID NO: 180769
  derived and/or modified CDS sequence (opt4) from neuraminidase__InfluenzaA__AGB13623

SEQ ID NO: 183376 - RNA, 1410 nt, Artificial Sequence
  derived and/or modified CDS sequence (opt4) from neuraminidase__InfluenzaA__AGB13633
augaaccccaaccagaagaucaucaccaucggcagcgugugcaugaccaucggcauggccaaccugauccugcagaucggcaacaucaucagcaucuggaucagccacagcauccagcugggcaaccagagccagaucgagaccugcaaccagagcgugaucaccuacgagaacaacaccugggugaaccagaccuacgugaacaucagcaacaccaacuucgccgccggccagagcguggugagcgugaagcuggccggcaacagcagccugugccccgugagcggcugggccaucuacagcaaggacaacagcaucagaaucggcagcaagggcgacguguucgugaucagagagcccuucaucagcugcagcccccuggagugcagaaccuucuuccugacccagggcgcccugcugaacgacaagcacagcaacggcaccaucaaggacagaagccccuacagaacccugaugagcugccccaucggcgaggugcccagccccuacaacagcagauucgagagcguggccuggagcgccagcgccugccacgacggcaucaacuggcugaccaucggcaucagcggccccgacaacggcgccguggccgugcugaaguacaacggcaucaucaccgacaccaucaagagcuggagaaacaacauccugagaacccaggagagcgagugcgccugcgugaacggcagcugcuucaccaucaugaccgacggccccagcgacggccaggccagcuacaagaucuucagaaucgagaagggcaagaucgugaagagcguggagaugaacgcccccaacuaccacuacgaggagugcagcugcuaccccgacagcagcgagaucaccugcgugugcagagacaacuggcacggcagcaacagacccugggugagcuucaaccagaaccuggaguaccagaucggcuacaucugcagcggcaucuucggcgacaaccccagacccaacgacaagaccggcagcugcggccccgugagcagcaacggcgccaacggcgugaagggcuucagcuucaaguacggcaacggcguguggaucggcagaaccaagagcaucagcagcagaaagggcuucgagaugaucugggaccccaacggcuggaccggcaccgacaacaacuucagcaucaagcaggacaucgugggcaucaacgaguggagcggcuacagcggcagcuucgugcagcaccccgagcugaccggccuggacugcaucagacccugcuucuggguggagcugaucagaggcagacccaaggagaacaccaucuggaccagcggcagcaucaucagcuucugcggcgugaacagcgacaccgugggcuggagcuggcccgacggcgccgagcugcccuucaccaucgacaaguga

SEQ ID NO: 183377 - RNA, 1410 nt, Artificial Sequence
  derived and/or modified CDS sequence (opt4) from neuraminidase__InfluenzaA__AGB13643
augaaccccaaccagaagaucaucaccaucggcagcgugugcaugaccaucggcauggccaaccugauccugcagaucggcaacaucaucagcaucuggaucagccacagcauccagcugggcaaccagaaccagaucgagaccugcaaccagagcgugaucaccuacgagaacaacaccugggugaaccagaccuacgugaacaucagcaacaccaacuucgccgccggccagagcguggugagcgugaagcuggccggcaacagcagccugugccccgugagcggcugggccaucuacagcaaggacaacggcaucagaaucggcagcaagggcgacguguucgugaucagagagcccuucaucagcugcagcccccuggagugcagaaccuucuuccugacccagggcgcccugcugaacgacaagcacagcaacggcaccaucaaggacagaagccccuacagaacccugaugagcugccccaucggcgaggugcccagccccuacaacagcagauucgagagcguggccuggagcgccagcgccugccacgacggcaucaacuggcugaccaucggcaucagcggccccgacaacggcgccguggccgugcugaaguacaacggcaucaucaccgacaccaucaagagcuggagaaacaacauccugagaacccaggagagcgagugcgugugcgugaacggcagcugcuucaccgugaugaccgacggccccagcgacggccaggccagcuacaagaucuucagaaucgagaagggcaagaucgugaagagcguggagaugaacgcccccaacuaccacuacgaggagugcagcugcuaccccgacagcagcgagaucaccugcgugugcagagacaacuggcacggcagcaacagacccugggugagcuucaaccagaaccuggaguaccagaucggcuacaucugcagcggcaucuucggcgacaaccccagacccaacgacaagaccggcagcugcggccccgugagcagcaacggcgccaacggcgugaagggcuucagcuucaaguacggcaacggcguguggaucggcagaaccaagagcaucagcagcagaaacggcuucgagaugaucugggaccccaacggcuggaccggcaccgacaacaacuucagcgugaagcaggacaucaucggcaucaacgaguggagcggcuacagcggcagcuucgugcagcaccccgagcugaccggccuggacugcaucagacccugcuucuggguggagcugaucagaggcagacccaaggagaacaccaucuggaccagcggcagcagcaucagcuucugcggcgugaacagcgacaccgugggcuggagcuggcccgacggcgccgagcugcccuucaccaucgacaaguga

SEQ ID NO: 183378 - RNA, 1410 nt, Artificial Sequence
  derived and/or modified CDS sequence (opt4) from neuraminidase__InfluenzaA__AGB13653
augaaccccaaccagaagaucaucaccaucggcagcgugugcaugaccaucggcauggccaaccugauccugcagaucggcaacaucaucagcaucuggaucagccacagcauccagcugggcaaccagaaccagaucgagaccugcaaccagagcgugaucaccuacgagaacaacaccugggugaaccagaccuacgugaacaucagcaacaccaacuucgccgccggccagagcguggugagcgugaagcuggccggcaacagcagccugugccccgugagcggcugggccaucuacagcaaggacaacagcaucagaaucggcagcaagggcgacguguucgugaucagagagcccuucaucagcugcagcccccuggagugcagaaccuucuuccugacccagggcgcccugcugaacgacaagcacagcaacggcaccaucaaggacagaagccccuacagaacccugaugagcugccccaucggcgaggugcccagccccuacaacagcagauucgagagcguggccuggagcgccagcgccugccacgacggcaucaacuggcugaccaucggcaucagcggccccgacaacggcgccguggccgugcugaaguacaacggcaucaucaccgacaccaucaagagcuggagaaacaacauccugagaacccaggagagcgagugcgugugcgugaacggcagcugcuucaccgugaugaccgacggccccagcgacggccaggccagcuacaagaucuucagaaucgagaagggcaagaucgugaagagcguggagaugaacgcccccaacuaccacuacgaggagugcagcugcuaccccgacagcagcgagaucaccugcgugugcagagacaacuggcacggcagcaacagacccugggugagcuucaaccagaaccuggaguaccagaucggcuacaucugcagcggcaucuucggcgacaaccccagacccaacgacaagaccggcagcugcggccccgugagcagcaacggcgccaacggcgugaagggcuucagcuucaaguacggcaacggcguguggaucggcagaaccaagagcaucagcagcagaaacggcuucgagaugaucugggaccccaacggcuggaccggcaccgacaacaacuucagcgugaagcaggacaucaucggcaucaacgaguggagcggcuacagcggcagcuucgugcagcaccccgagcugaccggccuggacugcaucagacccugcuucuggguggagcugaucagaggcagacccaaggagaacaccaucuggaccagcggcagcagcaucagcuucugcggcgugaacagcgacaccgugggcuggagcuggcccgacggcgccgagcugcccuucaccaucgacaaguga

SEQ ID NO: 183379 - RNA, 1410 nt, Artificial Sequence; identical to SEQ ID NO: 180317
  derived and/or modified CDS sequence (opt4) from neuraminidase__InfluenzaA__AGB13663

SEQ ID NO: 183380 - RNA, 1410 nt, Artificial Sequence; identical to SEQ ID NO: 180317
  derived and/or modified CDS sequence (opt4) from neuraminidase__InfluenzaA__AGB13724

SEQ ID NO: 183381 - RNA, 1410 nt, Artificial Sequence; identical to SEQ ID NO: 180769
  derived and/or modified CDS sequence (opt4) from neuraminidase__InfluenzaA__AGB13734

SEQ ID NO: 183382 - RNA, 1410 nt, Artificial Sequence; identical to SEQ ID NO: 177274
  derived and/or modified CDS sequence (opt4) from neuraminidase__InfluenzaA__AGB51359

SEQ ID NO: 183383 - RNA, 1410 nt, Artificial Sequence
  derived and/or modified CDS sequence (opt4) from neuraminidase__InfluenzaA__AGB97270
augaaccccaaccagaagaucaucaccaucggcagcgugugcaugaccaucggcauggccaaccugauccugcagaucggcaacaucaucagcaucuggaucagccacagcauccagcugagaaaccagaaccagaucgagaccugcaaccagagcgugaucaccuacgagaacaacaccugggugaaccagaccuacgugaacaucagcaacaccaacuucgccgccggccagagcguggugagcgugaagcuggccggcaacagcagccugugccccgugagcggcugggccaucuacagcaaggacaacagcaucagaaucggcagcaagggcgacguguucgugaucagagagcccuucaucagcugcagcccccuggagugcagaaccuucuuccugacccagggcgcccugcugaacgacaagcacagcaacggcaccaucaaggacagaagccccuacagaacccugaugagcugccccaucggcgaggugcccagccccuacaacagcagauucgagagcguggccuggagcgccagcgccugccacgacggcaucaacuggcugaccaucggcaucagcggccccgacaacggcgccauggccgugcugaaguacaacggcaucaucaccgacaccaucaagagcuggagaaacaacauccugagaacccaggagagcgagugcgccugcgugaacggcagcugcuucaccaucaugaccgacggccccagcgacggccaggccagcuacaagaucuucagaaucgagaagggcaagaucgugaagagcguggagaugaacgcccccaacuaccacuacgaggagugcagcugcuaccccgacagcagcgagaucaccugcgugugcagagacaacuggcacggcagcaacagacccugggugagcuucaaccagaaccuggaguaccagaucggcuacaucugcagcggcaucuucggcgacaaccccagacccaacgacaagaccggcagcugcggccccgugagcagcaacggcgccaacggcgugaagggcuucagcuucaaguacggcaacggcguguggaucggcagaaccaagagcaucagcagcagaaagggcuucgagaugaucugggaccccaacggcuggaccggcaccgacaacaacuucagcaucaagcaggacaucgugggcaucaacgaguggagcggcuacagcggcagcuucgugcagcaccccgagcugaccggccuggacugcaucagacccugcuucuggguggagcugaucagaggcagacccaaggagaacaccaucuggaccagcggcagcagcaucagcuucugcggcgugaacagcgacaccgugggcuggagcuggcccgacggcgccgagcugcccuucaccaucgacaaguga

SEQ ID NO: 183384 - RNA, 1410 nt, Artificial Sequence
  derived and/or modified CDS sequence (opt4) from neuraminidase__InfluenzaA__AGB97274
augaaccccaaccagaagaucaucaccaucggcagcgugugcaugaccaucggcauggccaaccugauccugcagaucggcaacaucaucagcaucuggaucagccacagcauccagcugagaaaccagaaccagaucgagaccugcaaccagagcgugaucaccuacgagaacaacaccugggugaaccagaccuacgugaacaucagcaacaccaacuucgccgccggccagagcguggugagcgugaagcuggccggcaacagcagccugugccccgugagcggcugggccaucuacagcaaggacaacagcaucagaaucggcagcaagggcgacguguucgugaucagagagcccuucaucagcugcagcccccuggagugcagaaccuucuuccugacccagggcgcccugcugaacgacaagcacagcaacggcaccaucaaggacagaagccccuacagaacccugaugagcugccccaucggcgaggugcccagccccuacaacagcagauucgagagcguggccuggagcgccagcgccugccacgacggcaucaacuggcugaccaucggcaucagcggccccgacaacggcgccguggccgugcugaaguacaacggcaucaucaccgacaccaucaagagcuggagaaacaacauccugagaacccaggagagcgagugcgccugcgugaacggcagcugcuucaccaucaugaccgacggccccagcgacggccaggccagcuacaagaucuucagaaucgagaagggcaagaucgugaagagcguggagaugaacgcccccaacuaccacuacgaggagugcagcugcuaccccgacagcagcgagaucaccugcgugugcagagacaacuggcacggcagcaacagacccugggugagcuucaaccagaaccuggaguaccagaucggcuacaucugcagcggcaucuucggcgacaaccccagacccaacgacaagaccggcagcugcggccccgugagcagcaacggcgccaacggcgugaagggcuucagcuucaaguacggcaacggcguguggaucggcagaaccaagagcaucagcagcagaaagggcuucgagaugaucugggaccccaacggcuggaccggcaccgacaacaacuucagcaucaagcaggacaucgugggcaucaacgaguggagcggcuacagcggcagcuucgugcagcaccccgagcugaccggccuggacugcaucagacccugcuucuggguggagcugaucagaggcagacccaaggagaacaccaucuggaccagcggcagcagcaucagcuucugcggcgugaacagcgacaccgugggcuggagcuggcccgacggcgccgagcugcccuucaccaucgacaaguga

SEQ ID NO: 183385 - RNA, 1410 nt, Artificial Sequence; identical to SEQ ID NO: 182206
  derived and/or modified CDS sequence (opt4) from neuraminidase__InfluenzaA__AGB97289

SEQ ID NO: 183386 - RNA, 1410 nt, Artificial Sequence
  derived and/or modified CDS sequence (opt4) from neuraminidase__InfluenzaA__AGE15475
augaaccccaaccagaagaucaucaccaucggcagcgugugcaugaccaucggcauggccaaccugauccugcagaucggcaacaucaucagcaucuggaucagccacagcauccagcugggcaaccagagccagaucgagaccugcaaccagagcgugaucaccuacgagaacaacaccugggugaaccagaccuacgugaacaucagcaacaccaacuucgccgccggccagagcguggugagcgugaagcuggccggcaacagcagccugugccccgugagcggcugggccaucuacagcaaggacaacagcaucagaaucggcagcaagggcgacguguucgugaucagagagcccuucaucagcugcagcccccuggagugcagaaccuucuuccugacccagggcagccugcugaacgacaagcacagcaacggcaccaucaaggacagaagccccuacagaacccugaugagcugccccaucggcgaggugcccagccccuacaacagcagauucgagagcguggccuggagcgccagcgccugccacgacggcaucaacuggcugaccaucggcaucagcggccccgacaacggcgccguggccgugcugaaguacaacggcaucaucaccgacaccaucaagagcuggagaaacaacauccugagaacccaggagagcgagugcgccugcgugaacggcagcugcuucaccaucaugaccgacggccccagcgacggccaggccagcuacaagaucuucagaaucgagaagggcaagaucgugaagagcguggagaugaacgcccccaacuaccacuacgaggagugcagcugcuaccccgacagcagcgagaucaccugcgugugcagagacaacuggcacggcagcaacagacccugggugagcuucaaccagaaccuggaguaccagaucggcuacaucugcagcggcaucuucggcgacaaccccagacccaacgacaagaccggcagcugcggccccgugagcagcaacggcgccaacggcgugaagggcuucagcuucaaguacggcaacggcguguggaucggcagaaccaagagcaucagcagcagaaagggcuucgagaugaucugggaccccaacggcuggaccggcaccgacaacuacuucagcaucaagcaggacaucgugggcaucaacgaguggagcggcuacagcggcagcuucgugcagcaccccgagcugaccggccuggacugcaucagacccugcuucuggguggagcugaucagaggcagacccaaggagaacaccaucuggaccagcggcagcagcaucagcuucugcggcgugaacagcgacaccgugggcuggagcuggcccgacggcgccgagcugcccuucagcaucgacaaguga

SEQ ID NO: 183387 - RNA, 1410 nt, Artificial Sequence
  derived and/or modified CDS sequence (opt4) from neuraminidase__InfluenzaA__AGE15476
augaaccccaaccagaagaucaucaccaucggcagcgugugcaugaccaucggcauggccaaccugauccugcagaucggcaacaucaucagcaucuggaucagccacagcauccagcugggcaaccagagccagaucgagaccugcaaccagagcgugaucaccuacgagaacaacaccugggugaaccagaccuacgugaacaucagcaacaccaacuucgccgccggccagagcguggugagcgugaagcuggccggcaacagcagccugugccccgugagcggcugggccaucuacagcaaggacaacagcaucagaaucggcagcaagggcgacguguucgugaucagagagcccuucaucagcugcagcccccuggagugcagaaccuucuuccugacccagggcagccugcugaacgacaagcacagcaacggcaccaucaaggacagaagccccuacagaacccugaugagcugccccaucggcgaggugcccagccccuacaacagcagauucgagagcguggccuggagcgccagcgccugccacgacggcaucaacuggcugaccaucggcaucagcggccccgacaacggcgccguggccgugcugaaguacaacggcaucaucaccgacaccaucaagagcuggagaaacaacauccugagaacccaggagagcgagugcgccugcgugaacggcagcugcuucaccaucaugaccgacggccccagcgacggccaggccagcuacaagaucuucagaaucgagaagggcaagaucgugaagagcguggagaugaacgcccccaacuaccacuacgaggagugcagcugcuaccccgacagcagcgagaucaccugcgugugcagagacaacuggcacggcagcaacagacccugggugagcuucaaccagaaccuggaguaccagaucggcuacaucugcagcggcaucuucggcgacaaccccagacccaacgacaagaccggcagcugcggccccgugagcagcaacggcgccaacggcgugaagggcuucagcuucaaguacggcaacggcguguggaucggcagaaccaagagcaucagcagcagaaagggcuucgagaugaucugggaccccaacggcuggaccggcaccgacaacuacuucagcaucaagcaggacaucgugggcaucaacgaguggagcggcuacagcggcagcuucgugcagcaccccgagcugaccggccuggacugcaucagacccugcuucuggguggagcugaucagaggcagacccaaggagaacaccaucuggaccagcggcagcagcaucagcuucugcggcgugaacagcgacaccgugggcuggagcuggcccgacggcgccgagcugcccuucaccaucgacaaguga

SEQ ID NO: 183388 - RNA, 1410 nt, Artificial Sequence; identical to SEQ ID NO: 183218
  derived and/or modified CDS sequence (opt4) from neuraminidase__InfluenzaA__AGE15477

SEQ ID NO: 183389 - RNA, 1410 nt, Artificial Sequence
  derived and/or modified CDS sequence (opt4) from neuraminidase__InfluenzaA__AGE15478
augaaccccaaccagaagaucaucaccaucggcagcgugugcaugaccaucggcauggccaaccugauccugcagaucggcaacaucaucagcaucuggaucagccacagcauccagcugggcaaccagagccagaucgagaccugcaaccagagcgugaucaccuacgagaacaacaccugggugaaccagaccuacgugaacaucagcaacaccaacuucgccgccggccagagcguggugagcgugaagcuggccggcaacagcagccugugccccgugagcggcugggccaucuacagcaaggacaacagcaucagaaucggcagcaagggcgacguguucgugaucagagagcccuucaucagcugcagcccccuggagugcagaaccuucuuccugacccagggcagccugcugaacgacaagcacagcaacggcaccaucaaggacagaagccccuacagaacccugaugagcugccccaucggcgaggugcccagccccuacaacagcagauucgagagcguggccuggagcgccagcgccugccacgacggcaucaacuggcugaccaucggcaucagcggccccgacaacggcgccguggccgugcugaaguacaacggcaucaucaccgacaccaucaagagcuggagaaacaacauccugagaacccaggagagcgagugcgccugcgugaacggcagcugcuucaccaucaugaccgacggccccagcgacggccaggccagcuacaagaucuucagaaucgagaagggcaagaucgugaagagcguggagaugaacgcccccaacuaccacuacgaggagugcagcugcuaccccgacagcagcgagaucaccugcgugugcagagacaacuggcacggcagcaacagacccugggugagcuucaaccagaaccuggaguaccagaucggcuacaucugcagcggcaucuucggcgacaaccccagacccaacgacaagaccggcagcugcggccccgugagcagcaacggcgccaacggcgugaagggcuucagcuucaaguacggcaacggcguguggaucggcagaaccaagagcaucagcagcagaaagggcuucgagaugaucugggaccccaacggcuggaccggcaccgacaacuacuucagcaucaagcaggacaucgugggcaucaacgaguggagcggcuacagcggcagcuucgugcagcaccccgagcugaccggccuggacugcaucagacccugcuucuggguggagcugaucagaggcagacccaaggagaacaccaucuggaccagcggcagcagcaucagcuucugcggcgugaagagcgacaccgugggcuggagcuggcccgacggcgccgagcugcccuucaccaucgacaaguga

SEQ ID NO: 183390 - RNA, 1410 nt, Artificial Sequence
  derived and/or modified CDS sequence (opt4) from neuraminidase__InfluenzaA__AGE15479
augaaccccaaccagaagaucaucaccaucggcagcgugugcaugaccaucggcauggccaaccugauccugcagaucggcaacaucaucagcaucuggaucagccacagcauccagcugggcaaccagagccagaucgagaccugcaaccagagcgugaucaccuacgagaacaacaccugggugaaccagaccuacgugaacaucagcaacaccaacuucgccgccggccagagcguggugagcgugaagcuggccggcaacagcagccugugccccgugagcggcugggccaucuacagcaaggacaacagcaucagaaucggcagcaagggcgacguguucgugaucagagagcccuucaucagcugcagcccccuggagugcagaaccuucuuccugacccagggcagccugcugaacgacaagcacagcaacggcaccaucaaggacagaagccccuacagaacccugaugagcugccccaucggcgaggugcccagccccuacaacagcagauucgagagcguggccuggagcgccagcgccugccacgacggcaucaacuggcugaccaucggcaucagcggccccgacaacggcgccguggccgugcugaaguacaacggcaucaucaccgacaccaucaagagcuggagaaacaacauccugagaacccaggagagcgagugcgccugcgugaacggcagcugcuucaccaucaugaccgacggccccaucgacggccaggccagcuacaagaucuucagaaucgagaagggcaagaucgugaagagcguggagaugaacgcccccaacuaccacuacgaggagugcagcugcuaccccgacagcagcgagaucaccugcgugugcagagacaacuggcacggcagcaacagacccugggugagcuucaaccagaaccuggaguaccagaucggcuacaucugcagcggcaucuucggcgacaaccccagacccaacgacaagaccggcagcugcggccccgugagcagcaacggcgccaacggcgugaagggcuucagcuucaaguacggcaacggcguguggaucggcagaaccaagagcaucagcagcagaaagggcuucgagaugaucugggaccccaacggcuggaccggcaccgacaacuacuucagcaucaagcaggacaucgugggcaucaacgaguggagcggcuacagcggcagcuucgugcagcaccccgagcugaccggccuggacugcaucagacccugcuucuggguggagcugaucagaggcagacccaaggagaacaccaucuggaccagcggcagcagcaucagcuucugcggcgugaacagcgacaccgugggcuggagcuggcccgacggcgccgagcugcccuucaccaucgacaaguga

SEQ ID NO: 183391 - RNA, 1410 nt, Artificial Sequence; identical to SEQ ID NO: 183218
  derived and/or modified CDS sequence (opt4) from neuraminidase__InfluenzaA__AGE15480

SEQ ID NO: 183392 - RNA, 1410 nt, Artificial Sequence; identical to SEQ ID NO: 178260
  derived and/or modified CDS sequence (opt4) from neuraminidase__InfluenzaA__AGE89270

SEQ ID NO: 183393 - RNA, 1410 nt, Artificial Sequence; identical to SEQ ID NO: 178260
  derived and/or modified CDS sequence (opt4) from neuraminidase__InfluenzaA__AGE89280

SEQ ID NO: 183394 - RNA, 1410 nt, Artificial Sequence
  derived and/or modified CDS sequence (opt4) from neuraminidase__InfluenzaA__AGE89290
augaaccccaaccagaagaucaucaccaucggcagcgugagccugaccaucagcaccaucugcuucuucaugcagaucgccauccugaucaccaccgugacccugcacuucaagcaguacgaguucaacagcccccccaacaaccaggugaugcugugcgagcccaccaucaucgagagaaacaucaccgagaucguguaccugaccaacaccaccaucgagaaggagaucugccccaagcuggccgaguacagaaacuggagcaagccccagugcgacaucaccggcuucgcccccuucagcaaggacaacagcaucagacugagcgccggcggcgacaucugggugaccagagagcccuacgugagcugcgaccccgacaagugcuaccaguucgcccugggccagggcaccacccugaacaacgugcacagcaacaacaccgugagagacagaacccccuacagaacccugcugaugaacgagcugggcgugcccuuccaccugggcaccaagcaggugugcaucgccuggagcagcagcagcugccacgacggcaaggccuggcugcacgugugcaucaccggcgacgacaagaacgccaccgccagcuucaucuacaacggcaagcugguggacagcguggugagcuggagcaaggagauccugagaacccaggagagcgagugcgugugcaucaacggcaccugcaucguggugaugaccgacggcagcgccagcggcaaggccgacaccaagauccuguucguggaggagggcaagaucgugcacaccagcacccugagcggcagcgcccagcacguggaggagugcagcugcuaccccagauaccccggcgugagaugcgugugcagagacaacuggaagggcagcaacagacccaucguggacaucaacaucaaggaccacagcaucaucagcagcuacgugugcagcggccuggugggcgacacccccagaaagaacgacagcagcagcagcagccacugccuggaccccaacaacgaggagggcggccacggcgugaagggcugggccuucgacgacggcaacgacguguggaugggcagaaccaucaacgagaccagcagacugggcuacgagaccuucaaggugaucgagggcuggagcaaccccaagagcaagcugcagaucaacagacaggugaucguggacagaggcaacagaagcggcuacagcggcaucuucagcguggagggcaagagcugcaucaacagaugcuucuacguggagcugaucagaggcagaaaggaggagaccgaggugcuguggaccagcaacagcaucgugguguucugcggcaccagcggcaccuacggcaccggcagcuggcccgacggcgccgaccugaaccugaugcccaucuga

SEQ ID NO: 183395 - RNA, 1410 nt, Artificial Sequence; identical to SEQ ID NO: 180317
  derived and/or modified CDS sequence (opt4) from neuraminidase__InfluenzaA__AGE89301

SEQ ID NO: 183396 - RNA, 1410 nt, Artificial Sequence
  derived and/or modified CDS sequence (opt4) from neuraminidase__InfluenzaA__AGE89311
augaaccccaaccagaagaucaucaccaucggcagcgugugcaugaccaucggcauggccaaccugauccugcagaucggcaacaucaucagcaucuggaucagccacagcauccagcugggcaaccagaaccagaucgagaccugcaaccagagcgugaucaccuacgagaacaacaccugggugaaccagaccuacgugaacaucagcaacaccaacuucgccgccggccagagcguggugagcgugaagcuggccggcaacagcagccugugccccgugagcggcugggccaucuacagcaaggacaacagcaucagaaucggcagcaagggcgacguguucgugaucagagagcccuucaucagcugcagcccccuggagugcagaaccuucuuccugacccagggcgcccugcugaacgacaagcacagcaacggcaccaucaaggacagaagccccuacagaacccugaugagcugccccaucggcgaggugcccagccccuacaacagcagauucgagagcguggccuggagcgccagcgccugccacgacggcaucaacuggcugaccaucggcaucagcggccccgacaacggcgccguggccgugcugaaguacaacggcaucaucaccgacaccaucaagagcuggaagaacaacauccugagaacccaggagagcgagugcgccugcgugaacggcagcugcuucaccgugaugaccgacggccccagcgacggccaggccagcuacaagaucuucagaaucgagaagggcaagaucgugaagagcguggagaugaacgcccccaacuaccacuacgaggagugcagcugcuaccccgacagcagcgagaucaccugcgugugcagagacaacuggcacggcagcaacagacccugggugagcuucaaccagaaccuggaguacagaaucggcuacaucugcagcggcaucuucggcgacaaccccagacccaacgacaagaccggcagcugcggccccgugagcagcaacggcgccaacggcgugaagggcuucagcuucaaguacggcaacggcguguggaucggcagaaccaagagcaucagcagcagaaacggcuucgagaugaucugggaccccaacggcuggaccggcaccgacaacaacuucagcaagaagcaggacaucaucggcaucaacgaguggagcggcuacagcggcagcuucgugcagcaccccgagcugaccggccuggacugcaucagacccugcuucuggguggagcugaucagaggcagacccaaggagaacaccaucuggaccagcggcagcagcaugagcuucugcggcgugaacagcgacaccgugggcuggagcuggcccgacggcgccgagcugcccuucaccaucgacaaguga

SEQ ID NO: 183397 - RNA, 1410 nt, Artificial Sequence; identical to SEQ ID NO: 181847
  derived and/or modified CDS sequence (opt4) from neuraminidase__InfluenzaA__AGE89321

SEQ ID NO: 183398 - RNA, 1410 nt, Artificial Sequence; identical to SEQ ID NO: 181203
  derived and/or modified CDS sequence (opt4) from neuraminidase__InfluenzaA__AGE89332

SEQ ID NO: 183399 - RNA, 1410 nt, Artificial Sequence; identical to SEQ ID NO: 180317
  derived and/or modified CDS sequence (opt4) from neuraminidase__InfluenzaA__AGE89343

SEQ ID NO: 183400 - RNA, 1410 nt, Artificial Sequence
  derived and/or modified CDS sequence (opt4) from neuraminidase__InfluenzaA__AGE89353
augaaccccaaccagaagaucaucaccaucggcagcgugagccugaccaucagcaccaucugcuucuucaugcagaucgccauccugaucaccaccgugacccugcacuucaagcaguacgaguucaacagcccccccaacaaccaggugaugcugugcgagcccaccaucaucgagagaaacaucaccgagaucguguaccugaccaacaucaccaucgagaaggagaucugccccaagcuggccgaguacagaaacuggagcaagccccagugcgacaucaccggcuucgcccccuucagcaaggacaacagcaucagacugagcgccggcggcgacaucugggugaccagagagcccuacgugagcugcgaccccgacaagugcuaccaguucgcccugggccagggcaccacccugaacaacgugcacagcaacaacaccgugagagacagaacccccuacagaacccugcugaugaacgagcugggcgugcccuuccaccugggcaccaagcaggugugcaucgccuggagcagcagcagcugccacgacggcaaggccuggcugcacgugugcaucaccggcgacgacaagaacgccaccgccagcuucaucuacaacggcagacugguggacagcguggugagcuggagcaaggagauccugagaacccaggagagcgagugcgugugcaucaacggcaccugcaccguggugaugaccgacggcagcgccagcggcaaggccgacaccaagauccuguucaucgaggagggcaagaucgugcacaccagcacccugagcggcagcgcccagcacguggaggagugcagcugcuaccccagauaccccggcgugagaugcgugugcagagacaacuggaagggcagcaacagacccaucguggacaucaacaucaaggaccacagcaucgugagcagcuacgugugcagcggccuggugggcgacacccccagaaagaacgacagcagcagcagcagccacugccuggaccccaacaacgaggagggcggccacggcgugaagggcugggccuucgacgacggcaacgacguguggaugggcagaaccaucaacgagaccagcagacugggcuacgagaccuucaaggugaucgagggcuggagcaaccccaagagcaagcugcagaucaacagacaggugaucguggacaagggcaacagaagcggcuacagcggcaucuucagcguggagggcaagagcugcaucaacagaugcuucuacguggagcugaucagaggcagaaaggaggagaccgaggugcuguggaccagcaacagcaucgugguguucugcggcaccagcggcaccuacggcaccggcagcuggcccgacggcgccgaccugaaccugaugcccaucuga

SEQ ID NO: 183401 - RNA, 1410 nt, Artificial Sequence; identical to SEQ ID NO: 181054
  derived and/or modified CDS sequence (opt4) from neuraminidase__InfluenzaA__AGE89364

SEQ ID NO: 183402 - RNA, 1410 nt, Artificial Sequence; identical to SEQ ID NO: 181847
  derived and/or modified CDS sequence (opt4) from neuraminidase__InfluenzaA__AGE89374

SEQ ID NO: 183403 - RNA, 1410 nt, Artificial Sequence
  derived and/or modified CDS sequence (opt4) from neuraminidase__InfluenzaA__AGE89385
augaaccccaaccagaagaucaucaccaucggcagcgugugcaugaccaucggcauggccaaccugauccugcagaucggcaacaucaucagcaucuggaucagccacagcauccagcugggcaaccagaaccagaucgagaccugcaaccagagcgugaucaccuacgagaacaacaccugggugaaccagaccuacgugaacaucagcaacaccaacuucgccgccggccagagcguggccagcgugaagcuggccggcaacagcagccugugccccgugagcggcugggccaucuacagcaaggacaacagcaucagaaucggcagcaagggcgacguguucgugaucagagagcccuucaucagcugcagcccccuggagugcagaaccuucuuccugacccagggcgcccugcugaacgacaagcacagcaacggcaccaucaaggacagaagccccuacagaacccugaugagcugccccaucggcgaggugcccagccccuacaacagcagauucgagagcguggccuggagcgccagcgccugccacgacggcaucaacuggcugaccaucggcaucagcggccccgacaacggcgccguggccgugcugaaguacaacggcaucaucaccgacaccaucaagagcuggagaaacaacauccugagaacccaggagagcgagugcgccugcgugaacggcagcugcuucaccaucaugaccgacggccccagcgacggccaggccagcuacaagaucuucagaaucgagaagggcaagaucgugaagagcguggagaugaacgcccccaacuaccacuacgaggagugcagcugcuaccccgacagcagcgagaucaccugcgugugcagagacaacuggcacggcagcaacagacccugggugagcuucaaccagaaccuggaguaccagaucggcuacaucugcagcggcaucuucggcgacaaccccagacccaacgacaagaccggcagcugcggccccgugagcagcaacggcgccaacggcgugaagggcuucagcuucaaguacggcaacggcguguggaucggcagaaccaagagcaucagcagcagaaagggcuucgagaugaucugggaccccaacggcuggaccggcaccgacaacaacuucagcaucaagcaggacaucgugggcaucaacgaguggagcggcuacagcggcagcuucgugcagcaccccgagcugaccggccuggacugcaucagacccugcuucuggguggagcugaucagaggcagacccaaggagaacaccaucuggaccagcggcagcagcaucagcuucugcggcgugaacagcgacaccgugggcuggagcuggcccgacggcgccgagcugcccuucaccaucgacaaguga

SEQ ID NO: 183404 - RNA, 1410 nt, Artificial Sequence
  derived and/or modified CDS sequence (opt4) from neuraminidase__InfluenzaA__AGE89395
augaaccccaaccagaagaucaucaccaucggcagcgugagccugaccaucagcaccaucugcuucuucaugcagaucgccauccugaucaccaccgugacccugcacuucaagcaguacgaguucaacagcccccccaacaaccaggugaugcugugcgagcccaccaucaucgagagaaacaucaccgagaucguguaccugaccaacaccaccaucgagaaggagaucugccccaagcccgccgaguacagaaacuggagcaagccccagugcgacaucaccggcuucgcccccuucagcaaggacaacagcaucagacugagcgccggcggcgacaucugggugaccagagagcccuacgugagcugcgaccccgacaagugcuaccaguucgcccugggccagggcaccacccugaacaacgugcacagcaacaacaccgugagagacagaacccccuacagaacccugcugaugaacgagcugggcgugcccuuccaccugggcaccaagcaggugugcaucgccuggagcagcagcagcugccacgacggcaaggccuggcugcacgugugcaucaccggcgacgacaagaacgccaccgccagcuucaucuacaacggcagacugguggacagcguggugagcuggagcaaggagauccugagaacccaggagagcgagugcgugugcaucaacggcaccugcaccguggugaugaccgacggcagcgccagcggcaaggccgacaccaagauccuguucaucgaggagggcaagaucgugcacaccagcacccugagcggcagcgcccagcacguggaggagugcagcugcuaccccagauaccccggcgugagaugcgugugcagagacaacuggaagggcagcaacagacccaucguggacaucaacaucaaggaccacagcaucgugagcagcuacgugugcagcggccuggugggcgacacccccagaaagaacgacagcagcagcagcagccacugccuggaccccaacaacgaggagggcggccacggcgugaagggcugggccuucgacgacggcaacgacguguggaugggcagaaccaucaacgagaccagcagacugggcuacgagaccuucaaggugaucgagggcuggagcaaccccaagagcaagcugcagaucaacagacaggugaucguggacagaggcaacagaagcggcuacagcggcaucuucagcguggagggcaagagcugcaucaacagaugcuucuacguggagcugaucagaggcagaaaggaggagaccgaggugcuguggaccagcaacagcaucgugguguucugcggcaccagcggcaccuacggcaccggcagcuggcccgacggcgccgaccugaaccugaugcccaucuga

SEQ ID NO: 183405 - RNA, 1410 nt, Artificial Sequence; identical to SEQ ID NO: 178260
  derived and/or modified CDS sequence (opt4) from neuraminidase__InfluenzaA__AGE89425

SEQ ID NO: 183406 - RNA, 1410 nt, Artificial Sequence; identical to SEQ ID NO: 179578
  derived and/or modified CDS sequence (opt4) from neuraminidase__InfluenzaA__AGE89722

SEQ ID NO: 183407 - RNA, 1410 nt, Artificial Sequence
  derived and/or modified CDS sequence (opt4) from neuraminidase__InfluenzaA__AGE89733
augaaccccaaccagaagaucaucaccaucggcagcgugugcaugaccaucggcauggccaaccugauccugcagaucggcaacaucaucagcaucuggaucagccacagcauccagcugggcaaccagaaccagaucgagaccugcaaccagagcgugaucaccuacgagaacaacaccugggugaaccagaccuacgugaacaucagcaacaccaacuucgccgccggccagagcguggugagcgugaagcuggccggcaacagcagccugugccccgugagcggcugggccaucuacagcaaggacaacagcaucagaaucggcagcaagggcgacguguucgugaucagagagcccuucaucagcugcagcccccuggagugcagaaccuucuuccugacccagggcgcccugcugaacgacaagcacagcaacggcaccaucaaggacagaagccccuacagaacccugaugagcugccccaucggcgaggugcccagccccuacaacagcagauucgagagcguggccuggagcgccagcgccugccacgacggcaucaacuggcugaccaucggcaucagcggccccgacaacggcgccguggccgugcugaaguacaacggcaucaucaccgacaccaucaagagcuggagaaacaacauccugagaacccaggagagcgagugcgccugcgugaacggcagcugcuucaccaucaugaccgacggccccaacgacggccaggccagcuacaagaucuucagaaucgagaagggcaagaucgugaagagcguggagaugaacgcccccaacuaccacuacgaggagugcagcugcuaccccgacagcagcgagaucaccugcgugugcagagacaacuggcacggcagcaacagacccugggugagcuucaaccagaaccuggaguaccagaucggcuacaucugcagcggcaucuucggcgacaaccccagacccaacgacaagaccggcagcugcggccccgugagcagcaacggcgccaacggcgugaagggcuucagcuucaaguacggcaacggcguguggaucggcagaaccaagagcaucagcagcagaaagggcuucgagaugaucugggaccccaacggcuggaccggcaccgacaacaacuucagcaucaagcaggacaucgugggcaucaacgaguggagcggcuacagcggcagcuucgugcagcaccccgagcugaccggccuggacugcaucagacccugcuucuggguggagcugaucagaggcagacccaaggagaacaccaucuggaccagcggcagcagcaucagcuucugcggcgugaacagcgacaccgugggcuggagcuggcccgacggcgccgagcugcccuucaccaucgacaaguga

SEQ ID NO: 183408 - RNA, 1410 nt, Artificial Sequence
  derived and/or modified CDS sequence (opt4) from neuraminidase__InfluenzaA__AGE89743
augaaccccaaccagaagaucaucaccaucggcagcgugagccugaccaucagcaccaucugcuucuucaugcagaucgccauccugaucaccaccgugacccugcacuucaagcaguacgaguucaacagcccccccaacaaccaggugaugcugugcgagcccaccaucaucgagagaaacaucaccgagaucguguaccugaccaacaccaccaucgagaaggagaucugccccaagcuggccgaguacagaaacuggagcaagccccagugcgacaucaccggcuucgcccccuucagcaaggacaacagcaucagacugagcgccggcggcgacaucugggugaccagagagcccuacgugagcugcgaccccgacaagugcuaccaguucgcccugggccagggcaccacccugaacaacgugcacagcaacaacaccgugagagacagaacccccuacagaacccugcugaugaacgagcugggcgugcccuuccaccugggcaccaagcaggugugcaucgccuggagcagcagcagcugccacgacggcaaggccuggcugcacgugugcaucaccggcgacgacaagaacgccaccgccagcuucaucuacaacggcagacugguggacagcguggugagcuggagcaaggagauccugagaacccaggagagcgagugcgugugcaucaacggcaccugcaccguggugaugaccgacggcagcgccagcggcaaggccgacaccaagauccuguucaucgaggagggcaagaucgugcacaccagcacccugagcggcagcgcccagcacguggaggagugcagcugcuaccccagauaccccggcgugagaugcgugugcagagacaacuggaagggcagcaacagacccaucguggacaucaacaucaaggaccacagcaucgugagcagcuacgugugcagcggccuggugggcgacacccccagaaagaacgacagcagcagcagcagccacugccuggaccccaacaacgaggagggcggccacggcgugaagggcugggccuucgacgacggcaacgacguguggaugggcagaaccaucaacgagaccagcagacugggcuacgagaccuucaaggugaucgagggcuggagcaaccccaagagcaagcugcagaucaacagacaggugaucguggacaaggacaacagaagcggcuacagcggcaucuucagcguggagggcaagagcugcaucaacagaugcuucuacguggagcugaucagaggcagaaaggaggagaccgaggugcuguggaccagcaacagcaucgugguguucugcggcaccagcggcaccuacggcaccggcagcuggcccgacggcgccgaccugaaccugaugcccaucuga

SEQ ID NO: 183409 - RNA, 1410 nt, Artificial Sequence; identical to SEQ ID NO: 181847
  derived and/or modified CDS sequence (opt4) from neuraminidase__InfluenzaA__AGE89754

SEQ ID NO: 183410 - RNA, 1410 nt, Artificial Sequence; identical to SEQ ID NO: 181847
  derived and/or modified CDS sequence (opt4) from neuraminidase__InfluenzaA__AGE89765

SEQ ID NO: 183411 - RNA, 1410 nt, Artificial Sequence
  derived and/or modified CDS sequence (opt4) from neuraminidase__InfluenzaA__AGG13414
augaaccccaaccagaagaucaucaccaucggcagcgugagccugaccaucagcaccaucugcuucuucaugcagaucgccauccugaucaccaccgugacccugcacuucaagcaguacgaguucaacagcccccccaacaaccaggugaugcugugcgagcccaccaucaucgagagaaacaucaccgagaucguguaccugaccaacaccaccaucgagaaggagaucugccccaagcccgccgaguacagaaacuggagcaagccccagugcgacaucaccggcuucgcccccuucagcaaggacaacagcaucagacugagcgccggcggcgacaucugggugaccagagagcccuacgugagcugcgaccccgacaagugcuaccaguucgcccugggccagggcaccacccugaacagcgugcacagcaacaacaccgugagagacagaacccccuacagaacccugcugaugaacgagcugggcgugcccuuccaccugggcaccaagcaggugugcaucgccuggagcagcagcagcugccacgacggcaaggccuggcugcacgugugcaucaccggcgacgacaagaacgccaccgccagcuucaucuacaacggcagacugguggacagcguggugagcuggagcaaggagauccugagaacccaggagagcgagugcgugugcaucaacggcaccugcaccguggugaugaccgacggcagcgccagcggcaaggccgacaccaagauccuguucaucgaggagggcaagaucgugcacaccagcacccugagcggcagcgcccagcacguggaggagugcagcugcuaccccagauaccccggcgugagaugcgugugcagagacaacuggaagggcagcaacagacccaucguggacaucaacaucaaggaccacagcaucgugagcagauacgugugcagcggccuggugggcgacacccccagaaagaacgacagcagcagcagcagccacugccuggaccccaacaacgaggagggcggccacggcgugaagggcugggccuucgacgacggcaacgacguguggaugggcagaaccaucaacgagaccagcagacugggcuacgagaccuucaaggugaucgagggcuggagcaaccccaagagcaagcugcagaucaacaagcaggugaucguggacagaggcgacagaagcggcuacagcggcaucuucagcguggagggcaagagcugcaucaacagaugcuucuacguggagcugaucagaggcagaaaggaggagaccgaggugcuguggaccagcaacagcaucgugguguucugcggcaccagcggcaccuacggcaccggcagcuggcccgacggcgccgaccugaaccugaugcccaucuga

SEQ ID NO: 183412 - RNA, 1410 nt, Artificial Sequence; identical to SEQ ID NO: 182206
  derived and/or modified CDS sequence (opt4) from neuraminidase__InfluenzaA__AGG13426

SEQ ID NO: 183413 - RNA, 1410 nt, Artificial Sequence; identical to SEQ ID NO: 182206
  derived and/or modified CDS sequence (opt4) from neuraminidase__InfluenzaA__AGG13438

SEQ ID NO: 183414 - RNA, 1410 nt, Artificial Sequence
  derived and/or modified CDS sequence (opt4) from neuraminidase__InfluenzaA__AGG13498
augaaccccaaccagaagaucaucaccaucggcagcgugagccugaccaucagcaccaucugcuucuucaugcagaucgccauccugaucaccaccgugacccugcacuucaagcaguacgaguucaacagcccccccaacaaccaggugaugcugugcgagcccaccaucaucgagagaaacaucaccgagaucguguaccugaccaacaccaccaucgagaaggagaucugccccaagcuggccgaguacagaaacuggagcaagccccagugcgacaucaccggcuucgcccccuucagcaaggacaacagcaucagacugagcgccggcggcgacaucugggugaccagagagcccuacgugagcugcgaccccgacaagugcuaccaguucgcccugggccagggcaccacccugaacaacgugcacagcaacaacaccgugagagacagaacccccuacagaacccugcugaugaacgagcugggcgugcccuuccaccugggcaccaagcaggugugcaucgccuggagcagcagcagcugccacgacggcaaggccuggcugcacgugugcaucaccggcgacgacaagaacgccaccgccagcuucaucuacaacggcagacugguggacagcguggugagcuggagcaaggacauccugagaacccaggagagcgagugcgugugcaucaacggcaccugcgccguggugaugaccgacggcagcgccagcggcaaggccgacaccaagauccuguucaucgaggagggcaagaucgugcacaccagcacccugagcggcagcgcccagcacguggaggagugcagcugcuaccccagauaccccggcgugagaugcgugugcagagacaacuggaagggcagcaacagacccaucguggacaucaacaucaaggaccacagcaucgugagcagcuacgugugcagcggccuggugggcgacacccccagaaagaacgacagcagcagcagcggccacugccuggaccccaacaacgaggagggcggccacggcgugaagggcugggccuucgacgacggcaacgacguguggaugggcagaaccaucaacgagaccagcagacugggcuacgagaccuucaaggugaucgagggcuggagcaaccccaagagcaagcugcagaucaacagacaggugaucguggacagaggcaacagaagcggcuacagcggcaucuucagcguggagggcaagaacugcaucaacagaugcuucuacguggagcugaucagaggcagaaaggaggagaccgaggugcuguggaccagcaacagcaucgugguguucugcggcaccagcggcaccuacggcaccggcagcuggcccgacggcgccgaccugaaccugaugcccaucuga

SEQ ID NO: 183415 - RNA, 1410 nt, Artificial Sequence; identical to SEQ ID NO: 182206
  derived and/or modified CDS sequence (opt4) from neuraminidase__InfluenzaA__AGG13510

SEQ ID NO: 183416 - RNA, 1410 nt, Artificial Sequence; identical to SEQ ID NO: 183414
  derived and/or modified CDS sequence (opt4) from neuraminidase__InfluenzaA__AGG13522

SEQ ID NO: 183417 - RNA, 1410 nt, Artificial Sequence
  derived and/or modified CDS sequence (opt4) from neuraminidase__InfluenzaA__AGG13534
augaaccccaaccagaagaucaucaccaucggcagcgugagccugaccaucagcaccgugugcuucuucaugcagaucgccauccugaucaccaccgugacccugcacuucaagcaguacgaguucaacagcccccccaacaaccaggugaugcugugcgagcccaccaucaucgagagaaacaucaccgagaucguguaccugaccaacaccaccaucgagaaggagaucugccccaagcccgccgaguacagaaacuggagcaagccccagugcggcaucaccggcuucgcccccuucagcaaggacaacagcaucagacugagcgccggcggcgacaucugggugaccagagagcccuacgugagcugcgaccccgacaagugcuaccaguucgcccugggccagggcaccacccugaacaacgugcacagcaacaacaccgugagagacagaacccccuacagaacccugcugaugaacgagcugggcgugcccuuccaccugggcaccaagcaggugugcaucgccuggagcagcagcagcugccacgacggcaaggccuggcugcacgugugcaucaccggcgacgacaagaacgccaccgccagcuucaucuacaacggcagacugguggacagcguggugagcuggagcaaggagauccugagaacccaggagagcgagugcgugugcaucaacggcaccugcaccguggugaugaccgacggcagcgccagcggcaaggccgacaccaagauccuguucaucgaggagggcaagaucgugcacaccagcacccugagcggcagcgcccagcacguggaggagugcagcugcuaccccagauaccccggcgugagaugcgugugcagagacaacuggaagggcagcaacagacccaucguggacaucaacaucaaggaccacagcaucgugagcagcuacgugugcagcggccuggugggcgacacccccagaaagaacgacagcagcagcagcagccacugccuggaccccaacaacgaggagggcggccacggcgugaagggcugggccuucgacgacggcaacgacguguggaugggcagaaccaucaacgagaccagcagacugggcuacgagaccuucaaggugaucgagggcuggagcaaccccaagagcaagcugcagaucaacagacaggugaucguggacagaggcgacagaagcggcuacagcggcaucuucagcguggagggcaagagcugcaucaacagaugcuucuacguggagcugaucagaggcagaaaggaggagaccgaggugcuguggaccagcaacagcaucgugguguucugcggcaccagcggcaccuacggcaccggcagcuggcccgacggcgccgaccugaaccugaugcccaucuga

SEQ ID NO: 183418 - RNA, 1410 nt, Artificial Sequence
  derived and/or modified CDS sequence (opt4) from neuraminidase__InfluenzaA__AGG13546
augaaccccaaccagaagaucaucaccaucggcagcgugagccugaccaucagcaccaucugcuucuucaugcagaucgccauccugaucaccaccgugacccugcacuucaagcaguacgaguucaacagcccccccaacaaccaggugaugcugugcgagcccaccaucaucgagagaaacaucaccgagaucguguaccugaccaacaccaccaucgagaaggagaucugccccaagcccgccgaguacagaaacuggagcaagccccagugcggcaucaccggcuucgcccccuucagcaaggacaacagcaucagacugagcgccggcggcgacaucugggugaccagagagcccuacgugagcugcgaccccgacaagugcuaccaguucgcccugggccagggcaccacccugaacaacgugcacagcaacaacaccgugagagacagaacccccuacagaacccugcugaugaacgagcugggcgugcccuuccaccugggcaccaagcaggugugcaucgccuggagcagcagcagcugccacgacggcaaggccuggcugcacgugugcaucaccggcgacgacaagaacgccaccgccagcuucaucuacaacggcagacugguggacagcguggugagcuggagcaaggagauccugagaacccaggagagcgagugcgugugcaucaacggcaccugcaccguggugaugaccgacggcagcgccagcggcaaggccgacaccaagauccuguucaucgaggagggcaagaucgugcacaccagcacccugagcggcagcgcccagcacguggaggagugcagcugcuaccccagauaccccggcgugagaugcgugugcagagacaacuggagaggcagcaacagacccaucguggacaucaacaucaaggaccacagcaucgugagcagcuacgugugcagcggccuggugggcgacacccccagaaagaacgacagcagcagcagcagccacugccuggaccccaacaacgaggagggcggccacggcgugaagggcugggccuucgacgacggcaacgacguguggaugggcagaaccaucaacgagaccagcagacugggcuacgagaccuucaaggugaucgagggcuggagcaaccccaagagcaagcugcagaucaacagacaggugaucguggacagaagcgacagaagcggcuacagcggcaucuucagcguggagggcaagagcugcaucaacagaugcuucuacguggagcugaucagaggcagaaaggaggagaccgaggugcuguggaccagcaacagcaucgugguguucugcggcaccagcggcaccuacggcaccggcagcuggcccgacggcgccgaccugaaccugaugcccaucuga

SEQ ID NO: 183419 - RNA, 1410 nt, Artificial Sequence; identical to SEQ ID NO: 182206
  derived and/or modified CDS sequence (opt4) from neuraminidase__InfluenzaA__AGG13558

SEQ ID NO: 183420 - RNA, 1410 nt, Artificial Sequence; identical to SEQ ID NO: 182206
  derived and/or modified CDS sequence (opt4) from neuraminidase__InfluenzaA__AGG13570

SEQ ID NO: 183421 - RNA, 1410 nt, Artificial Sequence
  derived and/or modified CDS sequence (opt4) from neuraminidase__InfluenzaA__AGG13582
augaaccccaaccagaagaucaucaccaucggcagcgugagccugaccaucagcaccaucugcuucuucaugcagaucgccauccugaucaccaccgugacccugcacuucaagcaguacgaguucaacagcccccccaacaaccaggugaugcugugcgagcccaccaucaucgagagaaacaucaccgagaucguguaccugaccaacaccaccaucgagaaggagaucugccccaagcccgccgaguacagaaacuggagcaagccccagugcggcaucaccggcuucgcccccuucagcaaggacaacagcaucagacugagcgccggcggcgacaucugggugaccagagagcccuacgugagcugcgaccccgacaagugcuaccaguucgcccugggccagggcaccacccugaacaacgugcacagcaacaacaccgugagagacagaacccccuacagaacccugcugaugaacgagcugggcgugcccuuccaccugggcaccaagcaggugugcaucgccuggagcagcagcagcugccacgacggcaaggccuggcugcacgugugcaucaccggcgaggacaagaacgccaccgccagcuucaucuacaacggcagacugguggacagcguggugagcuggagcaaggagacccugagaacccaggagagcgagugcgugugcaucaacggcaccugcaccguggugaugaccgacggcagcgccagcggcaaggccgacaccaagauccuguucaucgaggagggcaagaucgugcacaccagcacccugagcggcagcgcccagcacguggaggagugcagcugcuaccccagauaccccggcgugagaugcgugugcagagacaacuggaagggcagcaacagacccaucguggacaucaacaucaaggaccacagcaucgugagcagcuacgugugcagcggccuggugggcgacacccccagaaagaacgacagcagcagcagcagccacugccuggaccccaacaacgaggagggcggccacggcgugaagggcugggccuucgacgacggcaacgacguguggaugggcagaaccaucaacgagaccagcagacugggcuacgagaccuucaaggugaucgagggcuggagcaaccccaagagcaagcugcagaucaacagacaggugaucguggacagaggcgacagaagcggcuacagcggcaucuucagcguggagggcaagagcugcaucaacagaugcuucuacguggagcugaucagaggcagaaaggaggagaccgaggugcuguggaccagcaacagcaucgugguguucugcggcaccagcggcaccuacggcaccggcagcuggcccgacggcgccgaccugaaccugaugcccaucuga

SEQ ID NO: 183422 - RNA, 1410 nt, Artificial Sequence; identical to SEQ ID NO: 182206
  derived and/or modified CDS sequence (opt4) from neuraminidase__InfluenzaA__AGG13606

SEQ ID NO: 183423 - RNA, 1410 nt, Artificial Sequence
  derived and/or modified CDS sequence (opt4) from neuraminidase__InfluenzaA__AGG13618
augaaccccaaccagaagaucaucaccaucggcagcgugagccugaccaucagcaccaucugcuucuucaugcagaucgccauccugaucaccaccgugacccugcacuucaagcaguacgaguucaacagcccccccaacaaccaggugaugcugugcgagcccaccaucaucgagagaaacaucaccgagaucguguaccugaccaacaccaccaucgagaaggagaucugccccaagcccgccgaguacagaaacuggagcaagccccagugcggcaucaccggcuucgcccccuucagcaaggacaacagcaucagacugagcgccggcggcgacaucugggugaccagagagcccuacgugagcugcgaccccgacaagugcuaccaguucgcccugggccagggcaccacccugaacaacgugcacagcaacaacaccgugagagacagaacccccuacagaacccugcugaugaacgagcugggcgugcccuuccaccugggcaccaagcaggugugcaucgccuggagcagcagcagcugccacgacggcaaggccuggcugcacgugugcaucaccggcgacgacaagaacgccaccgccagcuucaucuacaacggcagacugguggacagcguggugagcuggagcaaggagauccugagaacccaggagagcgagugcgugugcaucaacggcaccugcaccguggugaugaccgacggcagcgccagcggcaaggccgacaccaagauccuguucaucgaggagggcaagaucgugcacaccagcacccugagcggcagcgcccagcacguggaggagugcagcugcuaccccagauaccccggcgugagaugcgugugcagagacaacuggaagggcagcaacagacccaucguggacaucaacaucaaggaccacagcaucgugagcagcuaccugugcagcggccuggugggcgacacccccagaaagaacgacggcagcagcagcagccacugccuggaccccaacaacgaggagggcggccacggcgugaagggcugggccuucgacgacggcaacgacguguggaugggcagaaccaucaacgagaccagcagacugggcuacgagaccuucaaggugaucgagggcuggagcaaccccaagagcaagcugcagaucaacagacagaucaucguggacagaggcgacagaagcggcuacagcggcaucuucagcguggagggcaagagcugcaucaacagaugcuucuacguggagcugaucagaggcagaaaggaggagaccgaggugcuguggaccagcaacagcaucgugguguucugcggcaccagcggcaccuacggcaccggcagcuggcccgacggcgccgaccugaaccugaugcccaucuga

SEQ ID NO: 183424 - RNA, 1410 nt, Artificial Sequence
  derived and/or modified CDS sequence (opt4) from neuraminidase__InfluenzaA__AGG13630
augaaccccaaccagaagaucaucaccaucggcagcgugagccugaccaucagcaccaucugcuucuucaugcagaucgccauccugaucaccaccgugacccugcacuucaagcaguacgaguucaacagcccccccaacaaccaggugaugcugugcgagcccaccaucaucgagagaaacaucaccgagaucguguaccugaccaacaccaccaucgagaaggagaucugccccaagcccgccgaguacagaaacuggagcaagccccagugcggcaucaccggcuucgcccccuucagcaaggacaacagcaucagacugagcgccggcggcgacaucugggugaccagagagcccuacgugagcugcgaccccgacaagugcuaccaguucgcccugggccagggcaccacccugaacaacgugcacagcaacaacaccgugagagacagaacccccuacagaacccugcugaugaacgagcugggcgugcccuuccaccugggcaccaagcaggugugcaucgccuggagcagcagcagcugccacgacggcaaggccuggcugcacgugugcaucaccggcgaggacaagaacgccaccgccagcuucaucuacaacggcagacugguggacagcguggugagcuggagcaaggagauccugagaacccaggagagcgagugcgugugcaucaacggcaccugcaccguggugaugaccgacggcagcgccagcggcaaggccgacaccaagauccuguucaucgaggagggcaagaucgugcacaccagcacccugagcggcagcgcccagcacguggaggagugcagcugcuaccccagauaccccggcgugagaugcgugugcagagacaacuggaagggcagcaacagacccaucguggacaucaacaucaaggaccacagcaucgugagcagcuacgugugcagcggccuggugggcgacacccccagaaagaacgacagcagcagcagcagccacugccuggaccccaacaacgaggagggcggccacggcgugaagggcugggccuucgacgacggcaacgacguguggaugggcagaaccaucaacgagaccagcagacugggcuacgagaccuucaaggugaucgagggcuggagcaaccccaagagcaagcugcagaucaacagacaggugaucguggacagaggcgacagaagcggcuacagcggcaucuucagcguggagggcaagagcugcaucaacagaugcuucuacguggagcugaucagaggcagaaaggaggagaccgaggugcuguggaccagcaacagcaucgugguguucugcggcaccagcggcaccuacggcaccggcagcuggcccgacggcgccgaccugaaccugaugcccaucuga

SEQ ID NO: 183425 - RNA, 1410 nt, Artificial Sequence; identical to SEQ ID NO: 182206
  derived and/or modified CDS sequence (opt4) from neuraminidase__InfluenzaA__AGG13642

SEQ ID NO: 183426 - RNA, 1410 nt, Artificial Sequence
  derived and/or modified CDS sequence (opt4) from neuraminidase__InfluenzaA__AGG13654
augaaccccaaccagaagaucaucaccaucggcagcgugagccugaccaucagcaccaucugcuucuucaugcagaucgccauccugaucaccaccgugacccugcacuucaagcaguacgaguucaacagcccccccaacaaccaggugaugcugugcgagcccaccaucaucgagagaaacaucaccgagaucguguaccugaccaacaccaccaucgagaaggagaucugccccaagcuggccgaguacagaaacuggagcaagccccagugcgacaucaccggcuucgcccccuucagcaaggacaacagcaucagacugagcgccggcggcgacaucugggugaccagagagcccuacgugagcugcgaccccgacaagugcuaccaguucgcccugggccagggcaccacccugaacaacgugcacagcaacaacaccgugagagacagaacccccuacagaacccugcugaugaacgagcugggcgugcccuuccaccugggcaccaagcaggugugcaucgccuggagcagcagcagcugccacgacggcaaggccuggcugcacgugugcaucaccggcgacgacaagaacgccaccgccagcuucaucuacaacggcagacugguggacagcguggugagcuggagcaaggacauccugagaacccaggagagcgagugcgugugcaucaacggcaccugcgccguggugaugaccgacggcagcgccagcggcaaggccgacaccaagauccuguucaucgaggagggcaagaucgugcagaccagcacccugagcggcagcgcccagcacguggaggagugcagcugcuaccccagauaccccggcgugagaugcgugugcagagacaacuggaagggcagcaacagacccaucguggacaucaacaucaaggaccacagcaucgugagcagcuacgugugcagcggccuggugggcgacacccccagaaagaacgacagcagcagcagcggccacugccuggaccccaacaacgaggagggcggccacggcgugaagggcugggccuucgacgacggcaacgacguguggaugggcagaaccaucaacgagaccagcagacugggcuacgagaccuucaaggugaucgagggcuggagcaaccccaagagcaagcugcagaucaacagacaggugaucguggacagaggcaacagaagcggcuacagcggcaucuucagcguggagggcaagaacugcaucaacagaugcuucuacguggagcugaucagaggcagaaaggaggagaucgaggugcuguggaccagcaacagcaucgugguguucugcggcaccagcggcaccuacggcaccggcagcuggcccgacggcgccgaccugaaccugaugcccaucuga

SEQ ID NO: 183427 - RNA, 1410 nt, Artificial Sequence; identical to SEQ ID NO: 183417
  derived and/or modified CDS sequence (opt4) from neuraminidase__InfluenzaA__AGG13666

SEQ ID NO: 183428 - RNA, 1410 nt, Artificial Sequence
  derived and/or modified CDS sequence (opt4) from neuraminidase__InfluenzaA__AGG13678
augaaccccaaccagaagaucaucaccaucggcagcgugagccugaccaucagcaccaucugcuucuucaugcagaucgccauccugaucaccaccgugacccugcacuucaagcaguacgaguucaacagcccccccaacaaccaggugaugcugugcgagcccaccaucaucgagagaaacaucaccgagaucguguaccugaccaacaccaccaucgagaaggagaucugccccaagcccgccgaguacagaaacuggagcaagccccagugcggcaucaccggcuucgccccccugagcaaggacaacagcaucagacugagcgccggcggcgacaucugggugaccagagagcccuacgugagcugcgaccccgacaagugcuaccaguucgcccugggccagggcaccacccugaacaacgugcacagcaacaacaccgugagagacagaacccccuacagaacccugcugaugaacgagcugggcgugcccuuccaccugggcaccaagcaggugugcaucgccuggagcagcagcagcugccacgacggcaaggccuggcugcacgugugcaucaccggcgacgacaagaacgccaccgccagcuucaucuacaacggcagacugguggacagcguggugagcuggagcaaggagauccugagaacccaggagagcgagugcgugugcaucaacggcaccugcaccguggugaugaccgacggcagcgccagcggcaaggccgacaccaagauccuguucaucgaggagggcaagaucgugcacaccagcacccugagcggcagcgcccagcacguggaggagugcagcugcuaccccagauaccccggcgugagaugcgugugcagagacaacuggaagggcagcaacagacccaucguggacaucaacaucaaggaccacagcaucgugagcagcuacgugugcagcggccuggugggcgacacccccagaaagaacgacagcagcagcagcagccacugccugggccccaacaacgaggagggcggccacggcgugaagggcugggccuucgacgacggcaacgacguguggaugggcagaaccaucaacgagaccagcagacugggcuacgagaccuucaaggugaucgagggcuggagcaaccccaagagcaagcugcagaucaacagacaggugaucguggacagaggcgacagaagcggcuacagcggcaucuucagcguggagggcaagagcugcaucaacagaugcuucuacguggagcugaucagaggcagaaaggaggagaccgaggugcuguggaccagcaacagcaucgugguguucugcggcaccgccggcaccuacggcaccggcagcuggcccgacggcgccgaccugaaccugaugcccaucuga

SEQ ID NO: 183429 - RNA, 1410 nt, Artificial Sequence; identical to SEQ ID NO: 182206
  derived and/or modified CDS sequence (opt4) from neuraminidase__InfluenzaA__AGG13690

SEQ ID NO: 183430 - RNA, 1410 nt, Artificial Sequence
  derived and/or modified CDS sequence (opt4) from neuraminidase__InfluenzaA__AGG13702
augaaccccaaccagaagaucaucaccaucggcagcgugagccugaccaucagcaccaucugcuucuucaugcagaucgccauccugaucaccaccgugacccugcacuucaagcaguacgaguucaacagcccccccaacaaccaggugaugcugugcgagcccaccaucaucgagagaaacaucaccgagaucguguaccugaccaacaccaccaucgagaaggagaucugccccaagcccgccgaguacagaaacuggagcaagccccagugcgacaucaccggcuucgcccccuucagcaaggacaacagcaucagacugagcgccggcggcgacaucugggugaccagagagcccuacgugagcugcgaccccgacaagugcuaccaguucgcccugggccagggcaccacccugaacaacgugcacagcaacaacaccgugagagacagaacccccuacagaacccugcugaugaacgagcugggcgugcccuuccaccugggcaccaagcaggugugcaucgccuggagcagcagcagcugccacgacggcaaggccuggcugcacgugugcaucaccggcgacgacaagaacgccaccgccagcuucaucuacaacggcagacugguggacagcguggugagcuggagcaaggagauccugagaacccaggagagcgagugcgugugcaucaacggcaccugcaccguggugaugaccgacggcagcgccagcggcaaggccgacaccaagauccuguucaucgaggagggcaagaucgugcacaccagcacccugagcggcaacgcccagcacguggaggagugcagcugcuaccccagauaccccggcgugagaugcgugugcagagacaacuggaagggcagcaacagacccaucguggacaucaacaucaaggaccacagcaucgugagcagauacgugugcagcggccuggugggcgacacccccagaaagaacgacagcagcagcagcagccacugccuggaccccaacaacgaggagggcggccacggcgugaagggcugggccuucgacgacggcaacgacguguggaugggcagaaccaucaacgagaccagcagacugggcuacgagaccuucaaggugaucgagggcuggagcaaccccaagagcaagcugcagaucaacagacaggugaucguggacagaggcgacagaagcggcuacagcggcaucuucagcguggagggcaagagcugcaucaacagaugcuucuacguggagcugaucagaggcagaaaggaggagaccgaggugcuguggaccagcaacagcaucgugguguucugcggcaccagcggcaccuacggcaccggcagcuggcccgacggcgccgaccugaaccugaugcccaucuga

SEQ ID NO: 183431 - RNA, 1410 nt, Artificial Sequence; identical to SEQ ID NO: 183414
  derived and/or modified CDS sequence (opt4) from neuraminidase__InfluenzaA__AGG13714

SEQ ID NO: 183432 - RNA, 1410 nt, Artificial Sequence; identical to SEQ ID NO: 182206
  derived and/or modified CDS sequence (opt4) from neuraminidase__InfluenzaA__AGG13726

SEQ ID NO: 183433 - RNA, 1410 nt, Artificial Sequence; identical to SEQ ID NO: 182206
  derived and/or modified CDS sequence (opt4) from neuraminidase__InfluenzaA__AGG13738

SEQ ID NO: 183434 - RNA, 1410 nt, Artificial Sequence; identical to SEQ ID NO: 182206
  derived and/or modified CDS sequence (opt4) from neuraminidase__InfluenzaA__AGG13750

SEQ ID NO: 183435 - RNA, 1410 nt, Artificial Sequence
  derived and/or modified CDS sequence (opt4) from neuraminidase__InfluenzaA__AGG13762
augaaccccaaccagaagaucaucaccaucggcagcgugagccugaccaucagcaccaucugcuucuucaugcagaucgccauccugaucaccaccgugacccugcacuucaagcaguacgaguucaacagcccccccaacaaccaggugaugcugugcgagcccaccaucaucgagagaaacaucaccgagaucguguaccugaccaacaccaccaucgagaaggagaucugccccaagcccgccgaguacagaaacuggagcaagccccagugcgacaucaccggcuucgcccccuucagcaaggacaacagcaucagacugagcgccggcggcgacaucugggugaccagagagcccuacgugagcugcgaccccgacaagugcuaccaguucgcccugggccagggcaccacccugaacaacgugcacagcaacaacaccgugagagacagaacccccuacagaacccugcugaugaacgagcugggcgugcccuuccaccugggcaccaagcaggugugcaucgccuggagcagcagcagcugccacgacggcaaggccuggcugcacgugugcaucaccggcgacgacaagaacgccaccgccagcuucaucuacaacggcagacugguggacagcguggugagcuggagcaaggagauccugagaacccaggagagcgagugcgugugcaucaacggcaccugcaccguggugaugaccgacggcagcgccagcggcaaggccgacaccaagauccuguucaucgaggagggcaagaucgugcacaccagcacccugagcggcagcgcccagcacguggaggagugcagcugcuaccccagauaccccggcgugagaugcgugugcagagacaacuggaagggcagcaacagacccaucguggacaucaacaucaaggaccacagcaucgugagcagauacgugugcagcggccuggugggcgacacccccagaaagaacgacagcagcagcagcagccacugccuggaccccaacaacgaggagggcggccacggcgugaagggcugggccuucgacgacggcaacgacguguggaugggcagaaccaucaacgagaccagcagacugggcuacgagaccuucaaggugaucgagggcuggagcaaccccaagagcaagcugcagaucaacagacaggugaucguggacagaggcgacagaagcggcuacagcggcaucuucagcguggagggcaagagcugcaucaacagaugcuucuacguggagcugaucagaggcagaaaggaggagaccgaggugcuguggaccagcaacagcaucgugguguucugcggcaccagcggcaccuacggcaccggcagcuggcccgacggcgccgaccugaaccugaugcccaucuga

SEQ ID NO: 183436 - RNA, 1410 nt, Artificial Sequence
  derived and/or modified CDS sequence (opt4) from neuraminidase__InfluenzaA__AGG13774
augaaccccaaccagaagaucaucaccaucggcagcgugagccugaccaucagcaccaucugcuucuucaugcagaucgccauccugaucaccaccgugacccugcacuucaagcaguacgaguucaacagcccccccaacaaccaggugaugcugugcgagcccaccaccaucgagagaaacaucaccgagaucguguaccugaccaacaccaccaucgagaaggagaucugccccaagcuggccgaguacagaaacuggagcaagccccagugcgacaucaccggcuucgcccccuucagcaaggacaacagcaucagacugagcgccggcggcgacaucugggugaccagagagcccuacgugagcugcgaccccgacaagugcuaccaguucgcccugggccagggcaccacccugaacaacgugcacagcaacaacaccgugagagacagaacccccuacagaacccugcugaugaacgagcugggcgugcccuuccaccugggcaccaagcaggugugcaucgccuggagcagcagcagcugccacgacggcaaggccuggcugcacgugugcaucaccggcgacgacaagaacgccaccgccagcuucaucuacaacggcagacugguggacagcguggugagcuggagcaaggacauccugagaacccaggagagcgagugcgugugcaucaacggcaccugcgccguggugaugaccgacggcagcgccagcggcaaggccgacaccaagauccuguucaucgaggagggcaagaucgugcacaccagcacccugagcggcagcgcccagcacguggaggagugcagcugcuaccccagauaccccggcgugagaugcgugugcagagacaacuggaagggcagcaacagacccaucguggacaucaacaucaaggaccacagcaucgugagcagcuacgugugcagcggccuggugggcgacacccccagaaagaacgacagcagcagcagcggccacugccuggaccccaacaacgaggagggcggccacggcgugaagggcugggccuucgacgacggcaacgacguguggaugggcagaaccaucaacgagaccagcagacugggcuacgagaccuucaaggugaucgagggcuggagcaaccccaagagcaagcugcagaucaacagacaggugaucguggacagaggcaacagaagcggcuacagcggcaucuucagcguggagggcaagaacugcaucaacagaugcuucuacguggagcugaucagaggcagaaaggaggagaccgaggugcuguggaccagcaacagcaucgugguguucugcggcaccagcggcaccuacggcaccggcagcuggcccgacggcgccgaccugaaccugaugcccaucuga

SEQ ID NO: 183437 - RNA, 1410 nt, Artificial Sequence
  derived and/or modified CDS sequence (opt4) from neuraminidase__InfluenzaA__AGG13786
augaaccccaaccagaagaucaucaccaucggcagcgugagccugaccaucagcaccaucugcuucuucaugcagaucgccauccugaucaccaccgugacccugcacuucaagcaguacgaguucaacagcccccccaacaaccaggugaugcugugcgagcccaccaucaucgagagaaacaucaccgagaucguguaccugaccaacaccaccaucgagaaggagaucugccccaagcccgccgaguacagaaacuggagcaagccccagugcggcaucaccggcuucgcccccuucagcaaggacaacagcaucagacugagcgccggcggcgacaucugggugaccagagagcccuacgugagcugcgaccccgacaagugcuaccaguucgcccugggccagggcaccacccugaacaaccugcacagcaacaacaccgugagagacagaacccccuacagaacccugcugaugaacgagcugggcgugcccuuccaccugggcaccaagcaggugugcaucgccuggagcagcagcagcugccacgacggcaaggccuggcugcacgugugcaucaccggcgacgacaagaacgccaccgccagcuucaucuacaacggcagacugguggacagcguggugagcuggagcaaggagauccugagaacccaggagagcgagugcgugugcaucaacggcaccugcaccguggugaugaccgacggcagcgccagcggcaaggccgacaccaagauccuguucaucgaggagggcaagaucgugcacaccagcacccugagcggcagcgcccagcacguggaggagugcagcugcuaccccagauaccccggcgugagaugcgugugcagagacaacuggaagggcagcaacagacccaucguggacaucaacaucaaggaccacagcaucgugagcagcuacgugugcagcggccuggugggcgacacccccagaaagaacgacagcagcagcagcagccacugccuggaccccaacaacgaggagggcggccacggcgugaagggcugggccuucgacgacggcaacgacguguggaugggcagaaccaucaacgagaccagcagacugggcuacgagaccuucaaggugaucgagggcuggagcaaccccaagagcaagcugcagaucaacagacaggugaucguggacagaggcgacagaagcggcuacagcggcaucuucagcguggagggcaagagcugcaucaacagaugcuucuacguggagcugaucagaggcagaaaggaggagaccgaggugcuguggaccagcaacagcaucgugguguucugcggcaccagcggcaccuacggcaccggcagcuggcccgacggcgccgaccugaaccugaugcccaucuga

SEQ ID NO: 183438 - RNA, 1410 nt, Artificial Sequence; identical to SEQ ID NO: 183414
  derived and/or modified CDS sequence (opt4) from neuraminidase__InfluenzaA__AGG13798

SEQ ID NO: 183439 - RNA, 1410 nt, Artificial Sequence
  derived and/or modified CDS sequence (opt4) from neuraminidase__InfluenzaA__AGG13810
augaaccccaaccagaagaucaucaccaucggcagcgugagccugaccaucagcaccaucugcuucuucaugcagaucgccauccugaucaccaccgugacccugcacuucaagcaguacgaguucaacagcccccccaacaaccaggugaugcugugcgagcccaccaucaucgagagaaacaucaccgagaucguguaccugaccaacaccaccaucgagaaggagaucugccccaagcccgccgaguacagaaacuggagcaagccccagugcgacaucaccggcuucgcccccuucagcaaggacaacagcaucagacugagcgccggcggcgacaucugggugaccagagagcccuacgugagcugcgaccccgacaagugcuaccaguucgcccugggccagggcaccacccugaacaacgugcacagcaacaacaccgugagagacagaacccccuacagaacccugcugaugaacgagcugggcgugcccuuccaccugggcaccaagcaggugugcaucgccuggagcagcagcagcugccacgacggcaaggccuggcugcacgugugcaucaccggcgacgacaagaacgccaccgccagcuucaucuacaacggcagacugguggacagcguggugagcuggagcaaggagauccugagaacccaggagagcgagugcgugugcaucaacggcaccugcaccguggugaugaccgacggcagcgccagcggcaaggccgacaccaagauccuguucaucgaggagggcaagaucgugcacaccagcacccugagcggcagcgcccagcacguggaggagugcagcugcuaccccagauaccccggcgugagaugcgugugcagagacaacuggaagggcagcaacagacccaucguggacaucaacaucaaggaccacagcaucgugagcagauacgugugcagcggccuggugggcgacacccccagaaagaacgacagcagcagcagcagccacugccugggccccaacaacgaggagggcggccacggcgugaagggcugggccuucgacgacggcaacgacguguggaugggcagaaccaucaacgagaccagcagacugggcuacgagaccuucaaggugaucgagggcuggagcaaccccaagagcaagcugcagaucaacagacaggugaucguggacagaggcgacagaagcggcuacagcggcaucuucagcguggagggcaagagcugcaucaacagaugcuucuacguggagcugaucagaggcagaaaggaggagaccgaggugcuguggaccagcaacagcaucgugguguucugcggcaccagcggcaccuacggcaccggcagcuggcccgacggcgccgaccugaaccugaugcccaucuga

SEQ ID NO: 183440 - RNA, 1410 nt, Artificial Sequence; identical to SEQ ID NO: 183414
  derived and/or modified CDS sequence (opt4) from neuraminidase__InfluenzaA__AGG13822

SEQ ID NO: 183441 - RNA, 1410 nt, Artificial Sequence; identical to SEQ ID NO: 183414
  derived and/or modified CDS sequence (opt4) from neuraminidase__InfluenzaA__AGG13834

SEQ ID NO: 183442 - RNA, 1410 nt, Artificial Sequence; identical to SEQ ID NO: 183435
  derived and/or modified CDS sequence (opt4) from neuraminidase__InfluenzaA__AGG13846

SEQ ID NO: 183443 - RNA, 1410 nt, Artificial Sequence; identical to SEQ ID NO: 182206
  derived and/or modified CDS sequence (opt4) from neuraminidase__InfluenzaA__AGG13858

SEQ ID NO: 183444 - RNA, 1410 nt, Artificial Sequence
  derived and/or modified CDS sequence (opt4) from neuraminidase__InfluenzaA__AGG13870
augaaccccaaccagaagaucaucaccaucggcagcgugagccugaccaucagcaccaucugcuucuucaugcagaucgccauccugaucaccaccgugacccugcacuucaagcaguacgaguucaacagcccccccaacaaccaggugaugcugugcgagcccaccaucaucgagagaaacaucaccgagaucguguaccugaccaacaccaccaucgagaaggagaucugccccaagcccgccgaguacagaaacuggagcaagccccagugcggcaucaccggcuucgcccccuucagcaaggacaacagcaucagacugagcgccggcggcgacaucugggugaccagagagcccuacgugagcugcgaccccgacagaugcuaccaguucgcccugggccagggcaccacccugaacaacaugcacagcaacaacaccgugagagacagaacccccuacagaacccugcugaugaacgagcugggcgugcccuuccaccugggcaccaagcaggugugcaucgccuggagcagcagcagcugccacgacggcaaggccuggcugcacgugugcaucaccggcgacgacaagaacgccaccgccagcuucaucuacaacggcagacugguggacagcguggugagcuggagcaaggagauccugagaacccaggagagcgagugcgugugcaucaacggcaccugcaccguggugaugaccgacggcagcgccagcggcaaggccgacaccaagauccuguucaucgaggagggcaagaucgugcacaccagcacccugagcggcagcgcccagcacguggaggagugcagcugcuaccccagauaccccggcgugagaugcgugugcagagacaacuggaagggcagcaacagacccaucguggacaucaacaucaaggaccacagcaucgugagcagcuacgugugcagcggccuggugggcgacacccccagaaagaacgacagcagcagcagcagccacugccuggaccccaacaacgaggagggcggccacggcgugaagggcugggccuucgacgacggcaacgacguguggaugggcagaaccaucaacgagaccagcagacugggcuacgagaccuucaaggugaucgagggcuggagcaaccccaagagcaagcugcagaucaacagacaggugaucguggacagaggcgacagaagcggcuacagcggcaucuucagcguggagggcaccagcugcaucaacagaugcuucuacguggagcugaucagaggcagaaaggaggagaccgaggugcuguggaccagcaacagcaucgugguguucugcggcaccagcggcaccuacggcaccggcagcuggcccgacggcgccgaccugaaccugaugcccaucuga

SEQ ID NO: 183445 - RNA, 1410 nt, Artificial Sequence
  derived and/or modified CDS sequence (opt4) from neuraminidase__InfluenzaA__AGG13894
augaaccccaaccagaagaucaucaccaucggcagcgugagccugaccaucagcaccgugugcuucuucaugcagaucgccauccugaucaccaccgugacccugcacuucaagcaguacgaguucaacagcccccccaacaaccaggugaugcugugcgagcccaccaucaucgagagaaacgugaccgagaucguguaccugaccaacaccaccaucgagaaggagaucugccccaagcccgccgaguacagaaacuggagcaagccccagugcggcaucaccggcuucgcccccuucagcaaggacaacagcaucagacugagcgccggcggcgacaucugggugaccagagagcccuacgugagcugcgaccccgacaagugcuaccaguucgcccugggccagggcaccacccugaacaacgugcacagcaacaacaccgugagagacagaacccccuacagaacccugcugaugaacgagcugggcgugcccuuccaccugggcaccaagcaggugugcaucgccuggagcagcagcagcugccacgacggcaaggccuggcugcacgugugcaucaccggcgacgacaagaacgccaccgccagcuucaucuacaacggcagacugguggacagcguggugagcuggagcaaggagauccugagaacccaggagagcgagugcgugugcaucaacggcaccugcaccguggugaugaccgacggcagcgccagcggcaaggccgacaccaagauccuguucaucgaggagggcaagaucgugcacaccagcacccugagcggcagcgcccagcacguggaggagugcagcugcuaccccagauaccccggcgugagaugcgugugcagagacaacuggaagggcagcaacagacccaucguggacaucaacaucaaggaccacagcaucgugagcagcuacgugugcagcggccuggugggcgacacccccagaaagaacgacagcagcagcagcagccacugccuggaccccaacaacgaggagggcggccacggcgugaagggcugggccuucgacgacggcaacgacguguggaugggcagaaccaucaacgagaccagcagacugggcuacgagaccuucaaggugaucgagggcuggagcaaccccaagagcaagcugcagaucaacagacaggugaucguggacagaggcgacagaagcggcuacagcggcaucuucagcguggagggcaagagcugcaucaacagaugcuucuacguggagcugaucagaggcagaaaggaggagaccgaggugcuguggaccagcaacagcaucgugguguucugcggcaccagcggcaccuacggcaccggcagcuggcccgacggcgccgaccugaaccugaugcccaucuga

SEQ ID NO: 183446 - RNA, 1410 nt, Artificial Sequence; identical to SEQ ID NO: 183414
  derived and/or modified CDS sequence (opt4) from neuraminidase__InfluenzaA__AGG13906

SEQ ID NO: 183447 - RNA, 1410 nt, Artificial Sequence
  derived and/or modified CDS sequence (opt4) from neuraminidase__InfluenzaA__AGG13930
augaaccccaaccagaagaucaucaccaucggcagcgugagccugaccaucagcaccaucugcuucuucaugcagaucgccauccugaucaccaccgugacccugcacuucaagcaguacgaguucaacagcccccccaacaaccaggugaugcugugcgagcccaccaucaucgagagaaacaucaccgagaucguguaccugaccaacaccaccaucgagaaggagaucugccccaagcccgccgaguacagaaacuggagcaagccccagugcggcaucaccggcuucgcccccuucagcaaggacaacagcaucagacugagcgccggcggcgacaucugggugaccagagagcccuacgugagcugcgaccccgacaagugcuaccaguucgcccugggccagggcaccacccugaacaacgugcacagcaacaacaccgugagagacagaacccccuacagaacccugcugaugaacgagcugggcgugcccuuccaccugggcaccaagcaggugugcaucgccuggagcagcagcagcugccacgacggcaaggccuggcugcacgugugcaucaccggcgacgacaagaacgccaccgccagcuucaucuacaacggcagacugguggacagcguggugagcuggagcaaggagauccugagaacccaggagagcgagugcgugugcaucaacggcaccugcaccguggugaugaccgacggcagcgccagcggcaaggccgacaccaagauccuguucaucgaggagggcaagaucgugcacaccagcacccugagcggcagcgcccagcacguggaggagugcagcugcuaccccagauaccccggcgugagaugcgugugcagagacaacuggaagggcagcaacagacccaucguggacaucaacaucaaggaccacagcaucgugagcagcuacgugugcagcggccuggugggcgacacccccagaaagaacgacagaagcagcagcagccacugccuggaccccaacaacgaggagggcggccacggcgugaagggcugggccuucgacgacggcaacgacguguggaugggcagaaccaucaacgagaccagcagacugggcuacgagaccuucaaggugaucgagggcuggagcaaccccaagagcaagcugcagaucaacagacaggugaucguggacagaggcgacagaagcggcuacagcggcaucuucagcguggagggcaagagcugcaucaacagaugcuucuacguggagcugaucagaggcagaaaggaggagaccgaggugcuguggaccagcaacagcaucgugguguucugcggcaccagcggcaccuacggcaccggcagcuggcccgacggcgccgaccugaaccugaugcccaucuga

SEQ ID NO: 183448 - RNA, 1410 nt, Artificial Sequence; identical to SEQ ID NO: 183424
  derived and/or modified CDS sequence (opt4) from neuraminidase__InfluenzaA__AGG13942

SEQ ID NO: 183449 - RNA, 1410 nt, Artificial Sequence
  derived and/or modified CDS sequence (opt4) from neuraminidase__InfluenzaA__AGG13965
augaaccccaaccagaagaucaucaccaucggcagcgugugcaugaccaucggcauggccaaccugauccugcagaucggcaacaucaucagcaucuggaucagccacagcauccagcugggcaaccagagccagaucgagaccugcaaccagagcgugaucaccuacgagaacaacaccugggugaaccagaccuacgugaacaucagcaacaccaacuucgccgccggccagagcguggugagcgugaagcuggccggcaacagcagccugugccccgugagcggcugggccaucuacagcaaggacaacagcgugagaaucggcagcaagggcgacguguucgugaucagagagcccuucaucagcugcagcccccuggagugcagaaccuucuuccugacccagggcgcccugcugaacgacaagcacagcaacggcaccaucaaggacagaagccccuacagaacccugaugagcugccccaucggcgaggugcccagccccuacaacagcagauucgagagcguggccuggagcgccagcgccugccacgacggcaucaacuggcugaccaucggcaucagcggccccgacagcggcgccguggccgugcugaaguacaacggcaucaucaccgacaccaucaagagcuggagaaacaacauccugagaacccaggagagcgagugcgccugcgugaacggcagcugcuucaccaucaugaccgacggccccagcgacggccaggccagcuacaagaucuucagaaucgagaagggcaagaucgugaagagcguggagaugaacgcccccaacuaccacuacgaggagugcagcugcuaccccgacagcagcgagaucaccugcgugugcagagacaacuggcacggcagcaacagacccugggugagcuucaaccagaaccuggaguaccagaucggcuacaucugcagcggcaucuucggcgacaaccccagacccaacgacaagaccggcagcugcggccccgugagcagcaacggcgccaacggcgugaagggcuucagcuucaaguacggcaacggcguguggaucggcagaaccaagagcaucagcagcagaaagggcuucgagaugaucugggaccccaacggcuggaccggcaccgacaacaacuucagcaucaagcaggacaucgugggcaucaacgaguggagcggcuacagcggcagcuucgugcagcaccccgagcugaccggccuggacugcaucagacccugcuucuggguggagcugaucagaggcagacccaaggagaacaccaucuggaccagcggcagcagcaucagcuucugcggcgugaacagcgacaccgugggcuggagcuggcccgacggcgccgagcugcccuucaccaucgacaaguga

SEQ ID NO: 183450 - RNA, 1410 nt, Artificial Sequence; identical to SEQ ID NO: 183417
  derived and/or modified CDS sequence (opt4) from neuraminidase__InfluenzaA__AGG13976

SEQ ID NO: 183451 - RNA, 1410 nt, Artificial Sequence; identical to SEQ ID NO: 183417
  derived and/or modified CDS sequence (opt4) from neuraminidase__InfluenzaA__AGG13988

SEQ ID NO: 183452 - RNA, 1410 nt, Artificial Sequence; identical to SEQ ID NO: 183417
  derived and/or modified CDS sequence (opt4) from neuraminidase__InfluenzaA__AGG14000

SEQ ID NO: 183453 - RNA, 1410 nt, Artificial Sequence; identical to SEQ ID NO: 183417
  derived and/or modified CDS sequence (opt4) from neuraminidase__InfluenzaA__AGG14012

SEQ ID NO: 183454 - RNA, 1410 nt, Artificial Sequence; identical to SEQ ID NO: 183435
  derived and/or modified CDS sequence (opt4) from neuraminidase__InfluenzaA__AGG14024

SEQ ID NO: 183455 - RNA, 1410 nt, Artificial Sequence
  derived and/or modified CDS sequence (opt4) from neuraminidase__InfluenzaA__AGG14036
augaaccccaaccagaagaucaucaccaucggcagcgugagccugaccaucagcaccaucugcuucuucaugcagaucgccauccugaucaccaccgugacccugcacuucaagcaguacgaguucaacagcccccccaacaaccaggugaugcugugcgagcccaccaucaucgagagaaacaucaccgagaucguguaccugaccaacaccaccaucgagaaggagaucugccccaagcuggccgaguacagaaacuggagcaagccccagugcgacaucaccggcuucgcccccuucagcaaggacaacagcaucagacugagcgccggcggcgacaucugggugaccagagagcccuacgugagcugcgaccccgacaagugcuaccaguucgcccugggccagggcaccacccugaacaacgugcacagcaacaacaccgugagagacagaacccccuacagaacccugcugaugaacgagcugggcgugcccuuccaccugggcaccaagcaggugugcaucgccuggagcagcagcagcugccacgacggcaaggccuggcugcacgugugcaucaccggcgacgacaagaacgccaccgccagcuucaucuacaacggcagacugguggacagcguggugagcuggagcaaggacauccugagaacccaggagagcgagugcgugugcaucaacggcaccugcgccguggugaugaccgacggcagcgccagcggcaaggccgacaccaagauccuguucaucgaggagggcaagaucgugcacaccagcacccugagcggcagcgcccagcacguggaggagugcagcugcuaccccagauaccccggcgugagaugcgugugcagagacaacuggaagggcagcaacagacccaucguggacaucaacaucaaggaccacagcaucgugagcagcuacaugugcagcggccuggugggcgacacccccagaaagaacgacagcagcagcagcggccacugccuggaccccaacaacgaggagggcggccacggcgugaagggcugggccuucgacgacggcaacgacguguggaugggcagaaccaucaacgagaccagcagacugggcuacgagaccuucaaggugaucgagggcuggagcaaccccaagagcaagcugcagaucaacagacaggugaucguggacagaggcaacagaagcggcuacagcggcaucuucagcguggagggcaagaacugcaucaacagaugcuucuacguggagcugaucagaggcagaaaggaggagaccgaggugcuguggaccagcaacagcaucgugguguucugcggcaccagcggcaccuacggcaccggcagcuggcccgacggcgccgaccugaaccugaugcccaucuga

SEQ ID NO: 183456 - RNA, 1410 nt, Artificial Sequence; identical to SEQ ID NO: 183435
  derived and/or modified CDS sequence (opt4) from neuraminidase__InfluenzaA__AGG14321

SEQ ID NO: 183457 - RNA, 1410 nt, Artificial Sequence; identical to SEQ ID NO: 182206
  derived and/or modified CDS sequence (opt4) from neuraminidase__InfluenzaA__AGG14333

SEQ ID NO: 183458 - RNA, 1410 nt, Artificial Sequence; identical to SEQ ID NO: 181847
  derived and/or modified CDS sequence (opt4) from neuraminidase__InfluenzaA__AGG84182

SEQ ID NO: 183459 - RNA, 1398 nt, Artificial Sequence
  derived and/or modified CDS sequence (opt4) from neuraminidase__InfluenzaA__AGJ51955
augaaccccaaccagaagauccugugcaccagcgccaccgccaucaucaucggcgccaucgccgugcugaucggcaucgccaaccugggccugaacaucggccugcaccugaagcccggcugcaacugcagccacagccagcccgagaccaccaacaccagccagaccaucaucaacaacuacuacaacgagaccaacaucaccaacauccagauggaggagagaaccagcagaaacuucaacaaccugaccaagggccugugcaccaucaacagcuggcacaucuacggcaaggacaacgccgugagaaucggcgagagcagcgacgugcuggugaccagagagcccuacgugagcugcgaccccgacgagugcagauucuacgcccugagccagggcaccaccaucagaggcaagcacagcaacggcaccauccacgacagaagccaguacagagcccugaucagcuggccccugagcagcccccccaccguguacaacagcagaguggagugcaucggcuggagcagcaccagcugccacgacggcaagagcagaaugagcaucugcaucagcggccccaacaacaacgccagcgccguggugugguacaacagaagacccguggccgagaucaacaccugggccagaaacauccugagaacccaggagagcgagugcgugugccacaacggcgugugccccgugguguucaccgacggcagcgccaccggccccgccgacaccagaaucuacuacuucaaggagggcaagauccugaagugggagagccugaccggcaccgccaagcacaucgaggagugcagcugcuacggcgagagaaccggcaucaccugcaccugcagagacaacuggcagggcagcaacagacccgugauccagaucgaccccguggccaugacccacaccagccaguacaucugcagccccgugcugaccgacaaccccagacccaacgaccccaacaucggcaagugcaacgaccccuaccccggcaacaacaacaacggcgugaagggcuucagcuaccuggacggcgccaacaccuggcugggcagaaccaucagcaccgccagcagaagcggcuacgagaugcugaaggugcccaacgcccugaccgacgacagaagcaagcccauccagggccagaccaucgugcugaacgccgacuggagcggcuacagcggcagcuucauggacuacugggccgagggcgacugcuacagagccugcuucuacguggagcugaucagaggcagacccaaggaggacaaggugcuguggaccggcgacagcaucgugagcaugugcagcagcaccgaguuccugggccaguggaacuggcccgacggcgccaagaucgaguacuuccuguga

SEQ ID NO: 183460 - RNA, 1398 nt, Artificial Sequence
  derived and/or modified CDS sequence (opt4) from neuraminidase__InfluenzaA__AGJ72863
augaaccccaaccagaagauccugugcaccagcgccaccgccaucaucaucggcgccaucgccgugcugaucggcaucgccaaccugggccugaacaucggccugcaccugaagcccggcugcaacugcagccacagccagcccgagaccaccaacaccagccagaccaucaucaacaacuacuacaacgagaccaacaucaccaacauccagauggaggagagaaccagcagaaacuucaacaaccugaccaagggccugugcaccaucaacagcuggcacaucuacggcaaggacaacgccgugagaaucggcgagagcagcgacgugcuggugaccagagagcccuacgugagcugcgaccccgacgagugcagauucuacgcccugagccagggcaccaccaucagaggcaagcacagcaacggcaccauccacgacagaagccaguacagagcccugaucagcuggccccugagcagcccccccaccguguacaacagcagaguggagugcaucggcuggagcagcaccagcugccacgacggcaagagcagaaugagcaucugcaucagcggccccaacaacaacgccagcgccguggugugguacaacagaagacccguggccgagaucaacaccugggccagaaacauccugagaacccaggagagcgagugcgugugccacaacggcgugugccccgugguguucaccgacggcagcgccaccggccccgccgacaccagaaucuacuacuucaaggagggcaagauccugaagugggagagccugaccggcaccgccaagcacaucgaggagugcagcugcuacggcgagagaaccggcaucaccugcaccugcagagacaacuggcagggcagcaacagacccgugauccagaucgaccccguggccaugacccacaccagccaguacaucugcagccccgugcugaccgacaaccccagacccaacgaccccaacaucggcaagugcaacgaccccuaccccggcaacaacaacaacggcgugaagggcuucagcuaccuggacggcgccaacaccuggcugggcagaaccaucagcaccgccagcagaagcggcuacgagaugcugaaggugcccaacgcccugaccgacgacagaagcaagcccauccagggccagaccaucgugcugaacgccgacuggagcggcuacagcggcagcuucauggacuacugggccgagggcgacugcuacagagccugcuucuacguggaggugaucagaggcagacccaaggaggacaagguguggugggccggcaacagcaucgugagcaugugcagcagcaccgaguuccugggccaguggaacuggcccgacggcgccaagaucgaguacuuccuguga

SEQ ID NO: 183461 - RNA, 1410 nt, Artificial Sequence
  derived and/or modified CDS sequence (opt4) from neuraminidase__InfluenzaA__AGJ73328
augaaccccaaccagaagaucaucaccaucggcagcgugugcaugaccaucggcauggccaaccugauccugcagaucggcaacaucaucagcaucuggaucagccacagcauccagcugggcaaccagagccagaucgagaccugcaaccagagcgugaucaccuacgagaacaacaccugggugaaccagaccuacgugaacaucagcaacaccaacuucgccgccggccagagcguggugagcgugaagcuggccggcaacagcagccugugccccgugagcggcugggccaucuacagcaaggacaacagcgugagaaucggcagcaagggcgacguguucgugaucagagagcccuucaucagcugcagcccccuggagugcagaaccuucuuccugacccagggcgcccugcugaacgacaagcacagcaacggcaccaucaaggacagaagccccuacagaacccugaugagcugccccaucggcgaggugcccagccccuacaacagcagauucgagagcguggccuggagcgccagcgccugccacgacggcaucaacuggcugaccaucggcaucagcggccccgacagcggcgccguggccgugcugaaguacaacggcaucaucaccgacaccaucaagagcuggagaaacaacauccugagaacccaggagagcgagugcgccugcgugaacggcagcugcuucaccaucaugaccgacggccccagcgacggccaggccagcuacaagaucuucagaaucgagaagggcaagaucgugaagagcguggagaugaacgcccccaacuaccacuacgaggagugcagcugcuaccccgacagcagcgagaucaccugcgugugcagagacaacuggcacggcagcaacagacccugggugagcuucaaccagaaccuggaguaccagaucggcuacaucugcagcggcaucuucggcgacaaccccagacccaacgacaagaccggcagcugcggccccgugagcagcaacggcgccaacggcgugaagggcuucagcuucaaguacggcaacggcguguggaucggcagaaccaagagcaucagcagcagaaagggcuucgagaugaucugggaccccaacggcuggaacggcaccgacaacaacuucagcaucaagcaggacaucgugggcaucaacgaguggagcggcuacagcggcagcuucgugcagcaccccgagcugaccggccuggacugcaucagacccugcuucuggguggagcugaucagaggcagacccaaggagaacaccaucuggaccagcggcagcagcaucagcuucugcggcgugaacagcgacaccgugggcuggagcuggcccgacggcgccgagcugcccuucaccaucgacaaguga

SEQ ID NO: 183462 - RNA, 1410 nt, Artificial Sequence; identical to SEQ ID NO: 180317
  derived and/or modified CDS sequence (opt4) from neuraminidase__InfluenzaA__AGJ73330

SEQ ID NO: 183463 - RNA, 1410 nt, Artificial Sequence
  derived and/or modified CDS sequence (opt4) from neuraminidase__InfluenzaA__AGJ73332
augaaccccaaccagaagaucaucaccaucggcagcgugugcaugaccaucggcauggccaaccugauccugcagaucggcaacaucaucagcaucuggaucagccacagcauccagcugggcaaccagaaccagaucgagaccugcaaccagagcgugaucaccuacgagaacaacaccugggugaaccagaccuacgugaacaucagcaacaccaacuucgccgccggccagagcguggugagcgugaagcuggccggcaacagcagccugugccccgugagcggcugggccaucuacagcaaggacaacagcaucagaaucggcagcaagggcgacguguucgugaucagagagcccuucaucagcugcagcccccuggagugcagaaccuucuuccugacccagggcgcccugcugaacgacaagcacagcaacggcaccaucaaggacagaagccccuacagaacccugaugagcugccccaucggcgaggugcccagccccuacaacagcagauucgagagcguggccuggagcgccagcgccugccacgacggcaucaacuggcugaccaucggcaucagcggccccgacaacggcgccguggccgugcugaaguacaacggcaucaucaccgacaccaucaagagcuggagaaacaacauccugagaacccaggagagcgagugcgccugcgugaacggcagcugcuucaccgugaugaccgacggccccagcgacggccaggccagcuacaagaucuucagaaucgagaagggcaagaucgugaagagcguggagaugaacgcccccaacuaccacuacgaggagugcagcugcuaccccgacagcagcgagaucaccugcgugugcagagacaacuggcacggcagcaacagacccugggugagcuucaaccacaaccuggaguaccagaucggcuacaucugcagcggcaucuucggcgacaaccccagacccaacgacaagaccggcagcugcggccccgugagcagcaacggcgccaacggcgugaagggcuucagcuucaaguacggcaacggcguguggaucggcagaaccaagagcaucagcagcagaaacggcuucgagaugaucugggaccccaacggcuggaccggcaccgacaacaacuucagcaucaagcaggacaucaucggcaucaacgaguggagcggcuacagcggcagcuucgugcagcaccccgagcugaccggccuggacugcaucagacccugcuucuggguggagcugaucagaggcagacccaaggagaacaccaucuggaccagcggcagcagcaucagcuucugcggcgugaacagcgacaccgugggcuggagcuggcccgacggcgccgagcugcccuucaccaucgacaaguga

SEQ ID NO: 183464 - RNA, 1410 nt, Artificial Sequence; identical to SEQ ID NO: 180317
  derived and/or modified CDS sequence (opt4) from neuraminidase__InfluenzaA__AGJ73334

SEQ ID NO: 183465 - RNA, 1410 nt, Artificial Sequence; identical to SEQ ID NO: 180317
  derived and/or modified CDS sequence (opt4) from neuraminidase__InfluenzaA__AGJ73336

SEQ ID NO: 183466 - RNA, 1410 nt, Artificial Sequence; identical to SEQ ID NO: 180317
  derived and/or modified CDS sequence (opt4) from neuraminidase__InfluenzaA__AGJ73338

SEQ ID NO: 183467 - RNA, 1410 nt, Artificial Sequence
  derived and/or modified CDS sequence (opt4) from neuraminidase__InfluenzaA__AGJ73340
augaaccccaaccagaagaucaucaccaucggcagcgugugcaugaccaucggcauggccaaccugauccugcagaucggcaacaucaucagcaucuggaucagccacagcauccagcugggcaaccagagccagaucgagaccugcaaccagagcgugaucaccuacgagaacaacaccugggugaaccagaccuacgugaacaucagcaacaccaacuucgccgccggccagagcguggugagcgugaagcuggccggcaacagcagccugugccccgccagcggcugggccaucuacagcaaggacaacagcaucagaaucggcagcaagggcgacguguucgugaucagagagcccuucaucagcugcagcccccuggagugcagaaccuucuuccugacccagggcgcccugcugaacgacaagcacagcaacggcaccaucaaggacagaagccccuacagaacccugaugagcugccccaucggcgaggugcccagccccuacaacagcagauucgagagcguggccuggagcgccagcgccugccacgacggcaucaacuggcugaccaucggcaucagcggccccgacaacggcgccguggccgugcugaaguacaacggcaucaucaccgacaccaucaagagcuggagaaacaacauccugagaacccaggagagcgagugcgccugcgugaacggcagcugcuucaccaucaugaccgacggccccagcgacggccaggccagcuacaagaucuucagaaucgagaagggcaagaucgugaagagcguggagaugaacgcccccaacuaccacuacgaggagugcagcugcuaccccgacagcagcgagaucaccugcgugugcagagacaacuggcacggcagcaacagacccugggugagcuucaaccagaaccuggaguaccagaucggcuacaucugcagcggcaucuucggcgacaaccccagacccaacgacaagaccggcagcugcggccccgugagcagcaacggcgccaacggcgugaagggcuucagcuucaaguacggcaacggcguguggaucggcagaaccaagagcaucagcagcagaaagggcuucgagaugaucugggaccccaacggcuggaccggcaccgacaacaacuucagcaucaagcaggacaucgugggcaucaacgaguggagcggcuacagcggcagcuucgugcagcaccccgagcugaccggccuggacugcaucagacccugcuucuggguggagcugaucagaggcagacccaaggagaacaccaucuggaccagcggcagcagcaucagcuucugcggcgugaacagcgacaccgugggcuggagcuggcccgacggcgccgagcugcccuucaccaucgacaaguga

SEQ ID NO: 183468 - RNA, 1410 nt, Artificial Sequence
  derived and/or modified CDS sequence (opt4) from neuraminidase__InfluenzaA__AGJ73342
augaaccccaaccagaagaucaucaccaucggcagcgugugcaugaccaucggcauggccaaccugauccugcagaucggcaacaucaucagcaucuggaucagccacagcauccagcugggcaaccagagccagaucgagaccugcaaccagagcgugaucaccuacgagaacaacaccugggugaaccagaccuacgugaacaucagcaacaccaacuucgccgccggccagagcguggugagcgugaagcuggccggcaacagcagccugugccccgugagcggcugggccaucuacagcaaggacaacagcaucagaaucggcagcaagggcgacguguucgugaucagagagcccuucaucagcugcagcccccuggagugcagaaccuucuuccugacccagggcgcccugcugaacgacaagcacagcaacggcaccaucaaggacagaagccccuacagaacccugaugagcugccccaucggcgaggugcccagccccuacaacagcagauucgagagcguggccuggagcgccagcgccugccacgacggcaucaacuggcugaccaucggcaucagcggccccgacaacggcgccguggccgugcugaaguacaacggcaucaucaccgacaccaucaagagcuggagaaacaacauccugagaacccaggagagcgagugcgccugcgugaacggcagcugcuucaccaucaugaccgacggccccagcgacggccaggccagcuacaagaucuucagaaucgagaagggcaagaucgugaagagcguggagaugaacgcccccaacuaccacuacgaggagugcagcugcuaccccgacagcagcgagaucaccugcgugugcagagacaacuggcacggcagcaacagacccugggugagcuucaaccagaaccuggaguaccagaucggcuacaucugcagcggcaucuucggcgacaaccccagacccaacgacaagaccggcagcugcggccccgugagcagcaacggcgccaacggcgugaagggcuucagcuucaaguacggcaacggcguguggaucggcagaaccaagagcaucagcagcagaaagggcuucgagaugaucugggaccccaacggcuggaccggcaccgacaacaacuucagcaucaagcaggacaucgugggcaucaacgaguggagcggcuacagcggcagcuucgugcagcaccccgagcugaccggccuggacugcaucagacccugcuucuggguggagcugaucagaggcagacccaaggagaacaccaucuggaccagcggcagcagcaucagcuucugcggcgugaacagcggcaccgugggcuggagcuggcccgacggcgccgagcugcccuucaccaucgacaaguga

SEQ ID NO: 183469 - RNA, 1410 nt, Artificial Sequence; identical to SEQ ID NO: 180769
  derived and/or modified CDS sequence (opt4) from neuraminidase__InfluenzaA__AGJ73344

SEQ ID NO: 183470 - RNA, 1410 nt, Artificial Sequence
  derived and/or modified CDS sequence (opt4) from neuraminidase__InfluenzaA__AGJ73346
augaaccccaaccagaagaucaucaccaucggcagcgugugcaugaccaucggcauggccaaccugauccugcagaucggcaacaucaucagcaucuggaucagccacagcauccagcugggcaaccagaaccagaucgagaagugcaaccagagcgugaucaccuacgagaacaacaccugggugaaccagaccuacgugaacaucagcaacaccaacuucgccgccggccagagcguggugagcgugaagcuggccggcaacagcagccugugccccgugagcggcugggccaucuacagcaaggacaacagcaucagaaucggcagcaagggcgacguguucgugaucagagagcccuucaucagcugcagcccccuggagugcagaaccuucuuccugacccagggcgcccugcugaacgacaagcacagcaacggcaccaucaaggacagaagccccuacagaacccugaugagcugccccaucggcgaggugcccagccccuacaacagcagauucgagagcguggccuggagcgccagcgccugccacgacggcaucaacuggcugaccaucggcaucagcggccccgacaacggcgccguggccgugcugaaguacaacggcaucaucaccgacaccaucaagagcuggagaaacaacauccugagaacccaggagagcgagugcgccugcgugaacggcagcugcuucaccaucaugaccgacggccccagcgacggccaggccagcuacaagaucuucagaaucgagaagggcaagaucgugaagagcguggagaugaacgcccccaacuaccacuacgaggagugcagcugcuaccccgacagcagcgagaucaccugcgugugcagagacaacuggcacggcagcaacagacccugggugagcuucaaccagaaccuggaguaccagaucggcuacaucugcagcggcaucuucggcgacaaccccagacccaacgacaagaccggcagcugcggccccgugagcagcaacggcgccaacggcgugaagggcuucagcuucaaguacggcaacggcguguggaucggcagaaccaagagcaucagcagcagaaagggcuucgagaugaucugggaccccaacggcuggaccggcaccgacaacaacuucagcaucaagcaggacaucgugggcaucaacgaguggagcggcuacagcggcagcuucgugcagcaccccgagcugaccggccuggacugcaucagacccugcuucuggguggagcugaucagaggcagacccaaggagagcaccaucuggaccagcggcagcagcaucagcuucugcggcgugaacagcgacaccgugggcuggagcuggcccgacggcgccgagcugcccuucaccaucgacaaguga

SEQ ID NO: 183471 - RNA, 1410 nt, Artificial Sequence
  derived and/or modified CDS sequence (opt4) from neuraminidase__InfluenzaA__AGJ73348
augaaccccaaccagaagaucaucaccaucggcagcgugugcaugaccaucggcauggccaaccugauccugcagaucggcaacaucaucagcaucuggaucagccacagcauccagcugggcaaccagaaccagaucgagaccugcaaccagagcgugaucaccuacgagaacaacaccugggugaaccagaccuacgugaacaucagcaacaccaacuucgccgccggccagagcgugaucagcgugaagcuggccggcaacagcagccugugccccgugagcggcugggccaucuacagcaaggacaacagcaucagaaucggcagcaagggcgacguguucgugaucagagagcccuucaucagcugcagcccccuggagugcagaaccuucuuccugacccagggcgcccugcugaacgacaagcacagcaacggcaccaucaaggacagaagccccuacagaacccugaugagcugccccaucggcgaggugcccagccccuacaacagcagauucgagagcguggccuggagcgccagcgccugccacgacggcaucaacuggcugaccaucggcaucagcggccccgacaacggcgccguggccgugcugaaguacaacggcaucaucaccgacaccaucaagagcuggagaaacaacauccugagaacccaggagagcgagugcgccugcgugaacggcagcugcuucaccaucaugaccgacggccccagcgacggccaggccagcuacaagaucuucagaaucgagaagggcaagaucgugaagagcguggagaugaacgcccccaacuaccacuacgaggagugcagcugcuaccccgacagcagcgagaucaccugcgugugcagagacaacuggcacggcagcaacagacccugggugagcuucaaccagaaccuggaguaccagaucggcuacaucugcagcggcaucuucggcgacaaccccagacccaacgacaagaccggcagcugcggccccgugagcagcaacggcgccaacggcgugaagggcuucagcuucaaguacggcaacggcguguggaucggcagaaccaagagcaucagcagcagaaagggcuucgagaugaucugggaccccaacggcuggaccggcaccgacaacaacuucagcaucaagcaggacaucgugggcaucaacgaguggagcggcuacagcggcagcuucgugcagcaccccgagcugaccggccuggacugcaucagacccugcuucuggguggagcugaucagaggcagacccaaggagaacaccaucuggaccagcggcagcagcaucagcuucugcggcgugaacagcgacaccgugggcuggagcuggcccgacggcgccgagcugcccuucaccaucgacaaguga

SEQ ID NO: 183472 - RNA, 1410 nt, Artificial Sequence
  derived and/or modified CDS sequence (opt4) from neuraminidase__InfluenzaA__AGJ73350
augaaccccaaccagaagaucaucaccaucggcagcgugugcaugaccaucggcauggccaaccugauccugcagaucggcaacaucaucagcaucuggaucagccacagcauccagcugggcaaccagaaccagaucgagaccugcaaccagagcgugaucaccuacgagaacaacaccugggugaaccagaccuacgugaacaucagcaacaccaacuucgccgccggccagagcguggugagcgugaagcuggccggcaacagcagccugugccccgugagcggcugggccaucuacagcaaggacaacagcaucagaaucggcagcaagggcgacguguucgugaucagagagcccuucaucagcugcagcccccuggagugcagaaccuucuuccugacccagggcgcccugcugaacgacgagcacagcaacggcaccaucaaggacagaagccccuacagaacccugaugagcugccccaucggcgaggugcccagccccuacaacagcagauucgagagcguggccuggagcgccagcgccugccacgacggcaucaacuggcugaccaucggcaucagcggccccgacaacggcgccguggccgugcugaaguacaacggcaucaucaccgacaccaucaagagcuggagaaacaacauccugagaacccaggagagcgagugcgccugcgugaacggcagcugcuucaccaucaugaccgacggccccagcgacggccaggccagcuacaagaucuucagaaucgagaagggcaagaucgugaagagcguggugaugaacgcccccaacuaccacuacgaggagugcagcugcuaccccgacagcagcgagaucaccugcgugugcagagacaacuggcacggcagcaacagacccugggugagcuucaaccagaaccuggaguaccagaucggcuacaucugcagcggcaucuucggcgacaaccccagacccaacgacaagaccggcagcugcggccccgugagcagcaacggcgccaacggcgugaagggcuucagcuucaaguacggcaacggcguguggaucggcagaaccaagagcaucagcagcagaaagggcuucgagaugaucugggaccccaacggcuggaccggcaccgacaacaacuucagcaucaagcaggacaucgugggcaucaacgaguggagcggcuacagcggcagcuucgugcagcaccccgagcugaccggccuggacugcaucagacccugcuucuggguggagcugaucagaggcagacccaaggagaacaccaucuggaccagcggcagcagcaucagcuucugcggcgugaacagcgacaccgugggcuggagcuggcccgacggcgccgagcugcccuucaccaucgacaaguga

SEQ ID NO: 183473 - RNA, 1410 nt, Artificial Sequence
  derived and/or modified CDS sequence (opt4) from neuraminidase__InfluenzaA__AGJ73352
augaaccccaaccagaagaucaucaccaucggcagcgugugcaugaccaucggcauggccaaccugauccugcagaucggcaacaucaucagcaucuggaucagccacagcauccagcugggcaaccagagccagaucgagaccugcaaccagagcgugaucaccuacgagaacaacaccugggugaaccagaccuacgugaacaucagcaacaccaacuucgccgccggccagagcguggugagcgugaagcuggugggcaacagcagccugugccccgugagcggcugggccaucuacagcaaggacaacagcaucagaaucggcagcaagggcgacguguucgugaucagagagcccuucaucagcugcagcccccuggagugcagaaccuucuuccugacccagggcgcccugcugaacgacaagcacagcaacggcaccaucaaggacagaagccccuacagaacccugaugagcugccccaucggcgaggugcccagccccuacaacagcagauucgagagcguggccuggagcgccagcgccugccacgacggcaucaacuggcugaccaucggcaucagcggccccgacaacggcgccguggccgugcugaaguacaacggcaucaucaccgacaccaucaagagcuggagaaacaacauccugagaacccaggagagcgagugcgccugcgugaacggcagcugcuucaccaucaugaccgacggccccagcgacggccaggccagcuacaagaucuucagaaucgagaagggcaagaucgugaagagcguggagaugaacgcccccaacuaccacuacgaggagugcagcugcuaccccgacagcagcgagaucaccugcgugugcagagacaacuggcacggcagcaacagacccugggugagcuucaaccagaaccuggaguaccagaucggcuacaucugcagcggcaucuucggcgacagccccagacccaacgacaagaccggcagcugcggccccgugagcagcaacggcgccaacggcgugaagggcuucagcuucaaguacggcaacggcguguggaucggcagaaccaagagcaucagcagcagaaagggcuucgagaugaucugggaccccaacggcuggaccggcaccgacaacaacuucagcaucaagcaggacaucgugggcaucaacgaguggagcggcuacagcggcagcuucgugcagcaccccgagcugaccggccuggacugcaucagacccugcuucuggguggagcugaucagaggcagacccaaggagaacaccaucuggaccagcggcagcagcaucagcuucugcggcgugaacagcgacaccgugggcuggagcuggcccgacggcgccgagcugcccuucaccaucgacaaguga

SEQ ID NO: 183474 - RNA, 1410 nt, Artificial Sequence; identical to SEQ ID NO: 180769
  derived and/or modified CDS sequence (opt4) from neuraminidase__InfluenzaA__AGJ73354

SEQ ID NO: 183475 - RNA, 1410 nt, Artificial Sequence
  derived and/or modified CDS sequence (opt4) from neuraminidase__InfluenzaA__AGJ73356
augaaccccaaccagaagaucaucaccaucggcagcgugugcaugaccaucggcauggccaaccugauccugcagaucggcaacaucaucagcaucuggaucagccacagcauccagcugggcaaccagagccagaucgagaccugcaaccagagcgugaucaccuacgagaacaacaccugggugaaccagaccuacuucaacaucagcaacaccaacuucgccgccggccagagcguggugagcgugaagcuggccggcaacagcagccugugccccgugagcggcugggccaucuacagcaaggacaacagcaucagaaucggcagcaagggcgacguguucgugaucagagagcccuucaucagcugcagcccccuggagugcagaaccuucuuccugacccagggcgcccugcugaacgacaagcacagcaacggcaccaucaaggacagaagccccuacagaacccugaugagcugccccaucggcgaggugcccagccccuacaacagcagauucgagagcguggccuggagcgccagcgccugccacgacggcaucaacuggcugaccaucggcaucagcggccccgacaacggcgccguggccgugcugaaguacaacggcaucaucaccgacaccaucaagagcuggagaaacaacauccugagaacccaggagagcgagugcgccugcgugaacggcagcugcuucaccaucaugaccgacggccccagcgacggccaggccagcuacaagaucuucagaaucgagaagggcaagaucgugaagagcguggagaugaacgcccccaacuaccacuacgaggagugcagcugcuaccccgacagcagcgagaucaccugcgugugcagagacaacuggcacggcagcaacagacccugggugagcuucaaccagaaccuggaguaccagaucggcuacaucugcagcggcaucuucggcgacaaccccagacccaacgacaagaccggcagcugcggccccgugagcagcaacggcgccaacggcgugaagggcuucagcuucaaguacggcaacggcguguggaucggcagaaccaagagcaucagcagcagaaagggcuucgagaugaucugggaccccaacggcuggaccggcaccgacaacaacuucagcaucaagcaggacaucgugggcaucaacgaguggagcggcuacagcggcagcuucgugcagcaccccgagcugaccggccuggacugcaucagacccugcuucuggguggagcugaucagaggcagacccaaggagaacaccaucuggaccagcggcagcagcaucagcuucugcggcgugaacagcgacaccgugggcuggagcuggcccgacggcgccgagcugcccuucaccaucgacaaguga

SEQ ID NO: 183476 - RNA, 1410 nt, Artificial Sequence; identical to SEQ ID NO: 180769
  derived and/or modified CDS sequence (opt4) from neuraminidase__InfluenzaA__AGJ73358

SEQ ID NO: 183477 - RNA, 1410 nt, Artificial Sequence; identical to SEQ ID NO: 180769
  derived and/or modified CDS sequence (opt4) from neuraminidase__InfluenzaA__AGJ73360

SEQ ID NO: 183478 - RNA, 1410 nt, Artificial Sequence
  derived and/or modified CDS sequence (opt4) from neuraminidase__InfluenzaA__AGJ73362
augaaccccaaccagaagaucaucaccaucggcagcgugugcaugaccaucggcauggccaaccugauccugcagaucggcaacaucaucagcaucuggaucagccacagcauccagcugggcaaccagagccagaucgagaccugcaaccagagcgugaucaccuacgagaacaacaccugggugaaccagaccuacgugaacaucagcaacaccaacuucgccgacggccagagcguggugagcgugaagcuggccggcaacagcagccugugccccgugagcggcugggccaucuacagcaaggacaacagcaucagaaucggcagcaagggcgacguguucgugaucagagagcccuucaucagcugcagcccccuggagugcagaaccuucuuccugacccagggcgcccugcugaacgacaagcacagcaacggcaccaucaaggacagaagccccuacagaacccugaugagcugccccaucggcgaggugcccagccccuacaacagcagauucgagagcguggccuggagcgccagcgccugccacgacggcaucaacuggcugaccaucggcaucagcggccccgacaacggcgccguggccgugcugaaguacaacggcaucaucaccgacaccaucaagagcuggagaaacaacauccugagaacccaggagagcgagugcgccugcgugaacggcagcugcuucaccaucaugaccgacggccccagcgacggccaggccagcuacaagaucuucagaaucgagaagggcaagaucgugaagagcguggagaugaacgcccccaacuaccacuacgaggagugcagcugcuaccccgacagcagcgagaucaccugcgugugcagagacaacuggcacggcagcaacagacccugggugagcuucaaccagaaccuggaguaccagaucggcuacaucugcagcggcaucuucggcgacaaccccagacccaacgacaagaccggcagcugcggccccgugagcagcaacggcgccaacggcgugaagggcuucagcuucaaguacggcaacggcguguggaucggcagaaccaagagcaucagcagcagaaagggcuucgagaugaucugggaccccaacggcuggaccggcaccgacaacaacuucagcaucaagcaggacaucgugggcaucaacgaguggagcggcuacagcggcagcuucgugcagcaccccgagcugaccggccuggacugcaucagacccugcuucuggguggagcugaucagaggcagacccaaggagaacaccaucuggaccagcggcagcagcaucagcuucugcggcgugaacagcgacaccgugggcuggagcuggcccgacggcgccgagcugcccuucaccaucgacaaguga

SEQ ID NO: 183479 - RNA, 1410 nt, Artificial Sequence; identical to SEQ ID NO: 181892
  derived and/or modified CDS sequence (opt4) from neuraminidase__InfluenzaA__AGJ73364

SEQ ID NO: 183480 - RNA, 1410 nt, Artificial Sequence; identical to SEQ ID NO: 180769
  derived and/or modified CDS sequence (opt4) from neuraminidase__InfluenzaA__AGJ73366

SEQ ID NO: 183481 - RNA, 1410 nt, Artificial Sequence; identical to SEQ ID NO: 180317
  derived and/or modified CDS sequence (opt4) from neuraminidase__InfluenzaA__AGJ73370

SEQ ID NO: 183482 - RNA, 1410 nt, Artificial Sequence
  derived and/or modified CDS sequence (opt4) from neuraminidase__InfluenzaA__AGJ73372
augaaccccaaccagaagaucaucaccaucggcagcgugugcaugaccaucggcauggccaaccugauccugcagaucggcaacaucaucagcaucuggaucagccacagcauccagcugggcaaccagaaccagaucgagaccugcaaccagagcgugaucaccuacgagaacaacaccugggugaaccagaccuacgugaacaucagcaacaccaacuucgccgccggccagagcguggugagcgugaagcuggccggcaacagcagccugugccccgugagcggcugggccaucuacagcaaggacaacagcaucagaaucggcagcaagggcgacguguucgugaucagagagcccuucaucagcugcagcccccuggagugcagaaccuucuuccugacccagggcgcccugcugaacgacaagcacagcaacggcaccaucaaggacagaagccccuacagaacccugaugagcugccccaucggcgaggugcccagccccuacaacagcagauucgagagcguggccuggagcgccagcgccugccacgacggcaucaacuggcugaccaucggcaucagcggccccgacaacggcgccguggccgugcugaaguacaacggcaucaucaccgacaccaucaagagcuggagaaacaacauccugagaacccaggagagcgagugcgccugcgugaacggcagcugcuucaccaucaugaccgacggccccagcgacggccaggccagcuacaagaucuucagaaucgagaagggcaagaucgugaagagcguggagaugaacgcccccaacuaccacuacgaggagugcagcugcuaccccgacagcagcgagaucaccugcgugugcagagacaacuggcacggcagcaacagacccugggugagcuucaaccacaaccuggaguaccagaucggcuacaucugcagcggcaucuucggcgacaaccccagacccaacgacaagaccggcagcugcggccccgugagcagcaacggcgccaacggcgugaagggcuucagcuucaaguacggcaacggcguguggaucggcagaaccaagagcaucagcagcagaaagggcuucgagaugaucugggaccccaacggcuggaccggcaccgacaacaacuucagcaucaagcaggacaucgugggcaucaacgaguggagcggcuacagcggcagcuucgugcagcaccccgagcugaccggccuggacugcaucagacccugcuucuggguggagcugaucagaggcagacccaaggagaacaccaucuggaccagcggcagcagcaucagcuucugcggcgugaacagcgacaccgugggcuggagcuggcccgacggcgccgagcugcccuucaccaucgacaaguga

SEQ ID NO: 183483 - RNA, 1410 nt, Artificial Sequence; identical to SEQ ID NO: 180317
  derived and/or modified CDS sequence (opt4) from neuraminidase__InfluenzaA__AGJ73374

SEQ ID NO: 183484 - RNA, 1410 nt, Artificial Sequence
  derived and/or modified CDS sequence (opt4) from neuraminidase__InfluenzaA__AGJ73376
augaaccccaaccagaagaucaucaccaucggcagcgugugcaugaccaucggcauggccaaccugauccugcagaucggcaacaucaucagcaucuggaucagccacagcauccagcugggcaaccagagccagaucgagaccugcaaccagagcgugaucaccuacgagaacaacaccugggugaaccagaccuacgugaacaucagcaacaccaacuucgccgccggccagagcguggugagcgugaagcuggccggcaacagcagccugugccccgugagcggcugggccaucuacagcaaggacaacagcgugagaaucggcagcaagggcgacguguucgugaucagagagcccuucaucagcugcagcccccuggagugcagaaccuucuuccugacccagggcgcccugcugaacgacaagcacagcaacggcaccaucaaggacagaagccccuacagaacccugaugagcugccccaucggcgaggugcccagccccuacaacagcagauucgagagcguggccuggagcgccagcgccugccacgacggcaucaacuggcugaccaucggcaucagcggccccgacagcggcgccguggccgugcugaaguacaacggcaucaucaccgacaccaucaagagcuggagaaacaacauccugagaacccaggagagcgagugcgccugcgugaacggcagcugcuucaccaucaugaccgacggccccagcgacggccaggccagcuacaagauccugagaaucgagaagggcaagaucgugaagagcguggagaugaacgcccccaacuaccacuacgaggagugcagcugcuaccccgacagcagcgagaucaccugcgugugcagagacaacuggcacggcagcaacagacccugggugagcuucaaccagaaccuggaguaccagaucggcuacaucugcagcggcaucuucggcgacaaccccagacccaacgacaagaccggcagcugcggccccgugagcagcaacggcgccaacggcgugaagggcuucagcuucaaguacggcaacggcguguggaucggcagaaccaagagcaucagcagcagaaagggcuucgagaugaucugggaccccaacggcuggaccggcaccgacaacaacuucagcaccaagcaggacaucgugggcaucaacgaguggagcggcuacagcggcagcuucgugcagcaccccgagcugaccggccuggacugcaucagacccugcuucuggguggagcugaucagaggcagacccaaggagaacaccaucuggaccagcggcagcagcaucagcuucugcggcgugaacagcgacaccgugggcuggagcuggcccgacggcgccgagcugcccuucaccaucgacaaguga

SEQ ID NO: 183485 - RNA, 1410 nt, Artificial Sequence
  derived and/or modified CDS sequence (opt4) from neuraminidase__InfluenzaA__AGJ73379
augaaccccaaccagaagaucaucaccaucggcagcgugugcaugaccaucggcauggccaaccugauccugcagaucggcaacaucaucagcaucuggaucagccacagcauccagcugggcaaccagagccagaucgagaccugcaaccagagcgugaucaccuacgagaacaacaccugggugaaccagaccuacgugaacaucagcaacaccaacuucgccgccggccagagcguggugagcgugaagcuggccggcaacagcagccugugccccgugagcggcugggccaucuacagcaaggacaacagcgugagaaucggcagcaagggcgacguguucgugaucagagagcccuucaucagcugcagcccccuggagugcagaaccuucuuccugacccagggcgcccugcugaacgacaagcacagcaacggcaccaucaaggacagaagccccuacagaacccugaugagcugccccaucggcgaggugcccagccccuacaacagcagauucgagagcguggccuggagcgccagcgccugccacgacggcaucaacuggcugaccaucggcaucagcggccccgacagcggcgccguggccgugcugaaguacaacggcaucaucaccgacaccaucaagagcuggagaaacaacauccugagaacccaggagagcgagugcgccugcgugaacggcagcugcuucaccaucaugaccgacggccccagcgacggccaggccagcuacaagaucuucagaaucgagaagggcaagaucgugaagagcguggagaugaacgcccccaacuaccacuacgaggagugcagcugcuaccccgacagcagcgagaucaccugcgugugcagagacaacuggcacggcagcaacagacccugggugagcuucaaccagaaccuggaguaccagaucggcuacaucugcagcggcaucuucggcgacaaccccagacccaacgacaagaccggcagcugcggccccgugagcagcaacggcgccaacggcgugaagggcuucagcuucaaguacggcaacggcguguggaucggcagaaccaagagcaucagcagcagaaagggcuucgagaugaucugggaccccaacggcuggaccggcaccgacaacaacuucagcaucaagcaggacaucaucggcaucaacgaguggagcggcuacagcggcagcuucgugcagcaccccgagcugaccggccuggacugcaucagacccugcuucuggguggagcugaucagaggcagacccaaggagaacaccaucuggaccagcggcagcagcaucagcuucugcggcgugaacagcgacaccgugggcuggagcuggcccgacggcgccgagcugcccuucaccaucgacaaguga

SEQ ID NO: 183486 - RNA, 1410 nt, Artificial Sequence
  derived and/or modified CDS sequence (opt4) from neuraminidase__InfluenzaA__AGJ73381
augaaccccaaccagaagaucaucaccaucggcagcgugugcaugaccaucggcauggccaaccugauccugcagaucggcaacaucaucagcaucuggaucagccacagcauccagcugggcaaccagagccagaucgagaccugcaaccagagcgugaucaccuacgagaacaacaccugggugaaccagaccuacgugaacaucagcaacaccaacuucgccgccggccagagcguggugagcgugaagcuggccggcaacagcagccugugccccgugagcggcugggccaucuacagcaaggacaacagcgugagaaucggcagcaagggcgacguguucgugaucagagagcccuucaucagcugcagcccccuggagugcagaaccuucuuccugacccagggcgcccugcugaacgacgagcacagcaacggcaccaucaaggacagaagccccuacagaacccugaugagcugccccaucggcgaggugcccagccccuacaacagcagauucgagagcguggccuggagcgccagcgccugccacgacggcaucaacuggcugaccaucggcaucagcggccccgacagcggcgccguggccgugcugaaguacaacggcaucaucaccgacaccaucaagagcuggagaaacaacauccugagaacccaggagagcgagugcgccugcgugaacggcagcugcuucaccaucaugaccgacggccccagcgacggccaggccagcuacaagaucuucagaaucgagaagggcaagaucgugaagagcguggagaugaacgcccccaacuaccacuacgaggagugcagcugcuaccccgacagcagcgagaucaccugcgugugcagagacaacuggcacggcagcaacagacccugggugagcuucaaccagaaccuggaguaccagaucggcuacaucugcagcggcaucuucggcgacaaccccagacccaacgacaagaccggcagcugcggccccgugagcagcaacggcgccaacggcgugaagggcuucagcuucaaguacggcaacggcguguggaucggcagaaccaagagcaucagcagcagaaagggcuucgagaugaucugggaccccaacggcuggaccggcaccgacaacaacuucagcaucaagcaggacaucgugggcaucaacgaguggagcggcuacagcggcagcuucgugcagcaccccgagcugaccggccuggacugcaucagacccugcuucuggguggagcugaucagaggcagacccaaggagaacaccaucuggaccagcggcagcagcaucagcuucugcggcgugaacagcgacaccgugggcuggagcuggcccgacggcgccgagcugcccuucaccaucgacaaguga

SEQ ID NO: 183487 - RNA, 1410 nt, Artificial Sequence
  derived and/or modified CDS sequence (opt4) from neuraminidase__InfluenzaA__AGK62992
augaaccccaaccagaagaucaucaccaucggcagcgugagccugaccaucagcaccaucugcuucuucaugcagaucgccauccugaucaccaccgugacccugcacuucaagcaguacgaguucaacagcccccccaacaaccaggugaugcugugcgagcccaccaucaucgagagaaacaucaccgagaucguguaccugaccaacaccaccaucgagaaggagaucugccccaagcccgccgaguacagaaacuggagcaagccccagugcgacaucaccggcuucgcccccuucagcaaggacaacagcaucagacugagcgccggcggcgacaucugggugaccagagagcccuacgugagcugcgaccccgacaagugcuaccaguucgcccugggccagggcaccacccugaacaacgugcacagcaacaacaccgugagagacagaacccccuacagaacccugcugaugaacgagcugggcgugcccuuccaccugggcaccaagcaggugugcaucgccuggagcagcagcagcugccacgacggcaaggccuggcugcacgugugcaucaccggcgacgacaagaacgccaccgccagcuucaucuacaacggcagacugguggacagcguggugagcuggagcaaggagauccugagaacccaggagagcgagugcgugugcaucaacggcaccugcaccguggugaugaccgacggcagcgccagcggcaaggccgacaccaagauccuguucaucgaggagggcaagaucgugcacaccagcacccugagcggcagcgcccagcacguggaggagugcagcugcuaccccagauaccccggcgugagaugcgugugcagagacaacuggaagggcagcaacagacccaucguggacaucaacaucaaggaccacagcaucgugagcagcuacgugugcagcggccuggugggcgacacccccagaaagaacgacagcagcagcagcagccacugccuggaccccaacaacgaggagggcggccacggcgugaagggcugggccuucgacgacggcaacgacguguggaugggcagaaccaucaacgagaccagcagacugggcuacgagaccuucaaggugaucgagggcuggagcaaccccaagagcaagcugcagaucaacagacaggugaucguggacagaggcgacagaagcggcuacagcggcaucuucagcguggaggugaagagcugcaucaacagaugcuucuacguggagcugaucagaggcagaaaggaggagaccgaggugcuguggaccagcaacagcaucgugguguucugcggcaccagcggcaccuacggcaccggcagcuggcccgacggcgccgacaucaaccugaugcccaucuga

SEQ ID NO: 183488 - RNA, 1410 nt, Artificial Sequence
  derived and/or modified CDS sequence (opt4) from neuraminidase__InfluenzaA__AGK62996
augaaccccaaccagaagaucaucaccaucggcagcgugagccugaucaucagcaccaucugcuucuucaugcagaucgccauccugaucaccaccgugacccugcacuucaagcaguacgaguucaacagcccccccaacaaccaggugaugcugugcgagcccaccaucaucgagagaaacaucaccgagaucguguaccugaccaacaccaccaucgagaaggagaucugccccaagcccgccgaguacagaaacuggagcaagccccagugcgacaucaccggcuucgcccccuucagcaaggacaacagcaucagacugagcgccggcggcgacaucugggugaccagagagcccuacgugagcugcgaccccgacaagugcuaccaguucgcccugggccagggcaccacccugaacaacgugcacagcaacaacaccgugagagacagaacccccuacagaacccugcugaugaacgagcugggcgugcccuuccaccugggcaccaagcaggugugcaucgccuggagcagcagcagcugccacgacggcaaggccuggcugcacgugugcaucaccggcgacgacaagaacgccaccgccagcuucaucuacaacggcagacugguggacagcguggugagcuggagcaaggagauccugagaacccaggagagcgagugcgugugcaucaacggcaccugcaccguggugaugaccgacggcagcgccagcggcaaggccgacaccaagauccuguucaucgaggagggcaagaucgugcacaccagcacccugagcggcagcgcccagcacguggaggagugcagcugcuaccccagauaccccggcgugagaugcgugugcagagacaacuggaagggcagcaacagacccaucguggacaucaacaucaaggaccacagcaucgugagcagcuacgugugcagcggccuggugggcgacacccccagaaagaacgacagcagcagcagcagccacugccuggaccccaacaacgaggagggcggccacggcgugaagggcugggccuucgacgacggcaacgacguguggaugggcagaaccaucaacgagaccagcagacugggcuacgagaccuucaaggugaucgagggcuggagcaaccccaagagcaagcugcagaucaacagacaggugaucguggacagaggcgacagaagcggcuacagcggcaucuucagcguggagagcaagagcugcaucaacagaugcuucuacguggagcugaucagaggcagaaaggaggagaccgaggugcuguggaccagcaacagcaucgugguguucugcggcaccagcggcaccuacggcaccggcagcuggcccgacggcgccgacaucaaccugaugcccaucuga

SEQ ID NO: 183489 - RNA, 1410 nt, Artificial Sequence
  derived and/or modified CDS sequence (opt4) from neuraminidase__InfluenzaA__AGK62998
augaaccccaaccagaagaucaucaccaucggcagcgugagccugaccaucgccaccaucugcuucuucaugcagaucgccauccugaucaccaccgugacccugcacuucaagcagugcgaguucaacagcccccccaacaaccaggugaugcugugcgagcccaccaucaucgagagaaacaucaccgagaucguguaccugaccaacaccaccaucgagaaggagaucugccccaagcuggccgaguacagaaacuggagcaagccccagugcgacaucaccggcuucgcccccuucagcaaggacaacagcaucagacugagcgccggcggcgacaucugggugaccagagagcccuacgugagcugcgaccccgacaagugcuaccaguucgcccugggccagggcaccacccugaacaacgugcacagcaacaacaccgugagagacagaacccccuacagaacccugcugaugaacgagcugggcgugcccuuccaccugggcaccaagcaggugugcauggccuggagcagcagcagcugccacgacggcaaggccuggcugcacgugugcaucaccggcgacgacaagaacgccaccgccagcuucaucuacaacggcagacugguggacagcguggugagcuggagcaaggagauccugagaacccaggagagcgagugcgugugcaucaacggcaccugcaccguggugaugaccgacggcagcgccagcggcaaggccgacaccaagauccuguucaucgaggagggcaagaucgugcacaccagcacccugagcggcagcgcccagcacguggaggagugcagcugcuaccccagauaccccggcgugagaugcgugugcagagacaacuggaagggcagcaacagacccaucguggacaucaacaucaaggaccacagcaucgugagcagcuacgugugcagcggccugcugggcgacacccccagaaagaacgacagcagcagcagcagccacugccuggaccccaacaacgaggagggcggccacggcgugaagggcugggccuucgacgacggcaacgacguguggaugggcagaaccaucagcgagaagagcagacugggcuacgagaccuucaaggugaucgagggcuggagcaaccccaagagcaagcugcagaucaacagacaggugaucguggacagaggcgacagaagcggcuacagcggcaucuucagcguggagagcaagagcugcaucaacagaugcuucuacguggagcugaucagaggcagaaaggaggagaccgaggugcuguggaccagcaacagcaucgugguguucugcggcaccagcggcaccuacggcaccggcagcuggcccgacggcgccgacaucaaccugaugcccaucuga

SEQ ID NO: 183490 - RNA, 1410 nt, Artificial Sequence
  derived and/or modified CDS sequence (opt4) from neuraminidase__InfluenzaA__AGK63000
augaaccccaaccagaagaucaucaccaucggcagcgugagccugaccaucgccaccaucugcuucuucaugcagaucgccauccugaucaccaccgugacccugcacuucaagcagugcgacuucaacagcccccccaacaaccaggugaugcugugcgagcccaccaucaucgagagaaacaucaccgagaucguguaccugaccaacaccaccaucgagaaggagaucugccccaagcuggccgaguacagaaacuggagcaagccccagugcgacaucaccggcuucgcccccuucagcaaggacaacagcaucagacugagcgccggcggcgacaucugggugaccagagagcccuacgugagcugcgaccccgacaagugcuaccaguucgcccugggccagggcaccacccugaacaacgugcacagcaacaacaccgugagagacagaacccccuacagaacccugcugaugaacgagcugggcgugcccuuccaccugggcaccaagcaggugugcauggccuggagcagcagcagcugccacgacggcaaggccuggcugcacgugugcaucaccggcgacgacaagaacgccaccgccagcuucaucuacaacggcaagcugguggacagcguggugagcuggagcaaggagauccugagaacccaggagagcgagugcgugugcaucaacggcaccugcaccguggugaugaccgacggcagcgccagcggcaaggccgacaccaagauccuguucaucgaggagggcaagaucgugcacaccagcacccugagcggcagcgcccagcacguggaggagugcagcugcuaccccagauaccccggcgugagaugcgugugcagagacaacuggaagggcagcaacagacccaucguggacaucaacaucaaggaccacagcaucgugagcagcuacgugugcagcggccuggugggcgacacccccagaaagaacgacagcagcagcagcagccacugccuggaccccaacaacgaggagggcggccacggcgugaagggcugggccuucgacgacggcaacgacguguggaugggcagaaccaucaacgagaccagcagacugggcuacgagaccuucaaggugaucgagggcuggagcaaccccaagagcaagcugcagaucaacagacaggugaucguggacagaggcgacagaagcggcuacagcggcaucuucagcguggagggcaagagcugcaucaacagaugcuucuacguggagcugaucagaggcagaaaggaggagaccgaggugcuguggaccagcaacagcaucgugguguucugcggcaccagcggcaccuacggcaccggcagcuggcccgacggcgccgacaucaaccugaugcccaucuga

SEQ ID NO: 183491 - RNA, 1410 nt, Artificial Sequence
  derived and/or modified CDS sequence (opt4) from neuraminidase__InfluenzaA__AGK63002
augaaccccaaccagaagaucaucaccaucggcagcgugagccugaccaucagcaccaucugcuucuucaugcagaucgccauccugaugaccaccgugacccugcacuucaagcagugcgaguucaacagcccccccaacaaccaggugaugcugugcgagcccaccaucaucgagagaaacaucaccgagaucguguaccugaccaacaccaccaucgagaaggagaucugccccaagcuggccgaguacagaaacuggagcaagccccagugcgacaucaccggcuucgcccccuucagcaaggacaacagcaucagacugagcgccggcggcgacaucugggugaccagagagcccuacgugagcugcgaccccgacaagugcuaccaguucgcccugggccagggcaccacccugaacaacgugcacagcaacaacaccgugagagacagaacccccuacagaacccugcugaugaacgagcugggcgugcccuuccaccugggcaccaagcaggugugcauggccuggagcagcagcagcugccacgacggcaaggccuggcugcacgugugcaucaccggcaacgacaagaacgccaccgccagcuucaucuacaacggcagacugguggacagcguggugagcuggagcaaggagauccugagaacccaggagagcgagugcgugugcaucaacggcaccugcaccguggugaugaccgacggcagcgccagcggcaaggccgacaccaagauccuguucaucgaggagggcaagaucgugcacaccagcacccugagcggcagcgcccagcacguggaggagugcagcugcuaccccagauaccccggcgugagaugcgugugcagagacaacuggaagggcagcaacagacccaucguggacaucaacaucaaggaccacagcaucgugagcagcuacgugugcagcggccuggugggcgacacccccagaaagaacgacagcagcagcagcagccacugccuggaccccaacaacgaggagggcggccacggcgugaagggcugggccuucgacgacggcaacgacguguggaugggcagaaccaucaccgagaccagcagacugggcuacgagaccuucaaggugaucgagggcuggagcaaccccaagagcaagcugcagaucaacagacaggugaucguggacagaggcgacagaagcggcuacagcggcaucuucagcguggagggcaagagcugcaucaacagaugcuucuacguggagcugaucagaggcagaaaggaggagaccgaggugcuguggaccagcaacagcaucgugguguucugcggcaccagcggcaccuacggcaccggcagcuggcccgacggcgccgacaucaaccugaugcccaucuga

SEQ ID NO: 183492 - RNA, 1410 nt, Artificial Sequence
  derived and/or modified CDS sequence (opt4) from neuraminidase__InfluenzaA__AGK63004
augaaccccaaccagaagaucaucaccaucggcagcgugagccugaccaucagcaccaucugcuucuucaugcagaucgccauccugaucaccaccgugacccugcacuucaagcaguacgaguucaacagcccccccaacaaccaggugaugcugugcgagcccaccaucaucgagagaaacaucaccgagaucguguaccugaccaacaccaccaucgagaaggagaucugccccaagcccgccgaguacagaaacuggagcaagccccagugcgacaucaccggcuucgcccccuucagcaaggacaacagcaucagacugagcgccggcggcgacaucugggugaccagagagcccuacgugagcugcgaccccgacaagugcuaccaguucgcccugggccagggcaccacccugaacaacgugcacagcaacaacaccgugagagacagaacccccuacagaacccugcugaugaacgagcugggcgugcccuuccaccugggcaccaagcaggugugcaucgccuggagcagcagcagcugccacgacggcaaggccuggcugcacgugugcaucaccggcgacgacaagaacgccaccgccagcuucaucuacaacggcagacugguggacagcguggugagcuggagcaaggagauccugagaacccaggagagcgagugcgugugcaucaacggcaccugcaccguggugaugaccgacggcagcgccagcggcaaggccgacaccaagauccuguucaucgaggagggcaagaucgugcacaccagcacccugagcggcagcagccagcacguggaggagugcagcugcuaccccagauaccccggcgugagaugcgugugcagagacaacuggaagggcagcaacagacccaucguggacaucaacaucaaggaccacagcaucgugagcagcuacgugugcagcggccuggugggcgacacccccagaaagaacgacagcagcagcagcagccacugccuggaccccaacaacgaggagggcggccacggcgugaagggcugggccuucgacgacggcaacgacguguggaugggcagaaccaucaacgagaccagcagacugggcuacgagaccuucaaggugaucgagggcuggagcaaccccaagagcaagcugcagaucaacagacaggugaucguggacagaggcgacagaagcggcuacagcggcaucuucagcguggagggcaagagcugcaucaacagaugcuucuacguggagcugaucagaggcagaaaggaggagaccgaggugcuguggaccagcaacagcaucgugguguucugcggcaccagcggcaccuacggcaccggcagcuggcccgacggcgccgacaucaaccugaugcccaucuga

SEQ ID NO: 183493 - RNA, 1410 nt, Artificial Sequence
  derived and/or modified CDS sequence (opt4) from neuraminidase__InfluenzaA__AGK63006
augaaccccaaccagaagaucaucaccaucggcagcgugagccugaccaucgccaccaucugcuucuucaugcagaucgccauccugaucaccaccgugacccugcacuucaagcaguacgaguucaacagcccccccaacaaccaggugaugcugugcgagcccaccaucaucgagagaaacaucaccgagaucguguaccugaccaacaccaccaucgagaaggagaucugccccaagcccgccgaguacagaaacuggagcaagccccagugcgacaucaccggcuucgcccccuucagcaaggacaacagcaucagacugagcgccggcggcgacaucugggugaccagagagcccuacgugagcugcgaccccgacaagugcuaccaguucgcccugggccagggcaccacccugaacaacgugcacagcaacaacaccgugagagacagaacccccuacagaacccugcugaugaacgagcugggcgugcccuuccaccugggcaccaagcaggugugcaucgccuggagcagcagcagcugccacgacggcaaggccuggcugcacgugugcaucaccggcgacgacaagaacgccaccgccagcuucaucuacaacggcagacugguggacagcguggugagcuggagcaaggagauccugagaacccaggagagcgagugcgugugcaucaacggcaccugcaccguggugaugaccgacggcagcgccagcgccaaggccgacaccaagauccuguucaucgaggagggcaagaucgugcacaccagcacccugagcggcagcgcccagcacguggaggagugcagcugcuaccccagauacagcggcgugagaugcgugugcagagacaacuggaagggcagcaacagacccaucguggacaucaacaucaaggaccacagcaucgugagcagcuacgugugcagcggccuggugggcgacacccccagaaagaacgacagcagcagcagcagccacugccuggaccccaacaacgaggagggcggccacggcgugaagggcugggccuucgacgacggcaacgacguguggaugggcagaaccaucaacgagaccagcagacugggcuacgagaccuucaaggugaucgagggcuggagcaaccccaagagccagcugcagaucaacagacaggugaucguggacagaggcgacagaagcggcuacagcggcaucuucagcguggagagcaagagcugcaucaacagaugcuucuacguggagcugaucagaggcagaaaggaggagaccgaggugcuguggaccagcaacagcaucgugguguucugcggcaccagcggcaccuacggcaccggcagcuggcccgacggcgccgacaucaaccugaugcccaucuga

SEQ ID NO: 183494 - RNA, 1410 nt, Artificial Sequence
  derived and/or modified CDS sequence (opt4) from neuraminidase__InfluenzaA__AGK63008
augaaccccaaccagaagaucaucaccaucggcagcgugagccugaccaucgccaccaucugcuucuucaugcagaucgccauccugaucaccaccgugacccugcacuucaagcagugcgaguucaacagcccccccaacaaccaggugaugcugugcgagcccaccaucaucgagagaaacaucaccgagaucguguaccugaccaacaccaccaucgagaaggagaucugccccaagcuggccgaguacagaaacuggagcaagccccagugcgacaucaccggcuucgcccccuucagcaaggacaacagcaucagacugagcgccggcggcgacaucugggugaccagagagcccuacgugagcugcgaccccgacaagugcuaccaguucgcccugggccagggcaccacccugaacaacgugcacagcaacaacaccgugagagacagaacccccuacagaacccugcugaugaacgagcugggcgugcccuuccaccugggcaccaagcaggugugcauggccuggagcagcagcagcugccacgacggcaaggccuggcugcacgugugcaucaccggcgacgacaagaacgccaccgccagcuucaucuacaacggcaagcugguggacagcguggugagcuggagcaaggagauccugagaacccaggagagcgagugcgugugcaucaacggcaccugcaccguggugaugaccgacggcagcgccagcggcaaggccgacaccaagauccuguucaucgaggagggcaagaucgugcacaccagcacccugagcggcagcgcccagcacguggaggagugcagcugcuaccccagauaccccggcgugagaugcgugugcagagacaacuggaagggcagcaacagacccaucguggacaucaacaucaaggaccacagcaucgugagcagcuacgugugcagcggccuggugggcgacacccccagaaagaacgacagcagcagcagcagccacugccuggaccccaacaacgaggagggcggccacggcgugaagggcugggccuucgacgacggcaacgacguguggaugggcagaaccaucaacgagaccagcagacugggcuacgagaccuucaaggugaucgagggcuggagcaaccccaagagcaagcugcagaugaacagacaggugaucguggacagaggcgacagaagcggcuacagcggcaucuucagcguggagggcaagagcugcaucaacagaugcuucuacguggagcugaucagaggcagaaaggaggagaccgaggugcuguggaccagcaacagcaucgugguguucugcggcaccagcggcaccuacggcaccggcagcuggcccgacggcgccgacaucaaccugaugcccaucuga

SEQ ID NO: 183495 - RNA, 1410 nt, Artificial Sequence
  derived and/or modified CDS sequence (opt4) from neuraminidase__InfluenzaA__AGK63010
augaaccccaaccagaagaucaucaccaucggcagcgugagccugaccaucgccaccaucugcuucuucaugcagaucgccauccugaucaccaccgugacccugcacuucaagcagugcgaguucaacagcccccccaacaaccaggugaugcugugcgagcccaccaucaucgagagaaacaucaccgagaucguguaccugaccaacaccaccaucgagaaggagaucugccccaagcuggccgaguacagaaacuggagcaagccccagugcgacaucaccggcuucgcccccuucagcaaggacaacagcaucagacugagcgccggcggcgacaucugggugaccagagagcccuacgugagcugcgaccccgacaagugcuaccaguucgcccugggccagggcaccacccugaacaacgugcacagcaacaacaccgugagagacagaacccccuacagaacccugcugaugaacgagcugggcgugcccuuccaccugggcaccaagcaggugugcauggccuggagcagcagcagcugccacgacggcaaggccuggcugcacgugugcaucaccggcgacgacaagaacgccaccgccagcuucaucuacaacggcaagcugguggacagcguggugagcuggagcaaggagauccugagaacccaggagagcgagugcgugugcaucaacggcaccugcaccguggugaugaccgacggcagcgccagcggcaaggccgacaccaagauccuguucaucgaggagggcaagaucgugcacaccagcacccugagcggcagcgcccagcacguggaggagugcagcugcuaccccagauaccccggcgugagaugcgugugcagagacaacuggaagggcagcaacagacccaucguggacaucaacaucaaggaccacagcaucgugagcagcuacgugugcagcggccuggugggcgacacccccagaaagaacgacagcagcagcagcagccacugccuggaccccaacaacgaggagggcggccacggcgugaagggcugggccuucgacgacggcaacgacguguggaugggcagaaccaucaacgagaccagcagacugggcuacgagaccuucaaggugaucgagggcuggagcgaccccaagagcaagcugcagaucaacagacaggugaucguggacagaggcgacagaagcggcuacagcggcaucuucagcguggagggcaagagcugcaucaacagaugcuucuacguggagcugaucagaggcagaaaggaggagaccgaggugcuguggaccagcaacagcaucgugguguucugcggcaccagcggcaccuacggcaccggcagcuggcccgacggcgccgacaucaaccugaugcccaucuga

SEQ ID NO: 183496 - RNA, 1410 nt, Artificial Sequence
  derived and/or modified CDS sequence (opt4) from neuraminidase__InfluenzaA__AGK63012
augaaccccaaccagaagaucaucaccaucggcagcgugagccugaccaucagcaccaucugcuucuucaugcagaucgccauccugaucaccaccgugacccugcacuucaagcaguacgaguucaacagcccccccaacaaccaggugaugcugugcgagcccaccaucaucgagagaaacaucaccgagaucguguaccugaccaacaccaccaucgagaaggagaucugccccaagcccgccgaguacagaaacuggagcaagccccagugcgacaucaccggcuucgcccccuucagcaaggacaacagcaucagacugagcgccggcggcgacaucugggugaccagagagcccuacgugagcugcgaccccgacaagugcuaccaguucgcccugggccagggcaccacccugaacaacgugcacagcaacaacaccgugagagacagaacccccuacagaacccugcugaugaacgagcugggcgugcccuuccaccugggcaccaagcaggugugcaucgccuggagcagcagcagcugccacgacggcaaggccuggcugcacgugugcaucaccggcgacgacaagaacgccaccgccagcuucaucuacaacggcagacugguggacagcguggugagcuggagcaaggagauccugagaacccaggagagcgagugcgugugcaucaacggcaccugcaccguggugaugaccgacggcagcgccagcggcaaggccgacaccaagauccuguucaucgaggagggcaagaucgugcacaccagcacccugagcggcagcgcccagcacguggaggagugcagcugcuaccccagauaccccggcgugagaugcgugugcagagacaacuggaagggcagcaacagacccaucguggacaucaacaucaaggaccacagcaucgugagcagcuacgugugcagcggccuggugggcgacacccccagaaagaacgacagcagcagcagcagccacugccuggaccccaacaacgaggagggcggccacggcgugaagggcugggccuucgacgacggcaacgacguguggaugggcagaaccaucaacgagaccagcagacugggcuacgagaccuucaaggugaucgagggcuggagcaaccccaagagcaagcugcagaucaacagacaggugaucguggacagaggcuacagaagcggcuacagcggcaucuucagcguggagggcaagagcugcaucaacagaugcuucuacguggaccugaucagaggcagaaaggaggagaccgaggugcuguggaccagcaacagcaucgugguguucugcggcaccagcggcaccuacggcaccggcagcuggcccgacggcgccgacaucaaccugaugcccaucuga

SEQ ID NO: 183497 - RNA, 1410 nt, Artificial Sequence
  derived and/or modified CDS sequence (opt4) from neuraminidase__InfluenzaA__AGK63014
augaaccccaaccagaagaucaucaccaucggcagcgugagccugaccaucagcaccaucugcuucuucaugcagaucgccauccugaucaccaccgugacccugcacuucaagcaguacgaguucaacagcccccccaacaaccaggugaugcugugcgagcccaccaucaucgagagaaacaucaccgagaucguguaccugaccaacaccaccaucgagaaggagaucugccccaagcccgccgaguacagaaacuggagcaagccccagugcgacaucaccggcuucgcccccuucagcaaggacaacagcaucagacugagcgccggcggcgacaucugggugaccagagagcccuacgugagcugcgaccccgacaagugcuaccaguucgcccugggccagggcaccacccugaacaacgugcacagcaacaacaccgugagagacagaacccccuacagaacccugcugaugaacgagcugggcgugcccuucccccugggcaccaagcaggugugcaucgccuggagcagcagcagcugccacgacggcaaggccuggcugcacgugugcaucaccggcgacgacaagaacgccaccgccagcuucaucuacaacggcagacugguggacagcguggugagcuggagcaaggagauccacagaacccaggagagcgagugcgugugcaucaacggcaccugcaccguggugaugaccgacggcagcgccagcggcaaggccgacaccaagauccuguucaucgaggagggcaagaucgugcacaccagcacccugagcggcagcgcccagcacguggaggagugcagcugcuaccccagauaccccggcgugagaugcgugugcagagacaacuggaagggcagcaacagacccaucguggacaucaacaucaaggaccacagcaucgugagcagcuacgugugcagcggccuggugggcgacacccccagaaagaacgacagcagcagcagcagccacugccuggaccccaacaacgaggagggcggccacggcgugaagggcugggccuucgacgacggcaacgacguguggaugggcagaaccaucagcgagaagagcagacugggcuacgagaccuucaaggugaucgagggcuggagcaaccccaagagcaagcugcagaucaacagacaggugaucguggacagaggcaacagaagcggcuacagcggcaucuucagcguggagggcaagagcugcaucaacagaugcuucuacguggagcugaucagaggcagaaaggaggagaccgaggugcuguggaccagcaacagcaucgugguguucugcggcaccagcggcaccuacggcaccggcagcuggcccgacggcgccgacaucaaccugaugcccaucuga

SEQ ID NO: 183498 - RNA, 1410 nt, Artificial Sequence
  derived and/or modified CDS sequence (opt4) from neuraminidase__InfluenzaA__AGK63018
augaaccccaaccagaagaucaucaccaucggcagcgugagccugaccaucagcaccaucugcuucuucaugcagaucgccauccugaucaccaccgugacccugcacuucaagcagugcgaguucaacagcccccccaacaaccaggugaugcugugcgagcccaccaucaucgagagaaacaucaccgagaucguguaccugaccaacaccaccaucgagaaggagaucugccccaagcuggccgaguacagaaacuggagcaagccccagugcgacaucaccggcuucgcccccuucagcaaggacaacagcaucagacugagcgccggcggcgacaucugggugaccagagagcccuacgugagcugcgaccccgacaagugcuaccaguucgcccugggccagggcaccacccugaacaacgugcacagcaacaacaccgugagagacagaacccccuacagaacccugcugaugaacgagcugggcgugcccuuccaccugggcaccaagcaggugugcauggccuggagcagcagcagcugccacgacggcaaggccuggcugcacgugugcaucaccggcgacgacaagaacgccaccgccagcuucaucuacaacggcaagcugguggacagcguggugagcuggagcaaggagauccugagaacccaggagagcgagugcgugugcaucaacggcaccugcaccguggugaugaccgacggcagcgccagcggcaaggccgacaccaagauccuguucaucgaggagggcaagaucgugcacaccagcacccugagcggcagcgcccagcacguggaggagugcagcugcuaccccagauaccccggcgugagaugcgugugcagagacaacuggaagggcagcaacagacccaucguggacaucaacaucaaggaccacagcaucgugagcagcuacgugugcagcggccuggugggcgacacccccagaaagaacgacagcagcagcagcagccacugccuggaccccaacaacgaggagggcggccacggcgugaagggcugggccuucgacgacggcaacgacguguggaugggcagaaccaucaacgagaccagcagacugggcuacgagaccuucaaggugaucgagggcuggagcaaccccaagagcaagcugcagaucaacagacaggugaucguggacagaggcgacagaagcggcuacagcggcaucuucagcguggagggcaagagcugcaucaacagaugcuucuacguggagcugaucagaggcagaaaggaggagaccgaggugcuguggaccagcaacagcaucgugguguucugcggcaccagcggcaccuacggcaccggcagcuggcccgacggcgccgacaucaaccugaugcccaucuga

SEQ ID NO: 183499 - RNA, 1410 nt, Artificial Sequence
  derived and/or modified CDS sequence (opt4) from neuraminidase__InfluenzaA__AGK63020
augaaccccaaccagaagaucaucaccaucggcagcgugagccugaccaucagcaccaucugcuucuucaugcagaucgccauccugaucaccaccgugacccugcacuucaagcaguacgaguucaacagcccccccaacaaccaggugaugcugugcgagcccaccaucaucgagagaaacaucaccgagaucguguaccugaccaacaccaccaucgagaaggagaucugccccaagcccgccgaguacagaaacuggagcaagccccagugcgacaucaccggcuucgcccccuucagcaaggacaacagcaucagacugagcgccggcggcgacaucugggugaccagagagcccuacgugagcugcgaccccgacaagugcuaccaguucgcccugggccagggcaccacccugaacaacgugcacagcaacaacaccgugagagacagaacccccuacagaacccugcugaugaacgagcugggcgugcccuuccaccugggcaccaagcaggugugcaucgccuggagcagcagcagcugccacgacggcaaggccuggcugcacgugugcaucaccggcgacgacaagaacgccaccgccagcuucaucuacaacggcagacugguggacagcguggugagcuggagcaaggagauccugagaacccaggagagcgagugcgugugcaucaacggcaccugcaccguggugaugaccgacggcagcgccagcggcaaggccgacaccaagauccuguucaucgaggagggcaagaucgugcacaccagcacccugagcggcagcgcccagcacguggaggagugcagcugcuaccccagauaccccggcgugagaugcgugugcagagacaacuggaagggcagcaacagacccaucguggacaucaacaucaaggaccacagcaucgugagcagcuacgugugcagcggccuggugggcgacacccccagaaagaacgacagcagcagcagcagccacugccuggaccccaacaacgaggagggcggccacggcgugaagggcugggccuucgacgacggcaacgacguguggaugggcagaaccaucaacgagaccagcagacugggcuacgagaccuucaaggugaucgagggcuggagcaaccccaagagcaagcugcagaucaacagacaggugaucguggacagaggcgacagaagcggcuacagcggcaucuucagcguggagggcaagagcugcaucaacagaugcuucuacguggagcugaucagaggcagaaaggaggagaccgaggugcuguggaccagcaacagcaucgugguguucugcggcaccagcggcaccuacggcaccggcagcuggcccgacggcgccgacaucaaccugaugcccaucuga

SEQ ID NO: 183500 - RNA, 1410 nt, Artificial Sequence
  derived and/or modified CDS sequence (opt4) from neuraminidase__InfluenzaA__AGK63022
augaaccccaaccagaagaucaucaccaucggcagcgugagccugaccaucagcaccaucugcuucuucaugcagaucgccauccugaucaccaccgugacccugcacuucaagcagugcgaguucaacagcccccccaacaaccaggugaugcugugcgagcccaccaucaucgagagaaacaucaccgagaucguguaccugaccaacaccaccaucgagaaggagaucugccccaagcuggccgaguacagaaacuggagcaagccccagugcgacaucaccggcuucgcccccuucagcaaggacaacagcaucagacugagcgccggcggcgacaucugggugaccagagagcccuacgugagcugcgaccccgacaagugcuaccaguucgcccugggccagggcaccacccugaacaacgugcacagcaacaacaccgugagagacagaacccccuacagaacccugcugaugaacgagcugggcgugcccuuccaccugggcaccaagcaggugugcauggccuggagcagcagcagcugccacgacggcaaggccuggcugcacgugugcaucaccggcgacgacaagaacgccaccgccagcuucaucuacaacggcaagcugguggacagcguggugagcuggagcaaggagauccugagaacccaggagagcgagugcgugugcaucaacggcaccugcaccguggugaugaccgacggcagcgccagcggcaaggccgacaccaagauccuguucaucgaggagggcaagaucgugcacaccagcacccugagcggcagcgcccagcacguggaggagugcagcugcuaccccagauaccccggcgugagaugcgugugcagagacaacuggaagggcagcaacagacccaucguggacaucaacaucaaggaccacagcaucgugagcagcuacgugugcagcggccuggugggcgacacccccagaaagaacgacagcagcagcagcagccacugccuggaccccaacaacgaggagggcggccacggcgugaagggcugggccuucgacgacggcaacgacguguggaugggcagaaccaucaacgagaccagcagacugggcuacgagaccuucaaggugaucgagggcuggagcaaccccaagagcaagcugcagaucaacagacaggugaucguggacagaggcgacagaagcggcuacagcggcaucuucagcguggagggcaagagcugcaucaacagaugcuucuacguggaccugaucagaggcagaaaggaggagaccgaggugcuguggaccagcaacagcaucgugguguucugcggcaccagcggcaccuacggcaccggcagcuggcccgacggcgccgacaucaaccugaugcccaucuga

SEQ ID NO: 183501 - RNA, 1410 nt, Artificial Sequence; identical to SEQ ID NO: 183499
  derived and/or modified CDS sequence (opt4) from neuraminidase__InfluenzaA__AGK63024

SEQ ID NO: 183502 - RNA, 1410 nt, Artificial Sequence; identical to SEQ ID NO: 183499
  derived and/or modified CDS sequence (opt4) from neuraminidase__InfluenzaA__AGK63026

SEQ ID NO: 183503 - RNA, 1410 nt, Artificial Sequence
  derived and/or modified CDS sequence (opt4) from neuraminidase__InfluenzaA__AGK63028
augaaccccaaccagaagaucaucaccaucggcagcgugagccugaccaucagcaccaucugcuucuucaugcagaucgccauccugaucaccaccgugacccugcacuucaagcaguacgaguucaacagcccccccaacaaccaggugaugcugugcgagcccaccaucaucgagagaaacaagaccgagaucguguaccugaccaacaccaccaucgagaaggagaucugccccaagcccgccgaguacagaaacuggagcaagccccagugcgacaucaccggcuucgcccccuucagcaaggacaacagcaucagacugagcgccggcggcgacaucugggugaccagagagcccuacgugagcugcgaccccgacaagugcuaccaguucgcccugggccagggcaccacccugaacaacgugcacagcaacaacaccgugagagacagaacccccuacagaacccugcugaugaacgagcugggcgugcccuuccaccugggcaccaagcaggugugcaucgccuggagcagcagcagcugccacgacggcaaggccuggcugcacgugugcaucaccggcgacgacaagaacgccaccgccagcuucaucuacaacggcagacugguggacagcguggugagcuggagcaaggagauccugagaacccaggagagcgagugcgugugcaucaacggcaccugcaccguggugaugaccgacggcagcgccagcggcaaggccgacaccaagauccuguucaucgaggagggcaagguggugcacaccagcacccugagcggcagcgcccagcacguggaggagugcagcugcuaccccagauaccccggcgugagaugcgugugcagagacaacuggaagggcagcaacagacccaucguggacaucaacaucaaggaccacagcaucgugagcagcuacgugugcagcggccuggugggcgacacccccagaaagaacgacagcagcagcagcagccacugccuggaccccaacaacgaggagggcggccacggcgugaagggcugggccuucgacgacggcaacgacguguggaugggcagaaccaucaacgagaccagcagacugggcuacgagaccuucaaggugaucgagggcuggagcaaccccaagagcaagcugcagaucaacagacaggugaucguggacagaggcgacagaagcggcuacagcggcaucuucagcguggaggccaagagcugcaucaucagaugcuucuacguggagcugaucagaggcagaaaggaggagaccgaggugcuguggaccagcaacagcaucgugguguucugcggcaccagcggcaccuacggcaccggcagcuggcccgacggcgccgacaucaaccugaugcccaucuga

SEQ ID NO: 183504 - RNA, 1410 nt, Artificial Sequence; identical to SEQ ID NO: 183498
  derived and/or modified CDS sequence (opt4) from neuraminidase__InfluenzaA__AGK63030

SEQ ID NO: 183505 - RNA, 1410 nt, Artificial Sequence
  derived and/or modified CDS sequence (opt4) from neuraminidase__InfluenzaA__AGK63032
augaaccccaaccagaagaucaucaccaucggcagcgugagccugaccaucagcaccaucugcuucuucaugcagaucgccauccugaucaccaccgugacccugcacuucaagcaguacgaguucaacagcccccccaacaaccaggugaugcugugcgagcccaccaucaucgagagaaacaucaccgagaucguguaccugaccaacaccaccaucgagaaggagaucugccccaagcuggccgaguacagaaacuggagcaagccccagugcgacaucaccggcuucgcccccuucagcaaggacaacagcaucagacugagcgccggcggcgacaucugggugaccagagagcccuacgugagcugcgaccccgacaagugcuaccaguucgcccugggccagggcaccacccugaacaacgugcacagcaacaacaccgugagagacagaacccccuacagaacccugcugaugaacgagcugggcgugcccuuccaccugggcaccaagcaggugugcauggccuggagcagcagcagcugccacgacggcaaggccuggcugcacgugugcaucaccggcgacgacaagaacgccaccgccagcuucaucuacaacggcaagcugguggacagcguggugagcuggagcaaggagauccugagaacccaggagagcgagugcgugugcaucaacggcaccugcaccguggugaugaccgacggcagcgccagcggcaaggccgacaccaagauccuguucaucgaggagggcaagaucgugcacaccagcacccugagcggcagcgcccagcacguggaggagugcagcugcuaccccagauaccccggcgugagaugcgugugcagagacaacuggaagggcagcaacagacccaucguggacaucaacaucaaggaccacagcaucgugagcagcuacgugugcagcggccuggugggcgacacccccagaaagaacgacagcagcagcagcagccacugccuggaccccaacaacgaggagggcggccacggcgugaagggcugggccuucgacgacggcaacgacguguggaugggcagaaccaucaccgagaccagcagacugggcuacgagaccuucaaggugaucgagggcuggagcaaccccaagagcaagcugcagaucaacagacaggugaucguggacagaggcaacagaagcggcuacagcggcaucuucagcguggagggcaagagcugcaucaacagaugcuucuacguggagcugaucagaggcagaaaggaggagaccgaggugcuguggaccagcaacagcaucgugguguucugcggcaccagcggcaccuacggcaccggcagcuggcccgacggcgccgacaucaaccugaugcccaucuga

SEQ ID NO: 183506 - RNA, 1410 nt, Artificial Sequence
  derived and/or modified CDS sequence (opt4) from neuraminidase__InfluenzaA__AGK63034
augaaccccaaccagaagaucaucaccaucggcagcgugagccugaccaucagcaccaucugcuucuucaugcagaucgccauccugaucaccaccgugacccugcacuucaagcagugcgaguucaacagcccccccaacaaccaggugaugcugugcgagcccaccaucaucgagagaaacaucaccgagaucguguaccugaccaacaccaccaucgagaaggagaucugccccaagcuggccgaguacagaaacuggagcaagccccagugcgacaucaccggcuucgcccccuucagcaaggacaacagcaucagacugagcgccggcggcgacaucugggugaccagagagcccuacgugagcugcgaccccgacaagugcuaccaguucgcccugggccagggcaccacccugaacaacgugcacagcaacaacaccgugagagacagaacccccuacagaacccugcugaugaacgagcugggcgugcccuuccaccugggcaccaagcaggugugcauggccuggagcagcagcagcugccacgacggcaaggccuggcugcacgugugcaucaccggcgacgacaagaacgccaccgccagcuucaucuacaacggcaagcugguggacagcguggugagcuggagcaaggagauccugagaacccaggagagcgagugcgugugcaucaacggcaccugcaccguggugaugaccgacggcagcgccagcggcaaggccgacaccaagauccuguucaucgaggagggcaagaucgugcacaccagcacccugagcggcagcgcccagcacguggaggagugcagcugcuaccccagauaccccggcgugagaugcgugugcagagacaacuggaagggcagcaacagacccaucguggacaucaacaucaaggugcacagcaucgugagcagcuacgugugcagcggccuggugggcgacacccccagaaagaacgacagcagcagcagcagccacugccuggaccccaacaacgaggagggcggccacggcgugaagggcugggccuucgacgacggcaacgacguguggaugggcagaaccaucaacgagaccagcagacugggcuacgagaccuucaaggugaucgagggcuggagcaaccccaagagcaagcugcagaucaacagacaggugaucguggacagaggcgacagaagcggcuacagcggcaucuucagcguggagggcaagagcugcaucaacagaugcuucuacguggagcugaucagaggcagaaagaaggagaccgaggugcuguggaccagcaacagcaucgugguguucugcggcaccagcggcaccuacggcaccggcagcuggcccgacggcgccgacaucaaccugaugcccaucuga

SEQ ID NO: 183507 - RNA, 1410 nt, Artificial Sequence
  derived and/or modified CDS sequence (opt4) from neuraminidase__InfluenzaA__AGK63036
augaaccccaaccagaagaucaucaccaucggcagcgugagccugaccaucagcaccaucugcuucuucaugcagaucgccauccugaucaccaccgugacccugcacuucaagcaguacgaguucaacagcccccccaacaaccaggugaugcugugcgagcccaccaucaucgagagaaacaucaccgagaucguguaccugaccaacaccaccaucgagaaggagaucugccccaagcccgccgaguacagaaacuggagcaagccccagugcgacaucaccggcuucgcccccuucagcaaggacaacagcaucagacugagcgccggcggcgacaucugggugaccagagagcccuacgugagcugcgaccccgacaagugcuaccaguucgcccugggccagggcaccacccugaacaacgugcacagcaacaacaccgugagagacagaacccccuacagaacccugcugaugaacgagcugggcgugcccuuccaccugggcaccaagcaggugugcaucgccuggagcagcagcagcugccacgacggcaaggccuggcugcacgugugcaucaccggcgacgacaagaacgccaccgccagcuucaucuacaacggcagacugguggacagcguggugagcuggagcaaggagauccugagaacccaggagagcgagugcgugugcaucaacggcaccugcaccguggugaugaccgacggcagcgccagcggcaaggccgacaccaagauccuguucaucgaggagggcaagaucgugcacaccagcacccugagcggcagcgcccagcacguggaggagugcagcugcuaccccagauaccccggcgugagaugcgugugcagagacaacuggaagggcagcaacagacccaucguggacaucaacaucaaggaccacagcaucgugagcagcuacgugugcagcggccuggugggcgacacccccagaaagaacgacagcagcagcagcagccacugccuggaccccaacaacgaggagggcggccacggcgugaagggcugggccuucgacgacggcaacgacguguggaugggcagaaccaucaacgagaccagcagauucggcuacgagaccaucaaggugaucgagggcuggagcaaccccaagagcaaccugcagaucaacagacaggugaucguggacagaggcaacagaagcggcuacagcggcaucuucagcguggagggcaagagcugcaucaacagaugcuucuacguggagcugaucagaggcagaaaggaggagaccgaggugcuguggaccagcaacagcaucgugguguucugcggcaccagcggcaccuacggcaccggcagcuggcccgacggcgccgacaucaaccugaugcccaucuga

SEQ ID NO: 183508 - RNA, 1410 nt, Artificial Sequence
  derived and/or modified CDS sequence (opt4) from neuraminidase__InfluenzaA__AGK63038
augaaccccaaccagaagaucaucaccaucggcagcgugagccugaccaucagcaccaucugcuucuucaugcagaucgccauccugaucaccaccgugacccugcacuucaagcaguacgaguucaacagcccccccaacaaccaggugaugcugugcgagcccaccaucaucgagagaaacaucaccgagaucguguaccugaccaacaccaccaucgagaaggagaucugccccaagcuggccgaguacagaaacuggagcaagccccagugcgacaucaccggcuucgcccccuucagcaaggacaacagcaucagacugagcgccggcggcgacaucugggugaccagagagcccuacgugagcugcgaccccgacaagugcuaccaguucgcccugggccagggcaccacccugaacaacgugcacagcaacaacaccgugagagacagaacccccuacagaacccugcugaugaacgagcugggcgugcccuuccaccugggcaccaagcaggugugcauggccuggagcagcagcagcugccacgacggcaaggccuggcugcacgugugcaucaccggcgacgacaagaacgccaccgccagcuucaucuacaacggcaagcugguggacagcguggugagcuggagcaaggagauccugagaacccaggagagcgagugcgugugcaucaacggcaccugcaccguggugaugaccgacggcagcgccagcggcaaggccgacaccaagauccuguucaucgaggagggcaagaucgugcacaccagcacccugagcggcagcgcccagcacguggaggagugcagcugcuaccccagauaccccggcgugagaugcgugugcagagacaacuggaagggcagcaacagacccaucguggacaucaacaucaaggaccacagcaucgugagcagcuacgugugcagcggccuggugggcgacacccccagaaagaacgacagcagcagcagcagccacugccuggaccccaacaacgaggagggcgaccacggcgugaagggcugggccuucgacgacggcaacgacguguggaugggcagaaccaucaacgagaccagcagacugggcuacgagaccuucaaggugaucgagggcuggagcaaccccaagagcaagcugcagaucaacagacaggugaucguggacagaggcaacagaagcggcuacagcggcaucuucagcguggagagcaagagcugcaucaacagaugcuucuacguggagcugaucagaggcagaaaggaggagaccgaggugcuguggaccagcaacagcaucgugguguucugcggcaccagcggcaccuacggcaccggcagcuggcccgacggcgccgacaucaaccugaugcccaucuga

SEQ ID NO: 183509 - RNA, 1410 nt, Artificial Sequence
  derived and/or modified CDS sequence (opt4) from neuraminidase__InfluenzaA__AGK63040
augaaccccaaccagaagaucaucaccaucggcagcgugagccugaccaucagcaccaucugcuucuucaugcagaucgccauccugaucaccaccgugacccugcacuucaagcagugcgaguucaacagcccccccaacaaccaggugaugcugugcgagcccaccaucaucgagagaaacaucaccgagaucguguaccugaccaacaccaccaucgagaaggagaucugccccaagcuggccgaguacagaaacuggagcaagccccagugcaacaucaccggcuucgcccccuucagcaaggacaacagcaucagacugagcgccggcggcgacaucugggugaccagagagcccuacgugagcugcgaccccgacaagugcuaccaguucgcccugggccagggcaccacccugaacaacgugcacagcaacaacaccgugagagacagaacccccuacagaacccugcugaugaacgagcugggcgugcccuuccaccugggcaccaagcaggugugcauggccuggagcagcagcagcugccacgacggcaaggccuggcugcacgugugcaucaccggcgacgacaagaacgccaccgccagcuucaucuacaacggcaagcugguggacagcguggugagcuggagcaaggagauccugagaacccaggagagcgagugcgugugcaucaacggcaccugcaccguggugaugaccgacggcagcgccagcggcaaggccgacaccaagauccuguucaucgaggagggcaagaucgugcacaccagcacccugagcggcagcgcccagcacguggaggagugcagcugcuaccccagauaccccggcgugagaugcgugugcagagacaacuggaagggcagcaacagacccaucguggacaucaacaucaaggaccacagcaucgugagcagcuacgugugcagcggccuggugggcgacacccccagaaagaacgacagcagcagcagcagccacugccuggaccccaacaacgaggagggcggccacggcgugaagggcugggccuucgacgacggcaacgacguguggaugggcagaaccaucaacgagaccagcagacugggcuacgagaccuucaaggugaucgagggcuggagcaaccccaagagcaagcugcagaucaacagacaggugaucguggacagaggcgacagaagcggcuacagcggcaucuucagcguggagggcaagagcugcaucaacagaugcuucuacguggagcugaucagaggcagaaaggaggagaccgaggugcuguggaccagcaacagcaucgugguguucugcggcaccagcggcaccuacggcaccggcagcuggcccgacggcgccgacaucaaccugaugcccaucuga

SEQ ID NO: 183510 - RNA, 1410 nt, Artificial Sequence
  derived and/or modified CDS sequence (opt4) from neuraminidase__InfluenzaA__AGK63042
augaaccccaaccagaagaucaucaccaucggcagcgugagccugaccaucagcaccaucugcuucuucaugcagaucgccauccugaucaccaccgugacccugcacuucaagcagugcgaguucaaccccccccccaacaaccaggugaugcugugcgagcccaccaucaucgagagaaacaucaccgagaucguguaccugaccaacaccaccaucgagaaggagaucugccccaagcuggccgaguacagaaacuggagcaagccccagugcgacaucaccggcuucgcccccuucagcaaggacaacagcaucagacugagcgccggcggcgacaucugggugaccagagagcccuacgugagcugcgaccccgacaagugcuaccaguucgcccugggccagggcaccacccugaacaacgugcacagcaacaacaccgugagagacagaacccccuacagaacccugcugaugaacgagcugggcgugcccuuccaccugggcaccaagcaggugugcauggccuggagcagcagcagcugccacgacggcaaggccuggcugcacgugugcaucaccggcgacgacaagaacgccaccgccagcuucaucuacaacggcaagcugguggacagcguggugagcuggagcaaggagauccugagaacccaggagagcgagugcgugugcaucaacggcaccugcaccguggugaugaccgacggcagcgccagcggcaaggccgacaccaagauccuguucaucgaggagggcaagaucgugcacaccagcacccugagcggcagcgcccagcacguggaggagugcagcugcuaccccagauaccccggcgugagaugcgugugcagagacaacuggaagggcagcaacagacccaucguggacaucaacaucaaggaccacagcaucgugagcagcuacgugugcagcggccuggugggcgacacccccagaaagaacgacagcagcagcagcagccacugccuggaccccaacaacgaggagggcggccacggcgugaagggcugggccuucgacgacggcaacgacguguggaugggcagaaccaucaacgagaccagcagacugggcuacgagaccuucaaggugaucgagggcuggagcaaccccaagagcaagcugcagaucaacagacaggugaucguggacagaggcgacagaagcggcuacagcggcaucuucagcguggagggcaagagcugcaucaacagaugcuucuacguggagcugaucagaggcagaaaggaggagaccgaggugcuguggaccagcaacagcaucgugguguucugcggcaccagcggcaccuacggcaccggcagcuggcccgacggcgccgacaucaaccugaugcccaucuga

SEQ ID NO: 183511 - RNA, 1410 nt, Artificial Sequence
  derived and/or modified CDS sequence (opt4) from neuraminidase__InfluenzaA__AGK63044
augaaccccaaccagaagaucaucaccaucggcagcgugagccugaccaucagcaccaucugcuucuucaugcagaucgccauccugaucaccaccgugacccugcacuucaagcagugcgaguucaacagcccccccaacaaccaggugaugcugugcgagcccaccaucaucgagagaaacaucaccgagaucguguaccugaccaacaccaccaucgagaaggagaucugccccaagcuggccgaguacagaaacuggagcaagccccagugcgacaucaccggcuucgcccccuucagcaaggacaacagcaucagacugagcgccggcggcgacaucugggugaccagagagcccuacgugagcugcgaccccgacaagugcuaccaguucgcccugggccagggcaccacccugaacaacgugcacagcaacaacaccgugagagacagaacccccuacagaacccugcugaugaacgagcugggcgugcccuuccaccugggcaccaagcaggugugcauggccuggagcagcagcagcugccacgacggcaaggccuggcugcacgugugcaucaccggcgacgacaagaacgccaccgccagcuucaucuacaacggcaagcugguggacagcguggugagcuggagcaaggagauccugagaacccaggagagcgagugcgugugcaucaacggcaccugcaccguggugaugaccgacggcagcgccagcggcaaggccgacaccaagauccuguucaucgaggagggcaagaucgugcacaccagcacccugagcggcagcgcccagcacguggaggagugcagcugcuaccccagauaccccggcgugagaugcgugugcagagacaacuggaagggcagcaacagacccaucguggacaucaacaucaaggaccacagcaucgugagcagcuacgugugcagcggccuggugggcgacacccccagaaagaacgacagcagcagcagcagccacugccuggaccccaacaacgaggagggcggccacggcgugaagggcugggccuucgacgacggcaacgacguguggaugggcagaaccaucaacgagaccagcagacugggcuacgagaccuucaaggugaucgagggcuggagcaaccccaagagcaagcugcagaucaacagacaggugaucguggacagaggcuacagaagcggcuacagcggcaucuucagcguggagagcaagagcugcaucaacagaugcuucuacguggagcugcugagaggcagaaaggaggagaccgaggugcuguggaccagcaacagcaucgugguguucugcggcaccagcggcaccuacggcaccggcagcuggcccgacggcgccgacaucaaccugaugcccaucuga

SEQ ID NO: 183512 - RNA, 1410 nt, Artificial Sequence
  derived and/or modified CDS sequence (opt4) from neuraminidase__InfluenzaA__AGK63046
augaaccccaaccagaagaucaucaccaucggcagcgugagccugaccaucagcaccaucugcuucuucaugcagaucgccauccugaucaccaccgugacccugcacuucaagcacuacgaguucaacagcccccccaacaaccaggugaugcugugcgagcccaccaucaucgagagaaacaucaccgagaucguguaccugaccaacaccaccaucgagaaggagaucugccccaagcccgccgaguacagaaacuggagcaagccccagugcgacaucaccggcuucgcccccuucagcaaggacaacagcaucagacugagcgccggcggcgacaucugggugaccagagagcccuacgugagcugcgaccccgacaagugcuaccaguucgcccugggccagggcaccacccugaacaacgugcacagcaacaacaccgugagagacagaacccccuacagaacccugcugaugaacgagcugggcgugcccuuccaccugggcaccaagcaggugugcaucgccuggagcagcagcagcugccacgacggcaaggccuggcugcacgugugcaucaccggcgacgacaagaacgccaccgccagcuucaucuacaacggcagacugguggacagcguggugagcuggagcaaggagauccugagaacccaggagagcgagugcgugugcaucaacggcaccugcaccguggugaugaccgacggcagcgccagcggcaaggccgacaccaagauccuguucaucgaggagggcaagaucgugcacaccagcacccugagcggcagcgcccagcacguggaggagugcagcugcuaccccagauaccccggcgugagaugcgugugcagagacaacuggaagggcagcaacagacccaucguggacaucaacaucaaggaccacagcaucgugagcagcuacgugugcagcggccuggugggcgacacccccagaaagaacgacagcagcagcagcagccacugccuggaccccaacaacgaggagggcggccacggcgugaagggcugggccuucgacgacggcaacgacguguggaugggcagaaccaucaacgagaccagcagacugggcuacgagaccuucaaggugaucgagggcuggagcaaccccaagagcaagcugcagaucaacagacaggugaucguggacagaggcgacagaagcggcuacagcggcaucuucagcguggagggcaagagcugcaucaacagaugcuucuacguggaccugaucagaggcagaaaggaggagaccgaggugcuguggaccagcaacagcaucgugguguucugcggcaccagcggcaccuacggcaccggcagcuggcccgacggcgccgacaucaaccugaugcccaucuga

SEQ ID NO: 183513 - RNA, 1398 nt, Artificial Sequence
  derived and/or modified CDS sequence (opt4) from neuraminidase__InfluenzaA__AGK82159
augaaccccaaccagaagauccugugcaccagcgccaccgccaucaucaucggcgccaucgccgugcugaucggcaucgccaaccugggccugaacaucggccugcaccugaagcccggcugcaacugcagccacagccagcccgagaccaccaacaccagccagaccaucaucaacaacuacuacaacgagaccaacaucaccaacauccagauggaggagagaaccagcagaaacuucaacaaccugaccaagggccugugcaccaucaacagcuggcacaucuacggcaaggacaacgccgugagaaucggcgagagcagcgacgugcuggugaccagagagcccuacgugagcugcgaccccgacgagugcagauucuacgcccugagccagggcaccaccaucagaggcaagcacagcaacgagaccauccacgacagaagccaguacagagcccugaucagcuggccccugagcagcccccccaccguguacaacagcagaguggagugcaucggcuggagcagcaccagcugccacgacggcaagagcagaaugagcaucugcaucagcggccccaacaacaacgccagcgccguggugugguacaacagaagacccguggccgagaucaacaccugggccagaaacauccugagaacccaggagagcgagugcgugugccacaacggcgugugccccgugguguucaccgacggcagcgccaccggccccgccgacaccagaaucuacuacuucaaggagggcaagauccugaagugggagagccugaccggcaccgccaagcacaucgaggagugcagcugcuacggcgagagaaccggcaucaccugcaccugcagagacaacuggcagggcagcaacagacccgugauccagaucgaccccguggccaugacccacaccagccaguacaucugcagccccgugcugaccgacaaccccagacccaacgaccccaacaucggcaagugcaacgaccccuaccccggcaacaacaacaacggcgugaagggcuucagcuaccuggacggcgccaacaccuggcugggcagaaccaucagcaccgccagcagaagcggcuacgagaugcugaaggugcccaacgcccugaccgacgacagaagcaagcccauccagggccagaccaucgugcugaacgccgacuggagcggcuacagcggcagcuucauggacuacugggccgagggcgacugcuacagagccugcuucuacguggagcugaucagaggcagacccaaggaggacaaggugugguggaccagcaacagcaucgugagcaugugcagcagcaccgaguuccugggccaguggaacuggcccgacggcgccaagaucgaguacuuccuguga

SEQ ID NO: 183514 - RNA, 1398 nt, Artificial Sequence
  derived and/or modified CDS sequence (opt4) from neuraminidase__InfluenzaA__AGK84858
augaaccccaaccagaagauccugugcaccagcgccaccgccaucaucaucggcgccaucgccgugcugaucggcaucgccaaccugggccugaacaucggccugcaccugaagcccggcugcaacugcagccacagccagcccgagaccaccaacaccagccagaccaucaucaacaacuacuacaacgagaccaacaucaccaacauccagauggaggagagaaccagcagaaacuucaacaaccugaccaagggccugugcaccaucaacagcuggcacaucuacggcaaggacaacgccgugagaaucggcgagagcagcgacgugcuggugaccagagagcccuacgugagcugcgaccccgacgagugcagauucuacgcccugagccagggcaccaccaucagaggcaagcacagcaacggcaccauccacgacagaagccaguacagagcccugaucagcuggccccugagcagcccccccaccguguacaacagcagaguggagugcaucggcuggagcagcaccagcugccacgacggcaagagcagaaugagcaucugcaucagcggccccaacaacaacgccagcgccguggugugguacaacagaagacccguggccgagaucaacaccugggccagaaacauccugagaacccaggagagcgagugcgugugccacaacggcgugugccccgugguguucaccgacggcagcgccaccggccccgccgacaccagaaucuacuacuucaaggagggcaagauccugaagugggagagccugaccggcaccgccaagcacaucgaggagugcagcugcuacggcgagagaaccggcaucaccugcaccugcagagacaacuggcagggcagcaacagacccgugauccagaucgaccccguggccaugacccacaccagccaguacaucugcagccccgugcugaccgacaaccccagacccaacgaccccaacaucggcaagugcaacgaccccuaccccggcaacaacaacaacggcgugaagggcuucagcuaccuggacggcgccaacaccuggcugggcagaaccaucagcaccgccagcagaagcggcuacgagaugcugaaggugcccaacgcccugaccgacgacagaagcaagcccauccagggccagaccaucgugcugaacgccgacuggagcggcuacagcggcagcuucauggacuacugggccgagggcgacugcuacagagccugcuucuacguggagcugaucagaggcagacccaaggaggacaaggugugguggaccagcaacagcaucgugagcaugugcagcagcaccgaguuccugggccaguggaacuggcccgacggcgccaagaucgaguacuuccuguga

SEQ ID NO: 183515 - RNA, 1398 nt, Artificial Sequence
  derived and/or modified CDS sequence (opt4) from neuraminidase__InfluenzaA__AGK84861
augaaccccaaccagaagauccugugcaccagcgccaccgccaucaucaucggcgccaucgccgugcugaucggcaucgccaaccugggccugaacaucggccugcaccugaagcccagcugcaacugcagccacagccagcccgagaccaccaacaccagccagaccaucaucaacaacuacuacaacgagaccaacaucaccaacauccagauggaggagagaaccagcagaaacuucaacaaccugaccaagggccugugcaccaucaacagcuggcacaucuacggcaaggacaacgccgugagaaucggcgagagcagcgacgugcuggugaccagagagcccuacgugagcugcgaccccgacgagugcagauucuacgcccugagccagggcaccaccaucagaggcaagcacagcaacggcaccauccacgacagaagccaguacagagcccugaucagcuggccccugagcagcccccccaccguguacaacagcagaguggagugcaucggcuggagcagcaccagcugccacgacggcaagagcagaaugagcaucugcaucagcggccccaacaacaacgccagcgccguggugugguacaacagaagacccguggccgagaucaacaccugggccagaaacauccugagaacccaggagagcgagugcgugugccacaacggcgugugccccgugguguucaccgacggcagcgccaccggccccgccgacaccagaaucuacuacuucaaggagggcaagauccugaagugggagagccugaccggcaccgccaagcacaucgaggagugcagcugcuacggcgagagaaccggcaucaccugcaccugcagagacaacuggcagggcagcaacagacccguggugcagaucgaccccguggccaugacccacaccagccaguacaucugcagccccgugcugaccgacaaccccagacccaacgaccccaacaucggcaagugcaacgaccccuaccccggcaucaacaacaacggcgugaagggcuucagcuaccuggacggcgccaacaccuggcugggcagaaccaucagcaccgccagcagaagcggcuacgagaugcugaaggugcccaacgcccugaccgacgacagaagcaagcccauccagggccagaccaucgugcugaacgccgacuggagcggcuacagcggcagcuucauggacuacugggccgagggcgacugcuacagagccugcuucuacguggagcugaucagaggcagacccaaggaggacaaggugugguggaccagcaacagcaucgugagcaugugcagcagcaccgaguuccugggccaguggaacuggcccgacggcgccaagaucgaguacuuccuguga

SEQ ID NO: 183516 - RNA, 1398 nt, Artificial Sequence; identical to SEQ ID NO: 183514
  derived and/or modified CDS sequence (opt4) from neuraminidase__InfluenzaA__AGK84864

SEQ ID NO: 183517 - RNA, 1398 nt, Artificial Sequence
  derived and/or modified CDS sequence (opt4) from neuraminidase__InfluenzaA__AGL95090
augaaccccaaccagaagauccugugcaccagcgccaccgccaucaucaucggcgccaucgccgugcugaucggcaucgccaaccugggccugaacaucggccugcaccugaagcccggcugcaacugcagccacagccagcccgagaccaccaacaccagccagaccaucaucaacaacuacuacaacgagaccaacaucaacaacauccagauggaggagagaaccagcagaaacuucaacaaccugaccaagggccugugcaccaucaacagcuggcacaucuacggcaaggacaacgccgugagaaucggcgagagcagcgacgugcuggugaccagagagcccuacgugagcugcgaccccgacgagugcagauucuacgcccugagccagggcaccaccaucagaggcaagcacagcaacggcaccauccacgacagaagccaguacagagcccugaucagcuggccccugagcagcccccccaccguguacaacagcagaguggagugcaucggcuggagcagcaccagcugccacgacggcaagagcagaaugagcaucugcaucagcggccccaacaacaacgccagcgccguggugugguacaacagaagacccguggccgagaucaacaccugggccagaaacauccugagaacccaggagagcgagugcgugugccacaacggcgugugccccgugguguucaccgacggcagcgccaccggccccgccgacaccagaaucuacuacuucaaggagggcaagauccugaagugggagagccugaccggcaccgccaagcacaucgaggagugcagcugcuacggcgagagaaccggcaucaccugcaccugcaaggacaacuggcagggcagcaacagacccgugauccagaucgaccccguggccaugacccacaccagccaguacaucugcagccccgugcugaccgacaaccccagacccaacgaccccaacaucggcaagugcaacgaccccuaccccggcaacaacaacaacggcgugaagggcuucagcuaccuggacggcgccaacaccuggcugggcagaaccaucagcaccgccagcagaagcggcuacgagaugcugaaggugcccaacgcccugaccgacgacagaagcaagcccauccagggccagaccaucgugcugaacgccgacuggagcggcuacagcggcagcuucauggacuacugggccgagggcgacugcuacagagccugcuucuacguggagcugaucagaggcagacccaaggaggacaaggugugguggaccagcaacagcaucgugagcaugugcagcagcaccgaguuccugggccaguggaacuggcccgacggcgccaagaucgaguacuuccuguga

SEQ ID NO: 183518 - RNA, 1413 nt, Artificial Sequence; identical to SEQ ID NO: 176692
  derived and/or modified CDS sequence (opt4) from neuraminidase__InfluenzaA__AGL96802

SEQ ID NO: 183519 - RNA, 1413 nt, Artificial Sequence; identical to SEQ ID NO: 176692
  derived and/or modified CDS sequence (opt4) from neuraminidase__InfluenzaA__AGL96807

SEQ ID NO: 183520 - RNA, 1413 nt, Artificial Sequence
  derived and/or modified CDS sequence (opt4) from neuraminidase__InfluenzaA__AGL96808
augaaccccaaccagaagaucaucaccaucggcagcaucagcaucgccaucggcaucaucagccugaugcugcagaucggcaacaucaucagcaucugggccagccacagcauccagaccggcagccagaacaacaccggcaucugcaaccagagaaucaucaccuacgagaacagcaccugggugaaccacaccuacgugaacaucaacaacaccaacgugguggccggcgaggacaagaccagcgugacccuggccggcaacagcagccugugcagcaucagcggcugggccaucuacaccaaggacaacagcaucagaaucggcagcaagggcgacguguucgugaucagagagcccuucaucagcugcagccaccuggagugcagaaccuucuuccugacccagggcgcccugcugaacgacaagcacagcaacggcaccgugaaggacagaagccccuacagagcccugaugagcugcccccugggcgaggcccccagccccuacaacagcaaguucgagagcguggccuggagcgccagcgccugccacgacggcaugggcuggcugaccaucggcaucagcggccccgacaacggcgccguggccgugcugaaguacaacggcaucaucaccggcaccaucaagagcuggaagaagcagauccugagaacccaggagagcgagugcgugugcaugaacggcagcugcuucaccaucaugaccgacggccccagcaacaaggccgccagcuacaagaucuucaagaucgagaagggcaaggugaccaagagcaucgagcugaacgcccccaacuuccacuacgaggagugcagcugcuaccccgacaccggcaucgugaugugcgugugcagagacaacuggcacggcagcaacagacccugggugagcuucaaccagaaccuggacuaccagaucggcuacaucugcagcggcguguucggcgacaaccccagacccgaggacggcgagggcagcugcaaccccgugaccguggacggcgccaacggcgugaagggcuucagcuacaaguacgacaacggcguguggaucggcagaaccaagagcaacagacugagaaagggcuucgagaugaucugggaccccaacggcuggaccaacaccgacagcuucuucagcgugaagcaggacgugguggccaucaccgacuggagcggcuacagcggcagcuucgugcagcaccccgagcugaccggccuggacugcaucagacccugcuucuggguggagcuggugagaggccugcccagagagaacaccaccaucuggaccagcggcagcagcaucagcuucugcggcgugaacagcgacaccgccaacuggagcuggcccgacggcgccgagcugcccuucaccaucgacaaguga

SEQ ID NO: 183521 - RNA, 1413 nt, Artificial Sequence
  derived and/or modified CDS sequence (opt4) from neuraminidase__InfluenzaA__AGL96809
augaaccccaaccagaagaucaucaccaucggcagcaucagcaucgccaucggcaucaucagccugaugcugcagaucggcaacaucaucagcaucugggccagccacagcauccagaccggcagccagaacaacaccggcaucugcaaccagagaaucaucaccuacgagaacagcaccugggugaaccacaccuacgugaacaucaacaacaccaacgugguggccggcgaggacaagaccagcgugacccuggccggcaacagcagccugugcagcaucagcggcugggccaucuacaccaaggacaacagcaucagaaucggcagcaagggcgacguguucgugaucagagagcccuucaucagcugcagccaccuggagugcagaaccuucuuccugacccagggcgcccugcugaacgacaagcacagcaacggcaccgugaaggacagaagccccuacagagcccugaugagcugcccccugggcgaggcccccagccccuacaacagcaaguucgagagcguggccuggagcgccagcgccugccacgacggcaugggcuggcugaccaucggcaucagcggccccgacaacggcgccguggccgugcugaaguacaacggcaucaucaccggcaccaucaagagcuggaagaagcagauccugagaacccaggagagcgagugcgugugcaugaacggcagcugcuucaccaucaugaccgacggccccagcaacaagaccgccagcuacaagaucuucaagaucgagaagggcaaggugaccaagagcaucgagcugaacgcccccaacuuccacuacgaggagugcagcugcuaccccgacaccggcaucgugaugugcgugugcagagacaacuggcacggcagcaacagacccugggugagcuucaaccagaaccuggacuaccagaucggcuacaucugcagcggcguguucggcgacaaccccagacccgaggacggcgagggcagcugcaaccccgugaccguggacggcgccaacggcgugaagggcuucagcuacaaguacgacaacggcguguggaucggcagaaccaagagcaacagacugagaaagggcuucgagaugaucugggaccccaacggcuggaccaacaccgacagcgacuucagcgugaagcaggacgugguggccaucaccgacuggagcggcuacagcggcagcuucgugcagcaccccgagcugaccggccuggacugcaucagacccugcuucuggguggagcuggugagaggccugcccagagagaacaccaccaucuggaccagcggcagcagcaucagcuucugcggcgugaacagcgacaccgccaacuggagcuggcccgacggcgccgagcugcccuucaccaucgacaaguga

SEQ ID NO: 183522 - RNA, 1413 nt, Artificial Sequence; identical to SEQ ID NO: 176692
  derived and/or modified CDS sequence (opt4) from neuraminidase__InfluenzaA__AGL96818

SEQ ID NO: 183523 - RNA, 1413 nt, Artificial Sequence
  derived and/or modified CDS sequence (opt4) from neuraminidase__InfluenzaA__AGL96820
augaaccccaaccagaagaucaucaccaccggcagcaucagcaucgccaucggcaucaucagccugaugcugcagaucggcaacaucaucagcaucugggccagccacagcauccagaccggcagccagaacaacaccggcaucugcaaccagagaaucaucaccuacgagaacagcaccugggugaaccacaccuacgugaacaucaacaacaccaacgugguggccggcgaggacaagaccagcgugacccuggccggcaacagcagccugugcagcaucagcggcugggccaucuacaccaaggacaacagcaucagaaucggcagcaagggcgacguguucgugaucagagagcccuucaucagcugcagccaccuggagugcagaaccuucuuccugacccagggcgcccugcugaacgacaagcacagcaacggcaccgugaaggacagaagccccuacagagcccugaugagcugcccccugggcgaggcccccagccccuacaacagcaaguucgagagcguggccuggagcgccagcgccugccacgacggcaugggcuggcugaccaucggcaucagcggccccgacaacggcgccguggccgugcugaaguacaacggcaucaucaccggcaccaucaagagcuggaagaagcagauccugagaacccaggagagcgagugcgugugcaugaacggcagcugcuucaccaucaugaccgacggccccagcaacaaggccgccagcuacaagaucuucaagaucgagaagggcaaggugaccaagagcaucgagcugaacgcccccaacuuccacuacgaggagugcagcugcuaccccgacaccggcaucgugaugugcgugugcagagacaacuggcacggcagcaacagacccugggugagcuucaaccagaaccuggacuaccagaucggcuacaucugcagcggcguguucggcgacaaccccagacccgaggacggcgagggcagcugcaaccccgugaccguggacggcgccaacggcgugaagggcuucagcuacaaguacgacaacggcguguggaucggcagaaccaagagcaacagacugagaaagggcuucgagaugaucugggaccccaacggcuggaccaacaccgacagcgacuucagcgugaagcaggacgugguggccaucaccgacuggagcggcuacagcggcagcuucgugcagcaccccgagcugaccggccuggacugcaucagacccugcuucuggguggagcuggugagaggccugcccagagagaacaccaccaucuggaccagcggcagcagcaucagcuucugcggcgugaacagcgacaccgccaacuggagcuggcccgacggcgccgagcugcccuucaccaucgacaaguga

SEQ ID NO: 183524 - RNA, 1413 nt, Artificial Sequence
  derived and/or modified CDS sequence (opt4) from neuraminidase__InfluenzaA__AGL96821
augaaccccaaccagaagaucaucaccaucggcagcaucagcaucgccaucggcaucaucagccugaugcugcagaucggcaacaucaucagcaucugggccagccacagcauccagaccggcagccagaacaacaccggcaucugcaaccagagaaucaucaccuacgagaacagcaccugggugaaccacaccuacgugaacaucaacaacaccaacgugguggccggcgaggacaagaccagcgugacccuggccggcaacagcagccugugcagcaucagcggcugggccaucuacaccaaggacaacagcaucagaaucggcagcaagggcgacguguucgugaucagagagcccuucaucagcugcagccaccuggagugcagaaccuucuuccugacccagggcgcccugcugaacgacaagcacagcaacggcaccgugaaggacagaagccccuacagagcccugaugagcugcccccugggcgaggcccccagccccuacaacagcaaguucgagagcguggccuggagcgccagcgccugccacgacggcaugggcuggcugaccaucggcaucagcggccccgacaacggcgccguggccgugcugaaguacaacggcaucaucaccggcaccaucaagagcuggaagaagcagauccugagaacccaggagagcgagugcgugugcaugaacggcagcugcuucaccaucaugaccgacggccccagcaacaaggccgccagcuacaagaucuucaagaucgagaagggcaaggugaccaagagcaucgagcugaacgcccccaacuuccacuacgaggagugcagcugcuaccccgacaccggcaucgugaugugcgugugcagagacaacuggcacggcagcaacagacccugggugagcuucaaccagaaccuggacuaccagaucggcuacaucugcagcggcguguucggcgacaaccccagacccgaggacggcgagggcagcugcaaccccgugagcguggacggcgccaacggcgugaagggcuucagcuacaaguacgacaacggcguguggaucggcagaaccaagagcaacagacugagaaagggcuucgagaugaucugggaccccaacggcuggaccaacaccgacagcgacuucagcgugaagcaggacgugguggccaucaccgacuggagcggcuacagcggcagcuucgugcagcaccccgagcugaccggccuggacugcaucagacccugcuucuggguggagcuggugagaggccugcccagagagaacaccaccaucuggaccagcggcagcagcaucagcuucugcggcgugaacagcgacaccgccaacuggagcuggcccgacggcgccgagcugcccuucaccaucgacaaguga

SEQ ID NO: 183525 - RNA, 1410 nt, Artificial Sequence
  derived and/or modified CDS sequence (opt4) from neuraminidase__InfluenzaA__AGN69269
augaucaccaaccagagaaucaucaccaucggcaccgugugccugaucgugggcaucgugagccugcugcugcagaucggcaacaucgugagccuguggaucagccacagcauccagaccggcgagaagaaccacagcgagaucugcaaccagaacaccaucaccuacgagaacaacaccugggugaaccagaccuacgugaacaucagcaacaccaacaucgccgacggccagggcgugaccagcaucauccuggccggcaacagcagccugugccccaucagcggcugggccaucuacagcaaggacaacagcaucagaaucggcagcaagggcgacaucuucgugaucagagagcccuucaucagcugcagccaccuggagugcagaaccuucuuccugacccagggcgcccugcugaacgacagacacagcaacggcaccgugaaggacagaagccccuacagaacccugaugagcugccccaucggcgaggcccccagccccuacaacagcagauucgagagcguggccuggagcgccagcgccugccacgacggcaugggcuggaucaccaucggcaucagcggccccgacaacggcgccguggccgugcugaaguacaacggcaucaucaccgacaccaucaagagcuggagaaacaagauccugagaacccaggagagcgagugcgugugcaucaacggcagcugcuucaccaucaugaccgacggccccagcaacggccaggccagcuacaagaucuucaagauggagaagggcaagaucaucaagagcguggagcuggacgcccccaacuaccacuacgaggagugcagcugcuaccccgacaccggcaagguggugugcgugugcagagacaacuggcacgccagcaacagacccugggugagcuucgaccagaaccuggacuaccagaucggcuacaucugcagcggcguguucggcgacaaccccagaagcaacgacggcaagggcaacugcggccccgcccugagcaacggcgccaacggcgugaagggcuucagcuucagauacggcaacggcguguggaucggcagaaccaagagcaucagcagcagaagcggcuucgagaugaucugggaccccaacggcuggaccgagaccgacagcagcuucagcaugaagcaggacaucaucgcccugaccgacuggagcggcuacagcggcagcuucgugcagcaccccgagcugaccggcaugaacugcaucagacccugcuucuggguggagcugaucagaggccagcccaaggagagcaccaucuggaccagcggcagcagcaucagcuucugcggcguggacagcgagaccgccagcuggagcuggcccgacggcgccgaccugcccuucaccaucgacaaguga

SEQ ID NO: 183526 - RNA, 1410 nt, Artificial Sequence
  derived and/or modified CDS sequence (opt4) from neuraminidase__InfluenzaA__AGN69280
augaacaccaaccagagaaucaucaccaucggcaccgugugccugaucgugggcaucgugagccugcugcugcagaucggcaacaucgugagccuguggaucagccacagcauccagaccggcgagaagaaccacagcgagaucugcaaccagaacaccaucaccuacgagaacaacaccugggugaaccagaccuacgugaacaucagcaacaccaacaucgccgacggccagggcgugaccagcaucauccuggccggcaacagcagccugugccccaucagcggcugggccaucuacagcaaggacaacagcaucagaaucggcagcaagggcgacaucuucgugaucagagagcccuucaucagcugcagccaccuggagugcagaaccuucuuccugacccagggcgcccugcugaacgacagacacagcaacggcaccgugaaggacagaagccccuacagaacccugaugagcugccccaucggcgaggcccccagccccuacaacagcagauucgagagcguggccuggagcgccagcgccugccacgacggcaugggcuggcugaccaucggcaucagcggccccgacaacggcgccguggccgugcugaaguacaacggcaucaucaccgacaccaucaagagcuggagaaacaagauccugagaacccaggagagcgagugcgugugcaucaacggcagcugcuucaccaucaugaccgacggccccagcaacggccaggccagcuacaagaucuucaagauggagaagggcaagaucaucaagagcguggagcuggacgcccccaacuaccacuacgaggagugcagcugcuaccccgacaccggcaagguggugugcgugugcagagacaacuggcacgccagcaacagacccugggugagcuucgaccagaaccuggacuaccagaucggcuacaucugcagcggcguguucggcgacaaccccagaagcaacgacggcaagggcaacugcggccccgugcugagcaacggcgccaacggcgugaagggcuucagcuucagauacggcaacggcguguggaucggcagaaccaagagcaucagcagcagaagcggcuucgagaugaucugggaccccaacggcuggaccgagaccgacagcagcuucagcaugaagcaggacaucaucgcccugaccgacuggagcggcuacagcggcagcuucgugcagcaccccgagcugaccggcaugaacugcaucagacccugcuucuggguggagcugaucagaggccagcccaaggagagcaccaucuggaccggcggcagcagcaucagcuucugcggcguggacagcgagaccgccagcuggagcuggcccgacggcgccgaccugcccuucaccaucgacaaguga

SEQ ID NO: 183527 - RNA, 1410 nt, Artificial Sequence
  derived and/or modified CDS sequence (opt4) from neuraminidase__InfluenzaA__AGN69292
augaaccccaaccagaagaucaucaccaucggcagcaucugcaugaccaucggcaucgccagccugauccugcagaucggcaacaucaucagcaucuggaucagccacagcauccagaccgagaaccagaaccagcccgagaucugcaaccagaacgugaucaccuacgagaacaacaccugggugaaccagaccuacgugaacaucagcaacaccaacuucguggccgagcaggccguggccagcgugaagcuggccggcaacagcagccugugccccgugagcggcugggccaucuacagcaaggacaacagcgugagaaucggcagcaagggcgacguguucgugaucagagagcccuucaucagcugcagccaccuggagugcagaaccuucuuccugacccagggcgcccugcugaacgacaagcacagcaacggcaccaucaaggacagaagccccuacagaacccugaugagcugccccaucggcgaggugcccagccccuacaacagcagauucgagagcguggccuggagcgccagcgccugccacgacggcaccagcuggcugaccaucggcaucagcggccccgacaacggcgccguggccgugcugaaguacaacggcaucaucaccgacaccaucaagagcuggagaaagaacauccugagaacccaggagagcgagugcgccugcgugaacggcagcugcuucaccgugaugaccgacggccccagcaacggccaggccagcuacaagguguucaagaucgagaagggcaagguggugaagagcguggagcugaacgcccccaacuaccacuacgaggagugcagcugcuaccccgagagcggcgagaucaccugcgugugcagagacaacuggcacggcagcaacagacccugggugagcuucaaccagaaccuggaguaccagaugggcuacaucugcagcggcaucuucggcgacaaccccagacccaacgacaagaccggcagcugcggccccguguucagcaacggcgccaacggcgugaagggcuucagcuucaaguacggcaacggcguguggaucggcagaaccaagagcaucagcagcagaaugggcuucgagaugaucugggaccccgacggcuggaccaagaccgacgacaaguucagcgugaagcaggacaucaucggcaucaacgacuggagcggcuacagcggcagcuucgugcagcaccccgagcugaccggccuggacugcaugagacccugcuucuggguggagcugaucagaggcagacccaaggagaacaccaucuggaccagcggcagcagcaucagcuucugcggcgugaacagcgacaccgugggcuggagcuggcccgacggcgccgagcugcccuucaccaucgacaaguga

SEQ ID NO: 183528 - RNA, 1410 nt, Artificial Sequence
  derived and/or modified CDS sequence (opt4) from neuraminidase__InfluenzaA__AGN69316
augaaccccaaccagaagaucaucaccaucggcagcaucugcaugaccaucggcaucgccagccugauccugcagaucggcaacaucaucagcaucuggaucagccacagcauccagaccgagaaccagaaccagcccgagaucugcaaccagaacgugaucaccuacgagaacaacaccugggugaaccagaccuacgugaacaucagcaacaccaacuucguggccgagcaggccguggccagcgugaagcuggccggcaacagcagccugugccccgugagcggcugggccaucuacagcaaggacaacagcgugagaaucggcagcaagggcgacguguucgugaucagagagcccuucaucagcugcagccaccuggagugcagaaccuucuuccugacccagggcgcccugcugaacgacaagcacagcaacggcaccaucaaggacagaagccccuacagaacccugaugagcugccccaucggcgaggugcccagccccuacaacagcagauucgagagcguggccuggagcgccagcgccugccacgacggcaccagcuggcugaccaucggcaucagcggccccgacaacggcgccguggccgugcugaaguacaacggcaucaucaccgacaccaucaagagcuggagaaagaacauccugagaacccaggagagcgagugcgccugcgugaacggcagcugcuucaccgugaugaccgacggccccagcaacggccaggccagcuacaagguguucaagaucgagaagggcaagguggugaagaccguggagcugaacgcccccaacuaccacuacgaggagugcagcugcuaccccgagagcggcgagaucaccugcgugugcagagacaacuggcacggcagcaacagacccugggugagcuucaaccagaaccuggaguaccagaugggcuacaucugcagcggcaucuucggcgacaaccccagacccaacgacaagaccggcagcugcggccccguguucagcaacggcgccaacggcgugaagggcuucagcuucaaguacggcaacggcguguggaucggcagaaccaagagcaucagcagcagaaugggcuucgagaugaucugggaccccgacggcuggaccaagaccgacgacaaguucagcgugaagcaggacaucaucggcaucaacgacuggagcggcuacagcggcagcuucgugcagcaccccgagcugaccggccuggacugcaugagacccugcuucuggguggagcugaucagaggcagacccaaggagaacaccaucuggaccagcggcagcagcaucagcuucugcggcgugaacagcgacaccgugggcuggagcuggcccgacggcgccgagcugcccuucaccaucgacaaguga

SEQ ID NO: 183529 - RNA, 1410 nt, Artificial Sequence; identical to SEQ ID NO: 183528
  derived and/or modified CDS sequence (opt4) from neuraminidase__InfluenzaA__AGN69328

SEQ ID NO: 183530 - RNA, 1410 nt, Artificial Sequence
  derived and/or modified CDS sequence (opt4) from neuraminidase__InfluenzaA__AGN69340
augaaccccaaccagaagaucaucaccaucggccugaucugcaugaccaucggcaucgccagccugauccugcagaucggcaacaucaucagcaucuggaucagccacagcauccagaccgagaaccagaacaagcccgagaucugcaaccagaacgugaucaccuacgagaacaacaccugggugaaccagaccuacgugaacgugagcaacaccaacuucguggccgagcaggccguggccagcgugaagcuggugggcaacagcagccugugccccgugagcggcugggccaucuacagcaaggacaacagcgugagaaucggcagcaagggcgacguguucgugaucagagagcccuucaucagcugcagccaccuggagugcagaaccuucuuccugacccagggcgcccugcugaacgacaagcacagcaacggcaccaucaaggacagaagccccuacagaacccugaugagcugccccaucggcgaggugcccagccccuacaacagcagauucgagagcguggccuggagcgccagcgccugccacgacggcaccagcuggcugaccaucggcaucagcggccccgacaacggcgccguggccgugcugaaguacaacggcaucaucaccgacaccaucaagagcuggagaaagaacauccugagaacccaggagagcgagugcgccugcgugaacggcagcugcuucaccgugaugaccgacggccccagcaacggccaggccagcuacaagguguucaagaucgagagaggcaagguggugaagagcguggagcugaacgcccccaacuaccacuacgaggagugcagcugcuaccccgagagcagcgagaucaccugcgugugcagagacaacuggcacggcagcaacagacccugggugagcuucaaccagaaccuggaguaccagaugggcuacaucugcagcggcguguucggcgacaaccccagacccaacgacaagaccggcagcugcggccccguguucagcaacggcgccaacggcgugaagggcuucagcuucaaguacggcaacggcguguggaucggcagaaccaagagcaccagcagcagaaugggcuucgagaugaucugggaccccgacggcuggaccaagaccgacgacaaguucagcgugaagcaggacaucaucggcaucaccgacuggagcggcuacagcggcagcuucgugcagcaccccgagcugaccggccuggacugcaugagacccugcuucuggguggagcugaucagaggcagacccaaggagaacaccaucuggaccagcggcagcagcaucagcuucugcggcgugaacagcgacaccgugggcuggagcuggcccgacggcgccgagcugcccuucaccaucgacaaguga

SEQ ID NO: 183531 - RNA, 1410 nt, Artificial Sequence
  derived and/or modified CDS sequence (opt4) from neuraminidase__InfluenzaA__AGO00268
augaaccccaaccagaagaucaucaccaucggcagcaucugcaugguggugggcaucaucagccugauccugcagaucggcaacaucaucagcaucuggaucagccacagcauccagaccggcagccagaaccacaccggcaucugcaaccagagcaucaucaccuacaagaacagcaccugggugaaccagaccuacgugaacaucagcaacaccaacgugguggccggcaaggacaccaccagcaugauccuggccggcaacagcagccugugccccaucagaggcugggccaucuacagcaaggacaacggcaucagaaucggcagcaagggcgacguguucgugaucagagagcccuucaucagcugcagccaccuggagugcagaaccuucuuccugacccagggcgcccugcugaacgacaagcacagcaacggcaccgugaaggacagaagccccuacagagcccugaugagcugccccgugggcgaggcccccagccccuacaacagcagauucgagagcguggccuggagcgccagcgccugccacgacggcaugggcuggcugaccaucggcaucagcggccccgacgacggcgccguggccgugcugaaguacaacggcaucaucaccgagaccaucaagagcuggaagaagaagauccugagaacccaggagagcgagugcgugugcgugaacggcagcugcuucaccaucaugaccgacggccccagcgacggccccgccagcuacaagaucuucaagaucgagaagggcaaggugaccaagagcaucgagcuggacgcccccaacagccacuacgaggagugcagcugcuaccccgacaccggcaaggugaugugcgugugcagagacaacuggcacggcagcaacagacccugggugagcuucgaccagaaccuggacuaccagaucggcuacaucugcagcggcguguucggcgacaaccccagacccaaggacggcaagggcagcugcggccccguguacguggacggcgccaacggcgugaagggcuucagcuacagauacggcgacggcguguggaucggcagaaccaagagcaacagcagcagacagggcuucgagaugaucugggaccccaacggcuggaccgagaccgacagcagcuucuucgugaagcaggacgugguggccaugaccgacuggagcggcuacagcggcagcuucgugcagcaccccgagcugaccggccugaacugcaugagacccugcuucuggguggagcugaucagaggcagacccaaggagaagaccaucuggaccagcggcagcagcaucagcuucugcggcgugaacagcgacaccguggacuggagcuggcccgacggcgccgagcugcccuucaccaucgacaaguga

SEQ ID NO: 183532 - RNA, 1410 nt, Artificial Sequence
  derived and/or modified CDS sequence (opt4) from neuraminidase__InfluenzaA__AGO00280
augaaccccaaccagaagaucaucaccaucggcagcaucugcaugguggugggcaucaucagccugauccugcagaucggcaacaucgugagcaucuggaucagccacagcauccagaccggcaaccagaaccacaccggcaccugcaaccagagcaucaucaccuacaagaacagcaccugggugaaccagaccuacgugaacaucagcaacaccaacgugguggccggcaaggacaccaccagcgugauccuggccggcaacagcagccugugccccaucagaggcugggccaucuacagcaaggacaacggcgugagaaucggcagcaagggcgacguguucgugaucagagagcccuucaucagcugcagccaccuggagugcagaaccuucuuccugacccagggcgcccugcugaacgacaagcacagcaacggcaccgugaaggacagaagccccuacagagcccugaugagcugccccgugggcgaggcccccagccccuacaacagcagauucgagagcguggccuggagcgccagcgccugccacgacggcaugggcuggcugaccaucggcaucagcggccccgacgacggcgccguggccgugcugaaguacaacggcaucaucaccgagaccaucaagagcuggagaaaggagauccugagaacccaggagagcgagugcgugugcgugaacggcagcugcuucaccaucaugaccgacggccccagcggcggccccgccagcuacaagaucuucaagaucgagaagggcaaggugaccaagagcaucgagcuggacgcccccaacagccacuacgaggagugcagcugcuaccccgacaccagcaaggugaugugcgugugcagagacaacuggcacggcagcaacagacccugggugagcuucgaccagaaccuggacuaccagaugggcuacaucugcagcggcguguucggcgacaaccccagacccaaggacggcaagggcagcugcggccccguguacguggacggcgccaacggcgugaagggcuucagcuacagauacggcaacggcguguggaucggcagaaccaagagcaacagcagcagacagggcuucgagaugaucugggaccccaacggcuggaccgagaccgacagcaacuucuucaugaagcaggacgugguggccgugaccgacuggagcggcuacagcggcagcuucgugcagcaccccgagcugaccggccuggacugcaugagacccugcuucuggguggagcugaucagaggcagacccaaggagaacaccaucuggaccagcggcagcagcaucagcuucugcggcgugaacagcgacaccguggacuggagcuggcccgacggcgccgagcugcccuucaccaucgacaaguga

SEQ ID NO: 183533 - RNA, 1413 nt, Artificial Sequence
  derived and/or modified CDS sequence (opt4) from neuraminidase__InfluenzaA__AGO00292
augaaccccaaccagaagaucaucaccaucggcagcaucugcaugaccaucggcaccaucagccugauccugcagaucggcaacaucaucagcaucuggaucagccacagcauccagaccggcagccagaaccacaccggcaucugcaaccagagaaucaucaccuacgagaacaacaccugggugaaccagaccuacgugaacaucagcaacaccaacgugguggccggcaaggacaccaccagcaugauccuggccggcaacagcagccugugccccaucagaggcugggccaucuacagcaaggacaacagcaucagaaucggcagcaagggcgacguguucgugaucagagagcccuucaucagcugcagccaccuggagugcagaaccuucuuccugacccagggcgcccugcugaacgacaagcacagcaacggcaccgugaaggacagaagccccuacagagcccugaugagcugccccaucggcgaggcccccagccccuacaacagcagauucgagagcguggccuggagcgccagcgccugccacgacggcaugggcuggcugaccaucggcaucagcggccccgacgacggcgccguggccgugcugaaguacaacggcaucaucaccgagaucaucaagagcuggagaaagcagauccugagaacccaggagagcgagugcgugugcgugaacggcagcugcuucaccaucaugaccgacggccccagcgacggccccgccagcuacagaaucuucaagaucgagaagggcaagaucaccaagagcaucgagcuggacgcccccaacagccacuacgaggagugcagcugcuaccccgacaccggcaaggugaugugcgugugcagagacaacuggcacggcagcaacagacccugggugagcuucaaccagaaccuggacuaccagaucggcuacaucugcagcggcguguucggcgacaaccccagacccaaggacggcaagggcagcugcgaccccgugaacguggacggcgccgacggcgugaagggcuucagcuacagauacggcgacggcguguggaucggcagaaccaagagcaacagcagcagaaagggcuucgagaugaucugggaccccaacggcuggaccgacaccgacgacaacuuccuggugaagcaggacgugguggccaugaccgacuggagcggcuacagcggcagcuucgugcagcaccccgagcugaccggccuggacugcaucagacccugcuucuggguggagcugaucagaggcagacccagagagaagaccaccaucuggaccagcggcagcagcaucagcuucugcggcgugaacagcgacaccgugaacuggagcuggcccgacggcgccgagcugcccuucaccaucgacauguga

SEQ ID NO: 183534 - RNA, 1413 nt, Artificial Sequence
  derived and/or modified CDS sequence (opt4) from neuraminidase__InfluenzaA__AGO00304
augaaccccaaccagaagaucaucaccaucggcagcaucugcauggccaucggcaccaucagccugauccugcagaucggcaacaucaucagcaucuggaucagccacagcauccagaccggcagccagaaccacaccggcaucugcaaccagagaaucaucaccuacgagaacaacaccugggugaaccagaccuacgugaacaucagcaacaccaacgugguggccggcaaggacaccaccagcaugauccuggccggcaacaccagccugugccccaucagaggcugggccaucuacagcaaggacaacagcaucagaaucggcagcaagggcgacguguucgugaucagagagcccuucaucagcugcagccaccuggagugcagaaccuucuuccugacccagggcgcccugcugaacgacaagcacagcaacggcaccgugaaggacagaagccccuacagagcccugaugagcugccccaucggcgaggcccccagccccuacaacagcagauucgagagcguggccuggagcgccagcgccugccacgacggcaugggcuggcugaccaucggcaucagcggccccgacgacggcgccguggccgugcugaaguacaacggcaucaucaccgagaucaucaagagcuggagaaagcagauccugagaacccaggagagcgagugcgugugcgugaacggcagcugcuucaccaucaugaccgacggccccagcaacggccccgccagcuacagaaucuucaagaucgagaagggcaagaucaccaagagcaucgagcuggacgcccccaacagccacuacgaggagugcagcugcuaccccgacaccggcaaggugaugugcgugugcagagacaacuggcacggcagcaacagacccugggugagcuucaaccagaaccuggacuaccagaucggcuacaucugcagcggcguguucggcgacaaccccagacccaaggacggcaagggcagcugcgaccccgugaacguggacggcgccgacggcgugaagggcuucagcuacagauacggcaacggcguguggaucggcagaaccaagagcaacagcagcagaaagggcuucgagaugaucugggaccccaacggcuggaccaacaccgacggcaacuucagcgugaagcaggacgugguggccaugaccgacuggagcggcuacagcggcagcuucgugcagcaccccgagcugaccggccuggacugcaugagacccugcuucuggguggagcugaucagaggcagacccagagagaagaccaccaucuggaccagcggcagcagcaucagcuucugcggcgugaacagcgacaccgugaacuggagcuggcccgacggcgccgagcugcccuucaccaucgacaaguga

SEQ ID NO: 183535 - RNA, 1410 nt, Artificial Sequence; identical to SEQ ID NO: 182604
  derived and/or modified CDS sequence (opt4) from neuraminidase__InfluenzaA__AGO00316

SEQ ID NO: 183536 - RNA, 1410 nt, Artificial Sequence; identical to SEQ ID NO: 182048
  derived and/or modified CDS sequence (opt4) from neuraminidase__InfluenzaA__AGO00328

SEQ ID NO: 183537 - RNA, 1410 nt, Artificial Sequence; identical to SEQ ID NO: 174155
  derived and/or modified CDS sequence (opt4) from neuraminidase__InfluenzaA__AGO00340

SEQ ID NO: 183538 - RNA, 1365 nt, Artificial Sequence; identical to SEQ ID NO: 175779
  derived and/or modified CDS sequence (opt4) from neuraminidase__InfluenzaA__AGO00352

SEQ ID NO: 183539 - RNA, 1365 nt, Artificial Sequence; identical to SEQ ID NO: 175779
  derived and/or modified CDS sequence (opt4) from neuraminidase__InfluenzaA__AGO00376

SEQ ID NO: 183540 - RNA, 1365 nt, Artificial Sequence; identical to SEQ ID NO: 175779
  derived and/or modified CDS sequence (opt4) from neuraminidase__InfluenzaA__AGO00388

SEQ ID NO: 183541 - RNA, 1365 nt, Artificial Sequence; identical to SEQ ID NO: 175779
  derived and/or modified CDS sequence (opt4) from neuraminidase__InfluenzaA__AGO00400

SEQ ID NO: 183542 - RNA, 1365 nt, Artificial Sequence; identical to SEQ ID NO: 175779
  derived and/or modified CDS sequence (opt4) from neuraminidase__InfluenzaA__AGO00412

SEQ ID NO: 183543 - RNA, 1365 nt, Artificial Sequence; identical to SEQ ID NO: 175779
  derived and/or modified CDS sequence (opt4) from neuraminidase__InfluenzaA__AGO00424

SEQ ID NO: 183544 - RNA, 1365 nt, Artificial Sequence
  derived and/or modified CDS sequence (opt4) from neuraminidase__InfluenzaA__AGO00436
augaaccccaaccagaagaucaucaccaucggcagcaucugccugguggugggccugaucagccugauccugcagaucggcaacaucaucagcaucuggaucagccacagcauccagaccggcagccagaaccacaccggcaucugcaaccagaacaucaucaccuacaagaacagcaccugggugaaggacaccaccagcgugauccugaccggcaacagcagccugugccccaucagaggcugggccaucuacagcaaggacaacagcaucagaaucggcagcaagggcgacguguucgugaucagagagcccuucaucagcugcagccaccuggagugcagaaccuucuuccugacccagggcgcccugcugaacgacaagcacagcagcggcaccgugaaggacagaagccccuacagagcccugaugagcugccccgugggcgaggcccccagccccuacaacagcagauucgagagcguggccuggagcgccagcgccugccacgacggcaugggcuggcugaccaucggcaucagcggccccgacaacggcgccguggccgugcugaaguacaacggcaucaucaccgagaccaucaagagcuggagaaagaagauccugagaacccaggagagcgagugcgccugcgugaacggcagcugcuucaccaucaugaccgacggccccagcgacggccuggccagcuacaagaucuucaagaucgagaagggcaaggugaccaagagcaucgagcugaacgcccccaacagcaacuacgaggagugcagcugcuaccccgacaccggcaaggugaugugcgugugcagagacaacuggcacggcagcaacagacccugggugagcuucgaccagaaccuggacuaccagaucggcuacaucugcagcggcguguucggcgacaaccccagacccgaggacggcaccggcagcugcggccccguguacguggacggcgccaacggcgugaagggcuucagcuacagauacggcaacggcguguggaucggcagaaccaagagccacagcagcagacacggcuucgagaugaucugggaccccaacggcuggaccgagaccgacagcaaguucagcgugagacaggacgugguggccaugaccgacuggagcggcuacagcggcagcuucgugcagcaccccgagcugaccggccuggacugcaugagacccugcuucuggguggagcugaucagaggcagacccaaggagaagaccaucuggaccagcgccagcagcaucagcuucugcggcgugaacagcgacaccguggacuggagcuggcccgacggcgccgagcugcccuucagcaucgacaaguga

SEQ ID NO: 183545 - RNA, 1365 nt, Artificial Sequence
  derived and/or modified CDS sequence (opt4) from neuraminidase__InfluenzaA__AGO00448
augaaccccaaccagaagaucaucaccaucggcagcaucugccugguggugggccugaucagccugauccugcagaucggcaacaucaucagcaucuggaucagccacagcauccagaccggcagccagaaccacaccggcaucugcaaccagaacaucaucaccuacaagaacagcaccugggugaaggacaccaccagcgugauccugaccggcaacagcagccugugccccaucagaggcugggccaucuacagcaaggacaacagcaucagaaucggcagcaagggcgacguguucgugaucagagagcccuucaucagcugcagccaccuggagugcagaaccuucuuccugacccagggcgcccugcugaacgacaagcacagcagcggcaccgugaaggacagaagccccuacagagcccugaugagcugccccgugggcgaggcccccagccccuacaacagcagauucgagagcguggccuggagcgccagcgccugccacgacggcaugggcuggcugaccaucggcaucagcggccccgacaacggcgccguggccgugcugaaguacaacggcaucaucaccgagaccaucaagagcuggagaaagaagauccugagaacccaggagagcgagugcgccugcgugaacggcagcugcuucaccaucaugaccgacggccccagcgacggccuggccagcuacagaaucuucaagaucgagaagggcaaggugaccaagagcaucgagcugaacgcccccaacagccacuacgaggagugcagcugcuaccccgacaccggcaaggugaugugcgugugcagagacaacuggcacggcagcaacagacccugggugagcuucgaccagaaccuggacuaccagaucggcuacaucugcagcggcguguucggcgacaaccccagacccgaggacggcaccggcagcugcggccccguguacguggacggcgccaacggcgugaagggcuucagcuacagauacggcaacggcguguggaucggcagaaccaagagccacagcagcagacacggcuucgagaugaucugggaccccaacggcuggaccgagaccgacagcaaguucagcgugagacaggacgugguggccaugaccgacuggagcggcuacagcggcagcuucgugcagcaccccgagcugaccggccuggacugcaugagacccugcuucuggguggagcugaucagaggcagacccaaggagaagaccaucuggaccagcgccagcagcaucagcuucugcggcgugaacagcgacaccguggacuggagcuggcccgacggcgccgagcugcccuucagcaucgacaaguga

SEQ ID NO: 183546 - RNA, 1410 nt, Artificial Sequence
  derived and/or modified CDS sequence (opt4) from neuraminidase__InfluenzaA__AGQ47722
augaacaccaaccagagaaucaucaccaucggcaccaucugccugaucgugggcaucaucagccugcugcugcagaucggcaacaucaucagccuguggaucagccacagcauccagaccggcgagaagagccaccccgagaucugcaaccagagcgugaucaccuacgagaacaacaccugggugaaccagaccuacgugaacaucagcaacaccaacaucgccgccggccagggcgugacccccaucauccuggccggcaacagcagccugugccccaucagcggcugggccaucuacagcaaggacaacagcaucagaaucggcagcaagggcgacaucuucgugaugagagagcccuucaucagcugcagccaccuggagugcagaaccuucuuccugacccagggcgcccugcugaacgacagacacagcaacggcaccgugaaggacagaagccccuacagaacccugaugagcugccccaucggcgaggcccccagccccuacaacagcagauucgagagcguggccuggagcgccagcgccugccacgacggcaugggcuggcugaccaucggcaucagcggccccgacaacggcgccguggccgugcugaaguacaacggcaucaucaccgacaccaucaagagcuggagaaacaagauccugagaacccaggagagcgagugcgugugcaucaacggcagcugcuucaccaucaugaccgacggccccagcaacggccaggccagcuacaagaucuucaagauggagaagggcaagaucaucaagagcaucgagcuggacgcccccaacuaccacuacgaggagugcagcugcuaccccgacaccggcaaggugaugugcgugugcagagacaacuggcacgccagcaacagacccugggugagcuucgaccagaaccuggacuaccagaucggcuacaucugcagcggcguguucggcgacaaccccagaagcaacgacggcaagggcaacugcggccccgugcugagcaacggcgccaacggcgugaagggcuucagcuucagauacggcaacggcguguggaucggcagaaccaagagcaucagcagcagaagcggcuucgagauggugugggaccccaacggcuggaccgagaccgacagcagcuucagcaugaagcaggacaucaucgcccugaccgacuggagcggcuacagcggcagcuucgugcagcaccccgagcugaccggcaugaacugcaucagacccugcuucuggguggagcugaucagaggccagcccaaggagagcaccaucuggaccagcggcagcagcaucagcuucugcggcgugaacagcggcaccgccagcuggagcuggcccgacggcgccgaccugcccuucaccaucgacaaguga

SEQ ID NO: 183547 - RNA, 1413 nt, Artificial Sequence; identical to SEQ ID NO: 176513
  derived and/or modified CDS sequence (opt4) from neuraminidase__InfluenzaA__AGQ47731

SEQ ID NO: 183548 - RNA, 1377 nt, Artificial Sequence
  derived and/or modified CDS sequence (opt4) from neuraminidase__InfluenzaA__AGQ47743
augaaccccaaccagaagaucaucaccaucggcagcaucugcaugguggugggcaucaucagccugauccugcagaucggcaacaucaucagcaucuggaucagccacagcauccagaccggcaaccagaaccacaagaacagcaccuggaugaaccagaccuacaucaacaucagcaacaccaacgugguggccggccaggacagcaccagcgugauccugaccggcaacagcagccugugccccaucagaggcugggccaucaacagcaaggacaacggcaucagaaucggcagcaagggcgacguguucgugaucagagagcccuucaucagcugcagccaccuggagugcagaaccuucuuccugacccagggcgcccugcugaacgacaagcacagcaacggcaccgugaaggacagaagccccuacagagcccugaugagcugccccgugggcgaggcccccagccccuacaacagcagauucgagagcguggccuggagcgccagcgccugccacgacggcaugggcuggcugaccaucggcaucagcggccccgacaacggcgccguggccgugcugaaguacaacggcaucaucaccgagaccaucaagagcuggagaaagaagauccugagaacccaggagagcgagugcaccugcgugaacggcagcugcuucaccaucaugaccgacggccccagcaacggccuggccagcuacaagaucuucaagaucgagaagggcaaggugaccaagagcaucgagcugaacgcccccaacagccacuacgaggagugcagcugcuaccccgacaccggcaaggugaugugcgugugcagagacaacuggcacggcagcaacagacccugggugagcuucgaccagaaccuggacuaccagaucggcuacaucugcagcggcguguucggcgacaaccccagacccaaggacggcaccggcagcugcggccccgugagcgccgacggcgccaacggcgugaagggcuucagcuacagauacggcaacggcguguggaucggcagaaccaagagcaacagcagcagacacggcuucgagaugaucugggaccccaacggcuggaccgagaccgacagcagauucagcgugagacaggacgugguggccaugaccgacagaagcggcuacagcggcagcuucgugcagcaccccgagcugaccggccuggacugcaugagacccugcuucuggguggagcugaucagaggcagacccgaggaggagaccaucuggaccagcggcagcaucaucagcuucugcggcgugaacagcgacaccguggacuggagcuggcccgacggcgccgagcugcccuucaccaucgacaaguga

SEQ ID NO: 183549 - RNA, 1413 nt, Artificial Sequence
  derived and/or modified CDS sequence (opt4) from neuraminidase__InfluenzaA__AGQ47755
augaaccccaaccagaagaucaucaccaucggcagcaucugcauggccaucggcaccaucagccugauccugcagaucggcaacaucaucagcaucuggaucagccacagcauccagaccggcagccagaaccacaccggcaucugcaacagaagaaucgugaccuacgagaacaacaccugggugaaccagaccuacgugaacaucagcaacaccaacgugguggccgagaaggacaccaccagcaugauccuggccggcaacagcagccugugccccaucagaggcugggccaucuacagcaaggacaacagcaucagaaucggcagcaagggcgacguguucgugaucagagagcccuucaucagcugcagccaccuggagugcagaaccuucuuccugacccagggcgcccugcugaacgacaagcacagcaacggcaccgugaaggacagaagccccuacagagcccugaugagcugccccaucggcgaggcccccagccccuacaacagcagauucgagagcguggccuggagcgccagcgccugccacgacggcaugggcuggcugaccaucggcaucagcggccccgacgacggcgccguggccgugcugaaguacaacggcaucaucaccgagaucaucaagagcuggagaaagcagauccugagaacccaggagagcgagugcgugugcgugaacggcagcugcuucaccaucaugaccgacggccccagcaacggccccgccagcuacagaaucuucaagaucaagaagggcaagaucaccaagagcaucgagcuggacgcccccaacagccacuacgaggagugcagcugcuaccccgacaccggcaaggugaugugcgugugcagagacaacuggcacggcagcaacagacccugggugagcuucaaccagaaccuggacuaccagaucggcuacaucugcagcggcguguucggcgacaaccccagacccaaggacggcaagggcagcugcgaccccgugaacguggacggcgccgacggcgugaagggcuucagcuacagauacggcaacggcguguggaucggcagaaccaagagcaccagcagcagaaagggcuucgagaugaucugggaccccaacggcuggaccgacaccgacggcaacuuccuggugaagcaggacgugguggccaugaccgacuggagcggcuacagcggcagcuucgugcagcaccccgagcugaccggccuggacugcaugagacccugcuucuggguggagcugaucagaggcagacccagagagaagaccaccaucuggaccagcggcagcagcaucagcuucugcggcgugaacagcgacaccgugaacuggagcuggcccgacggcgccgagcugcccuucaccaucgacaaguga

SEQ ID NO: 183550 - RNA, 1410 nt, Artificial Sequence
  derived and/or modified CDS sequence (opt4) from neuraminidase__InfluenzaA__AGQ47767
augaaccccaaccagaagaucaucaccaucggcagcaucugcaugguggugggcaucaucagccugauccugcagaucggcaacaucgugagcaucuggaucagccacagcauccagaccggcaaccagaaccacaccggcaccugcgaccagagcaucaucaccuacaagaacagcaccugggugaaccagaccuacgugaacaucagcaacaccaacgugguggccggcaaggacaccaccagcgugauccuggccggcaacagcagccugugccccaucagaggcugggccaucuacagcaaggacaacggcgugagaaucggcagcaagggcgacguguucgugaucagagagcccuucaucagcugcagccaccuggagugcagaaccuucuuccugacccagggcgcccugcugaacgacaagcacagcaacggcaccgugaaggacagaagccccuacagagcccugaugagcugccccgugggcgaggcccccagccccuacaacagcagauucgagagcguggccuggagcgccagcgccugccacgacggcaugggcuggcugaccaucggcaucagcggccccgacgacggcgccguggccgugcugaaguacaacggcaucaucaccgagaccaucaagagcuggagaaaggagauccugagaacccaggagagcgagugcgugugcgugaacggcagcugcuucaccaucaugaccgacggccccagcggcggccccgccagcuacaagaucuucaagaucgagaagggcaaggugaccaagagcaucgagcuggacgcccccaacagccacuacgaggagugcagcugcuaccccgacaccagcaaggugaugugcgugugcagagacaacuggcacggcagcaacagacccugggugagcuucgaccagaaccuggacuaccagaugggcuacaucugcagcggcguguucggcgacaaccccagacccaaggacggcaagggcagcugcggccccguguacguggacggcgccaacggcgugaagggcuucagcuacaaguacggcaacggcguguggaucggcagaaccaagagcaacagcagcagacagggcuucgagaugaucugggaccccaacggcuggaccgagaccgacagcaacuucuucaccaagcaggacgugguggccgugaccgacuggagcggcuacagcggcagcuucgugcagcaccccgagcugaccggccuggacugcaugagacccugcuucuggguggagcugaucagaggcagacccaaggagaacaccaucuggaccagcggcagcagcaucagcuucugcggcgugaacagcgacaccguggacuggagcuggcccgacggcgccgagcugcccuucaccaucgacaaguga

SEQ ID NO: 183551 - RNA, 1410 nt, Artificial Sequence; identical to SEQ ID NO: 183532
  derived and/or modified CDS sequence (opt4) from neuraminidase__InfluenzaA__AGQ47779

SEQ ID NO: 183552 - RNA, 1413 nt, Artificial Sequence
  derived and/or modified CDS sequence (opt4) from neuraminidase__InfluenzaA__AGQ47791
augaaccccaaccagaagaucaucaccaucggcagcaucugcauggccaucggcaucaucagccugauccugcagaucggcaacaucaucagcaucugggugagccacagcauccagaccggcagccagaaccacaccggcaucugcaaccagagaaucaucaccuacgagaacaacaccugggugaaccagacccacgugaacaucagcaacaccaacgugguggccggcaaggacaccaccagcaugauccuggccggcaacagcagccugugccccaucagaggcugggccaucuacagcaaggacaacagcaucagaaucggcagcaagggcgacguguucgugaucagagagcccuucaucagcugcagccaccuggagugcagaaccuucuuccugacccagggcgcccugcugaacgacaagcacagcaacggcaccgugaaggacagaagccccuacagagcccugaugagcugccccaucggcgaggcccccagccccuacaacagcagauucgagagcguggccuggagcgccagcgccugccacgacggcaugggcuggcugaccaucggcaucagcggccccgacgacggcgccguggccgugcugaaguacaacggcaucaucaccgagaccaucaagagcuggaagaagcagauccugagaacccaggagagcgagugcgugugcgugaacggcagcugcuucaccaucaugaccgacggccccagcgacggccccgccagcuacagaaucuucaagaucgagaagggcaagaucaccaagagcaucgagcuggacgcccccaacagccacuacgaggagugcagcugcuaccccgacaccggcaccgugaugugcgugugcagagacaacuggcacggcagcaacagacccugggugagcuucaaccagaaccuggacuaccagaucggcuacaucugcagcggcguguucggcgacaaccccagacccaaggacggcaagggcagcugcgaccccgugaacguggacggcgccgacggcgugaagggcuucagcuacagauacggcaacggcguguggaucggcagaaccaagagcaacagcagcagaaagggcuucgagaugaucugggaccccaacggcuggaccgacaccgacggcaacuuccuggugaagcaggacgugguggccaugaccgacuggagcggcuacagcggcagcuucgugcagcaccccgagcugaccggccuggacugcaugagacccugcuucuggguggagcugaucagaggcagacccagagagaagaccaccaucuggaccagcggcagcagcaucagcuucugcggcgugaacagcgacaccgugaacuggagcuggcccgacggcgccgagcugcccuucaccaucgacaaguga

SEQ ID NO: 183553 - RNA, 1410 nt, Artificial Sequence
  derived and/or modified CDS sequence (opt4) from neuraminidase__InfluenzaA__AGQ47803
augaaccccaaccagaagaucaucaccaucggcagcaucugcaugguggugggcaucaucagccugauccugcagaucggcaacaucaucagcaucuggaucagccacagcauccagaccggcagccagaaccacaccggcaucugcaaccagagcaucaucaccuacaagaacagcaccugggugaaccagaccuacgugaacaucagcaacaccaacgugguggccggcaagggcaccaccagcgugauccuggccggcaacagcagccugugccccaucagaggcugggccaucuacagcaaggacaacggcaucagaaucggcagcaagggcgacguguucgugaucagagagcccuucaucagcugcagccaccuggagugcagaaccuucuuccugacccagggcgcccugcugaacgacaagcacagcaacggcaccgugaaggacagaagccccuacagagcccugaugagcugccccgugggcgaggcccccagccccuacaacagcagauucgagagcguggccuggagcgccugcgccugccacgacggcaugggcuggcugaccaucggcaucagcggccccgacgacgaggccguggccgugcugaaguacaacggcaucaucaccgagaccaucaagagcuggagaaagaagauccugagaacccaggagagcgagugcgugugcgugaacggcagcugcuucaccaucaugaccgacggccccagcgacggccccgccagcuacaagaucuucaagaucgagaagggcaaggugaccaagagcaucgagcuggacgcccccaacagccacuacgaggagugcagcugcuaccccgacaccggcaaggugaugugcgugugcagagacaacuggcacggcagcaacagacccugggugagcuucgaccagaaccuggacuaccagaucggcuacaucugcagcggcguguucggcgacaaccccagacccaaggacggcaagggcagcugcggccccguguacguggacggcgccaacggcgugaagggcuucagcuacagauacggcaacggcguguggaucggcagaaccaagagcgacagcagcagacagggcuucgagaugaucugggaccccaacggcuggaccgagaccgacagcaacuucuucgugaagcaggacaucguggccaugaccgacuggagcggcuacagcggcagcuucgugcagcaccccgagcugaccggccuggacugcaugagacccugcuucuggguggagcugaucagaggcagacccaaggagaagaccaucuggaccagcggcagcagcaucagcuucugcggcgugaacagcgacaccguggacuggagcuggcccgacggcgccgagcugcccuucaccaucgacaaguga

SEQ ID NO: 183554 - RNA, 1368 nt, Artificial Sequence
  derived and/or modified CDS sequence (opt4) from neuraminidase__InfluenzaA__AGQ47814
augaaccccaaccagaagaucaucaccaucggcagcaucugcauggccaucggcaucaucagccugauccugcagaucggcaacaucaucagcaucugggugagccacagcauccagaccggcagccagaaccacaccggcaucugcaaccagagaaucaucaccuacgagaacaacaccugggugaaggacaccaccagcaugacccuggccggcaacagcagccugugccccaucagaggcugggccaucuacagcaaggacaacagcaucagaaucggcagcaagggcgacguguucgugaucagagagcccuucaucagcugcagccaccuggagugcagaaccuucuuccugacccagggcgcccugcugaacgacaagcacagcaacggcaccgugaaggacagaagccccuacagagcccugaugagcugccccaucggcgaggcccccagccccuacaacagcagauucgagagcguggccuggagcgccagcgccugccacgacggcaugggcuggcugaccaucggcaucagcggccccgacgacggcgccguggccgugcugaaguacaacggcaucaucaccgagaccaucaagagcuggaagaagcagauccugagaacccaggagagcgagugcgugugcgugaacggcagcugcuucaccaucaugaccgacggccccagcgacggccccgccagcuacagaaucuucaagaucgagaagggcaagaucaccaagagcaucgagcuggacgcccccaacagccacuacgaggagugcagcugcuaccccgacaccggcaccgugaugugcgugugcagagacaacuggcacggcagcaacagacccugggugagcuucaaccagaaccuggacuaccagaucggcuacaucugcagcggcguguucggcgacaaccccagacccaaggacggcaagggcagcugcgaccccgugaacguggacggcgccgacggcgugaagggcuucagcuacagauacggcaacggcguguggaucggcagaaccaagagcaacagcagcagaaagggcuucgagaugaucugggaccccaacggcuggaccgacaccgacggcaacuuccuggugaagcaggacgugguggccaugaccgacuggagcggcuacagcggcagcuucgugcagcaccccgagcugaccggccuggacugcaugagacccugcuucuggguggagcugaucagaggcagacccagagagaagaccaccaucuggaccagcggcagcagcaucagcuucugcggcgugaacagcgacaccgugaacuggagcuggcccgacggcgccgagcugcccuucaccaucgacaaguga

SEQ ID NO: 183555 - RNA, 1413 nt, Artificial Sequence; identical to SEQ ID NO: 176517
  derived and/or modified CDS sequence (opt4) from neuraminidase__InfluenzaA__AGQ47826

SEQ ID NO: 183556 - RNA, 1410 nt, Artificial Sequence
  derived and/or modified CDS sequence (opt4) from neuraminidase__InfluenzaA__AGQ47838
augaaccccaaccagaagaucaucaccaucggcagcgugagccugaccaucgccaccaucugcuuccugaugcagaucgccauccuggugaccaccgugacccugcacuucaagcaguacgagugcgacagccccgccaacaaccaggugaugcccugcgagcccaucaucaucgagagaaacaucaccgagaucguguaccugaccaacaccaccaucgagaaggagaucugccccaagcuggugggcuacagaaacuggagcaagccccagugcaagaucaccggcuucgcccccuucagcaaggacaacagcaucagacugagcgccggcggcgacaucugggugaccagagagcccuacgugagcugcgaccccggcaagugcuaccaguucgcccugggccagggcaccacccuggacaacaagcacagcaacgacaccauccacgacagaaccccccacagaacccugcugaugaacgagcugggcgugcccuuccaccugggcaccaagcaggugugcaucgccuggagcagcagcagcugccacgacggcaaggccuggcugcacgugugcgugaccggcuacgacaagaacgccaccgccagcuucaucuacgacggcagacugguggacagcaucggcagcuggagccagaacauccugagaacccaggagagcgagugcgugugcaucaacggcaccugcaccguggugaugaccgacggcagcgccagcggcagagccgacaccaagauccuguucaucgaggagggcaagaucgugcacaucagcccccugagcggcagcgcccagcacguggaggagugcagcugcuaccccagauaccccggcgugagaugcaucugcagagacaacuggaagggcagcaacagacccgugguggacaucaacgugaaggacuacagcaucgacagcagcuacgugugcagcggccuggugggcgacacccccagaaacaacgacagaagcagcagcagcuacugcagaaaccccaacaacgagaagggcaaccacggcgugaagggcugggccuucgacgacggcaacgacguguggaugggcagaaccaucagcgaggacagcagaagcggcuacgagaccuucaaggugaucggcggcuggagcacccccaacagcaagcugcagaucaacagacaggugaucguggacagcgacaacagaagcggcuacagcggcaucuucagcguggagggcaagagcugcaucaacagaugcuucuacguggagcugaucagaggcagagagcaggagaccagagugugguggaccagcaacagcaucgugguguucugcggcaccagcggcaccuacggcaccggcagcuggcccgacggcgccgacaucaaccugaugcccaucuga

SEQ ID NO: 183557 - RNA, 1362 nt, Artificial Sequence
  derived and/or modified CDS sequence (opt4) from neuraminidase__InfluenzaA__AGQ47850
augaaccccaaccagaagaucaucaccaucggcagcaucugcaugguggugggcaucaucagccugauccugcagaucggcaacaucaucagcaucuggaucagccacagcauccaggccggcagcagcaccugggugaaccagaccuacgugaacaucagcaacaccaacgugguggccggccccgacgccaccagcgugauccugaccggcaacagcagccugugccccaucagaggcugggccaucuacagcaaggacaacggcaucagaaucggcagcaagggcgacaucuucgugaucagagagcccuucaucagcugcagccaccuggagugcagagccuucuuccugacccagggcgcccugcugaacgacaagcacagcaacggcaccgugaaggacagaagccccuacagagcccugaugagcugccccgugggcgaggcccccagccccuacaacagcagauucgagagcguggccuggagcgccagcgccugccacgacggcaugggcuggcugaccaucggcaucagcggccccgacaacggcgccguggccgugcugaaguacaacggcaucaucaccgagaccaucaagagcuggagaaagaagauccugagaacccaggagagcgagugcgccugcgugaacggcagcugcuucaccaucaugaccgacggccccagcgacggccccgccagcuacaagaucuucaagaucgagaagggcaaggugaccaagagcaucgagcuggacgcccccaacagccacuacgaggagugcagcugcuaccccgacaccggcaaggugaugugcgugugcagagacaacuggcacggcagcaacagacccugggugagcuucgaccagaaccuggacuaccagaucggcuacaucugcagcggcguguucggcgacagccccagacccaaggacggcaccggcagcugcggccccgugagcguggacggcgccaacggcgugaagggcuucagcuacagauacggcaacggcguguggaucggcagaaccaagagcaagagcagcagacacggcuucgagaugaucugggaccccaacggcuggaccgagaccgacagcagauucagcgugagacaggacgugguggccaugaccgacuggagcggcuacagcggcagcuucgugcagcaccccgagcugaccggccuggacugcaugagacccugcuucuggguggagcugaucagaggccagcccaaggagaagaccaucuggaccagcggcagcagcaucagcuucugcggcgugaacagcgacaccguggacuggagcuggcccgacggcgccgagcugcccuucaccaucgacaaguga

SEQ ID NO: 183558 - RNA, 1410 nt, Artificial Sequence
  derived and/or modified CDS sequence (opt4) from neuraminidase__InfluenzaA__AGQ47873
augaacaccaaccagagaaccaucaccaucggcaccaucugccugaucgugggcaucaucagccugcugcugcagaucggcaacaucauccugcuguggaugagccacagcauccagaccggcgagaagagccaccccaaggugugcaaccagagcgugaucaccuacgagaacaacaccugggugaaccagaccuacgugaacaucagcaacaccaacaucgccgccggccagggcgugacccccaucauccuggccggcaacagcagccugugccccaucagcggcugggccaucuacagcaaggacaacagcaucagaaucggcagcaagggcgacaucuucgugaugagagagcccuucaucagcugcagccaccuggagugcagaaccuucuuccugacccagggcgcccugcugaacgacagacacagcaacggcaccgugaaggacagaagccccuacagaacccugaugagcugccccaucggcgaggcccccagccccuacaacagcagauucgagagcguggccuggagcgccagcgccugccacgacggcaugggcuggcugaccaucggcaucagcggccccgacaacggcgccguggccgugcugaaguacaacggcaucaucaccgacaccaucaagagcuggagaaacaagauccugagaacccaggagagcgagugcgugugcaucaacggcagcugcuucaccaucaugaccgacggccccagcaacggccaggccagcuacaagcuguucaagauggagaagggcaagaucaucaagagcaucgagcuggacgcccccaacuaccacuacgaggagugcagcugcuaccccgacaccggcaagguggugugcgugugcagagacaacuggcacgccagcaacagacccugggugagcuucgaccagaaccuggacuaccagaucggcuacaucugcagcggcguguucggcgacaaccccagaagcaacgacggcaagggcaacugcggccccgugcugagcaacggcgccaacggcgugaagggcuucagcuucagauacggcaacggcguguggaucggcagaaccaagagcaucagcagcagaagcggcuucgagaugaucugggaccccaacggcuggaccgagaccgacagcagcuucagcaugaagcaggacaucaucgcccugaccgacuggagcggcuacagcggcagcuucgugcagcaccccgagcugaccggcaugaacugcaucagacccugcuucuggguggagcugaucagaggccagcccaaggagagcaccaucuggaccagcggcagcagcaucagcuucugcggcgugaacagcggcaccgccagcuggagcuggcccgacggcgccgaccugcccuucaccaucgacaaguga

SEQ ID NO: 183559 - RNA, 1410 nt, Artificial Sequence; identical to SEQ ID NO: 177274
  derived and/or modified CDS sequence (opt4) from neuraminidase__InfluenzaA__AGQ47885

SEQ ID NO: 183560 - RNA, 1410 nt, Artificial Sequence; identical to SEQ ID NO: 182040
  derived and/or modified CDS sequence (opt4) from neuraminidase__InfluenzaA__AGQ47897

SEQ ID NO: 183561 - RNA, 1410 nt, Artificial Sequence; identical to SEQ ID NO: 174155
  derived and/or modified CDS sequence (opt4) from neuraminidase__InfluenzaA__AGQ47909

SEQ ID NO: 183562 - RNA, 1410 nt, Artificial Sequence
  derived and/or modified CDS sequence (opt4) from neuraminidase__InfluenzaA__AGQ47921
augaaccccaaccagaagaucaucaccaucggcagcgugagccugaccaucgccaccgugugcuuccugaugcagaccgccauccuggugaccaccgugacccugcacuucaagcaguacgagugcgacagccccgccagcaaccaggugaugcccugcgagcccaucaucaucgagagaaacaucaccgagaucguguaccugaacaacaccaccaucgagaaggagaucugccccaaggugguggaguacagaaacuggagcaagccccagugccagaucaccggcuucgcccccuucagcaaggacaacagcaucagacugagcgccggcggcgacaucugggugaccagagagcccuacgugagcugcgaccacggcaagugcuaccaguucgcccugggccagggcaccacccuggacaacaagcacagcaacgacaccauccacgacagaaucccccacagaacccugcugaugaacgagcugggcgugcccuuccaccugggcaccagacaggugugcaucgccuggagcagcagcagcugccacgacggcaaggccuggcugcacgugugcaucaccggcgacgacaagaacgccaccgccagcuucaucuacgacggcagacugguggacagcaucggcagcuggagccagaacauccugagaacccaggagagcgagugcgugugcaucaacggcaccugcaccguggugaugaccgacggcagcgccagcggcagagccgacaccagaauccuguucaucgaggagggcaagaucgugcacaucagcccccugagcggcagcgcccagcacguggaggagugcagcugcuaccccagauaccccggcgugagaugcaucugcagagacaacuggaagggcagcaacagacccgugguggacaucaacauggaggacuacagcaucgacagcagcuacgugugcagcggccuggugggcgacacccccagaaacgacgacagaagcagcaacagcaacugcagaaaccccaacaacgagagaggcaaccagggcgugaagggcugggccuucgacaacggcgacgacguguggaugggcagaaccaucagcaaggaccugagaagcggcuacgagaccuucaaggugaucggcggcuggagcacccccaacagcaagagccagaucaacagacaggugaucguggacagcgacaacagaagcggcuacagcggcaucuucagcguggagggcaagagcugcaucaacagaugcuucuacguggagcugaucagaggcagaaagcaggaggccagagugugguggaccagcaacagcaucgugguguucugcggcaccagcggcaccuacggcaccggcagcuggcccgacggcgccaacaucaacuucaugcccaucuga

SEQ ID NO: 183563 - RNA, 1365 nt, Artificial Sequence
  derived and/or modified CDS sequence (opt4) from neuraminidase__InfluenzaA__AGQ47933
augaaccccaaccagaagaucaucaccaucggcagcaucugcaugguggugggccugaucagccugauccugcagaucggcaacaucaucagcaucuggaucagccacagcauccagaccggcagccagaaccacaccggcaucugcaaccagaacaucaucaccuacaagaacagcaccugggugaaggacaccaccagcgugauccugaccggcaacagcagccugugccccaucagaggcugggccaucuacagcaaggacaacagcaucagaaucggcagcaagggcgacguguucgugaucagagagcccuucaucagcugcagccaccuggagugcagaaccuucuuccugacccagggcgcccugcugaacgacagacacagcaacggcaccgugaaggacagaagccccuacagagcccugaugagcugccccgugggcgaggcccccagccccuacaacagcagauucgagagcguggccuggagcgccagcgccugccacgacggcaugggcuggcugaccaucggcaucagcggccccgacaacggcgccguggccgugcugaaguacaacggcaucaucaccgagaccaucaagagcuggagaaagaagauccugagaacccaggagagcgagugcgccugcgugaacggcagcugcuucaccaucaugaccgacggccccagcgacggccuggccagcuacaagaucuucaagaucgagaagggcaaggugaccaagagcaucgagcugaacgcccccaacagccacuacgaggagugcagcugcuaccccgacaccggcaaggugaugugcgugugcagagacaacuggcacggcagcaacagacccugggugagcuucgaccagaaccuggacuaccagaucggcuacaucugcagcggcguguucggcgacaaccccagacccaaggacggcaccggcagcugcggccccguguacguggacggcgccaacggcgugaagggcuucagcuacagauacggcaacggcguguggaucggcagaaccaagagccacagcagcagacacggcuucgagaugaucugggaccccaacggcuggaccgagaccgacagcaaguucagcgugagacaggacgugguggccaugaccgacuggagcggcuacagcggcagcuucgugcagcaccccgagcugaccggccuggacugcaucagacccugcuucuggguggagcugaucagaggcagacccaaggagaagaccaucuggaccagcgccagcagcaucagcuucugcggcgugaacagcgacaccgugaacuggagcuggcccgacggcgccgagcugcccuucaccaucgacaaguga

SEQ ID NO: 183564 - RNA, 1365 nt, Artificial Sequence; identical to SEQ ID NO: 175779
  derived and/or modified CDS sequence (opt4) from neuraminidase__InfluenzaA__AGQ47945

SEQ ID NO: 183565 - RNA, 1365 nt, Artificial Sequence; identical to SEQ ID NO: 175779
  derived and/or modified CDS sequence (opt4) from neuraminidase__InfluenzaA__AGQ47957

SEQ ID NO: 183566 - RNA, 1365 nt, Artificial Sequence; identical to SEQ ID NO: 175779
  derived and/or modified CDS sequence (opt4) from neuraminidase__InfluenzaA__AGQ47969

SEQ ID NO: 183567 - RNA, 1365 nt, Artificial Sequence; identical to SEQ ID NO: 175779
  derived and/or modified CDS sequence (opt4) from neuraminidase__InfluenzaA__AGQ47981

SEQ ID NO: 183568 - RNA, 1365 nt, Artificial Sequence
  derived and/or modified CDS sequence (opt4) from neuraminidase__InfluenzaA__AGQ48005
augaaccccaaccagaagaucaucaccaucggcagcaucugccugguggugggccugaucagccugauccugcagaucggcaacaucaucagcaucuggaucagccacagcauccagaccggcagccagaaccacaccggcaucugcaaccagaacaucaucaccuacaagaacagcaccugggugaaggacaccaccagcgugauccugaccggcaacagcagccugugccccaucagaggcugggccaucuacagcaaggacaacagcaucagaaucggcagcaagggcgacguguucgugaucagagagcccuucaucagcugcagccaccuggagugcagaaccuucuuccugacccagggcgcccugcugaacgacaagcacagcagcggcaccgugaaggacagaagccccuacagagcccugaugagcugccccgugggcgaggcccccagccccuacaacagcagauucgagagcguggccuggagcgccagcgccugccacgacggcaugggcuggcugaccaucggcaucagcggccccgacaacggcgccguggccgugcugaaguacaacggcaucaucaccgagaccaucaagagcuggagaaagaagauccugagaacccaggagagcgagugcgccugcgugaacggcagcugcuucaccaucaugaccgacggccccagcgacggccuggccagcuacaagaucuucaagaucgagaagggcaaggugaccaagagcaucgagcugaacgcccccaacagccacuacgaggagugcagcugcuaccccgacaccggcaaggugaugugcgugugcagagacaacuggcacggcagcaacagacccugggugagcuucgaccagaaccuggacuaccagaucggcuacaucugcagcggcguguucggcgacaaccccagacccgaggacggcaccggcagcugcggccccguguacguggacggcgccaacggcgugaagggcuucagcuacagauacagcaacggcguguggaucggcagaaccaagagccacagcagcagacacggcuucgagaugaucugggaccccaacggcuggaccgagaccgacagcaaguucagcgugagacaggacgugguggccaugaccgacuggagcggcuacagcggcagcuucgugcagcaccccgagcugaccggccuggacugcaugagacccugcuucuggguggagcugaucagaggcagacccaaggagaagaccaucuggaccagcgccagcagcaucagcuucugcggcgugaacagcgacaccguggacuggagcuggcccgacggcgccgagcugcccuucagcaucgacaaguga

SEQ ID NO: 183569 - RNA, 1365 nt, Artificial Sequence; identical to SEQ ID NO: 183568
  derived and/or modified CDS sequence (opt4) from neuraminidase__InfluenzaA__AGQ48017

SEQ ID NO: 183570 - RNA, 1365 nt, Artificial Sequence; identical to SEQ ID NO: 175779
  derived and/or modified CDS sequence (opt4) from neuraminidase__InfluenzaA__AGQ48029

SEQ ID NO: 183571 - RNA, 1365 nt, Artificial Sequence
  derived and/or modified CDS sequence (opt4) from neuraminidase__InfluenzaA__AGQ48041
augaaccccaaccagaagaucaucaccaucggcagcaucugccugguggugggccugaucagccugauccugcagaucggcaacaucaucagcaucuggaucagccacagcauccagaccggcagccagaaccacaccggcaucugcaaccagaacaucaucaccuacaagaacagcaccuggaucaaggacaccaccagcgugauccugaccggcaacagcagccugugccccaucagaggcugggccaucuacagcaaggacaacagcaucagaaucggcagcaagggcgacguguucgugaucagagagcccuucaucagcugcagccaccuggagugcagaaccuucuuccugacccagggcgcccugcugaacgacaagcacagcagcggcaccgugaaggacagaagccccuacagagcccugaugagcugccccgugggcgaggcccccagccccuacaacagcagauucgagagcguggccuggagcgccagcgccugccacgacggcaugggcuggcugaccaucggcaucagcggccccgacaacggcgccguggccgugcugaaguacaacggcaucaucaccgagaccaucaagagcuggagaaagaagauccugagaacccaggagagcgagugcgccugcgugaacggcagcugcuucaccaucaugaccgacggccccagcgacggccuggccagcuacaagaucuucaagaucgagaagggcaaggugaccaagagcaucgagcugaacgcccccaacagccacuacgaggagugcagcugcuaccccgacaccggcaaggugaugugcgugugcagagacaacuggcacggcagcaacagacccugggugagcuucgaccagaaccuggacuaccagaucggcuacaucugcagcggcguguucggcgacaaccccagacccgaggacggcaccggcagcugcggccccguguacguggacggcgccaacggcgugaagggcuucagcuacagauacggcaacggcguguggaucggcagaaccaagagccacagcagcagacacggcuucgagaugaucugggaccccaacggcuggaccgagaccgacagcaaguucagcgugagacaggacgugguggccaugaccgacuggagcggcuacagcggcagcuucgugcagcaccccgagcugaccggccuggacugcaugagacccugcuucuggguggagcugaucagaggcagacccaaggagaagaccaucuggaccagcgccagcagcaucagcuucugcggcgugaacagcgacaccguggacuggagcuggcccgacggcgccgagcugcccuucagcaucgacaaguga

SEQ ID NO: 183572 - RNA, 1365 nt, Artificial Sequence
  derived and/or modified CDS sequence (opt4) from neuraminidase__InfluenzaA__AGQ48053
augaaccccaaccagaagaucaucaccaucggcagcaucugccugguggugggccugaucagccugauccugcagaucggcaacaucaucagcaucuggaucagccacagcauccagaccggcagccagaaccacaccggcaucugcaaccagaacaucaucaccuacaagaacagcaccuggaucaaggacaccaccagcgugauccugaccggcaacagcagccugugccccaucagaggcugggccaucuacagcaaggacaacagcaucagaaucggcagcaagggcgacguguucgugaucagagagcccuucaucagcugcagccaccuggagugcagaaccuucuuccugacccagggcgcccugcugaacgacaagcacagcagcggcaccgugaaggacagaagccccuacagagcccugaugagcugccccgugggcgaggcccccagccccuacaacagcagauucgagagcguggccuggagcgccagcgccugccacgacggcaugggcuggcugaccaucggcaucagcggccccgacaacggcgccguggccgugcugaaguacaacggcaucaucaccgagaccaucaagagcuggagaaagaagauccugagaacccaggagagcgagugcgccugcgugaacggcagcugcuucaccaucaugaccgacggccccagcgacggccuggccagcuacaagaucuucaagaucgagaagggcaaggugaccaagagcaucgagcugaacgcccccaacagccacuacgaggagugcagcugcuaccccgacaccggcaaggugaugugcgugugcagagacaacuggcacggcagcaacagacccugggugagcuucgaccagaaccuggacuaccagaucggcuacaucugcagcggcguguucggcgacaaccccagacccgaggacggcaccggcagcugcggccccguguacguggacggcgccaacggcgugaagggcuucagcuacagauacggcaacggcguguggaucggcagaaccaagagccacagcagcagacacggcuucgagaugaucugggaccccaacggcuggaccgagaccgacagcaaguucagcgugagacaggacgugguggccauggccgacuggagcggcuacagcggcagcuucgugcagcaccccgagcugaccggccuggacugcaugagacccugcuucuggguggagcugaucagaggcagacccaaggagaagaccaucuggaccagcgccagcagcaucagcuucugcggcgugaacagcgacaccguggacuggagcuggcccgacggcgccgagcugcccuucagcaucgacaaguga

SEQ ID NO: 183573 - RNA, 1410 nt, Artificial Sequence
  derived and/or modified CDS sequence (opt4) from neuraminidase__InfluenzaA__AGQ81707
augaaccccaaccagaagaucaucaccaucggcagcaucugcauggugaucggcaucgccagccugaugcugcagaucggcaacaugaucagcaucugggugagccacagcauccagaccggcaaccaguaccagcccgagcccugcaaccagagcaucaucaccuacgagaacaacaccugggugaaccagaccuacgugaacaucagcaacaccaacuuccugaccgagcaggccgugaccagcguggcccuggccggcaacagcagccugugccccaucagcggcugggccaucuacagcaaggacaacggcaucagaaucggcagcaagggcgacguguucgugaucagagagcccuucaucagcugcagccaccuggagugcagaaccuucuuccugacccagggcgcccugcugaacgacaagcacagcaacggcaccgugaaggacagaagccccuacagaacccugaugagcugccccgugggcgaggcccccagccccuacaacagcagauucgagagcguggccuggagcgccagcgccugccacgacggcaucagcuggcugaccaucggcaucagcggccccgacaacggcgccguggccgugcugaaguacaacggcaucaucaccgacaccaucaagagcuggagaaacaacauccugagaacccaggagagcgagugcgccugcgugaacggcagcugcuucaccgugaugaccgacggccccagcaacggccaggccagcuacaagaucuucaagaucgagaagggcaagguggugaagagcguggagcugaacgcccccaacuaccacuacgaggagugcagcugcuaccccgacgccggcaagaucaugugcgugugcagagacaacuggcacggcagcaacagacccugggugagcuucaaccagaaccuggaguaccagaucggcuacaucugcagcggcguguucggcgacaaccccagacccaacgacggcaccggcagcugcggccccgugagcagcaacggcgccuacggcgugaagggcuucagcuucaaguacggcaacggcguguggaucggcagaaccaagagcaccagcagcagaagcggcuucgagaugaucugggaccccaacggcuggaccgagaccgacagcagcuucagcgugaagcaggacaucguggccaucaccgacuggagcggcuacagcggcagcuucgugcagcaccccgagcugaccggccuggacugcaugagacccugcuucuggguggagcugaucagaggcagacccaaggagaacaccaucuggaccagcggcagcagcaucagcuucugcggcguggacagcgacaccgugggcuggagcuggcccgacggcgccgagcugcccuucaccaucgacaaguga

SEQ ID NO: 183574 - RNA, 1410 nt, Artificial Sequence
  derived and/or modified CDS sequence (opt4) from neuraminidase__InfluenzaA__AGQ81715
augaaccccaaccagaagaucaucgccaucggcagcgugagccugaccaucgccaccaucugccugcugaugcagaucgccauccuggugaccaccaugacccugcacuucaagcacaacgagugcaccaacagcagcaacaaccaggccgugcccugcggccccaucaucaucgagagaaacgugaccgagaucgugcaccugaacagcaccacccuggagaaggagaucugccccaaggccgccggcuacagagacuggagcaagccccagugccagaucaccggcuucgcccccuucagcaaggacaacagcaucagacugagcgccagcggcgacaucugggugaccagagagcccuacgugagcugcggccugggcaagugcuaccaguucgcccugggccagggcaccacccuggacaacagacacagcaacggcaccagccacgacagaacccccuacagaacccugcugaugaacgagcugggcgugcccuuccaccuggccaccaagcaggugugcaucgccuggagcagcagcagcugccacgacggcaaggccuggcugcacgugugcgugaccggcgacgacagaaacgccaccgccagcaucaucuacgacggcauccugguggacagcaucggcagcuggagcaagaacauccugagaacccaggagagcgagugcgugugcaucaacggcaccugcaccguggugaugaccgacggcagcgccagcggcaaggccgacaccagaauccuguucaucagagagggcaagaucgugcacaucagcccccugagcggcagcgcccagcacguggaggagugcagcugcuacccccaguaccccgaggugagaugcgugugcagagacaacuggagaggcagcaacagacccgugcuguacaucaacauggccgacuacagcaucgacagcggcuacgugugcagcggccuggugggcgacacccccagaaacgacgacaucagcagcagcagcaacugcaaggaccccaacaacgagagaggcgcccccggcgugaagggcugggccuucgacagcggcaacgacaucuggaugggcagaaccaucgagaaggacagcagaagcggcuacgagaccuucagagugaucggcggcuggaacaccgccaacagcaagagccagaccagcagacaggugaucguggacagcggcaacagcagcggcuacagcggcaucuucagcaucgagggcaagagcugcaucaacagaugcuucuacguggagcugaucagaggcagacccaaggagaccagagugugguggaccagcaacagcaucaucguguucugcggcaccagcggcaccuacggcaccggcagcuggcccgacggcgccaacaucaacuucauggccaucuga

SEQ ID NO: 183575 - RNA, 1410 nt, Artificial Sequence
  derived and/or modified CDS sequence (opt4) from neuraminidase__InfluenzaA__AGQ81717
augaaccccaaccagaagaucaucgccaucggcagcgugagccugaccaucgccaccaucugccugcugaugcagaucgccauccuggugaccaccaugaccccccacuucaagcacgacgagugcaccaacagcagcaacaaccaggccgugcccugcggccccaucaucaucgagagaaacgugaccgagaucgugcacaucaacagcaccauccuggagaaggagaucugccccaaggccgccggcuacagaaacuggagcaagccccagugccagaucaucggcuucgcccccuucagcaaggacaacagcaucagacugagcgccagcggcgacaucugggugaccagagagcccuacgugagcugcggccugggcaagugcuaccaguucgcccugggccagggcaccacccuggacaacagacacagcaacggcaccagccacgacagaaccccccacagaacccugcugaugaacgagcugggcgugcccuuccaccuggccaccaagcaggugugcaucgccuggagcagcagcagcugccacgacggcaaggccuggcugcacgugugcgugaccggcgacgacagaaacgccaccgccagcaucaucuacgacggcaugcugguggacagcaucggcagcuggagcaagaacauccugagaacccaggagagcgagugcgugugcaucaacggcaccugcaccguggugaugaccgacggcagcgccagcggcaaggccgacaccagaauccuguucaucagagagggcaagaucgugcacaucagcccccugagcggcagcgcccagcacguggaggagugcagcugcuacccccaguaccccgaggugagaugcgugugcagagacaacuggagaggcagcaacagacccgugcuguacaucaacauggccgacuacagcaucgacagcggcuacgugugcagcggccuggugggcgacacccccagaaacgacgacaucagcagcagcagcaacugcaaggaccccaacaacgagagaggcgcccccggcgugaagggcugggccuucgacagcggcaacgacaucuggaugggcagaaccaucgagaaggacagcagaagcggcuacgagaccuucagagugaucggcggcuggaacaccgccaacagcaagagccagaccagcagacaggugaucguggacagcgacaacagcagcggcuacagcggcaucuucagcguggagggcaagagcugcaucaacagaugcuucuacguggagcugaucagaggcagacccaaggagaccagagugugguggaccagcaacagcaucaucguguucugcggcaccagcggcaccuacggcaccggcagcuggcccgacggcgccaacaucaacuucauggccaucuga

SEQ ID NO: 183576 - RNA, 1410 nt, Artificial Sequence
  derived and/or modified CDS sequence (opt4) from neuraminidase__InfluenzaA__AGQ81718
augaaccccaaccagaagaucaucgccaucggcagcgugagccugaccaucgccaccaucugccugcugaugcagaucgccauccuggugaccaccaugacccugcacuucaagcacaacgagugcaccaacagcagcaacaaccaggccgugcccugcggccccaucaucaucgagagaaaccugaccgagaucgugcaccugaacagcaccauccuggagaaggagaucugccccaaggccgccggcuacagaaacuggagcaagccccagugccagaucaccggcuucgcccccuucagcaaggacaacagcaucagacugagcgccagcggcgacaucugggugaccagagagcccuacgugagcugcggccugggcaagugcuaccaguucgcccugggccagggcaccacccuggacaacagacacagcaacggcaccagccacgacagaaccccccacagaacccugcugaugaacgagcugggcgugcccuuccaccugagcaccaagcaggugugcaucgccuggagcagcagcagcugccacgacggcaaggccuggcugcacgugugcgugaccggcgacgacagaaacgccaccgccagcaucaucuacgacggcauccugguggacagcaucgugagcuggagcaagaacauccugagaacccaggagagcgagugcgugugcaucaacggcaccugcaccguggugaugaccgacggcagcgccagcggcaaggccgacaccagaauccuguucaucagagagggcaagaucgugcacaucagcccccugagcggcagcgcccagcacguggaggagugcagcugcuaccccagauaccccgaggugagaugcgugugcagagacaacuggagaggcagcaacagacccgugcuguacaucaacauggccgacuacagcaucgacagcggcuacgugugcagcggccuggugggcgacacccccagaaacgacgacaccagcagcagcagcaacugcagagaccccaacaacgagagaggcgcccccggcgugaagggcugggccuucgacagcggcaacgacaucuggaugggcagaaccaucgagaaggacagcagaagcggcuacgagaccuucagagugaucggcggcuggaacaccgccaacagcaagagccagaccagcagacaggugaucguggacagcgacaacagcagcggcuacagcggcguguucagcguggagggcaagagcugcaucaacagaugcuucuacguggagcugaucagaggcagacccaaggagaccagagugugguggaccagcaacagcaucaucguguucugcggcaccagcggcaccuacggcaccggcagcuggcccgacggcgccaacaucaacuucauggccaucuga

SEQ ID NO: 183577 - RNA, 1410 nt, Artificial Sequence
  derived and/or modified CDS sequence (opt4) from neuraminidase__InfluenzaA__AGQ81719
augaaccccaaccagaagaucaucgccaucggcagcgugagccugaccaucgccaccaucugccugcugaugcagaucgccauccuggugaccaccaugacccugcacuucaagcacaacgagugcaccaacagcagcaacaaccaggccgugcccugcggccccaucaucaucgagagaaacgugaccgagaucgugcaccugaacagcaccacccuggagaaggagaucugcaccaaggccgccggcuacagagacuggagcaagccccagugccagaucaccggcuucgcccccuucagcaaggacaacagcaucagacugagcgccagcggcgacaucugggugaccagagagcccuacgugagcugcggccugggcaagugcuaccaguucgcccugggccagggcaccacccuggacaacagacacagcaacggcaccacccacgacagaaccccccacagaacccugcugaugaacgagcugggcgugcccuuccaccuggccaccaagcaggugugcaucgccuggagcagcagcagcugccacgacggcaaggccuggcugcacgugugcgugaccggcgacgacagaaacgccaccgccagcaucaucuacgacggcauccugguggacagcaucggcagcuggagcaagaacauccugagaacccaggagagcgagugcgugugcaucaacggcaccugcaccguggugaugaccgacggcagcgccagcggcaaggccgacaccagaauccuguucaucagagagggcaagaucgugcacaucagcccccugagcggcagcgcccagcacguggaggagugcagcugcuacccccaguaccccgaggugagaugcgugugcagagacaacuggagaggcagcaacagacccgugcuguacaucaacauggccgacuacagcaucgacagcggcuacgugugcagcggccuggugggcgacacccccagaaacgacgacaucagcagcaacagcaacugcaaggaccccaacaacgagagcggcgcccccggcgugaagggcugggccuucgacagcggcaacgacaucuggaugggcagaaccaucgagaaggacagcagaagcggcuacgagaccuucagagugaucggcggcuggaacaccgccaacagcaagagccagaccagcagacaggugaucguggacagcgacaacagcagcggcuacagcggcaucuucagcaucgagggcaagagcugcaucaacagaugcuucuacguggagcugaucagaggcagacccaaggagaccagagugugguggaccagcaacagcaucaucguguucugcggcaccagcggcaccuacggcaccggcagcuggcccgacggcgccaacaucaacuucauggccaucuga

SEQ ID NO: 183578 - RNA, 1410 nt, Artificial Sequence
  derived and/or modified CDS sequence (opt4) from neuraminidase__InfluenzaA__AGQ81722
augaaccccaaccagaagaucaucgccaucggcagcgugagccugaccaucgccaccaucugccugcugaugcagaucgccauccuggugaccaccaugaccccccacuucaagcacgacgagugcaccaacagcagcaacaaccaggccgugcccugcggccccaucaucaucgagagaaacgugaccgagaucgugcacaucaacagcaccauccuggagaagggcaucugccccaaggccgccggcuacagaaacuggagcaagccccagugccagaucaucggcuucgcccccuucagcaaggacaacagcaucagacugagcgccagcggcgacaucugggugaccagagagcccuacgugagcugcggccugggcaagugcuaccaguucgcccugggccagggcaccacccuggacaacagacacagcaacggcaccagccacgacagaaccccccacagaacccugcugaugaacgagcugggcgugcccuuccaccuggccaccaagcaggugugcaucgccuggagcagcagcagcugccacgacggcaaggccuggcugcacgugugcgugaccggcgacgacagaaacgccaccgccagcaucaucuacgacggcaugcugguggacagcaucggcagcuggagcaagaacauccugagaacccaggagagcgagugcgugugcaucaacggcaccugcaccguggugaugaccgacggcagcgccagcggcaaggccgacaccagaauccuguucaucagagagggcaagaucgugcacaucagcccccugagcggcagcgcccagcacguggaggagugcagcugcuacccccaguaccccgaggugagaugcgugugcagagacaacuggagaggcagcaacagacccgugcuguacaucaacauggccgacuacagcaucgacagcggcuacgugugcagcggccuggugggcgacacccccagaaacgacgacaccagcagcagcagcaacugcaaggaccccaacaacgagagaggcgcccccggcgugaagggcugggccuucgacagcggcaacgacaucuggaugggcagaaccaucgagaaggacagcagaagcggcuacgagaccuucagagugaucggcggcuggaacaccgccaacagcaagagccagaccagcagacaggugaucguggacagcgacaacagcagcggcuacagcggcaucuucagcguggagggcaagagcugcaucaacagaugcuucuacguggagcugaucagaggcagacccaaggagaccagagugugguggaccagcaacagcaucaucguguucugcggcaccagcggcaccuacggcaccggcagcuggcccgacggcgccaacaucaacuucauggccaucuga

SEQ ID NO: 183579 - RNA, 1410 nt, Artificial Sequence
  derived and/or modified CDS sequence (opt4) from neuraminidase__InfluenzaA__AGQ81724
augaaccccaaccagaagaucaucgccaucggcagcgugagccugaccaucgccaccaucugccugcugaugcagaucgccauccuggugaccaccaugacccugcacuucaagcacaacgagugcagcaacagcagcaacaaccaggccgugcccugcggccccaucaucaucgagagaaacgugaccgagaucgugcaccugaacagcaccacccuggagaaggagaucugccccaaggccgccggcuacagagacuggagcaagccccagugccagaucaccggcuucgcccccuucagcaaggacaacagcaucagacugagcgccagcggcgacaucugggugaccagagagcccuacgugagcugcggccugggcaagugcuaccaguucgcccugggccagggcaccacccuggacaacagacacagcaacggcaccagccacgacagaaccccccacagaacccugcugaugaacgagcugggcgugcccuuccaccuggccaccaagcaggugugcaucgccuggagcagcagcagcugccacgacggcaaggccuggcugcacgugugcgugaccggcgacgacagaaacgccaccgccagcaucaucuacgacggcauccugguggacagcaucggcagcuggagcaagaacauccugagaacccaggagagcgagugcgugugcaucaacggcaccugcaccguggugaugaccgacggcagcgccagcggcaaggccgacaccagaauccuguucaucagagagggcaagaucgugcacaucagcccccugagcggcagcgcccagcacguggaggagugcagcugcuacccccaguaccccgaggugagaugcgugugcagagacaacuggagaggcagcaacagacccgugcuguacaucaacauggaggacuacagcaucgacagcggcuacgugugcagcggccuggugggcgacacccccagaaacgacgacaucagcagcagcagcaacugcaaggaccccaacaacgagagaggcgcccccggcgugaagggcugggccuucgacagcggcaacgaccuguggaugggcagaaccaucgagaaggacagcagaagcggcuacgagaccuucagagugaucggcggcuggaacaccgccaacagcaagagccagaccagcagacaggugaucguggacagcgacaacagcagcggcuacagcggcaucuucagcguggagggcaagagcugcaucaacagaugcuucuacguggagcugaucagaggcagacccaaggagaccagagugugguggaccagcaacagcaucaucguguucugcggcaccagcggcaccuacggcaccggcagcuggcccgacggcgccaacaucaacuucauggccaucuga

SEQ ID NO: 183580 - RNA, 1410 nt, Artificial Sequence
  derived and/or modified CDS sequence (opt4) from neuraminidase__InfluenzaA__AGQ81726
augaaccccaaccagaagaucaucgccaucggcagcgugagccugaccaucgccaccaucugccugcugaugcagaucgccauccuggugaccaccaugacccugcacuucaagcacaacgagugcagcaacagcagcaacaaccaggccgugcccugcggccccaucaucaucgagagaaacaucaccgagaucgugcaccugaacagcaccacccuggagaaggagaucugccccaaggccgccggcuacagagacuggagcaagccccagugccagaucaccggcuucgcccccuucagcaaggacaacagcaucagacugagcgccagcggcgacaucugggugaccagagagcccuacgugagcugcggccugggcaagugcuaccaguucgcccugggccagggcaccacccuggacaacagacacagcaacggcaccagccacgacagaaccccccacagaacccugcugaugaacgagcugggcgugcccuuccaccuggccaccaagcaggugugcaucgccuggagcagcagcagcugccacgacggcaaggccuggcugcacgugugcgugaccggcgacgacagaaacgccaccgccagcaucaucuacgacggcauccugguggacagcaucggcagcuggagcaagaacauccugagaacccaggagagcgagugcgugugcaucaagagaaccugcaccguggugaugaccgacggcagcgccagcggcaaggccgacaccagaauccuguucaucagagagggcaagaucgugcacaucagcccccugagcggcagcgcccagcacguggaggagugcagcugcuacccccaguaccccgaggugagaugcgugugcagagacaacuggagaggcagcaacagacccgugcuguacaucaacauggccgacuacagcaucgacagcggcuacgugugcagcggccuggugggcgacacccccagaaacgacgacaucagcagcagcagcaacugcaaggaccccaacaacgagagaggcgcccccggcgugaagggcugggccuucgacagcggcaacgaccuguggaugggcagaaccaucgagaaggagagcagaagcggcuacgagaccuucagagugaucggcggcuggaacaccgccaacagcaagagccagaccagcagacaggugaucguggacagcgacaacagcagcggcuacagcggcaucuucagcguggagggcaagagcugcaucaacagaugcuucuacguggagcugaucagaggcagacccaaggagaccagagugugguggaccagcaacagcaucaucguguucugcggcaccagcggcaccuacggcaccggcagcuggcccgacggcgccaacaucaacuucauggccaucuga

SEQ ID NO: 183581 - RNA, 1410 nt, Artificial Sequence
  derived and/or modified CDS sequence (opt4) from neuraminidase__InfluenzaA__AGQ81727
augaaccccaaccagaagaucaucgccaucggcagcgugagccugaccaucgccaccaucugccugcugaugcagguggccauccuggugaccaccaugacccugcacuucaagcacaacgagugcagcaacagcagcaacaaccaggccgugcccugcggccccaucaucaucgagagaaacaucaccgagaucgugcaccugaacagcaccacccuggagaaggagaucugccccaaggccgccggcuacagagacuggagcaagccccagugccagaucaccggcuucgcccccuucagcaaggacaacagcaucagacugagcgccagcggcgacaucugggugaccagagagcccuacgugagcugcggccugggcaagugcuaccaguucgcccugggccagggcaccacccuggacaacagacacagcaacggcaccagccacgacagaaccccccacagaacccugcugaugaacgagcugggcgugcccuuccaccuggccaccaagcaggugugcaucgccuggagcagcagcagcugccacgacggcagagccuggcugcacgugugcgugaccggcgacgacagaaacgccaccgccagcaucaucuacgacggcauccugguggacagcaucggcagcuggagcaagaacauccugagaacccaggagagcgagugcgugugcaucaacggcaccugcaccguggugaugaccgacggcagcgccagcggcaaggccgacaccagaauccuguucaucagagagggcaagaucgugcacaucagcccccugagcggcagcgcccagcacguggaggagugcagcugcuacccccaguaccccgaggugagaugcgugugcagagacaacuggagaggcagcaacagacccgugcuguacaucaacauggccgacuacagcaucgacagcggcuacgugugcagcggccuggugggcgacacccccagaaacgacgacaucagcagcagcagcaacugcaaggaccccaacaacgagagaggcgcccccggcgugaagggcugggccuucgacagcggcaacgaccuguggaugggcagaaccaucgagaaggagagcagaagcggcuacgagaccuucagagugaucggcggcuggaacaccgccaacagcaagagccagaccagcagacaggugaucguggacagcgacaacagcagcggcuacagcggcaucuucagcguggagggcaagagcugcaucaacagaugcuucuacguggagcugaucagaggcagacccaaggagaccagagugugguggaccagcaacagcaucaucguguucugcggcaccagcggcaccuacggcaccggcagcuggcccgacggcgccaacaucaacuucaugcccaucuga

SEQ ID NO: 183582 - RNA, 1410 nt, Artificial Sequence
  derived and/or modified CDS sequence (opt4) from neuraminidase__InfluenzaA__AGQ81728
augaaccccaaccagaagaucguggccaucggcagcgugagccugaccaucgccaccaugugccugcugaugcagaucgcccuguucgccaccaccaugacccugcacuucaagcagaccggcagcaccaacagcagcgacaaccaggccgugcccugcggccccaucaucaucgagagaaacaucaccgagaucgugcaccugaacagcaccacccuggagaaggagaccugccccaagagcgccggcuacagaaacuggagcaagccccagugccagaucaccggcuucgcccccuucagcaaggacaacagcaucagacugagcgccggcggcgacaucugggugaccagagagcccuacgugagcugcggccugggcaagugcuaccaguucgcccugggccagggcaccacccuggacaacaagcacagcaacggcaccaccuacgacagaaccccccacagaacccugcugaugaacgagcugggcgugcccuuccaccuggccaccaagcaggugugcaucgccuggagcagcagcagcugccacgacggcaaggccuggcugcacgugugcgugaccggcgacgacaagaacgccaccgccagcaucaucuacgacggcauccugguggacagcaucgccagcuggagcaagaacauccugagaacccaggagagcgagugcgugugcaucaacggcaccugcaccguggugaugaccgacggcagcgccagcggcagagccgacaccagaauccuguucaucagagagggcaagaucgugcacaucagcccccugagcggcagcgcccagcacguggaggagugcagcugcuaccccagauaccccgaggugagaugcgugugcagagacaacuggaagggcagcaacagacccgugcuguacaucaacauggccgacuacagcaucgacagcagcuacgugugcagcggcaucgugggcgacacccccagaaacgacgacagaagcagcagcagcaacugcagagaccccaacaacgagaucggcgcccccggcgugaagggcugggccuucgacagcggcaacgacaucuggaugggcagaaccaucgagaaggacagcagaagcggcuacgagaccuucagagugaucggcggcuggagcaccgccaacagcaagagccagaucaacagacaggugaucguggacagagacaacagcagcggcuacagcggcaucuucagcguggagggcaagagcugcaucaacagaugcuucuacguggagcugaucagaggcagacccaaggagaacagagugugguggaccagcaacagcaucaucguguucugcggcaccagcggcaccuacggcaccggcagcuggcccgacggcgccaacaucaaccugaugcccaucuga

SEQ ID NO: 183583 - RNA, 1410 nt, Artificial Sequence
  derived and/or modified CDS sequence (opt4) from neuraminidase__InfluenzaA__AGQ81729
augaaccccaaccagaagaucaucgccaucggcagcgugagccugaccaucgccaccaucugccugcugaugcagaucgccauccugguggccaccaugacccugcacagcaagcacggcgagugcaccaacagcagcaacaaccaggccgugcccugcggccccaucaucaucgagagaaacgugaccgagaucgugcaccugaacagcaccacccuggagaaggagaucugccccaaggccgccggcuacagagacuggagcaagccccagugccagaucaccggcuucgcccccuucagcaaggacaacagcaucagacugagcgccagcggcgacaucugggugaccagagagcccuacgugagcugcggccugggcaagugcuaccaguucgcccugggccagggcaccacccuggacaacagacacagcaacggcaccagccacgacagaaccccccacagaacccugcugaugaacgagcugggcauccccuuccaccuggccaccaagcaggugugcaucgccuggagcagcagcagcugccacgacggcaaggccuggcugcacgugugcgugaccggcgacgacagaaacgccaccgccagcaucaucuacgacggcaugcugguggacagcaucggcagcuggagcaagaacauccugagaacccaggagagcgagugcgugugcaucaacggcaccugcaccguggugaugaccgacggcagcgccagcggcaaggccgacaccagaauccuguucaucagagagggcaagaucgugcacaucagcccccugcugggcagcgcccagcacguggaggagugcagcugcuacccccaguaccccgaggugagaugcgugugcagagacaacuggagaggcagcaacagacccgugcuguacaucaacauggccgacuacagcguggacagcggcuacgugugcagcggccuggugggcgacacccccagaaacgacgacaccagcagcagcagcaacugcaaggaccccaacaacgagagaggcgcccccggcgugaagggcugggccuucgacagcggcaacgacaucuggaugggcagaaccaucgagaaggacagcagaagcggcuacgagaccuucagagugaucggcggcuggaacaccgccaacagcaagagccagaccagcagacaggugaucguggacagcgacaacagcagcggcuacagcggcaucuucagcguggagggcaagagcugcaucaacagaugcuucuacguggagcugaucagaggcagacccaaggagaccagagugugguggaccagcaacagcaucaucguguucugcggcaccagcggcaccuacggcaccggcagcuggcccgacggcgccaacaucaacuucaugcccaucuga

SEQ ID NO: 183584 - RNA, 1410 nt, Artificial Sequence
  derived and/or modified CDS sequence (opt4) from neuraminidase__InfluenzaA__AGQ81730
augaaccccaaccagaagaucaucgccaucggcagcgugagccugaccaucgccaccaucugccugcugaugcagaucgccauccuggugaccaccaugacccugcacuucaagcacaacgagugcaucaacagcagcaacaaccagagcgugcccugcggccccaucaucaucgagagaaacgugaccgagaucgugcaccugaacagcaccacccuggagaaggagaucugccccaaggccgccggcuacagagacuggagcaagccccagugccagaucaccggcuucgcccccuucagcaaggacaacagcaucagacugagcgccagcggcgacaucugggugaccagagagcccuacgugagcugcggccugggcaagugcuaccaguucgcccugggccagggcaccacccuggacaacagacacagcaacggcaccagccacgacagaaccccccacagaacccugcugaugaacgagcugggcgugcccuuccaccuggccagcaagcaggugugcaucgccuggagcagcagcagcugccacgacggcaaggccuggcugcacgugugcgugaccggcgacgacagaaacgccaccgccagcaucaucuacgacggcaugcugguggacagcaucggcagcuggagcaagaacauccugagaacccaggagagcgagugcgugugcaucaacggcaccugcaccguggugaugaccgacggcagcgccagcggcgaggccgacaccagaauccuguucaucagagagggcaagaucgugcacaucagcccccugagcggcagcgcccagcacguggaggagugcagcugcuacccccaguaccccgaggugagaugcgugugcagagacaacuggagaggcagcaacagacccgugcuguacaucaacauggccgacuacagcaucgacagcggcuacgugugcagcggccuggugggcgacacccccagaaacgacgacaucagcagcagcagcaacugcaaggaccccaacaacgagagaggcgcccccggcgugaagggcugggccuucgacagcggcaacgacaucuggaugggcagaaccaucgagaaggacagcagaagcggcuacgagaccuucagagugaucggcggcuggaacaccgccaacagcaagagccagaccagcagacaggugaucguggacagcgacaacagcagcggcuacagcggcaucuucagcguggagggcaagagcugcaucaacagaugcuucuacguggagcugaucagaggcagacccaaggagaccagagugugguggaccagcaacagcaucaucguguucugcggcaccagcggcaccuacggcaccggcagcuggcccgacggcgccaacaucaacuucauggccaucuga

SEQ ID NO: 183585 - RNA, 1410 nt, Artificial Sequence
  derived and/or modified CDS sequence (opt4) from neuraminidase__InfluenzaA__AGQ81731
augaaccccaaccagaagaucaucgccaucggcagcgugagccugaccaucgccaccaucugccugcugaugcagaucgccauccuggugaccaccaugacccugcacuucaagcacaacgagugcagcaacagcagcaacaaccaggccgugcccugcggccccaucaucaucgagagaaacaucaccgagaucgugcaccugaacagcaccacccuggagaaggagaucugccccaagaccgccggcuacagagacuggagcaagccccagugccagaucaccggcuucgcccccuucagcaaggacaacagcaucagacugagcgccagcggcgacaucugggugaccagagagcccuacgugagcugcggcuucggcaagugcuaccaguucgcccugggccagggcaccacccuggacaacagacacagcaacggcaccagccacgacagaaccccccacagaacccugcugaugaacgagcugggcgugcccuuccaccuggccaccaagcaggugugcaucgccuggagcagcagcagcugccacgacggcaaggccuggcugcacgugugcgugaccggcgacgacagaaacgccaccgccagcaucaucuacgacggcauccugguggacagcaucggcagcuggagcaagaacauccugagaacccaggagagcgagugcgugugcaucaacggcaccugcaccguggugaugaccgacggcagcgccagcggcaaggccgacaccagaauccuguucaucagagagggcaagaucgugcacaucagcccccugagcggcagcgcccagcacguggaggagugcagcugcuacccccaguaccccgaggugagaugcgugugcagagacaacuggagaggcagcaacagacccgugcuguacaucaacaugaccgacuacagcaucgacagcggcuacgugugcagcggccuggugggcgacacccccagaaacgacgacaucagcagcagcagcaacugcaaggaccccaacaacgagagaggcgcccccggcgugaagggcugggccuucgacagcggcaacgaccuguggaugggcagaaccaucgagaaggagagcagaagcggcuacgagaccuucagagugaucggcggcuggaacaccgccaacagcaagagccagaccagcagacaggugaucguggacagcgacaacagcagcggcuacagcggcaucuucagcguggagggcaagagcugcaucaacagaugcuucuacguggagcugaucagaggcagacccaaggagaccagagugugguggaccagcaacagcaucaucguguucugcggcaccagcggcaccuacggcaccggcagcuggcccgacggcgccaacaucaacuucauggccaucuga

SEQ ID NO: 183586 - RNA, 1410 nt, Artificial Sequence
  derived and/or modified CDS sequence (opt4) from neuraminidase__InfluenzaA__AGQ81732
augaaccccaaccagaagaucaucgccaucggcagcgugagccugaccaucgccaccaucugccugcugaugcagguggccauccuggugaccaccaugacccugcacuucaagcacaacgagugcagcaacagcagcaacaaccaggccgugcccugcggccccaucaucaucgagagaaacaucaccgagaucgugcaccugaacagcaccacccuggagaaggagaucugccccaaggccgccggcuacagagacuggagcaagccccagugccagaucaccggcuucgcccccuucagcaaggacaacagcaucagacugagcgccagcggcgacaucugggugaccagagagcccuacgugagcugcggccugggcaagugcuaccaguucgcccugggccagggcaccacccuggacaacagacacagcaacggcaccagccacgacagaaccccccacagaacccugcugaugaacgagcugggcgugcccuuccaccuggccaccaagcaggugugcaucgccuggagcagcagcagcugccacgacggcaaggccuggcugcacgugugcgugaccggcgacgacagaaacgccaccgccagcaucaucuacgacggcauccugguggacagcaucggcagcuggagcaagaacauccugagaacccaggagagcgagugcgugugcaucaacggcaccugcaccguggugaugaccgacggcagcgccagcggcaaggccgacaccagaauccuguucaucagagagggcaagaucgugcacaucagcccccugagcggcagcgcccagcacguggaggagugcagcugcuacccccaguaccccgaggugagaugcgugugcagagacaacuggagaggcagcaacagacccgugcuguacaucaacauggccgacuacagcaucgacagcggcuacgugugcagcggccuggugggcgacacccccagaaacgacgacaucagcagcagcagcaacugcaaggaccccaacaacgagagaggcgcccccggcgugaagggcugggccuucgacagcggcaacgaccuguggaugggcagaaccaucgagaaggagagcagaagcggcuacgagaccuucagagugaucggcggcuggaacaccgccaacagcaagagccagaccagcagacaggugaucguggacagcgacaacagcagcggcuacagcggcaucuucagcguggagggcaagagcugcaucaacagaugcuucuacguggagcugaucagaggcagacccaaggagaccagagugugguggaccagcaacagcaucaucguguucugcggcaccagcggcaccuacggcaccggcagcuggcccgacggcgccaacaucaacuucaugcccaucuga

SEQ ID NO: 183587 - RNA, 1410 nt, Artificial Sequence
  derived and/or modified CDS sequence (opt4) from neuraminidase__InfluenzaA__AGQ81733
augaaccccaaccagaagaucaucgccaucggcagcgugagccugaccaucgccaccaucugccugcugaugcagaucgccauccuggugaccaccaugacccugcacuucaagcacaacgagugcagcaacagcagcaacagccaggccgugcccugcggccccaucaucaucgagagaaacgugaccgagaucgugcaccugaacagcaccacccuggagaaggagaucugccccaaggccgccgaguacagagacuggagcaagccccagugccagaucaccggcuucgcccccuucagcaaggacaacagcaucagacugagcgccagcggcgacaucugggugaccagagagcccuacgugagcugcggccugggcaagugcuaccaguucgcccugggccagggcaccacccuggacaacagacacagcaacggcaccagccacgacagaaccccccacagaacccugcugaugaacgagcugggcgugcccuuccaccuggccaccaagcaggugugcaucgccuggagcagcagcagcugccacgacggcaaggccuggcugcacgugugcgugaccggcgacgacagaaacgccaccgccagcaucaucuacgacggcauccugguggacagcaucggcagcuggagcaagaacauccugagaacccaggagagcgagugcgugugcaucaacggcaccugcaccguggugaugaccgacggcagcgccagcggcaaggccgacaccagaauccuguucaucagagagggcaagaucgugcacaucagcccccugagcggcagcgcccagcacguggaggagugcagcugcuacccccaguaccccgaggugagaugcgugugcagagacaacuggagaggcagcaacagacccgugcuguacaucaacauggccgacuacagcaucgacagcggcuacgugugcagcggccuggugggcgacacccccagaaacgacgacaucagcagcagcagcaacugcaaggaccccaacaacgagagaggcgcccccggcgugaagggcugggccuucgacagcggcaacgaccuguggaugggcagaaccaucgagaaggacagcagaagcggcuacgagaccuucagagugaucggcggcuggaacaccgccaacagcaagagccagaccagcagacaggugaucguggacagcgacaacagcagcggcuacagcggcaucuucagcguggagggcaagagcugcaucaacagaugcuucuacguggagcugaucagaggcagacccaaggagaccagagugugguggaccagcaacagcaucaucguguucugcggcaccagcggcaccuacggcaccggcagcuggcccgacggcgccaacaucaacuucaugcccaucuga

SEQ ID NO: 183588 - RNA, 1410 nt, Artificial Sequence
  derived and/or modified CDS sequence (opt4) from neuraminidase__InfluenzaA__AGQ81734
augaaccccaaccagaagaucaucgccaucggcagcgugagccugaccaucgccaccaucugccugcugaugcagaucgccauccuggugaccaccaugacccugcacuucaagcacaacgaguacagcaacagcagcaacaaccaggccgugcccugcggccccaucaucaucgagagaaacaucaccgagaucgugcaccugaacagcaccacccuggagaaggagaucugccccaaggccgccggcuacagagacuggagcaagccccagugccagaucaccggcuucgcccccuucagcaaggacaacagcaucagacugagcgccagcggcgacaucugggugaccagagagcccuacgugagcugcggccugggcaagugcuaccaguucgcccugggccagggcaccacccuggacaacagacacagcaacggcaccagccacgacagaaccccccacagaacccugcugaugaacgagcugggcgugcccuuccaccuggccaccaagcaggugugcaucgccuggagcagcagcagcugccacgacggcaaggccuggcugcacgugugcgugaccggcgacgacagaaacgccaccgccagcaucaucuacgacggcauccugguggacagcaucggcagcuggagcaagaacauccugagaacccaggagagcaagugcgugugcaucaagagaaccugcaccguggugaagaccgacggcagcgccagcggcaaggccgacaccagaauccuguucaucagagagggcaagaucgugcacaucagcccccugagcggcagcgcccagcacguggaggagugcagcugcuacccccaguaccccgaggugagaugcgugugcagagacaacuggagaggcagcaacagacccgugcuguacaucaacauggccgacuacagcaucgacagcggcuacgugugcagcggccuggugggcgacacccccagaaacgacgacaucagcagcagcagcaacugcaaggaccccaacaacgagagaggcgcccccggcgugaagggcugggccuucgacagcggcaacgaccuguggaugggcagaaccaucgagaaggagagcagaagcggcuacgagaccuucagagugaucggcggcuggaacaccgccaacagcaagagccagaccagcagacaggugaucguggacagcgacaacagcagcggcuacagcggcaucuucagcguggagggcaagagcugcaucaacagaugcuucuacguggagcugaucagaggcagacccaaggagaccagagugugguggaccagcaacagcaucaucguguucugcggcaccagcggcaccuacggcaccggcagcuggcccgacggcgccaacaucaacuucauggccaucuga

SEQ ID NO: 183589 - RNA, 1410 nt, Artificial Sequence; identical to SEQ ID NO: 183587
  derived and/or modified CDS sequence (opt4) from neuraminidase__InfluenzaA__AGQ81735

SEQ ID NO: 183590 - RNA, 1410 nt, Artificial Sequence
  derived and/or modified CDS sequence (opt4) from neuraminidase__InfluenzaA__AGQ81736
augaaccccaaccagaagaucaucgccaucggcagcgugagccugaccaucgccaccaucugccugcugaugcagaucgccauccugguggccaccaugacccugcacagcaagcacggcgagugcaccgacagcagcaacaaccaggccgugcccugcggccccaucaucaucgagagaaacgugaccgagaucgugcaccugaacagcaccacccuggagaaggagaucugccccaaggccgccggcuacaaggacuggagcaagccccagugccagaucaccggcuucgcccccuucagcaaggacaacagcaucagacugagcgccagcggcgacaucugggugaccagagagcccuacgugagcugcggccugggcaagugcuaccaguucgcccugggccagggcaccacccuggacaacagacacagcaacggcaccagccacgacagaaccccccacagaacccugcugaugaacgagcugggcgugcccuuccaccuggccaccaagcaggugugcaucgccuggagcagcagcagcugccacgacggcaaggccuggcugcacgugugcgugaccggcgacgacagaaacgccaccgccagcaucaucuacgacggcaugcugguggacagcaucggcagcuggagcaagaacauccugagaacccaggagagcgagugcgugugcaucaacggcaccugcaccguggugaugaccgacggcagcgccagcggcaaggccgacaccagaauccuguucaucagagagggcaagaucgcccacaucagcccccugagcggcagcgcccagcacguggaggagugcagcugcuacccccaguaccccgaggugagaugcgugugcagagacaacuggagaggcagcaacagacccgugcuguacaucaacauggccgacuacagcguggacagcggcuacgugugcagcggccuggugggcgacacccccagaaacgacgacaccagcagcagcagcaacugcaaggaccccaacaacgagagaggcgcccccggcgugaagggcugggccuucgacagcggcaacgacaucuggaugggcagaaccaucgagaaggacagcagaagcggcuacgagaccuucagagugaucggcggcuggaacaccgccaacagcaagagccagaccagcagacaggugaucguggacagcgacaacagcagcggcuacagcggcaucuucagcguggagggcaagagcugcaucaacagaugcuucuacguggagcugaucagaggcagacccaaggagaccagagugugguggaccagcaacagcaucaucguguucugcggcaccagcggcaccuacggcaccggcagcuggcccgacggcgccaacaucaacuucaugcccaucuga

SEQ ID NO: 183591 - RNA, 1410 nt, Artificial Sequence
  derived and/or modified CDS sequence (opt4) from neuraminidase__InfluenzaA__AGQ81737
augaaccccaaccagaagaucaucgccaucggcagcgugagccugaccaucgccaccaucugccugcugaugcagaucgccauccuggugaccaccaugacccugcacuucaagcacaacgagugcagcaacagcagcaacaaccaggccgugcccugcggccccaucaucaucgagagaaacaucaccgagaucgugcaccugaacagcaccacccuggagaaggagaucugccccaaggccgccggcuacagagacuggagcaagccccagugccagaucaccggcuucgcccccuucagcaaggacaacagcaucagacugagcgccagcggcgacaucugggugaccagagagcccuacgugagcugcggccugggcaagugcuaccaguucgcccugggccagggcaccacccuggacaacagacacagcaacggcaccagccacgacagaaccccccacagaacccugcugaugaacgagcugggcgugcccuuccaccuggccaccaagcaggugugcaucgccuggagcagcagcagcugccacgacggcaaggccuggcugcacgugugcgugaccggcgacgacagaaacgccaccgccagcaucaucuacgacggcauccugguggacagcaucggcagcuggagcaagaacauccugagaacccaggagagcgagugcgugugcaucaacggcaccugcaccguggugaugaccgacggcagcgccagcggcaaggccgacaccagaauccuguucaucagagagggcaagaucgugcacaucagcccccugagcggcagcgcccagcacguggaggagugcagcugcuacccccaguaccccgaggugagaugcgugugcagagacaacuggagaggcagcaacagacccgugcuguacaucaacauggccgacuacagcaucgacagcggcuacgugugcagcggccuggugggcgacacccccagaaacgacgacaucagcagcagcagcaacugcaaggaccccaacaacgagagaggcgcccccggcgugaagggcugggccuucgacagcggcaacgaccuguggaugggcagaaccaucgagaaggagagcagaagcggcuacgagaccuucagagugaucggcggcuggaacaccgccaacagcaagagccagaccagcagacaggugaucguggacagcgacaacagcagcggcuacagcggcaucuucagcguggagggcaagagcugcaucaacagaugcuucuacguggagcugaucagaggcagacccaaggagaccagagugugguggaccagcaacagcaucaucguguucugcggcaccagcggcaccuacggcaccggcagcuggcccgacggcgccaacaucaacuucauggccaucuga

SEQ ID NO: 183592 - RNA, 1410 nt, Artificial Sequence
  derived and/or modified CDS sequence (opt4) from neuraminidase__InfluenzaA__AGQ81738
augaaccccaaccagaagaucaucgccaucggcagcgugagccugaccaucgccaccaucugccugcugaugcagguggccauccuggugaccaccaugacccugcacuucaagcacaacgagugcagcaacagcagcaacaaccaggccgugcccugcggccccaucaucaucgagagaaacaucaccgagaucgugcaccugaacagcaccacccuggagaaggagaucugccccaaggccgccggcuacagagacuggagcaagccccagugccagaucaccggcuucgcccccuucagcaaggacaacagcaucagacugagcgccagcggcgacaucugggugaccagagagcccuacgugagcugcggccugggcaagugcuaccaguucgcccugggccagggcaccacccuggacaacagacacagcaacggcaccagccacgacagaaccccccacagaacccugcugaugaacgagcugggcgugcccuuccaccuggccaccaagcaggugugcaucgccuggagcagcagcagcugccacgacggcaaggccuggcugcacgugugcgugaccggcgacgacagaaacgccaccgccagcaucaucuacgacggcauccugguggacagcaucggcagcuggagcaagaacauccugagaacccaggagagcgagugcgugugcaucaacggcaccugcaccguggugaugaccgacggcagcgccagcggcaaggccgacaccagaauccuguucaucagagagggcaagaucauccacaucagcccccugagcggcagcgcccagcacguggaggagugcagcugcuacccccaguaccccgaggugagaugcgugugcagagacaacuggagaggcagcaacagacccgugcuguacaucaacauggccgacuacagcaucgacagcggcuacgugugcagcggccuggugggcgacacccccagaaacgacgacaucagcagcagcagcaacugcaaggaccccaacaacgagagaggcgcccccggcgugaagggcugggccuucgacagcggcaacgaccuguggaugggcagaaccaucgagaaggagagcagaagcggcuacgagaccuucagagugaucggcggcuggaacaccgccaacagcaagagccagaccagcagacaggugaucguggacagcgacaacagcagcggcuacagcggcaucuucagcguggagggcaagagcugcaucaacagaugcuucuacguggagcugaucagaggcagacccaaggagaccagagugugguggaccagcaacagcaucaucguguucugcggcaccagcggcaccuacggcaccggcagcuggcccgacggcgccaacaucaacuucaugcccaucuga

SEQ ID NO: 183593 - RNA, 1410 nt, Artificial Sequence
  derived and/or modified CDS sequence (opt4) from neuraminidase__InfluenzaA__AGQ81739
augaaccccaaccagaagaucaucgccaucggcagcgugagccugaccaucgccaccaucugccugcugaugcagaucgccauccuggugaccaccaugacccugcacuucaagcacgacgagugcaccaacagcagcaacaaccaggccgugcccugcgagcccaucaucaucgagagaaacgugaccgagaucgugcacaucaacagcaccauccuggagaaggagaucugccccaaggccgccggcuacagaaacuggagcaagccccagugccagaucaccggcuucgcccccuucagcaaggacaacagcaucagacugagcgccagcggcgacaucugggugaccagagagcccuacgugagcugcggccugggcaagugcuaccaguucgcccugggccagggcaccacccuggacaacagacacagcaacggcacccugaacgacagaaccccccacagaacccugcugaugaacgagcugggcgugcccuuccaccuggccaccaagcaggugugcaucgccuggagcagcagcagcugccacgacggcaaggccuggcugcacgugugcgugaccggcgacgacagaaacgccaccgccagcaucaucuacgacgacaugcugguggacagcaucggcagcuggagcaagaacauccugagaacccaggagagcgagugcgugugcaucaacggcaccugcaccguggugaugaccgacggcagcgccagcggcaaggccgacaccagaauccuguucaucagagagggcaagaucgugcacaucagcccccugagcggcagcgcccagcacguggaggagugcagcugcuacccccaguaccccgaggugagaugcgugugcagagacaacuggagaggcagcaacagacccgugcuguacaucaacauggccgacuacagcaucgacagcggcuacgugugcagcggccuggugggcgacacccccagaaacgacgacaucagcagcagcagcaacugcaaggaccccaacaacgagagaggcgcccccggcgugaagggcugggccuucgacagcggcaacgacaucuggaugggcagaaccaucgagaaggacagcagaagcggcuacgagaccuucagagugaucggcggcuggaacaccgccaacagcaagagccagaccagcagacaggugaucguggacagcgacaacagcagcggcuacagcggcaucuucagcguggagggcaagagcugcaucaacagaugcuucuacguggagcugaucagaggcagacccaaggagaccagagugugguggaccagcaacagcaucaucguguucugcggcaccagcggcaccuacggcaccggcagcuggcccgacggcgccaacaucaacuucauggccaucuga

SEQ ID NO: 183594 - RNA, 1410 nt, Artificial Sequence
  derived and/or modified CDS sequence (opt4) from neuraminidase__InfluenzaA__AGQ81740
augaaccccaaccagaagaucguggccaucggcagcgugagccugaccaucgccaccaucugccugcugaugcagaucgccauccuggugaccaccaugacccugcacuucaagcacggcgagugcaccaacagcagcaacaaccaggccgugcccugcggccccaucaucaucgagagaaacaucaccgagaucgugcaccugaacagcaccacccuggagaaggagaucugccccaaggccgccggcuacagagacuggagcaagccccagugccagaucaccggcuucgcccccuucagcaaggacaacagcaucagacugagcgccagcggcgacaucugggugaccagagagcccuacgugagcugcggccugggcaagugcuaccaguucgcccugggccagggcaccacccuggacaacagacacagcaacggcaccagccacgacagaaccccccacagaacccugcugaugaacgagcugggcgugcccuuccaccuggccaccaagcaggugugcaucgccuggagcagcagcagcugccacgacggcaaggccuggcugcacgugugcgugaccggcgacgacagaaacgccaccgccagcaucaucuacaacggcauccugguggacagcaucggcagcuggagcaagaacauccugagaacccaggagagcgagugcgugugcaucaacggcaccugcaccguggugaugaccgacggcagcgccagcggcaaggccgacaccagaauccuguucaucagagagggcaagaucgugcacaucagcccccugagcggcagcgcccagcacguggaggagugcagcugcuacccccaguaccccgaggugagaugcgugugcagagacaacuggagaggcagcaacagacccgugcuguacaucaacauggccgacuacagcguggacagcggcuacgugugcagcggccuggugggcgacacccccagaaacgacgacaccagcagcagcagcaacugcaaggaccccaacaacgagagaggcgcccccggcgugaagggcugggccuucgacagcggcaacgacaucuggaugggcagaaccaucgagaaggaccugagaagcggcuacgagaccuucagagugaucggcggcuggaacaccgccaacagcaagagccagaccagcagacaggugaucguggacagcgacaacagcagcggcuacagcggcaucuucagcguggagggcaagagcugcaucaacagaugcuucuacguggagcugaucagaggcagacccaaggagaccagagugugguggaccagcaacagcaucaucguguucugcggcaccagcggcaccuacggcaccggcagcuggcccgacggcgccaacaucaacuucaugcccaucuga

SEQ ID NO: 183595 - RNA, 1410 nt, Artificial Sequence
  derived and/or modified CDS sequence (opt4) from neuraminidase__InfluenzaA__AGQ81741
augaaccccaaccagaagaucguggccaucggcagcgugagccugaccaucgccaccaucugccugcugaugcagaucgccauccuggugaccaccaugacccugcacuucaagcacggcgagugcaccaacagcagcaacaaccaggccgugcccugcggccccaucaucaucgagagaaacaucaccgagaucgugcaccugaacagcaccacccuggacaaggagaucugccccaaggccgccggcuacagagacuggagcaagccccagugccagaucaccggcuucgcccccuucagcaaggacaacagcaucagacugagcgccagcggcgacaucugggugaccagagagcccuacgugagcugcggccugggcaagugcuaccaguucgcccugggccagggcaccacccuggacaacagacacagcaacggcaccagccacgacagaaccccccacagaacccugcugaugaacgagcugggcgugcccuuccaccuggccaccaagcaggugugcaucgccuggagcagcagcagcugccacgacggcaaggccuggcugcacgugugcgugaccggcgacgacagaaacgccaccgccagcaucaucuacgacggcaugcugguggacagcaucggcagcuggagcaagaacauccugagaacccaggagagcgagugcgugugcaucaacggcaccugcaccguggugaugaccgacggcagcgccagcggcaaggccgacaccagaauccuguucaucagagagggcaagaucgugcacaucagcccccugagcggcagcgcccagcacguggaggagugcagcugcuacccccaguaccccgaggugagaugcgugugcagagacaacuggagaggcagcaacagacccgugcuguacaucaacauggccgacuacagcguggacagcggcuacgugugcagcggccuggugggcgacacccccagaaacgacgacaccagcagcagcagcaacugcaaggaccccaacaacgagagaggcgcccccggcgugaagggcugggccuucgacagcggcaacgacaucuggaugggcagaaccaucgagaaggaccugagaagcggcuacgagaccuucagagugaucggcggcuggaacaccgccaacagcaagagccagaccagcagacaggugaucguggacagcgacaacagcagcggcuacagcggcaucuucagcguggagggcaagagcugcaucaacagaugcuucuacguggagcugaucagaggcagacccaaggagaccagagugugguggaccagcaacagcaucaucguguucugcggcaccagcggcaccuacggcaccggcagcuggcccgacggcgccaacaucaacuucaugcccaucuga

SEQ ID NO: 183596 - RNA, 1410 nt, Artificial Sequence
  derived and/or modified CDS sequence (opt4) from neuraminidase__InfluenzaA__AGQ81742
augaaccccaaccagaagaucguggccaucggcagcgugagccugaccaucgccaccaucugccugcugaugcagaucgccauccuggugaccaccaugacccugcacuucaagcacggcgagugcaccaacagcagcaacaaccaggccgugcccugcggccccaucaucaucgagagaaacaucaccgagaucgugcaccugaacagcaccacccuggagaaggagaucugccccaaggccgccgaguacagagacuggagcaagccccagugccagaucaccggcuucgcccccuucagcaaggacaacagcaucagacugagcgccagcggcgacaucugggugaccagagagcccuacgugagcugcggccugggcaagugcuaccaguucgcccugggccagggcaccacccuggacaacagacacagcaacggcaccagccacgacagaaccccccacagaacccugcugaugaacgagcugggcgugcccuuccaccuggccaccaagcaggugugcaucgccuggagcagcagcagcugccacgacggcaaggccuggcugcacgugugcgugaccggcgacgacagaaacgccaccgccagcaucaucuacgacggcaugcugguggacagcaucggcagcuggagcaagaacauccugagaacccaggagagcgagugcgugugcaucaacggcaccugcaccguggugaugaccgacggcagcgccagcggcaaggccgacaccagaauccuguucaucagagagggcaagaucgugcacaucagcccccugagcggcagcgcccagcacguggaggagugcagcugcuacccccaguaccccgaggugagaugcgugugcagagacaacuggagaggcagcaacagacccgugcuguacaucaacauggccgacuacagcguggacagcggcuacgugugcagcggccuggugggcgacacccccagaaacgacgacaccagcagcagcagcaacugcaaggaccccaacaacgagagaggcgcccccggcgugaagggcugggccuucgacagcggcaacgacaucuggaugggcagaaccaucgagaaggaccugagaagcggcuacgagaccuucagagugaucggcggcuggaacaccgccaacagcaagagccagaccagcagacaggugaucguggacagcgacaacagcagcggcuacagcggcaucuucagcguggagggcaagagcugcaucaacagaugcuucuacguggagcugaucagaggcagacccaaggagaccagagugugguggaccagcaacagcaucaucguguucugcggcaccagcggcaccuacggcaccggcagcuggcccgacggcgccaacaucaacuucaugcccaucuga

SEQ ID NO: 183597 - RNA, 1410 nt, Artificial Sequence
  derived and/or modified CDS sequence (opt4) from neuraminidase__InfluenzaA__AGQ81744
augaaccccaaccagaagaucaucgccaucggcagcgugagccugaccaucgccaccaucugccugcugaugcagaucgccauccuggugaccaccaugacccugcacuucagacacgacgagugcaccaacagcagcaacaaccaggccgugcccugcggccccaucaucaucgagagaaacgugaccgagaucgugcaccugaacagcaccacccuggagaaggagaucugccccaaggccgccgaguacagagacuggagcaagccccagugccagaucaccggcuucgugcccuucagcaaggacaacagcaucagacugagcgccggcggcgacaucugggugaccagagagcccuacgugagcugcggccugggcaagugcuaccaguucgcccugggccagggcaccacccuggacaacagacacagcaacggcaccagccacgacagaaccccccacagaacccugcugaugaacgagcugggcgugcccuuccaccuggccaccaagcaggugugcaucgccuggagcagcagcagcugccacgacggcaaggccuggcugcacgugugcgugaccggcgacgacagaaacgccaccgccagcaucaucuacgacggcaugcugguggacagcaucggcagcuggagcaagaacauccugagaacccaggagagcgagugcgugugcaucaacggcaccugcaccguggugaugaccgacggcagcgccagcggcaaggccgacaccagaauccuguucaucagagagggcaagaucgugcacaucagcccccugagcggcagcgcccagcacguggaggagugcagcugcuacccccaguaccccgaggugagaugcgugugcagagacaacuggagaggcagcaacagacccgugcuguacaucaacguggccgacuacagcguggacagcggcuacgugugcagcggccuggugggcgacacccccagaaacgacgacaucagcagcagcagcaacugcaaggaccccaacaacgagagaggcgcccccggcgugaagggcugggccuucgacagcggcaacgacaucuggaugggcagaaccaucgagaaggacagcagaagcggcuacgagaccuucagagugaucggcggcuggaacaccgccaacagcaagagccagaccagcagacaggugaucguggacagcgacaaccccagcggcuacagcggcaucuucagcguggagggcaagagcugcaucaacagaugcuucuacguggagcugaucagaggcagacccaaggagaccagagugugguggaccagcaacagcaucaucguguucugcggcaccagcggcaccuacggcaccggcagcuggcccgacggcgccaacaucaacuucaugcccaucuga

SEQ ID NO: 183598 - RNA, 1410 nt, Artificial Sequence
  derived and/or modified CDS sequence (opt4) from neuraminidase__InfluenzaA__AGQ81746
augaaccccaaccagaagaucaucgccaucggcagcgugagccugaccaucgccaccaucugccugcugaugcagaucgccauccuggugaccaccaugacccugcacuucaagcacaacgagugcagcaacagcagcaacagccaggccgugcccugcggccccaucaucaucgagagaaacgugaccgagaucgugcaccugaacagcaccacccuggagaaggagaucugccccaaggccgccgaguacagaggcuggagcaagccccagugccagaucaccggcuucgcccccuucagcaaggacaacagcaucagacugagcgccagcggcgacaucugggugaccagagagcccuacgugagcugcgaccugggcaagugcuaccaguucgcccugggccagggcaccacccuggacaacagacacagcaacggcaccagccacgacagaaccccccacagaacccugcugaugaacgagcugggcgugcccuuccaccuggccaccaagcaggugugcaucgccuggagcagcagcagcugccacgacggcaaggccuggcugcacgugugcgugaccggcgacgacagaaacgccaccgccagcaucaucuacgacggcauccugguggacagcaucggcagcuggagcaagaacauccugagaacccaggagagcgagugcgugugcaucaacggcaccugcaccguggugaugaccgacggcagcgccagcggcaaggccgacaccagaauccuguucaucagagagggcaagaucgugcacaucagcccccugagcggcagcgcccagcacguggaggagugcagcugcuacccccaguaccccgaggugagaugcgugugcagagacaacuggagaggcagcaacagacccgugcuguacaucaacauggccgacuacagcaucgacagcggcuacgugugcagcggccuggugggcgacacccccagaaacgacgacaucagcagcagcagcaacugcaaggaccccaacaacgagagaggcgcccccggcgugaagggcugggccuucgacagcggcaacgaccuguggaugggcagaaccaucgagaaggacagcagaagcggcuacgagaccuucagagugaucggcggcuggaacaccgccaacagcaagagccagaccagcagacaggugaucguggacagcgacaacagcagcggcuacagcggcaucuucagcguggagggcaagagcugcaucaacagaugcuucuacguggagcugaucagaggcagacccaaggagaccagagugugguggaccagcaacagcaucaucguguucugcggcaccagcggcaccuacggcaccggcagcuggcccgacggcgccaacaucaacuucaugcccaucuga

SEQ ID NO: 183599 - RNA, 1410 nt, Artificial Sequence
  derived and/or modified CDS sequence (opt4) from neuraminidase__InfluenzaA__AGQ81747
augaaccccaaccagaagaucguggccaucggcagcgugagccugaccaucgccaccaucugccugcugaugcagaucgccauccuggugaccaccaugacccugcacuucaagcacggcgagugcaccaacagcagcaacaaccaggccgugcccugcggccccaucaucaucgagagaaacaucaccgagaucgugcaccugaacagcaccacccuggagaaggagaucugccccaaggccgccggcuacagagacuggagcaagccccagugccagaucaccggcuucgcccccuucagcaaggacaacagcaucagacugagcgccagcggcgacaucugggugaccagagagcccuacgugagcugcggccugggcaagugcuaccaguucgcccugggccagggcaccacccuggacaacagacacagcaacggcaccagccacgacagaaccccccacagaacccugcugaugaacgagcugggcgugcccuuccaccuggccaccaagcaggugugcaucgccuggagcagcagcagcugccacgacggcaaggccuggcugcacgugugcgugaccggcgacgacagaaacgccaccgccagcaucaucuacgacggcaugcugguggacagcaucggcagcuggagcaagaacauccugagaacccaggagagcgagugcgugugcaucaacggcaccugcaccguggugaugaccgacggcagcgccagcggcaaggccgacaccagaauccuguucaucagagagggcaagaucgugcacaucagcccccugagcggcagcgcccagcacguggaggagugcagcugcuacccccaguaccccgaggugagaugcgugugcagagacaacuggagaggcagcaacagacccgugcuguacaucaacauggccgacuacagcguggacagcggcuacgugugcagcggccuggugggcgacacccccagaaacgacgacaccagcagcagcagcaacugcaaggaccccaacaacgagagaggcgcccccggcgugaagggcugggccuucgacagcggcaacgacaucuggaugggcagaaccaucgagaaggaccugagaagcggcuacgagaccuucagagugaucggcggcuggaacaccgccaacagcaagagccagaccagcagacaggugaucguggacagcgacaacagcagcggcuacagcggcaucuucagcguggagggcaagagcugcaucaacagaugcuucuacguggagcugaucagaggcagacccaaggagaccagagugugguggaccagcaacagcaucaucguguucugcggcaccagcggcaccuacggcaccggcagcuggcccgacggcgccaacaucaacuucaugcccaucuga

SEQ ID NO: 183600 - RNA, 1401 nt, Artificial Sequence
  derived and/or modified CDS sequence (opt4) from neuraminidase__InfluenzaA__AGQ81749
augaaccccaaccagaagaucaucgccaucggcagcgugagccugaccaccgccaucaucugcuuccugaugcagaucgccauccugaccaccaccaugacccugcacuucaagcagaacgagugcagcaaccccagcaacaaccagguggugcccugcgagcccaucaucaucgagagaaacaccgugcaccugaacagcaccaccaucgagaaggagaucugcagcaagguggccgaguacaagaacuggagcaagccccagugccagaucaccggcuucgcccccuucagcaaggacaacagcaucagacugagcgccggcggcgacaucugggugaccagagagcccuacgugagcugcagccugggcaagugcuaccaguucgcccugggccagggcaccacccugaagaacaagcacagcaacggcaccacccacgacagaaucccccacagaacccugcugaugaacgagcugggcgugcccuuccaccugggcaccaagcaggugugcaucgccuggagcagcagcagcugcuacgacggcaaggccuggcugcacaucugcgugaccggcgacgacaagaacgccaccgccagcaucaucuacgacggcaugcuggccgacagcaucggcagcuggagcaagaacauccugagaacccaggagagcgagugcgugugcaucaacggcaccugcgccguggugaugaccgacggcagcgccagcggcaaggccgacaccagaauccuguucaucagagagggcagaaucaucaacaucagcccccugagcggcagcgcccagcacguggaggagugcagcugcuaccccagauaccccgaggugagaugcgugugcagagacaacuggaagggcagcaacagacccgugcuguacaucaacauggccgacuacagcguggagagcagcuacgugugcagcggccuggugggcgacacccccagaaacgacgacagcagcagcagcagcaacugcagagaccccaacaacgagagaggcgcccccggcgugaagggcugggccuucgacgacggcaacgacguguggaugggcagaaccaucaagaaggacagcagaagcggcuacgagaccuucagagugaucaacggcuggaccaccgccaacagcaagagccagaucaacagacaggugaucguggacagcgacaacuggagcggcuacagcggcaucuucagcguggagggcaagaacugcaucaacagaugcuucuacguggagcugaucagaggcagaccccaggagcccaaggugugguggaccagcaacagcaucaucgccuucugcggcaccagcggcaccuacggcaccggcagcuggcccgacggcgccaacaucaacuucaugcccaucuga

SEQ ID NO: 183601 - RNA, 1401 nt, Artificial Sequence; identical to SEQ ID NO: 183600
  derived and/or modified CDS sequence (opt4) from neuraminidase__InfluenzaA__AGQ81750

SEQ ID NO: 183602 - RNA, 1410 nt, Artificial Sequence
  derived and/or modified CDS sequence (opt4) from neuraminidase__InfluenzaA__AGQ81751
augaaccccaaccagaagaucaucgccaucggcagcgugagccugaccaucgccaccaucugccugcugaugcagaucgccauccuggugaccaccaugacccuguacuucaagcacaacgagugcagcaacagcagcaacaaccaggccgugcccugcggccccaucaucaucgagagaaacaucaccgagaucgugcaccugaacagcaccacccuggagaaggagaucugccccaaggccgccggcuacagagacuggagcaagccccagugccagaucaccggcuucgcccccuucagcaaggacaacagcaucagacugagcgccagcggcgacaucugggugaccagagagcccuacgugagcugcggccugggcaagugcuaccaguucgcccugggccagggcaccacccuggacaacagacacagcaacggcaccagccacgacagaaccccccacagaacccugcugaugaacgagcugggcgugcccuuccaccuggccaccaagcaggugugcaucgccuggagcagcagcagcugccacgacggcaaggccuggcugcacgugugcgugaccggcgacgacagaaacgccaccgccagcaucaucuacgacggcauccugguggacagcaucggcagcuggagcaagaacauccugagaacccaggagagcgagugcgugugcaucaacggcaccugcaccguggugaugaccgacggcagcgccagcggcaaggccgacaccagaauccuguucaucagagagggcaagaucgugcacaucagcccccugagcggcagcgcccagcacguggaggagugcagcugcuacccccaguaccccgaggugagaugcgugugcagagacaacuggagaggcagcaacagacccgugcuguacaucaacauggccgacuacagcaucgacagcggcuacgugugcagcggccuggugggcgacacccccagaaacgacgacaucagcagcagcagcaacugcaaggaccccaacaacgagagaggcgcccccggcgugaagggcugggccuucgacagcggcaacgaccuguggaugggcagaaccaucgagaaggagagcagaagcggcuacgagaccuucagagugaucggcggcuggaacaccgccaacagcaagagccagaccagcagacaggugaucguggacagcgacaacagcagcggcuacagcggcaucuucagcguggagggcaagagcugcaucaacagaugcuucuacguggagcugaucagaggcagacccaaggagaccagagugugguggaccagcaacagcaucaucguguucugcggcaccagcggcaccuacggcaccggcagcuggcccgacggcgccaacaucaacuucaugcccaucuga

SEQ ID NO: 183603 - RNA, 1410 nt, Artificial Sequence
  derived and/or modified CDS sequence (opt4) from neuraminidase__InfluenzaA__AGQ81753
augaaccccaaccagaagaucguggccaucggcagcgugagccugaccaucgccaccaucugccugcugaugcagaucgccauccuggugaccaccaugacccugcacuucaagcacggcgagugcaccaacagcagcaacaaccaggccgugcccugcggccccaucaucaucgagagaaacaucaccggcaucgugcaccugaacagcaccacccuggagaaggagaucugccccaaggccgccggcuacagagacuggagcaagccccagugccagaucaccggcuucgcccccuucagcaaggacaacagcaucagacugagcgccagcggcgacaucugggugaccagagagcccuacgugagcugcggccugggcaagugcuaccaguucgcccugggccagggcaccacccuggacaacagacacagcaacggcaccagccacgacagaaccccccacagaacccugcugaugaacgagcugggcgugcccuuccaccuggccaccaagcaggugugcaucgccuggagcagcagcagcugccacgacggcaaggccuggcugcacaucugcgugaccggcgacgacagaaacgccaccgccagcaucaucuacgacggcaugcugguggacagcaucggcagcuggagcaagaacauccugagaacccaggagagcgagugcgugugcaucaacggcaccugcaccguggugaugaccgacggcagcgccagcggcaaggccgacaccagaauccuguucaucagagagggcaagaucgugcacaucagcccccugagcggcagcgcccagcacguggaggagugcagcugcuacccccaguaccccgaggugagaugcgugugcagagacaacuggagaggcagcaacagacccgugcuguacaucaacauggccgacuacagcguggacagcggcuacgugugcagcggccuggugggcgacacccccagaaacgacgacaccagcagcagcagcaacugcaaggaccccaacaacgagagaggcgcccccggcgugaagggcugggccuucgacagcggcaacgacaucuggaugggcagaaccaucgagaaggaccugagaagcggcuacgagaccuucagagugaucggcggcuggaacaccgccaacagcaagagccagaccaacagacaggugaucguggacagcgacaacagcagcggcuacagcggcaucuucagcguggagggcaagagcugcaucaacagaugcuucuacguggagcugaucagaggcagacccaaggagaccagagugugguggaccagcaacagcaucaucguguucugcggcaccagcggcaccuacggcaccggcagcuggcccgacggcgccaacaucaacuucaugcccaucuga

SEQ ID NO: 183604 - RNA, 1410 nt, Artificial Sequence; identical to SEQ ID NO: 183603
  derived and/or modified CDS sequence (opt4) from neuraminidase__InfluenzaA__AGQ81754

SEQ ID NO: 183605 - RNA, 1410 nt, Artificial Sequence
  derived and/or modified CDS sequence (opt4) from neuraminidase__InfluenzaA__AGQ81756
augaaccccaaccagaagaucaucgccaucggcagcaucagccugaccaucgccaccaucugccugcugauccagaucgccauccuggugaccaccaugacccugcacuucaagcacggcgagugcaccaacagcagcaacaaccaggccgugcccugcggccccaucaucaucgagagaaacgugaccgagaucgugcaccugaacagcaccacccuggagaaggagaucugccccaaggccgccggcuacagagacuggagcaagccccagugccagaucaccggcuucgcccccuucagcaaggacaacagcaucagacugagcgccagcggcgacaucugggugaccagagagcccuacgugagcugcggccugggcaagugcuaccaguucgcccugggccagggcaccacccuggacaacagacacagcaacggcaccagccacgacagaaccccccacagaacccugcugaugaacgagcugggcgugcccuuccaccuggccaccaagcaggugugcaucgccuggagcagcagcagcugccacgacggcaaggccuggcugcacgugugcgugaccggcgacgacagaaacgccaccgccagcaucaucuacgacggccugcugguggacagcaucggcagcuggagcaagaacauccugagaacccaggagagcgagugcgugugcaucaacggcaccugcaccguggugaugaccgacggcagcgccagcggcaaggccgacaccagaauccuguucaucagagagggcaagaucauccacaucagcccccugagcggcagcgcccagcacguggaggagugcagcugcuacccccaguaccccgaggugagaugcgugugcagagacaacuggagaggcagcaacagacccgugcuguacaucaacauggccgacuacagcguggacagcggcuacgugugcagcggccuggugggcgacacccccagaaacgacgacaccagcagcagcagcaacugcaaggaccccaacaacgagagaggcgcccccggcgugaagggcugggccuucgacagcggcaacgacaucuggaugggcagaaccaucgagaaggacagcagaagcggcuacgagaccuucagagugaucggcggcuggaacaccgccaacagcaagagccagaccagcagacaggugaucguggacagcgacaacagcagcggcuacagcggcaucuucagcguggagggcaagagcugcaucaacagaugcuucuacguggagcugaucagaggcagacccaaggagaccagagugugguggaccagcaacagcaucaucguguucugcggcaccagcggcaccuacggcaccggcagcuggcccgacggcgccaacaucaacuucaugcccaucuga

SEQ ID NO: 183606 - RNA, 1410 nt, Artificial Sequence
  derived and/or modified CDS sequence (opt4) from neuraminidase__InfluenzaA__AGQ81757
augaaccccaaccagaagaucaucgccaucggcagcgugagccugaccaucgccaccaucugccugcugauccagaucgccauccuggugaccaccaugacccugcacuucaagcacggcgagugcaccaacagcagcaacaaccaggccgugcccugcggccccaucaucaucgagagaaacgugaccgagaucgugcaccugaacagcaccacccuggagaaggagaucugccccaaggccgccggcuacagagacuggagcaagccccagugccagaucaccggcuucgcccccuucagcaaggacaacagcaucagacugagcgccagcggcgacaucugggugaccagagagcccuacgugagcugcggccugggcaagugcuaccaguucgcccugggccagggcaccacccuggacaacagacacagcaacggcaccagccacgacagaaccccccacagaacccugcugaugaacgagcugggcgugcccuuccaccuggccaccaagcaggugugcaucgccuggagcagcagcagcugccacgacggcaaggccuggcugcacgugugcgugaccggcgacgacagaaacgccaccgccagcaucaucuacgacggccugcugguggacagcaucggcagcuggagcaagaacauccugagaacccaggagagcgagugcgugugcaucaacggcaccugcaccguggugaugaccgacggcagcgccagcggcaaggccgacaccagaauccuguucaucagagagggcaagaucauccacaucagcccccugagcggcagcgcccagcacguggaggagugcagcugcuacccccaguaccccgaggugagaugcgugugcagagacaacuggagaggcagcaacagacccgugcuguacaucaacauggccgacuacagcguggacagcggcuacgugugcagcggccuggugggcgacacccccagaaacgacgacaccagcagcagcagcaacugcaaggaccccaacaacgagagaggcgcccccggcgugaagggcugggccuucgacagcggcaacgacaucuggaugggcagaaccaucgagaaggacagcagaagcggcuacgagaccuucagagugaucggcggcuggaacaccgccaacagcaagagccagaccagcagacaggugaucguggacagcgacaacagcagcggcuacagcggcaucuucagcguggagggcaagagcugcaucaacagaugcuucuacguggagcugaucagaggcagacccaaggagaccagagugugguggaccagcaacagcaucaucguguucugcggcaccagcggcaccuacggcaccggcagcuggcccgacggcgccaacaucaacuucaugcccaucuga

SEQ ID NO: 183607 - RNA, 1401 nt, Artificial Sequence
  derived and/or modified CDS sequence (opt4) from neuraminidase__InfluenzaA__AGQ81758
augaaccccaaccagaagaucaucgccaucggcagcgugagccugaucaucgccaucaucugccugcugaugcagaucgccauccugaccaccaccaugacccugcacuucagacagaacgagugcagcaaccccagcaacaaccagguggugcccugcgagcccaccaucaucgagagaaacaccgugcaccugaacagcaccaccaucgagagagagaucugccccaagguggccgaguacaagaacuggagcaagccccagugccagaucaccggcuucgcccccuucagcaaggacaacagcaucagacugagcgccggcggcgacaucugggugaccagagagcccuacgugagcugcagccugggcaagugcuaccaguucgcccugggccagggcaccacccugaagaacaagcacagcaacggcaccacccacgacagaaccccccacagaacccugcugaugaacgagcugggcgugcccuuccaccugggcaccaagcaggugugcaucgccuggagcagcagcagcugcuacgacggcaaggccuggcugcacaucugcgugaccggcgacgacgagaacgccaccgccagcaucaucuacgacggcaugcugguggacagcaucggcagcuggagcaagaacauccugagaacccaggagagcgagugcgugugcaucaacggcaccugcgccguggugaugaccgacggcagcgccagcggcaaggccgacaccagagugcuguucaucagagagggcaagaucaucaacaucagcccccugagcggcagcgcccagcacguggaggagugcagcugcuaccccagauaccccgaggugagaugcgugugcagagacaacuggaagggcagcaacagacccgugcuguacaucaacauggccgacuacagcaucgagagcagcuacgugugcagcggccuggugggcgacacccccagaaacgacgacagcagcagcagcagcaacugcagagaccccaacaacgagagaggcgcccccggcgugaagggcugggccuucgacgacggcaacgacguguggaugggcagaaccaucaagaacgacagcagaagcggcuacgagaccuucagaguggugaacggcuggaccauggccaacagcaagagccagaucaacagacaggugaucguggacagcgacaacuggagcggcuacagcggcaucuucagcguggagggcaagaagugcaucaacagaugcuucuacguggagcugaucagaggcagaccccaggagcccagagugugguggaccagcaacagcaucaucguguucugcggcaccagcggcaccuacggcaccggcagcuggcccgacggcgccaacaucaacuucaugcccaucuga

SEQ ID NO: 183608 - RNA, 1401 nt, Artificial Sequence
  derived and/or modified CDS sequence (opt4) from neuraminidase__InfluenzaA__AGQ81759
augaaccccaaccagaagaucaucgccaucggcagcgugagccugaccaucgccaucaucugcuuccugauccagaucgccauccugaccaccaccaugacccugcacuucagacagagcgagugcagcaaccccagcaacaaccagguggugcccugcgagcccaucaucaucgagagaaacaccgugcaccugaacagcaccaucaucgagaaggagaucugccccaagguggccgaguacaagaacuggagcaagccccagugccagaucaccggcuucgcccccuucagcaaggacaacagcaucagacugagcgccggcggcgacaucugggugaccagagagcccuacgugagcugcagccugggcaagugcuaccaguucgcccugggccagggcaccacccugaagaacaagcacagcaacggcaccacccacgacagaaucccccacagaacccugcugaugaacgagcugggcgugcccuuccaccugggcaccaagcaggugugcaucgccuggagcagcagcagcugccacgacggcaaggccuggcugcacaucugcgugaccggcgacgacaagaacgccaccgccagcaucaucuacgacggcaugcugguggacagcaucggcagcuggagcaagaacauccugagaacccaggagagcgagugcgugugcaucaacggcaccugcgccguggugaugaccgacggcagcgccagcggcaaggccgacaccagaauccuguucaucagagagggcaagaucaucaacaucagcccccugagcggcagcgcccagcacguggaggagugcagcugcuaccccagauaccccgaggugagaugcgugugcagagacaacuggaagggcagcaacagacccgugcuguacaucaacauggccgacuacagcaucgagagcagcuacgugugcagcggccuggugggcgacacccccagagacgacgacagcagcagcagcagcaacugcagagaccccaacaacgagagaggcgcccccggcgugaagggcugggccuucgacgacggcaacgacaucuggaugggcagaaccaucaagagcgacagcagaagcggcuacgagaccuucagagugaucaacggcuggaccaccgccaacagcaagagccagaucaacagacaggugaucguggacagcgacagcuggagcggcuacagcggcaucuucagcguggagggcaagaacugcaucaacagaugcuucuacguggagcugaucagaggcagacccagagagaccagagugugguggaccagcaacagcaucaucguguucugcggcaccagcggcaccuacggcaccggcagcuggcccgacggcgccaacaucaacuucaugcccaucuga

SEQ ID NO: 183609 - RNA, 1401 nt, Artificial Sequence
  derived and/or modified CDS sequence (opt4) from neuraminidase__InfluenzaA__AGQ81760
augaaccccaaccagaagaucaucgccaucggcagcgugagccugaccaucgccaucaucugcuuccugaugcagaucgccauccugaccaccaccaugacccugcacuucagacagaacgagugcagcaaccccagcaacaaccagguggugcccugcgagcccaucaucaucgagagaaacaccgugcaccugaacagcaccaccaucgagaaggagaucugccccaagguggccgaguacaagaacuggagcaagccccagugccagaucaccggcuucgcccccuucagcaaggacaacagcaucagacugagcgccggcggcgacaucugggugaccagagagcccuacgugagcugcagccugggcaagugcuaccaguucgcccugggccagggcaccacccugaagaacaagcacagcaacggcaccacccacgacagaaucccccacagaacccugcugaugaacgagcugggcgugcccuuccaccugggcaccaagcaggugugcaucgccuggagcagcagcagcugccacgacggcaaggccuggcugcacaucugcgugaccggcgacgacaagaacgccaccgccagcaucaucuacgacggcaugcugguggacagcaucggcagcuggagcaagaacauccugagaacccaggagagcgagugcgugugcaucaacggcaccugcgccguggugaugaccgacggcagcgccagcggcaaggccgacaccagagugcuguucaucagagagggcaagaucaucaacaucagcccccugagcggcagcgcccagcacguggaggagugcagcugcuaccccagauaccccgaggugagaugcgugugcagagacaacuggaagggcagcaacagacccgugcuguacaucaacauggccgacuacagcaucgagagcagcuacgugugcagcggccuggugggcgacacccccagagacgacgacagcagcagcagcagcaacugcagagaccccaacaacgagagaggcgcccccggcgugaagggcugggccuucgacgacggcaacgacaucuggaugggcagaaccaucaagagcgacagcagaagcggcuacgagaccuucagaguggugaacggcuggaucaccgccaacagcaagagccagaucaacagacaggugaucguggacagcgacagcuggagcggcuacagcggcaucuucagcguggagggcaagaacugcaucaacagaugcuucuacguggagcugaucagaggcagaccccaggagaccagagugugguggaccagcaacagcaucaucguguucugcggcaccagcggcaccuacggcaccggcagcuggcccgacggcgccaacaucaacuucaugcccaucuga

SEQ ID NO: 183610 - RNA, 1401 nt, Artificial Sequence
  derived and/or modified CDS sequence (opt4) from neuraminidase__InfluenzaA__AGQ81761
augaaccccaaccagaagaucaucgccaucggcagcgugagccugaccaucgccaucaucugcuuccugaugcagaucgccauccugaccaccaccaugacccugcacuucagacagaacgagugcagcaaccccagcaacaaccagguggugcccugcgagcccaucaucaucgagagaaacaccgugcaccugaacagcaccaccaucgagaaggagaucugccccaagguggccgaguacaagaacuggagcaagccccagugccagaucaccggcuucgcccccuucagcaaggacaacagcaucagacugagcgccggcggcgacaucugggugaccagagagcccuacgugagcugcagccugggcaagugcuaccaguucgcccugggccagggcaccacccugaagaacaagcacagcaacggcaccacccacgacagaaucccccacagaacccugcugaugaacgagcugggcgugcccuuccaccugggcaccaagcaggugugcaucgccuggagcagcagcagcugccacgacggcaaggccuggcugcacaucugcgugaccggcgacgacaagaacgccaccgccagcaucaucuacgacggcaugcugguggacagcaucggcagcuggagcaagaacauccugagaacccaggagagcgagugcgugugcaucaacggcaccugcgccguggugaugaccgacggcagcgccagcggcaaggccgacaccagaauccuguucaucaaggagggcaagaucaucaacaucagcccccugagcggcagcgcccagcacguggaggagugcagcugcuaccccagauaccccgaggugagaugcgugugcagagacaacuggaagggcagcaacagacccgugcuguacaucaacauggccgacuacagcaucgagagcagcuacgugugcagcggccuggugggcgacacccccagagacgacgacagcagcagcagcagcaacugcagagaccccaacaacgagagaggcgcccccggcgugaagggcugggccuucgacgacggcaacgacaucuggaugggcagaaccaucaagagcgacagcagaagcggcuacgagaccuucagaguggugaacggcuggaccaccgccaacagcaagagccagaucaacagacaggugaucguggacagcgacagcuggagcggcuacagcggcaucuucagcguggagggcaagaacugcaucaacagaugcuucuacguggagcugaucagaggcagaccccaggagaccagagugugguggaccagcaacagcaucaucguguucugcggcaccagcggcaccuacggcaccggcagcuggcccgacggcgccaacaucaacuucaugcccaucuga

SEQ ID NO: 183611 - RNA, 1401 nt, Artificial Sequence
  derived and/or modified CDS sequence (opt4) from neuraminidase__InfluenzaA__AGQ81763
augaaccccaaccagaagaucaucgccaucggcagcgugagccugaucaucgccaucaucugccugcugaugcagaucgccauccugaccaccaccaugacccugcacuucagacagaacgagugcagcaaccccagcaacaaccagguggugcccugcgagcccaucaucaucgagagaaacaccgugcaccugaacagcaccaccaucgagagagagaucugccccaagguggccgaguacaagaacuggagcaagccccagugccagaucaccggcuucgcccccuucagcaaggacaacagcaucagacugagcgccggcggcgacaucugggugaccagagagcccuacgugagcugcagccugggcaagugcuaccaguucgcccugggccagggcaccacccugaagaacaagcacagcaacggcaccacccacgacagaaccccccacagaacccugcugaugaacgagcugggcgugcccuuccaccugggcaccaagcaggugugcaucgccuggagcagcagcagcugcuacgacggcaaggccuggcugcacaucugcgugaccggcgacgacaagaacgccaccgccagcaucaucuacgacggcaugcugguggacagcaucggcagcuggagcaagaacauccugagaacccaggagagcgagugcgugugcaucaacggcaccugcgccguggugaugaccgacggcagcgccagcggcaaggccgacaccagagugcuguucaucagagagggcaagaucaucaacaucagcccccugagcggcagcgcccagcacguggaggagugcagcugcuaccccagauaccccgaggugagaugcgugugcagagacaacuggaagggcagcaacagacccgugcuguacaucaacauggccgacuacagcaucgagagcagcuacgugugcagcggccuggugggcgacacccccagaaacgacgacagcagcagcagcagcaacugcagagaccccaacaacgagagaggcgcccccggcgugaagggcugggccuucgacgacggcaacgacguguggaugggcagaaccaucaagaacggcagcagaagcggcuacgagaccuucagaguggugaacggcuggaccauggccaacagcaagagccagaucaacagacaggugaucguggacagcgacaacuggagcggcuacagcggcaucuucagcguggagggcaagaagugcaucaacagaugcuucuacguggagcugaucagaggcagaccccaggagcccagagugugguggaccagcaacagcaucaucguguucugcggcaccagcggcaccuacggcaccggcagcuggcccgacggcgccaacaucaacuucaugcccaucuga

SEQ ID NO: 183612 - RNA, 1401 nt, Artificial Sequence
  derived and/or modified CDS sequence (opt4) from neuraminidase__InfluenzaA__AGQ81766
augaaccccaaccagaagaucaucgccaucggcagcgugagccugaccaucgccaucaucugcuuccugaugcagaucgccauccugaccaccaccaugacccugcacuucagacagaacgagugcagcaaccccagcaacaaccagguggugcccugcgagcccaucaucaucgagagaaacaccgugcaccugaacagcaccaccaucgagaaggagaucugccccaagguggccgaguacaagaacuggagcaagccccagugccagaucaccggcuucgcccccuucagcaaggacaacagcaucagacugagcgccggcggcgacaucugggugaccagagagcccuacgugagcugcagccugggcaagugcuaccaguucgcccugggccagggcaccacccugaagaacaagcacagcaacggcaccacccacgacagaaucccccacagaacccugcugaugaacgagcugggcgugcccuuccaccugggcaccaagcaggugugcaucgccuggagcagcagcagcugccacgacggcaaggccuggcugcacaucugcgugaccggcgacgacaagaacgccaccgccagcaucaucuacgacggcaugcugguggacagcaucggcagcuggagcaagaacauccugagaacccaggagagcgagugcgugugcaucaacggcaccugcgccguggugaugaccgacggcagcgccagcggcaaggccgacaccagaauccuguucaucagagagggcaagaucaucaacaucagcccccugagcggcagcgcccagcacguggaggagugcagcugcuaccccagauaccccgaggugagaugcgugugcagagacaacuggaagggcagcaacagacccgugcuguacaucaacauggccgacuacagcaucgagagcagcuacgugugcagcggccuggugggcgacacccccagagacgacgacagcuucagcagcagcaacugcagagaccccaacaacgagagaggcgcccccggcgugaagggcugggccuucgacgacggcaacgacaucuggaugggcagaaccaucaagagcgacagcagaagcggcuacgagaccuucagaguggugaacggcuggaccaccgccaacagcaagagccagaucaacagacaggugaucguggacagcgacagcuggagcggcuacagcggcaucuucagcguggagggcaagaacugcaucaacagaugcuucuacguggagcugaucagaggcagaccccaggagaccaucgugugguggaccagcaacagcaucaucguguucugcggcaccagcggcaccuacggcaccggcagcuggcccgacggcgccaacaucaacuucaugcccaucuga

SEQ ID NO: 183613 - RNA, 1401 nt, Artificial Sequence; identical to SEQ ID NO: 183612
  derived and/or modified CDS sequence (opt4) from neuraminidase__InfluenzaA__AGQ81767

SEQ ID NO: 183614 - RNA, 1410 nt, Artificial Sequence
  derived and/or modified CDS sequence (opt4) from neuraminidase__InfluenzaA__AGQ81768
augaaccccaaccagaagaucguggccaucggcagcgugagccugaccaucgccaccaucugccugcugaugcagaucgccauccuggugaccaccaugacccugcacuucaagcacggcgagugcaccaacagcagcaacaaccaggccgugcccugcggccccaucaucaucgagagaaacaucaccgagaucgugcaccugaacagcaccacccuggagaaggagaucugccccaaggccgccggcuacagagacuggagcaagccccagugccagaucaccggcuucgcccccuucagcaaggacaacagcaucagacugagcgccagcggcgacaucugggugaccagagagcccuacgugagcugcggccugggcaagugcuaccaguucgcccugggccagggcaccacccuggacaacagacacagcaacggcaccagccacgacagaaccccccacagaacccugcugaugagcgagcugggcgugcccuuccaccuggccaccaagcaggugugcaucgccuggagcagcagcagcugccacgacggcgaggccuggcugcacaucugcgugaccggcgacgacagaaacgccaccgccagcaucaucuacgacggcaugcugguggacagcaucggcagcuggagcaagaacauccugagaacccaggagagcgagugcgugugcaucaacggcaccugcaccguggugaugaccgacggcagcgccagcggcaaggccgacaccagaauccuguucaucagagagggcaagaucgugcacaucagcccccugagcggcagcgcccagcacguggaggagugcagcugcuacccccaguaccccgaggugagaugcgugugcagagacaacuggagaggcagcaacagacccgugcuguacaucaacauggccgacuacagcguggacagcggcuacgugugcagcggccuggugggcgacacccccagaaacgacgacaccagcagcagcagcaacugcaaggaccccaacaacgagagaggcgcccccggcgugaagggcugggccuucgacagcggcaacgacaucuggaugggcagaaccaucgagaaggaccugagaagcggcuacgagaccuucagagugaucggcggcuggaacaccgccaacagcaagagccagaccaacagacaggugaucguggacagcgacaacagcagcggcuacagcggcaucuucagcguggagggcaagagcugcaucaacagaugcuucuacguggagcugaucagaggcagacccaaggagaccagagugugguggaccagcaacagcaucaucguguucugcggcaccagcggcaccuacggcaccggcagcuggcccgacggcgccaacaucaacuucaugcccaucuga

SEQ ID NO: 183615 - RNA, 1410 nt, Artificial Sequence
  derived and/or modified CDS sequence (opt4) from neuraminidase__InfluenzaA__AGQ81769
augaaccccaaccagaagaucguggccaucggcagcgugagccugaccaucgccaccaucugccugcugaugcagaucgccauccuggugaccaccaugacccugcacuucaagcacggcgagugcaccaacagcagcaacaaccaggccgugcccugcggccccaucaucaucgagagaaacaucaccgagaucgugcaccugaacagcaccacccuggagaaggagaucugccccaaggccgccggcuacagagacuggagcaagccccagugccagaucaccggcuucgcccccuucagcaaggacaacagcaucagacugagcgccagcggcgacaucugggugaccagagagcccuacgugagcugcggccugggcaagugcuaccaguucgcccugggccagggcaccacccuggacaacagacacagcaacggcaccagccacgacagaaccccccacagaacccugcugaugagcgagcugggcgugcccuuccaccuggccaccaagcaggugugcaucgccuggagcagcagcagcugccacgacggcgaggccuggcugcacaucugcgugaccggcgacgacagaaacgccaccgccagcaucaucuacggcggcaugcugguggacagcaucggcagcuggagcaagaacauccugagaacccaggagagcgagugcgugugcaucaacggcaccugcaccguggugaugaccgacggcagcgccagcggcaaggccgacaccagaauccuguucaucagagagggcaagaucgugcacaucagcccccugagcggcagcgcccagcacguggaggagugcagcugcuacccccaguaccccgaggugagaugcgugugcagagacaacuggagaggcagcaacagacccgugcuguacaucaacauggccgacuacagcguggacagcggcuacgugugcagcggccuggugggcgacacccccagaaacgacgacaccagcagcagcagcaacugcaaggaccccaacaacgagagaggcgcccccggcgugaagggcugggccuucgacagcggcaacgacaucuggaugggcagaaccaucgagaaggaccugagaagcggcuacgagaccuucagagugaucggcggcuggaacaccgccaacagcaagagccagaccaacagacaggugaucguggacagcgacaacagcagcggcuacagcggcaucuucagcguggagggcaagagcugcaucaacagaugcuucuacguggagcugaucagaggcagacccaaggagaccagagugugguggaccagcaacagcaucaucguguucugcggcaccagcggcaccuacggcaccggcagcuggcccgacggcgccaacaucaacuucaugcccaucuga

SEQ ID NO: 183616 - RNA, 1401 nt, Artificial Sequence
  derived and/or modified CDS sequence (opt4) from neuraminidase__InfluenzaA__AGQ81770
augaaccccaaccagaagaucaucgccaucggcagcgugagcaucaccaucgccaucaucugcuucaucaugcagaucgccauccugaccaccaccaugacccugcacuucagacagaacgagugcagcaaccccagcaacaaccagguggugcccugcgagcccaucaucaucgagagaaacaccgugcaccugaacagcaccaccaucgagaaggagaccugccccaagguggccgaguacaagaacuggagcaagccccagugccagaucaccggcuucgcccccuucagcaaggacaacagcaucagacugagcgccggcggcgacaucugggugaccagagagcccuacgugagcugcagccugggcaagugcuaccaguucgcccugggccagggcaccacccugaagaacaagcacagcaacggcaccacccacgacagaaucccccacagaacccugcugaugaacgagcugggcgugcccuuccaccugggcaccaagcaggugugcaucgccuggagcagcagcagcugccacgacggcaaggccuggcugcacaucugcgugaccggcgacgacaagaacgccaccgccagcaucaucuacgacggcaugcugguggacagcaucggcagcuggagcaagaacauccugagaacccaggagagcgagugcgugugcaucaacggcaccugcgccguggugaugaccgacggcagcgccagcggcaaggccgacaccagagugcuguucaucagagagggcaagaucaucaacaucagcccccugagcggcagcgcccagcacguggaggagugcagcugcuaccccagauaccccgaggugagaugcgugugcagagacaacuggaagggcagcaacagacccgugcuguacaucaacauggccgacuacagcguggagagcagcuacgugugcagcggccuggugggcgacacccccagagacgacgacagcagcagcagcagcaacugcagagaccccaacaacgagagaggcgcccccggcgugaagggcugggccuucgacgacggcaacgacaucuggaugggcagaaccaucaagagcgacagcagaagcggcuacgagaccuucagaguggugaacggcuggaccaccgccaacagcaagagccagaucaacagacaggugaucguggacagcgacagcuggagcggcuacagcggcaucuucagcguggagggcaagaacugcaucaacagaugcuucuacguggagcugaucagaggcagaccccaggagaccagagugugguggaccagcaacagcaucaucguguucugcggcaccagcggcaccuacggcaccggcagcuggcccgacggcgccaacaucaacuucaugcccaucuga

SEQ ID NO: 183617 - RNA, 1410 nt, Artificial Sequence
  derived and/or modified CDS sequence (opt4) from neuraminidase__InfluenzaA__AGQ81772
augaaccccaaccagaagaucguggccaucggcagcgccagccugaccaucgccaccaugugccugcugcugcagaucgcccuguucgccaccaccaugacccugcacuucaagcagaccggcugcaccaacagcagcgacaaccaggccgugcccugcggccccaucaucaucgagagaaacaucaccgagaucgugcaccugaacagcaccacccuggagaaggagaccugccccaagagcgccggcuacagaaacuggagcaagccccagugccagaucaccggcuucgcccccuucagcaaggacaacagcaucagacuggccgccgccggcgacaucugggugaccagagagcccuacgugagcugcggccugggcaagugcuaccaguucgcccugggccagggcaccacccuggacaacaagcacagcaacggcaccacccacgacagaaccccccacagaacccugcugaugagcgagcugggcgugcccuuccaccuggccaccaagcaggugugcaucgccuggagcagcagcagcugccacgacggcaaggccuggcugcacgugugcgugaccggcgacgacaagaacgccaccgccagcaucaucuacgacggcauccugguggacagcaucgccagcuggagcaagaacauccugagaacccaggagagcgagugcgugugcaucaacggcaccugcaccguggugaugaccgacggcagcgccagcggcagagccgacaccagaauccuguucaucagagagggcaagaucgugcacaucagcccccugagcggcagcgcccagcacguggaggagugcagcugcuaccccagauaccccgaggugagaugcgugugcagagacaacuggaagggcagcaacagacccgugcuguucaucaacauggccgacuacagcaucgacagcagcuacgugugccccggccuggugggcgacacccccagaaacgacgacagaagcagcagcagcaacugcagagaccccaacaacgagagaggcgcccccggcgugaagggcugggccuucgacagcggcaacgacaucuggaugggcagaaccaucgagaaggacagcagaagcggcuacgagaccuucagagugaucagcggcuggagcaccgccaacagcaagagccagaucaacagacaggugaucguggacagagacaacagcagcggcuacagcggcaucuucagcguggagggcaagagcugcaucaacagaugcuucuacguggagcugaucagaggcagacccaaggagaacagagugugguggaccagcaacagcaucaucguguucugcggcaccagcggcaccuacggcaccggcagcuggcccgacggcgccaacaucaaccugaugcccaucuga

SEQ ID NO: 183618 - RNA, 1401 nt, Artificial Sequence
  derived and/or modified CDS sequence (opt4) from neuraminidase__InfluenzaA__AGQ81773
augaaccccaaccagaagaucaucgccaucggcagcgugagccugaccaucgccaucaucugcuuccugaugcagaucgccauccugaccaccaccaugacccugcacuucagacagaacgagugcagcaaccccagcaacaaccagguggugcccugcgagcccaucaucaucgagagaaagaccgugcaccugaacagcaccaccaucgagaaggagaucugccccaagguggccgaguacaagaacuggagcaagccccagugccagaucaccggcuucgcccccuucagcaaggacaacagcaucagacugagcgccggcggcgacaucugggugaccagagagcccuacgugagcugcagccugggcaagugcuaccaguucgcccugggccagggcaccacccugaagaacaagcacagcaacggcaccacccacgacagaaucccccacagaacccugcugaugaacgagcugggcgugccccugcacuggggcaccaagcaggugugcaucgccuggagcagcagcagcugccacgacggcaaggccuggcugcacaucugcgugaccggcgacgacaagaacgccaccgccagcaucaucuacgacggcaugcugguggacagcaucggcagcuggagcaagaacauccugagaacccaggagagcgagugcgugugcaucaacggcaccugcgccguggugaugaccgacggcagcgccagcggcaaggccgacaccagagugcuguucaucagagagggcaagaucaucaacaucagcccccugagcggcagcgcccagcacguggaggagugcagcugcuaccccagauaccccgaggugagaugcgugugcagagacaacuggaagggcagcaacagacccgugcuguacaucaacauggccgacuacagcaucgagagcagcuacgugugcagcggccuggugggcgacacccccagagacgacgacagcagcagcagcagcaacugcagagaccccaacaacgagagaggcgcccccggcgugaagggcuggggcuucgacgacggcaacgacaucuggaugggcagaaccaucaagagcgacagcagaagcggcuacgagaccuucagaguggugaacggcuggaccaccgccaacagcaagagccagaucaacagacaggugaucguggacagcgacagcuggagcggcuacagcggcaucuucagcguggagggcaagaacugcaucaacagaugcuucuacguggagcugaucagaggcagaccccaggagaccagagugugguggaccagcaacagcaucaucguguucugcggcaccagcggcaccuacggcaccggcagcuggcccgacggcgccaacaucaacuucaugcccaucuga

SEQ ID NO: 183619 - RNA, 1401 nt, Artificial Sequence
  derived and/or modified CDS sequence (opt4) from neuraminidase__InfluenzaA__AGQ81774
augaaccccaaccagaagaucaucgccaucggcagcgugagccugaucaucgccaucaucugccugcugaugcagaucgccauccugaccaccaccaugacccugcacuucagacagaacgagugcagcaaccccagcaacaaccaggugaugcccugcgagcccaucaucaucgagagaaacaccgugcaccugaacagcaccaccaucgagagagagaucugccccaagguggccgaguacaagaacuggagcaagccccagugccagaucaccggcuucgcccccuucagcaaggacaacagcaucagacugagcgccggcggcgacaucugggugaccagagagcccuacgugagcugcagccuggacaagugcuaccaguucgcccugggccagggcaccacccugaagaacaagcacagcaacggcaccacccacgacagaaccccccacagaacccugcugaugaacgagcugggcgugcccuuccaccugggcaccaagcaggugugcaucgccuggagcagcagcagcugcuacgacggcaaggccuggcugcacaucugcgugaccggcgacgacaagaacgccaccgccagcaucaucuacgacggcaugcugguggacagcaucggcagcuggagcaagaacauccugagaacccaggagagcgagugcgugugcaucaacggcaccugcgccguggugaugaccgacggcagcgccagcggcaaggccgacaccagagugcuguucaucagagagggcaagaucaucaacaucagcccccugagcggcagcgcccagcacguggaggagugcagcugcuaccccagauaccccgaggugagaugcgugugcagagacaacuggaagggcagcaacagacccauccuguacaucaacauggccgacuacagcaucgagagcagcuacgugugcagcggccuggugggcgacacccccagaaacgacgacagcagcagcagcagcaacugcagagaccccaacaacgagagaggcgcccccggcgugaagggcugggccuucgacgacggcaacgacguguggaugggcagaaccaucaagaacggcagcagaagcggcuacgagaccuucagaguggugaacggcuggaccaucgccaacagcaagagccagaucaacagacaggugaucguggacagcgacgacuggagcggcuacagcggcaucuucagcguggagggcaagaagugcaucaacagaugcuucuacguggagcugaucagaggcagaccccaggagcccagagugugguggaccagcaacagcaucaucguguucugcggcaccagcggcaccuacggcaccggcagcuggcccgacggcgccaacaucaacuucaugcccaucuga

SEQ ID NO: 183620 - RNA, 1401 nt, Artificial Sequence
  derived and/or modified CDS sequence (opt4) from neuraminidase__InfluenzaA__AGQ81776
augaaccccaaccagaagaucaucgccaucggcagcgugagccugaccaucgccaucaucugcuuccugaugcagaucgccauccugaccaccaccaugacccugcacuucagacagaacgagugcagcaaccccagcaacaaccagguggugcccugcgagcccaucaucaucgagagaaacaccgugcaccugaacagcaccaccaucgagaaggagaucugccccaagguggccgaguacaagaacuggagcaagccccagugccagaucaccggcuucgcccccuucagcaaggacaacagcaucagacugagcgccggcggcgacaucugggugaccagagagcccuacgugagcugcagccugggcaagugcuaccaguucgcccugggccagggcaccacccugaagaacaagcacagcaacggcaccacccacgacagaaucccccacagaacccugcugaugaacgagcugggcgugcccuuccaccugggcaccaagcaggugugcaucgccuggagcagcagcagcugccacgacggcaaggccuggcugcacaucugcgugaccggcgacgacaagaacgccaccgccagcaucaucuacgacggcaugcugguggacagcaucggcagcuggagcaagaacauccugagaacccaggagagcgagugcgugugcaucaacggcaccugcgccguggugaugaccgacggcagcgccagcggcaaggccgacaccagagugcuguucaucagagagggcaagaucaucaacaucagcccccugagcggcagcgcccagcacguggaggagugcagcugcuaccccagauaccccgaggugagaugcgugugcagagacaacuggaagggcagcaacagacccgugcuguacaucaacauggccgacuacagcaucgagagcagcuacgugugcagcggccuggugggcgacacccccagagacgacgacagcagcagcagcagcaacugcagagaccccaacaacgagagaggcgcccccggcgugaagggcugggccuucgacgacggcaacgacaucuggaugggcagaaccaucaagagcgacagcagaagcggcuacgagaccuucagagugaucgacggcuggaccaccgccgacagcaagagccagaucaacagacaggugaucguggacagcgacagcuggagcggcuacagcggcaucuucagcguggagggcaagaacugcaucaacagaugcuucuacguggagcugaucagaggcagaccccaggagaccagagugugguggaccagcaacagcaucaucguguucugcggcaccagcggcaccuacggcaccggcagcuggcccgacggcgccaacaucaacuucaugcccaucuga

SEQ ID NO: 183621 - RNA, 1410 nt, Artificial Sequence
  derived and/or modified CDS sequence (opt4) from neuraminidase__InfluenzaA__AGQ81777
augaaccccaaccagaagaucgugaccaucggcagcgccagccugaccaucgccaccaugugccugcugcugcagaucgcccuguucgccaccaccaugacccugcacuucaagcagaccggcugcaccaacagcagcgacaaccaggccgugcccugcggccccaucaucaucgagagaaacaucaccgagaucgugcaccugaacagcaccacccuggagaaggagaccugccccaagagcgccggcuacagaaacuggagcaagccccagugccagaucaccggcuucgcccccuucagcaaggacaacagcaucagacuggccgccgccggcgacaucugggugaccagagagcccuacgugagcugcggccugggcaagugcuaccaguucgcccugggccagggcaccacccuggacaacaagcacagcaacggcaccacccacgacagaaccccccacagaacccugcugaugaacgagcugggcgugcccuuccaccuggccaccaagcaggugugcaucgccuggagcagcagcagcugccacgacggcaaggccuggcugcacgugugcgugaccggcgacgacaagaacgccaccgccagcaucaucuacgacggcauccugguggacagcaucgccagcuggagcaagaacauccugagaacccaggagagcgagugcgugugcaucaacggcaccugcaccguggugaugaccgacggcagcgccagcggcagagccgacaccagaauccuguucaucagagagggcaagaucgugcacaucagcccccugagcggcagcgcccagcacguggaggagugcagcugcuaccccagauaccccgaggugagaugcgugugcagagacaacuggaacggcagcaacagacccgugcuguucaucaacauggccgacuacagcaucgacagcagcuacgugugcagcggccuggugggcgacacccccagaaacgacgacagaagcagcagcagcaacugcagagaccccaacaacgagagaggcgcccccggcgugaagggcugggccuucgacagcggcaacgacaucuggaugggcagaaccaucgagaaggacagcagaagcggcuacgagaccuucagagugaucagcggcuggagcaccgccaacagcaagagccagaucaacagacaggugaucguggacagagacaacagcagcggcuacagcggcaucuucagcguggagggcaagagcugcaucaacagaugcuucuacguggagcugaucagaggcagacccaaggagaacagagugugguggaccagcaacagcaucaucguguucugcggcaccagcggcaccuacggcaccggcagcuggcccgacggcgccaacaucaaccugaugcccaucuga

SEQ ID NO: 183622 - RNA, 1410 nt, Artificial Sequence
  derived and/or modified CDS sequence (opt4) from neuraminidase__InfluenzaA__AGQ81778
augaaccccaaccagaagaucgugaccaucggcagcgccagccugaccaucgccaccaugugccugcugcugcagaucgcccuguucgccaccaccaugacccugcacuucaagcagaccggcugcaccaacagcagcgacaaccaggccgugcccugcggccccaucaucaucgagagaaacaucaccgagaucgugcaccugaacagcaccacccuggagaaggagaccugccccaagagcgccggcuacagaaacuggagcaagccccagugccagaucaccggcuucgcccccuucagcaaggacaacagcaucagacuggccgccgccggcgacaucugggugaccagagagcccuacgugagcugcggccugggcaagugcuaccaguucgcccugggccagggcaccacccuggacaacaagcacagcaacggcaccacccacgacagaaccccccacagaacccugcugaugaacgagcugggcgugcccuuccaccuggccaccaagcaggugugcaucgccuggagcagcagcagcugccacgacggcaaggccuggcugcacgugugcgugaccggcgacgacaagaacgccaccgccagcaucaucuacgacggcauccugguggacagcaucgccagcuggagcaagaacauccugagaacccaggagagcgagugcgugugcaucaacggcaccugcaccguggugaugaccgacggcagcgccagcggcagagccgacaccagaauccuguucaucagagagggcaagaucgugcacaucagcccccugagcggcagcgcccagcacguggaggagugcagcugcuaccccagauaccccgaggugagaugcgugugcagagacaacuggaagggcagcaacagacccgugcuguucaucaacauggccgacuacagcaucgacagcagcuacgugugcagcggccuggugggcgacacccccagaaacgacgacagaagcagcagcagcaacugcagagaccccaacaacgagagaggcgcccccggcgugaagggcugggccuucgacagcggcaacgacaucuggaugggcagaaccaucgagaaggacagcagaagcggcuacgagaccuucagagugaucagcggcuggagcaccgccaacagcaagagccagaucaacagacaggugaucguggacagagacaacagcagcggcuacagcggcaucuucagcguggagggcaagagcugcaucaacagaugcuucuacguggagcugaucagaggcagacccaaggagaacagagugugguggaccagcaacagcaucaucguguucugcggcaccagcggcaccuacggcaccggcagcuggcccgacggcgccaacaucaaccugaugcccaucuga

SEQ ID NO: 183623 - RNA, 1410 nt, Artificial Sequence
  derived and/or modified CDS sequence (opt4) from neuraminidase__InfluenzaA__AGQ81779
augaaccccaaccagaagaucguggccaucggcagcgccagccugaccaucgccaccaugugccugcugcugcagaucgcccuguucgccaccaccaugacccugcacuucaagcagaccggcugcaccaacagcagcgacaaccaggccgugcccugcggccccaucaucaucgagagaaacaucaccgagaucgugcaccugaacagcaccacccuggagaaggagaccugccccaagagcgccggcuacagaaacuggagcaagccccagugccagaucaccggcuucgcccccuucagcaaggacaacagcaucagacuggccgccgccggcgacaucugggugaccagagagcccuacgugagcugcggccugggcaagugcuaccaguucgcccugggccagggcaccacccuggacaacaagcacagcaacggcaccacccacgacagaaccccccacagaacccugcugaugaacgagcugggcgugcccuuccaccuggccaccaagcaggugugcaucgccuggagcagcagcagcugccacgacggcaaggccuggcugcacgugugcgugaccggcgacgacaagaacgccaccgccagcaucaucuacgacggcauccugguggacagcaucgccagcuggagcaagaacauccugagaacccaggagagcgagugcgugugcaucaacggcaccugcaccguggugaugaccgacggcagcgccagcggcagagccgacaccagaauccuguucaucagagagggcaagaucgugcacaucagcccccugagcggcagcgcccagcacguggaggagugcagcugcuaccccagauaccccgagaucagaugcgugugcagagacaacuggaagggcagcaacagacccgugcuguucaucaacauggccgacuacagcaucgacagcagcuacgugugcagcggccuggugggcgacacccccagaaacgacgacagaagcagcagcagcaacugcagagaccccaacaacgagagaggcgcccccggcgugaagggcugggccuucgacagcggcaacgacaucuggaugggcagaaccaucgagaaggacagcagaagcggcuacgagaccuucagagugaucagcggcuggagcaccgccaacagcaagagccagaucaacagacaggugaucguggacagagacaacagcagcggcuacagcggcaucuucagcguggagggcaagagcugcaucaacagaugcuucuacguggagcugaucagaggcagacccaaggagaacagagugugguggaccagcaacagcaucaucguguucugcggcaccagcggcaccuacggcaccggcagcuggcccgacggcgccaacaucaaccugaugcccaucuga

SEQ ID NO: 183624 - RNA, 1410 nt, Artificial Sequence
  derived and/or modified CDS sequence (opt4) from neuraminidase__InfluenzaA__AGQ81780
augaaccccaaccagaagaucguggccaucggcagcgccagccugaccaucgccaccaugugccugcugcugcagaucgcccuguucgccaccaccaugacccugcacuucaagcagaccggcugcaccaacagcagcgacaaccaggccgugcccugcggccccaucaucaucgagagaaacaucaccgagaucgugcaccugaacagcaccacccuggagaaggagaccugccccaagagcgccggcuacagaaacuggagcaagccccagugccagaucaccggcuucgcccccuucagcaaggacaacagcaucagacuggccgccgccggcgacaucugggugaccagagagcccuacgugagcugcggccugggcaagugcuaccaguucgcccugggccagggcaccacccuggacaacaagcacagcaacggcaccacccacgacagaaccccccacagaacccugcugaugaacgagcugggcgugcccuuccaccuggccaccaagcaggugugcaucgccuggagcagcagcagcugccacgacggcaaggccuggcugcacgugugcgugaccggcgacgacaagaacgccaccgccagcaucaucuacgacggcauccugguggacagcaucgccagcuggagcaagaacauccugagaacccaggagagcgagugcgugugcaucaacggcaccugcaccguggugaugaccgacggcagcgccagcggcagagccgacaccagaauccuguucaucagagagggcaagaucgugcacaucagcccccugagcggcagcgcccagcacguggaggagugcagcugcuaccccagauaccccgaggugagaugcgugugcagagacaacuggaagggcagcaacagacccgugcuguucaucaacauggccgacuacagcaucgacagcagcuacgugugcagcggccuggugggcgacacccccagaaacgacgacagaagcagcagcagcaacugcagagaccccaacaacgagagaggcgccagcggcgugaagggcugggccuucgacagcggcaacgacaucuggaugggcagaaccaucgagaaggacagcagaagcggcuacgagaccuucagagugaucagcggcuggagcaccgccaacagcaagagccagaucaacagacaggugaucguggacagagacaacagcagcggcuacagcggcaucuucagcguggagggcaagagcugcaucaacagaugcuucuacguggagcugaucagaggcagacccaaggagaacagagugugguggaccagcaacagcaucaucguguucugcggcaccagcggcaccuacggcaccggcagcuggcccgacggcgccaacaucaaccugaugcccaucuga

SEQ ID NO: 183625 - RNA, 1401 nt, Artificial Sequence
  derived and/or modified CDS sequence (opt4) from neuraminidase__InfluenzaA__AGQ81781
augaaccccaaccagaagaucaucgccaucggcagcgugagccugaccaucgccaucaucugcuuccugaugcagaucgccauccugaccaccaccaugaccccccacuucagacagaacgagugcagcaaccccagcaacaaccagguggugcccugcgagcccaucaucaucgagagaaacaccgugcaccugaacagcaccaccaucgagaaggagaucugccccaagguggccgaguacaagaacuggagcaagccccagugccagaucaccggcuucgcccccuucagcaaggacaacagcaucagacugagcgccggcggcgacaucugggugaccagagagcccuacgugagcugcagccugggcaagugcuaccaguucgcccugggccagggcaccacccugaagaacaagcacagcaacggcaccacccacgacagaaucccccacagaacccugcugaugaacgagcugggcgugcccuuccaccugggcaccaagcaggugugcaucgccuggagcagcagcagcugccacgacggcaaggccuggcugcacaucugcgugaccggcgacgacaagaacgccaccgccagcaucaucuacgacggcaugcugguggacagcaucggcagcuggagcaagaacauccugagaacccaggagagcgagugcgugugcaucaacggcaccugcgccguggugaugaccgacggcagcgccagcggcaaggccgacaccagaauccuguucaucagagagggcaagaucaucaacaucagcccccugagcggcagcgcccagcacguggaggagugcagcugcuaccccagauaccccgaggugagaugcgugugcagagacaacuggaagggcagcaacagacccgugcuguacaucaacauggccgacuacagcaucgagagcagcuacgugugcagcggccuggugggcgacacccccagagacgacgacagcagcagcagcagcaacugcagagaccccaacaacgagagaggcgcccccggcgugaagggcugggccuucgacgacggcaacgacaucuggaugggcagaaccaucaagagcgacagcagaagcggcuacgagaccuucagaguggugaacggcuggaccaccgccaacagcaagagccagaucaacagacaggugaucguggacagcgacagcuggagcggcuacagcggcaucuucagcguggagggcaagaacugcaucaacagaugcuucuacguggagcugaucagaggcagaccccaggagaccagagugugguggaccagcaacagcaucaucguguucugcggcaccagcggcaccuacggcaccggcagcuggcccgacggcgccgacaucaaccugaugcccaucuga

SEQ ID NO: 183626 - RNA, 1410 nt, Artificial Sequence
  derived and/or modified CDS sequence (opt4) from neuraminidase__InfluenzaA__AGQ81783
augaaccccaaccagaagaucgugaccaucggcagcgccagccugaccaucgccaccaugugccugcugcugcagaucgcccuguucgccaccaccaugacccugcacuucaagcagaccggcugcaccaacagcagcgacaaccaggccgugcccugcggccccaucaucaucgagagaaacaucaccgagaucgugcaccugaacagcaccacccuggagaaggagaccugccccaagagcgccggcuacagaaacuggagcaagccccagugccagaucaccggcuucgcccccuucagcaaggacaacagcaucagacuggccgccgccggcgacaucugggugaccagagagcccuacgugagcugcggccugggcaagugcuaccaguucgcccugggccagggcaccacccuggacaacaagcacagcaacggcaccacccacgacagaaccccccacagaacccugcugaugaacgagcugggcgugcccuuccaccuggccaccaagcaggugugcaucgccuggagcagcagcagcugccacgacggcaaggccuggcugcacgugugcgugaccggcgacgacaagaacgccaccgccagcaucaucuacaacggcauccugguggacagcaucgccagcuggagcaagaacauccugagaacccaggagagcgagugcgugugcaucaacggcaccugcaccguggugaugaccgacggcagcgccagcggcagagccgacaccagaauccuguucaucagagagggcaagaucgugcacaucagcccccugagcggcagcgcccagcacguggaggagugcagcugcuaccccagauaccccgaggugagaugcgugugcagagacaacuggaagggcagcaacagacccgugcuguucaucaacauggccgacuacagcaucgacagcagcuacgugugcagcggccuggugggcgacacccccagaaacgacgacagaagcagcagcagcaacugcagagaccccaacaacgagagaggcgcccccggcgugaagggcugggccuucgacagcggcaacgacaucuggaugggcagaaccaucgagaaggacagcagaagcggcuacgagaccuucagagugaucagcggcuggagcaccgccaacagcaagagccagaucaacagacaggugaucguggacagagacaacagcagcggcuacagcggcaucuucagcguggagggcaagagcugcaucaacagaugcuucuacguggagcugaucagaggcagacccaaggagaacagagugugguggaccagcaacagcaucaucguguucugcggcaccagcggcaccuacggcaccggcagcuggcccgacggcgccaacaucaaccugaugcccaucuga

SEQ ID NO: 183627 - RNA, 1401 nt, Artificial Sequence
  derived and/or modified CDS sequence (opt4) from neuraminidase__InfluenzaA__AGQ81784
augaaccccaaccagaagaucaucgccaucggcagcgugagccugaccaucgccaucaucugcuuccugaugcagaucgccauccugaccaccaccaugacccugcacuucagacagaacgagugcagcaaccccagcaacaaccagguggugcccugcgagcccaucaucaucgagagaaacaccgugcaccugaacagcaccaccaucgagaaggagaucugccccaagguggccgaguacaagaacuggagcaagccccagugccagaucaccggcuucgcccccuucagcaaggacaacagcaucagacugagcgccggcggcgacaucugggugaccagagagcccuacgugagcugcagccugggcaagugcuaccaguucgcccugggccagggcaccacccugagaaacaagcacagcaacggcaccacccacgacagaaucccccacagaacccugcugaugaacgagcugggcgugcccuuccaccugggcaccaagcaggugugcaucgccuggagcagcagcagcugccacgacggcaaggccuggcugcacaucugcgugaccggcgacgacaagaacgccaccgccagcaucaucuacgacggcaugcugguggacagcaucggcagcuggagcaagaacauccugagaacccaggagagcgagugcgugugcaucaacggcaccugcgccguggugaugaccgacggcaacgccagcggcaaggccgacaccagagugcuguucaucagagagggcaagaucaucaacaucagcccccugagcggcagcgcccagcacguggaggagugcagcugcuaccccagauaccccgaggugagaugcgugugcagagacaacuggaagggcagcaacagacccgugcuguacaucaacauggccgacuacagcaucgagagcagcuacgugugcagcggccuggugggcgacacccccagagacgacgacagcagcagcagcagcaacugcagagaccccaacaacgagagaggcgcccccggcgugaagggcugggccuucgacgacggcaacgacaucuggaugggcagaaccaucaagagcgacagcagaagcggcuacgagaccuucagaguggugaacggcuggaccaccgccaacagcaagagccagaucaacagacaggugaucguggacagcgacagcuggagcggcuacagcggcaucuucagcguggagggcaagaacugcaucaacagaugcuucuacguggagcugaucagaggcagaccccaggagaccagagugugguggaccagcaacagcaucaucguguucugcggcaccagcggcaccuacggcaccggcagcuggcccgacggcgccgacaucaacuucaugcccaucuga

SEQ ID NO: 183628 - RNA, 1401 nt, Artificial Sequence
  derived and/or modified CDS sequence (opt4) from neuraminidase__InfluenzaA__AGQ81785
augaaccccaaccagaagaucaucgccaucggcagcgugagccugaccaucgccaucaucugcuucaucaugcagaucgccauccugaccaccaccaugaccccccacuucagacagaacgagugcagcaaccccagcaacaaccagguggugcccugcgagcccaucaucaucgagagaaacaccgugcaccugaacagcaccaccaucgagaaggagaucugccccaagguggccgaguacaagaacuggagcaagccccagugccagaucaccggcuucgcccccuucagcaaggacaacagcaucagacugagcgccggcggcgacaucugggugaccagagagcccuacgugagcugcagccugggcaagugcuaccaguucgcccugggccagggcaccacccugaagaacaagcacagcaacggcaccacccacgacagaaucccccacagaacccugcugaugaacgagcugggcgugcccuuccaccugggcaccaagcaggugugcaucgccuggagcagcagcagcugccacgacggcaaggccuggcugcacaucugcgugaccggcgacgacaagaacgccaccgccagcaucaucuacgacggcaugcugguggacagcaucggcagcuggagcaagaacauccugagaacccaggagagcgagugcgugugcaucaacggcaccugcgccguggugaugaccgacggcagcgccagcggcaaggccgacaccagaauccuguucaucagagagggcaagaucaucaacaucagcccccugagcggcagcgcccagcacguggaggagugcagcugcuaccccagauaccccgaggugagaugcgugugcagagacaacuggaagggcagcaacagacccgugcuguacaucaacauggccgacuacagcaucgagagcagcuacgugugcagcggccuggugggcgacacccccagagacgacgacagcagcagcagcagcaacugcagagaccccaacaacgagagaggcgcccccggcgugaagggcugggccuucgacgacggcaacgacaucuggaugggcagaaccaucaagagcgacagcagaagcggcuacgagaccuucagaguggugaacggcuggaccaccgccaacagcaagagccagaucaacagacaggugaucguggacagcgacagcuggagcggcuacagcggcaucuucagcguggagggcaagaacugcaucaacagaugcuucuacguggagcugaucagaggcagaccccaggagaccagagugugguggaccagcaacagcaucaucguguucugcggcaccagcggcaccuacggcaccggcagcuggcccgacggcgccgacaucaaccugaugcccaucuga

SEQ ID NO: 183629 - RNA, 1401 nt, Artificial Sequence
  derived and/or modified CDS sequence (opt4) from neuraminidase__InfluenzaA__AGQ81787
augaaccccaaccagaagaucaucgccaucggcagcgugagccugaucaucgccaucaucugccugcugaugcagaucgccauccugaccaccaccaugacccugcacuucagacagaacgagugcagcaaccccagcaacaaccagguggugcccugcgagcccaucaucaucgagagaaacaccgugcaccugaacagcaccaccaucgagagagagaucugccccaagguggccgaguacaagaacuggagcaagccccagugccagaucaccggcuucgcccccuucagcaaggacaacagcaucagacugagcgccggcggcgacaucugggugaccagagagcccuacgugagcugcagccuggacaagugcuaccaguucgcccugggccagggcaccacccugaagaacaagcacagcaacggcaccacccacgacagaaccccccacagaacccugcugaugaacgagcugggcgugcccuuccaccugggcaccaagcaggugugcaucgccuggagcagcagcagcugcuacgacggcaaggccuggcugcacaucugcgugaccggcgacgacaagaacgccaccgccagcaucaucuacgacggcaugcugguggacagcaucggcagcuggagcaagaacauccugagaacccaggagagcgagugcgugugcaucaacggcaccugcgccguggugaugaccgacggcagcgccagcggcaaggccgacaccagagugcuguucaucagagagggcaagaucaucaacaucagcccccugagcggcagcgcccagcacguggaggagugcagcugcuaccccagauaccccgaggugagaugcgugugcagagacaacuggaagggcagcaacagacccauccuguacaucaacauggccgacuacagcaucgagagcagcuacgugugcagcggccuggugggcgacacccccagaaacgacgacagcagcagcagcagcaacugcagagaccccaacaacgagagaggcgcccccggcgugaagggcugggccuucgacgacggcaacgacguguggaugggcagaaccaucaagaacggcagcagaagcggcuacgagaccuucagaguggugaacggcuggaccauggccaacagcaagagccagaucaacagacaggugaucguggacagcgacgacuggagcggcuacagcggcaucuucagcguggagggcaagaagugcaucaacagaugcuucuacguggagcugaucagaggcagaccccaggagcccagagugugguggaccagcaacagcaucaucguguucugcggcaccagcggcaccuacggcaccggcagcuggcccgacggcgccaacaucaacuucaugcccaucuga

SEQ ID NO: 183630 - RNA, 1401 nt, Artificial Sequence
  derived and/or modified CDS sequence (opt4) from neuraminidase__InfluenzaA__AGQ81789
augaaccccaaccagaagaucaucgccaucggcagcgugagccugaccaucgccaucaucugccugcugaugcagaucgccauccugaccaccaccaugaccccccacuucagacagaacgagugcagcaaccccagcaacaaccagguggugcccugcgagcccaucaucaucgagagaaacaccgugcaccugaacagcaccaccaucgagaaggagaucugccccaagguggccgaguacaagaacuggagcaagccccagugccagaucaccggcuucgcccccuucagcaaggacaacagcaucagacugagcgccggcggcgacaucugggugaccagagagcccuacgugagcugcagccugggcaagugcuaccaguucgcccugggccagggcaccacccugaagaacaagcacagcaacggcaccacccacgacagaaucccccacagaacccugcugaugaacgagcugggcgugcccuuccaccugggcaccaagcaggugugcaucgccuggagcagcagcagcugccacgacggcaaggccuggcugcacaucugcgugaccggcgacgacaagaacgccaccgccagcaucaucuacgacggcaugcugguggacagcaucggcagcuggagcaagaacauccugagaacccaggagagcgagugcgugugcaucaacggcaccugcgccguggugaugaccgacggcagcgccagcggcaaggccgacaccagaauccuguucaucagagagggcaagaucaucaacaucagcccccugagcggcagcgcccagcacguggaggagugcagcugcuaccccagauaccccgaggugagaugcgugugcagagacaacuggaagggcagcaacagacccgugcuguacaucaacauggccgacuacagcaucgagagcagcuacgugugcagcggccuggugggcgacacccccagagacgacgacagcagcagcagcagcaacugcagagaccccaacaacgagagaggcgcccccggcgugaagggcugggccuucgacgacggcaacgacaucuggaugggcagaaccaucaagagcgacagcagaagcggcuacgagaccuucagaguggugaacggcuggaccaccgccaacagcaagagccagaucaacagacaggugaucguggacagcgacagcuggagcggcuacagcggcaucuucagcguggagggcaagaacugcaucaacagaugcuucuacguggagcugaucagaggcagaccccaggagaccagagugugguggaccagcaacagcaucaucguguucugcggcaccagcggcaccuacggcaccggcagcuggcccgacggcgccgacaucaaccugaugcccaucuga

SEQ ID NO: 183631 - RNA, 1401 nt, Artificial Sequence
  derived and/or modified CDS sequence (opt4) from neuraminidase__InfluenzaA__AGQ81790
augaaccccaaccagaagaucaucgccaucggcagcgugagccugaucaucgccaucaucugccugcugaugcagaucgccauccugaccaccaccaugacccugcacuucagacagaacgagugcagcaaccccagcaacaaccaggccaugcccugcgagcccaucaucaucgagagaaacaccgugcaccugaacagcaccaccaucgagagagagaucugccccaaggugaccgaguacaagaacuggagcaagccccagugccagaucaccggcuucgcccccuucagcaaggacaacagcaucagacugagcgccggcggcgacaucugggugaccagagagcccuacgugagcugcagccuggacaagugcuaccaguucgcccugggccagggcaccacccugaagaacaagcacagcaacggcaccacccacgacagaaccccccacagaacccugcugaugaacgagcugggcgugcccuuccaccugggcaccaagcaggugugcaucgccuggagcagcagcagcugcuacgacggcaaggccuggcugcacaucugcgugaccggcgacgacaagaacgccaccgccagcaucaucuacgacggcaugcugguggacagcaucggcagcuggagcaagaacauccugagaacccaggagagcgagugcgugugcaucaacggcaccugcgccguggugaugaccgacggcagcgccagcggcagagccgacaccagagugcuguucaucagagagggcaagaucaucaacaucagcccccugagcggcaacgcccagcacguggaggagugcagcugcuaccccagauaccccgaggugagaugcgugugcagagacaacuggaagggcagcaacagacccauccuguacaucaacauggccgacuacagcaucgagagcagcuacgugugcagcggccuggugggcgacacccccagaaacgacgacagcagcagcagcagcaacugcagagaccccaacaacgagagaggcgcccccggcgugaagggcugggccuucgacgacggcaacgacguguggaugggcagaaccaucaagaacggcagcagaagcggcuacgagaccuucagaguggugaacggcuggaccauggccaacagcaagagccagaucaacagacaggugaucguggacagcgacgaguggagcggcuacagcggcaucuucagcguggagggcaagaagugcaucaacagaugcuucuacguggagcugaucagaggcagaccccaggagcccagagugugguggaccagcaacagcaucaucguguucugcggcaccagcggcaccuacggcaccggcagcuggcccgacggcgccaacaucaacuucaugcccaucuga

SEQ ID NO: 183632 - RNA, 1401 nt, Artificial Sequence
  derived and/or modified CDS sequence (opt4) from neuraminidase__InfluenzaA__AGQ81792
augaaccccaaccagaagaucaucgccaucggcagcgugagccugaucaucgccaucaucugccugcugaugcagaucgccauccugaccaccaccaugacccugcacuucagacagaacgagugcagcaaccccagcaacaaccaggugaugcccugcgagcccaucaucaucgagagaaacaccgugcaccugaacagcaccaccaucgagagagagaucugccccaagguggccgaguacaagaacuggagcaagccccagugccagaucaccggcuucgcccccuucagcaaggacaacagcaucagacugagcgccggcggcgacaucugggugaccagagagcccuacgugagcugcagccugaacaagugcuaccaguucgcccugggccagggcaccacccuggagaacaagcacagcaacggcaccacccacgacagaaccccccacagaacccugcugaugaacgagcugggcgugcccuuccaccugggcaccaagcaggugugcauggccuggagcagcagcagcugcuacgacggcaaggccuggcugcacaucugcgugaccggcgacgacaagaacgccaccgccagcgugaucuacgacggcaugcugguggacagcaucggcagcuggagccagaacauccugagaacccaggagagcgagugcgugugcaucaacggcaccugcgccguggugaugaccgacggcagcgccagcggcaaggccgacaccagagugcuguucaucagagagggcaagaucaucaacaucagcccccugagcggcagcgcccagcacguggaggagugcagcugcuaccccagauaccccgaggugagaugcgugugcagagacaacuggaagggcagcaacagacccauccuguacaucaacauggccgacuacagcaucgagagcagcuacgugugcagcggccuggugggcgacacccccagaaacgacgacagcagcagcagcagcaacugcagagaccccaacaacgagagaggcgcccccggcgugaagggcugggccuucgacgacggcaacgacguguggaugggcagaaccaucaagaacggcagcagaagcggcuacgagaccuucagaguggugaacggcuggaccauggccaacagcaagagccagaucaacagacaggugaucguggacagcgacgacuggagcggcuacagcggcaucuucagcguggagggcaagaagugcaucaacagaugcuucuacguggagcugaucagaggcagaccccaggagcccagagugugguggaccagcaacagcaucaucguguucugcggcaccagcggcaccuacggcaccggcagcuggcccgacggcgccaacaucaacuucaugcccaucuga

SEQ ID NO: 183633 - RNA, 1401 nt, Artificial Sequence
  derived and/or modified CDS sequence (opt4) from neuraminidase__InfluenzaA__AGQ81793
augaaccccaaccagaagaucaucgccaucggcagcgugagccugaucaucgccaucaucugccugcugaugcagaucgccauccugaccaccaccaugacccugcacuucagacagaacgagugcagcaaccccagcaacaaccaggugaugcccugcgagcccaucaucaucgagagaaacaccgugcaccugaacagcaccaccaucgagagagagaucugccccaagguggccgaguacaagaacuggagcaagccccagugccagaucaccggcuucgcccccuucagcaaggacaacagcaucagacugagcgccggcggcgacaucugggugaccagagagcccuacgugagcugcagccugaacaagugcuaccaguucgcccugggccagggcaccacccuggagaacaagcacagcaacggcaccacccacgacagaaccccccacagaacccugcugaugaacgagcugggcgugcccuuccaccugggcaccaagcaggugugcauggccuggagcagcagcagcugcuacgacggcaaggccuggcugcacaucugcgugaccggcgacgacaagaacgccaccgccagcgugaucuacgacggcaugcugguggacagcaucggcagcuggagcaagaacauccugagaacccaggagagcgagugcgugugcaucaacggcaccugcgccguggugaugaccgacggcagcgccagcggcaaggccgacaccagagugcuguucaucagagagggcaagaucaucaacaucagcccccugagcggcagcgcccagcacguggaggagugcagcugcuaccccagauaccccgaggugagaugcgugugcagagacaacuggaagggcagcaacagacccauccuguacaucaacauggccgacuacagcaucgagagcagcuacgugugcagcggccuggugggcgacacccccagaaacgacgacagcagcagcagcagcaacugcagagaccccaacaacgagagaggcgcccccggcgugaagggcugggccuucgacgacggcaacgacguguggaugggcagaaccaucaagaacggcagcagaagcggcuacgagaccuucagaguggugaacggcuggaccauggccaacagcaagagccagaucaacagacaggugaucguggacagcgacgacuggagcggcuacagcggcaucuucagcguggagggcaagaagugcaucaacagaugcuucuacguggagcugaucagaggcagaccccaggagcccagagugugguggaccagcaacagcaucaucguguucugcggcaccagcggcaccuacggcaccggcagcuggcccgacggcgccaacaucaacuucaugcccaucuga

SEQ ID NO: 183634 - RNA, 1401 nt, Artificial Sequence; identical to SEQ ID NO: 183633
  derived and/or modified CDS sequence (opt4) from neuraminidase__InfluenzaA__AGQ81794

SEQ ID NO: 183635 - RNA, 1401 nt, Artificial Sequence
  derived and/or modified CDS sequence (opt4) from neuraminidase__InfluenzaA__AGQ81795
augaaccccaaccagaagaucaucgccaucggcagcgugagccugaucaucgccaucaucugccugcugaugcagaucgccauccugaccaccaccaugacccugcacuucagacagaacgagugcaacaaccccagcaacaaccaggugaugcccugcgagcccaucaucaucgagagaaacaccgugcaccugaacagcaccaccaucgagagagagaucugccccaagguggccgaguacaagaacuggagcaagccccagugccagaucaccggcuucgcccccuucagcaaggacaacagcaucagacugagcgccggcggcgacaucugggugaccagagagcccuacgugagcugcagccuggacaagugcuaccaguucgcccugggccagggcaccacccugaagaacaagcacagcaacggcaccacccacgacagaaccccccacagaacccugcugaugaacgagcugggcgugcccuuccaccugggcaccaagcaggugugcaucgccuggagcagcagcagcugcuacgacggcaaggccuggcugcacaucugcgugaccggcgacgacaagaacgccaccgccagcaucaucuacgacggcaugcugguggacagcaucggcagcuggagcaagaacauccugagaacccaggagagcgagugcgugugcaucaacggcaccugcgccguggugaugaccgacggcagcgccagcggcaaggccgacaccagagugcuguucaucagagagggcaagaucaucaacaucagcccccugagcggcagcgcccagcacguggaggagugcagcugcuaccccagauaccccgaggugagaugcgugugcagagacaacuggaagggcagcaacagacccauccuguacaucaacauggccgacuacagcaucgagagcagcuacgugugcagcggccuggugggcgacacccccagaaacgacgacagcagcagcagcagcaacugcagagaccccaacaacgagagaggcgcccccggcgugaagggcugggccuucgacgacggcaacgacguguggaugggcagaaccaucaagaacggcagcagaagcggcuacgagaccuucagaguggugaacggcuggaccaucgccaacagcaagagccagaucaacagacagaucaucguggacagcgacgacuggagcggcuacagcggcaucuucagcguggagggcaagaagugcaucaacagaugcuucuacguggagcugaucagaggcagaccccaggagcccagagugugguggaccagcaacagcaucaucguguucugcggcaccagcggcaccuacggcaccggcagcuggcccgacggcgccaacaucaacuucaugcccaucuga

SEQ ID NO: 183636 - RNA, 1401 nt, Artificial Sequence
  derived and/or modified CDS sequence (opt4) from neuraminidase__InfluenzaA__AGQ81796
augaaccccaaccagaagaucaucgccaucggcagcgugagccugaucaucgccaucaucugccugcugaugcagaucgccauccugaccaccaccaugacccugcacuucagacagaacgagugcagcaaccccagcaacaaccaggugaugcccugcgagcccaucaucaucgagagaaacaccgugcaccugaacagcaccaccaucgagagagagaucugccccaagguggccgaguacaagaacuggagcaagccccagugccagaucaccggcuucgcccccuucagcaaggacaacagcaucagacugagcgccggcggcgacaucugggugaccagagagcccuacgugagcugcagccuggacaagugcuaccaguucgcccugggccagggcaccacccugaagaacaagcacagcaacggcaccacccacgacagaaccccccacagaacccugcugaugaacgagcugggcgugcccuuccaccugggcaccaagcaggugugcaucgccuggagcagcagcagcugcuacgacggcaaggccuggcugcacaucugcgugaccggcgacgacaagaacgccaccgccagcaucaucuacgacggcaugcugguggacagcaucggcagcuggagcaagaacauccugagaacccaggagagcgagugcgugugcaucaacggcaccugcgccguggugaugaccgacggcagcgccagcggcaaggccgacaccagagugcuguucaucagagagggcaagaucaucaacaucagcccccugagcggcagcgcccagcacguggaggagugcagcugcuaccccagauaccccgaggugagaugcgugugcagagacaacuggaagggcagcaacagacccauccuguacaucaacauggccgacuacagcaucgagagcagcuacgugugcagcggccuggugggcgacacccccagaaacgacgacagcagcagcagcagcaacugcagagaccccaacaacgagagaggcgcccccggcgugaagggcugggccuucgacgacggcaacgacaucuggaugggcagaaccaucaagaacggcagcagaagcggcuacgagaccuucagaguggugaacggcuggaccauggccaacagcaagagccagaucaacagacaggugaucguggacagcgacgacuggagcggcuacagcggcaucuucagcguggagggcaagaagugcaucaacagaugcuucuacguggagcugaucagaggcagaccccaggagcccagagugugguggaccagcaacagcaucaucguguucugcggcaccagcggcaccuacggcaccggcagcuggcccgacggcgccaacaucaacuucaugcccaucuga

SEQ ID NO: 183637 - RNA, 1401 nt, Artificial Sequence
  derived and/or modified CDS sequence (opt4) from neuraminidase__InfluenzaA__AGQ81798
augaaccccaaccagaagaucaucagcaucggcagcgugagccugaucaucgccaucaucugccugcugaugcagaucgccauccugaccaccaccaugacccugcacuucagacagaacgagugcagcaaccccagcaacaaccaggugaugcccugcgagcccaucaucaucgagagaaacaccgugcaccugaacagcaccaccaucgagagagagaucugccccaagguggccgaguacaagaacuggagcaagccccagugccagaucaccggcuucgcccccuucagcaaggacaacagcaucagacugagcgccggcggcgacaucugggugaccagagagcccuacgugagcugcagccuggacaagugcuaccaguucgcccugggccagggcaccacccugaagaacaagcacagcaacggcaccacccacgacagaaccccccacagaacccugcugaugaacgagcugggcgugcccuuccaccugggcaccaagcaggugugcaucgccuggagcagcagcagcugcuacgacggcaaggccuggcugcacaucugcgugaccggcgacgacaagaacgccaccgccagcaucaucuacgacggcaugcugguggacagcaucggcagcuggagcaagaacauccugagaacccaggagagcgagugcgugugcaucaacggcaccugcgccguggugaugaccgacggcagcgccagcggcaaggccgacaccagagugcuguucaucagagagggcaagaucaucaacaucagcccccugagcggcagcgcccagcacguggaggagugcagcugcuaccccagauaccccgaggugagaugcgugugcagagacaacuggaagggcagcaacagacccauccuguacaucaacauggccgacuacagcaucgagagcagcuacgugugcagcggccuggugggcgacacccccagaaacgacgacagcagcagcagcagcaacugcagagaccccaacaacgagagaggcgcccccggcgugaagggcugggccuucgacgacggcaacgacguguggaugggcagaaccaucaagaacggcagcagaagcggcuacgagaccuucagaguggugaacggcuggaccauggccaacagcaagagccagaucaacagacaggugaucguggacagcgacgacuggagcggcuacagcggcaucuucagcguggagggcaagaagugcaucaacagaugcuucuacguggagcugaucagaggcagaccccaggagcccagagugugguggaccagcaacagcaucaucguguucugcggcaccagcggcaccuacggcaccggcagcuggcccgacggcgccaacaucaacuucaugcccaucuga

SEQ ID NO: 183638 - RNA, 1401 nt, Artificial Sequence
  derived and/or modified CDS sequence (opt4) from neuraminidase__InfluenzaA__AGQ81799
augaaccccaaccagaagaucaucgccaucggcagcgugagccugaucaucgccaucaucugccugcugaugcagaucgccauccugaccaccaccaugacccugcacuucagacagaacgagugcagcaaccccagcaacaaccaggugaugcccugcgagcccaucaucaucgagagaaacaccgugcaccugaacagcaccaccaucgagagagagaucugccccaagguggccgaguacaagaacuggagcaagccccagugccagaucaccggcuucgcccccuucagcaaggacaacagcaucagacugagcgccggcggcgacaucugggugaccagagagcccuacgugagcugcagccuggacaagugcuaccaguucgcccugggccagggcaccacccugaagaacaagcacagcaacggcaccacccacgacagaaccccccacagaacccugcugaugaacgagcugggcgugcccuuccaccugggcaccaagcaggugugcaucgccuggagcagcagcagcugcuacgacggcaaggccuggcugcacaucugcgugaccggcgacgacaagaacgccaccgccagcaucaucuacgacggcaugcugguggacagcaucggcagcuggagcaagaacauccugagaacccaggagagcgagugcgugugcaucaacggcaccugcgccguggugaugaccgacggcagcgccagcggcaaggccgacaccagagugcuguucaucagagagggcaagaucaucaacaucagcccccugagcggcagcgcccagcacguggaggagugcagcugcuaccccagauaccccgaggugagaugcgugugcagagacaacuggaagggcagcaacagacccauccuguacaucaacauggccgacuacagcaucgagagcagcuacgugugcagcggccuggugggcgacacccccagaaacgacgacagcagcagcagcagcaacugcagagaccccaacaacgagagaggcgcccccggcgugaagggcugggccuucgacgacggcaacgacguguggaugggcagaaccaucaagaacggcagcagaagcggcuacgagaccuucagaguggugaacggcuggaccauggccaacagcaagagccagaucaacagacaggugaucguggacagcgacgacuggagcggcuacagcggcaucuucagcguggagggcaagaagugcaucaacagaugcuucuacguggagcugaucagaggcagaccccaggagcccagagugugguggaccagcaacagcaucaucguguucugcggcaccagcggcaccuacggcaccggcagcuggcccgacggcgccaacaucaacuucaugcccaucuga

SEQ ID NO: 183639 - RNA, 1401 nt, Artificial Sequence; identical to SEQ ID NO: 183638
  derived and/or modified CDS sequence (opt4) from neuraminidase__InfluenzaA__AGQ81800

SEQ ID NO: 183640 - RNA, 1401 nt, Artificial Sequence
  derived and/or modified CDS sequence (opt4) from neuraminidase__InfluenzaA__AGQ81801
augaaccccaaccagaagaucaucgccaucggcagcgugagccugaucaucgccaucaucugccugcugaugcagaucgccauccugaccaccaccaugacccugcacuucagacagaacgagugcagcaaccccagcaacaaccaggugaugcccugcgagcccaucaucaucgagagaaacaccgugcaccugaacagcaccaccaucgagagagagaucugccccaagguggccgaguacaagaacuggagcaagccccagugccagaucaccggcuucgcccccuucagcaaggacaacagcaucagacugagcgccagcggcgacaucugggugaccagagagcccuacgugagcugcagccuggacaagugcuaccaguucgcccugggccagggcaccacccugaagaacaagcacagcaacggcaccacccacgacagaaccccccacagaacccugcugaugaacgagcugggcgugcccuuccaccugggcaccaagcaggugugcaucgccuggagcagcagcagcugcuacgacggcaaggccuggcugcacaucugcgugaccggcgacgacaagaacgccaccgccagcaucaucuacgacggcaugcugguggacagcaucggcagcuggagcaagaacauccugagaacccaggagagcgagugcgugugcaucaacggcaccugcgccguggugaugaccgacggcagcgccagcggcaaggccgacaccagagugcuguucaucagagagggcaagaucaucaacaucagcccccugagcggcagcgcccagcacguggaggagugcagcugcuaccccagauaccccgaggugagaugcgugugcagagacaacuggaagggcagcaacagacccauccuguacaucaacauggccgacuacagcaucgagagcagcuacgugugcagcggccuggugggcgacacccccagaaacgacgacagcagcagcagcagcaacugcagagaccccaacaacgagagaggcgcccccggcgugaagggcugggccuucgacgacggcaacgacguguggaugggcagaaccaucaagaacggcagcagaagcggcuacgagaccuucagaguggugaacggcuggaccauggccaacagcaagagccagaucaacagacaggugaucguggacagcgacgacuggagcggcuacagcggcaucuucagcguggagggcaagaagugcaucaacagaugcuucuacguggagcugaucagaggcagaccccaggagcccagagugugguggaccagcaacagcaucaucguguucugcggcaccagcggcaccuacggcaccggcagcuggcccgacggcgccaacaucaacuucaugcccaucuga

SEQ ID NO: 183641 - RNA, 1401 nt, Artificial Sequence
  derived and/or modified CDS sequence (opt4) from neuraminidase__InfluenzaA__AGQ81802
augaaccccaaccagaagaucaucgccaucggcagcgugagccugaucaucgccaucaucugccugcugaugcagaucgcccugcugaccaccaccaugacccugcacuucagacagaacgagugcagcaaccccagcaacaaccaggugaugcccugcgagcccaucaucaucgagagaaacaccgugcaccugaacagcaccaccaucgagagagagaucugccccaagguggccgaguacaagaacuggagcaagccccagugccagaucaccggcuucgcccccuucagcaaggacaacagcaucagacugagcgccggcggcgacaucugggugaccagagagcccuacgugagcugcagccuggacaagugcuaccaguucgcccugggccagggcaccacccugaagaacaagcacagcaacggcaccacccacgacagaaccccccacagaacccugcugaugaacgagcugggcgugcccuuccaccugggcaccaagcaggugugcaucgccuggagcagcagcagcugcuacgacggcaaggccuggcugcacaucugcgugaccggcgacgacaagaacgccaccgccagcaucaucuacaacggcaugcugguggacagcaucggcagcuggagcaagaacauccugagaacccaggagagcgagugcgugugcaucaacggcaccugcgccguggugaugaccgacggcagcgccagcggcaaggccgacaccagagugcuguucaucagagagggcgagaucaucaacaucagcccccugagcggcagcgcccagcacguggaggagugcagcugcuaccccagauaccccgaggugagaugcgugugcagagacaacuggaagggcagcaacagacccauccuguacaucaacauggccgacuacagcaucgagagcagcuacgugugcagcggccuggugggcgacacccccagaaacgacgacagcagcagcagcagcaacugcagagaccccaacaacgagagaggcgcccccggcgugaagggcugggccuucgacgacggcaacgacguguggaugggcagaaccaucaagaacggcagcagaagcggcuacgagaccuucagaguggugaacggcuggaccauggccaacagcaagagccagaucaacagacaggugaucguggacagcgacgacuggagcggcuacagcggcaucuucagcguggagggcaagaagugcaucaacagaugcuucuacguggagcugaucagaggcagaccccaggagcccagagugugguggaccagcaacagcaucaucguguucugcggcaccagcggcaccuacggcaccggcagcuggcccgacggcgccaacaucaacuucaugcccaucuga

SEQ ID NO: 183642 - RNA, 1401 nt, Artificial Sequence
  derived and/or modified CDS sequence (opt4) from neuraminidase__InfluenzaA__AGQ81803
augaaccccaaccagaagaucaucgccaucggcagcgugagccugaucaucgccaucaucugccugcugaugcagaucgccauccugaccaccaccaugacccugcacuucagacagaacgagugcagcaaccccagcaacaaccaggugaugcccugcgagcccaucaucaucgagagaaacaccgugcaccugaacagcaccaccaucgagagagagaucugccccaagguggccgaguacaagaacuggagcaagccccagugccagaucaccggcuucgcccccuucagcaaggacaacagcaucagacugagcgccagcggcgacaucugggugaccagagagcccuacgugagcugcagccuggacaagugcuaccaguucgcccugggccagggcaccacccugaagaacgagcacagcaacggcaccacccacgacagaaccccccacagaacccugcugaugaacgagcugggcgugcccuuccaccugggcaccaagcaggugugcaucgccuggagcagcagcagcugcuacgacggcaaggccuggcugcacaucugcgugaccggcgacgacaagaacgccaccgccagcaucaucuacgacggcaugcugguggacagcaucggcagcuggagcaagaacauccugagaacccaggagagcgagugcgugugcaucaacggcaccugcgccguggugaugaccgacggcagcgccagcggcaaggccgacaccagagugcuguucaucagagagggcaagaucaucaacaucagcccccugagcggcagcgcccagcacguggaggagugcagcugcuaccccagauaccccgaggugagaugcgugugcagagacaacuggaagggcagcaacagacccauccuguacaucaacauggccgacuacagcaucgagagcagcuacgugugcagcggccuggugggcgacacccccagaaacgacgacagcagcagcagcagcaacugcagagaccccaacaacgagagaggcgcccccggcgugaagggcugggccuucgacgacggcaacgacguguggaugggcagaaccaucaagaacggcagcagaagcggcuacgagaccuucagaguggugaacggcuggaucauggccaacagcaagagccagaucaacagacaggugaucguggacagcgacgacuggagcggcuacagcggcaucuucagcguggagggcaagaagugcaucaacagaugcuucuacguggagcugaucagaggcagaccccaggagcccagagugugguggaccagcaacagcaucaucguguucugcggcaccagcggcaccuacggcaccggcagcuggcccgacggcgccaacaucaacuucaugcccaucuga

SEQ ID NO: 183643 - RNA, 1410 nt, Artificial Sequence
  derived and/or modified CDS sequence (opt4) from neuraminidase__InfluenzaA__AGQ81804
augaaccccaaccagaagaugaucgccaucggcgccgugagccugaccaucgccaucaucugccugcugaugcagaccgccauccuggugaccaccaugacccugcacuucaagcacaacgagugcaccaacagcagcaacaaccaggccgcccccugcggccccaucaucaucgagagaaacgugaccgagguggugcaccugaacagcaccacccuggagaaggagaucugccccaaggccgccggcuacagaaacuggagcaagccccagugccagaucaccggcuucgcccccuucagcaaggacaacagcaucagacugagcgccggcggcgacaucugggugaccagagagcccuacgugagcugcggccugggcaagugcuaccaguucgcccugggccagggcaccacccuggacaacagccacagcaacggcaccagccacgacagaaccccccacagaacccugcugaugaacgagcugggcgugcccuuccaccugaugaccaagcaggugugcaucgccuggagcagcagcagcugccacgacggcaaggccuggcugcacgugugcgugaccggcgacgacagaaacgccaccgccagcaucaucuacggcggcauccugguggacagcaucggcagcuggagcaagaacauccugagaacccaggagagcgagugcgugugcaucaacggcaccugcgccguggugaugaccgacggcagcgccagcggcaaggccgacaccagaauccuguucaucagagagggcaagaucgugcacaucagcccccugagcggcagcgcccagcacguggaggagugcagcugcuacccccaguaccccgaggugagaugcgugugcagagacaacuggagaggcagcaacagacccgugcuguacaucaacauggccgacuacagcaucgacagcggcuacgugugcagcggccuggugggcgacacccccagaaacgacgacgugagcagcagcagcaacugcaaggaccccaacaacgagagaggcgcccccggcgugaagggcugggccuucgacaacggcaacgacaucuggaugggcagaaccaucgacaaggacagcagaagcggcuacgagaccuucagagugaucgacggcuggaacaccgccaacagcaagagccagaccagcagacaggugaucgugggcagcgacaacagcagcggcuacagcggcaucuucagcguggagggcaagagcugcaucaacagaugcuucuacguggagcugaucagaggcagacccaaggagaccagagugugguggaccagcaacagcaucaucguguucugcggcaccagcggcaccuacggcaccggcagcuggcccgacggcgccaacaucaacuucaugcccaucuga

SEQ ID NO: 183644 - RNA, 1401 nt, Artificial Sequence
  derived and/or modified CDS sequence (opt4) from neuraminidase__InfluenzaA__AGQ81805
augaaccccaaccagaagaucaucgccaucggcagcgugagccugaucaucgccaucaucugccugcugaugcagaucgcccugcugaccaccaccaugacccugcacuucagacagaacgagugcagcaaccccagcaacaaccaggugaugcccugcgagcccaucaucaucgagagaaacaccgugcaccugaacagcaccaccaucgagagagagaucugccccaagguggccgaguacaagaacuggagcaagccccagugccagaucaccggcuucgcccccuucagcaaggacaacagcaucagacugagcgccggcggcgacaucugggugaccagagagcccuacgugagcugcagccuggacaagugcuaccaguucgcccugggccagggcaccaccaugaagaacaagcacagcaacggcaccacccacgacagaaccccccacagaacccugcugaugaacgagcugggcgugcccuuccaccugggcaccaagcaggugugcaucgccuggagcagcagcagcugcuacgacggcaaggccuggcugcacaucugcgugaccggcgacgacaagaacgccaccgccagcaucaucuacgacggcaugcugguggacagcaucggcagcuggagcaagaacauccugagaacccaggagagcgagugcgugugcaucaacggcaccugcgccguggugaugaccgacggcagcgccagcggcaaggccgacaccagagugcuguucaucagagagggcaagaucaucaacaucagcccccugagcggcagcgcccagcacguggaggagugcagcugcuaccccagauaccccgaggugagaugcgugugcagagacaacuggaagggcagcaacagacccauccuguacaucaacauggccgacuacagcaucgagagcagcuacgugugcagcggccuggugggcgacacccccagaaacgacgacagcagcagcagcagcaacugcagaggccccaacaacgagagaggcgcccccggcgugaagggcugggccuucgacgacggcaacgacguguggaugggcagaaccaucaagaacggcagcagaagcggcuacgagaccuucagaguggugaacggcuggaccauggccaacagcaagagccagaucaacagacaggugaucguggacagcgacgacuggagcggcuacagcggcaucuucagcguggagggcaagaagugcaucaacagaugcuucuacguggagcugaucagaggcagaccccaggagcccagagugugguggaccagcaacagcaucaucguguucugcggcaccagcggcaccuacggcaccggcagcuggcccgacggcgccaacaucaacuucaugcccaucuga

SEQ ID NO: 183645 - RNA, 1401 nt, Artificial Sequence
  derived and/or modified CDS sequence (opt4) from neuraminidase__InfluenzaA__AGQ81807
augaaccccaaccagaagaucaccgccaucggcagcaucagccugaucaucgccaucaucugccugcugaugcagaucgccauccugaccaccaccaugacccugcacuucagacagaacgagugcagaaaccccagcaacaaccaggugaugcccugcgagcccgugaucaucgagagaaacaccgugcaccugaacagcaccaccaucgagagagagaucugccccaagguggccgaguacaagaacuggagcaagccccagugccagaucaccggcuucgcccccuucagcaaggacaacagcaucagacugagcgccagcggcgacaucugggugaccagagagcccuacgugagcugcagccugaacaagugcuaccaguucgcccugggccagggcaccacccugaagaacaagcacagcaacggcaccacccacgacagaaccccccacagaacccugcugaugaacgagcugggcgugcccuuccaccugggcaccaagcaggugugcaucgccuggagcagcagcagcugcuacgacggcaaggccuggcugcacaucugcgugaccggcgacgacaagaacgccaccgccagcaucaucuacgacggcaugcugguggacagcaucggcagcuggagcaagaacauccugagaacccaggagagcgagugcgugugcaucaacggcaccugcgccguggugaugaccgacggcagcgccagcggcaaggccgacaccagagugcuguucaucaaggagggcaagaucaucaacaucagcccccugagcggcagcgcccagcacguggaggagugcagcugcuaccccagauaccccgaggugagaugcgugugcagagacaacuggaagggcagcaacagacccauccuguacaucaacauggccgacuacagcaucgagagcagcuacgugugcagcggccuggugggcgacacccccagaaacgacgacagcagcagcagcagcaacugcagagaccccaacaacgagagaggcgcccccggcgugaagggcugggccuucgacgacggcaacgacguguggaugggcagaaccaucaagaacggcagcagaagcggcuacgagaccuucagaguggugaacggcuggaucauggccaacagcaagagccagaucaacagacaggugaucguggacagcgacgacuggagcggcuacagcggcaucuucagcguggagggcaagaagugcaucaacagaugcuucuacguggagcugaucagaggcagaccccaggagcccagagugugguggaccagcaacagcaucaucguguucugcggcaccagcggcaccuacggcaccggcagcuggcccgacggcgccaacaucaacuucaugcccaucuga

SEQ ID NO: 183646 - RNA, 1401 nt, Artificial Sequence
  derived and/or modified CDS sequence (opt4) from neuraminidase__InfluenzaA__AGQ81808
augaaccccaaccagaagaucaucgccaucggcagcgugagccugaccaucgccaucaucugcuuccugaugcagaucgccauccugaccaccaccaugacccugcacuucaagcagaacgagugcagcaaccccagcaacaaccagguggugcccugcgagcccauccugaucgagagaaacaccgugcaccugaacagcaccaccaucgagaaggaggugugccccaagguggccgaguacaagaacuggagcaagccccagugccagaucaccggcuucgcccccuucagcaaggacaacagcaucagacugagcgccggcggcgacaucugggugaccagagagcccuacgugagcugcagccugggcaagugcuaccaguucgcccugggccagggcaccacccugaagaacaaccacagcaacggcaccacccacgacagaaccccccacagaacccugcugaugaacgagcugggcgugcccuuccaccugggcaccaagcaggugugcaucgccuggagcagcagcagcugcuacgacggcaaggccuggcugcacaucugcgugaccggcgacgacaagaacgccaccgccagcaucaucuacgacggcaugcugguggacagcaucggcagcuggagcaagaacauccugagaacccaggagagcgagugcgugugcaucaacggcaccugcgccguggugaugaccgacggcagcgccagcggcaaggccgacaccagaauccuguucaucagagagggcaagaucaucaacaucagcccccugagcggcagcgcccagcacguggaggagugcagcugcuaccccagauaccccgaggugagaugcgugugcagagacaacuggaagggcagcaacagacccgugcuguacaucaacauggccgacuacagcguggagagcagcuacgugugcagcggccuggugggcgacacccccagaaacgacgacagcagcagcagcagcaacugcagagaccccaacaacgagagaggcgcccccggcgugaagggcugggccuucgacgacggcaacgacguguggaugggcagaaccaucagaaacaacagcagaagcggcuacgagaccuucagaguggugaacggcuggaccaccgccaacagcaagagccagaucaacagacagaucaucguggacagcgagaacuggagcggcuacagcggcaucuucagcguggagggcaagaacugcaucaacagaugcuucuacguggagcugaucagaggcagaccccaggagcccagagugugguggaccagcaacagcaucaucguguucugcggcaccagcggcaccuacggcaccggcagcuggcccgacggcgccaacaucaacuucaugcccaucuga

SEQ ID NO: 183647 - RNA, 1401 nt, Artificial Sequence
  derived and/or modified CDS sequence (opt4) from neuraminidase__InfluenzaA__AGQ81809
augaaccccaaccagaagaucaccgccaucggcagcgugagccugaucaucgccaucaucugccugcugaugcagaucgccauccugaccaccaccaugacccugcacuucagacagaacgagugcagcaaccccagcaacaaccaggugaugcccugcgagcccaucaucaucgagagaaacaccgugcaccugaacagcaccaccaucgagagagagaucugccccaagguggccgaguacaagaacuggagcaagccccagugccagaucaccggcuucgcccccuucagcaaggacaacagcaucagacugagcgccggcggcgacaucugggugaccagagagcccuacgugagcugcagccccgacaagugcuaccaguucgcccugggccagggcaccacccugaagaacaagcacagcaacggcaccacccacgacagaaccccccacagaacccugcugaugaacgagcugggcgugcccuuccaccugggcaccaagcaggugugcaucgccuggagcagcagcagcugcuacgacggcaaggccuggcugcacaucugcgugaccggcgacgacaagaacgccaccgccagcaucaucuacgacggcaugcugguggacagcaucggcagcuggagcaagaacauccugagaacccaggagagcgagugcgugugcaucaacggcaccugcgccguggugaugaccgacggcagcgccagcggcgaggccgacaccagaauccuguucaucagagagggcaagaucaucaacaucagcccccugagcggcagcgcccagcacguggaggagugcagcugcuaccccagauaccccgaggugagaugcgugugcagagacaacuggaagggcagcaacagacccaucaucuacaucaacaugguggacuacagcaucggcagcagauacgugugcagcggccuggugggcgacacccccagaaacgacgacagcaccagcagcagcaacugcagagaccccaacaacgagagaggcgcccccggcgugaagggcugggccuucgacgacggcaacgacguguggaugggcagaaccaucaagaacggcagcagaagcggcuacgagaccuucagagugaucaacggcuggaccauggccaacagcaagagccagaucaacagacaggugaucguggacagcgacaacuggagcggcuacagcggcaucuucagcguggagggcaagaagugcaucaacagaugcuucuacguggagcugaucagaggcagaccccaggagcccagagugugguggaccagcaacagcaucaucguguucugcggcaccagcggcaccuacggcaccggcagcuggcccgacggcgccgacaucaacuucaugcccaucuga

SEQ ID NO: 183648 - RNA, 1401 nt, Artificial Sequence
  derived and/or modified CDS sequence (opt4) from neuraminidase__InfluenzaA__AGQ81810
augaaccccaaccagaagauccuggccaucggcagcgugagccugaccaucgccaucaucugcuuccugaugcagaucgccauccugaccaccaccaugacccugcacuucaagcagaacgagugcagcaaccccagcaacaaccagguggugcccugcgagcccauccugaucgagagaaacaccgugcaccugaacagcaccaccaucgagaaggaggugugccccaagguggccgaguacaagaacuggagcaagccccagugccagaucaccggcuucgcccccuucagcaaggacaacagcaucagacugagcgccggcggcgacaucugggugaccagagagcccuacgugagcugcagccugggcaagugcuaccaguucgcccugggccagggcaccacccugaagaacaaccacagcaacggcaccacccacgacagaaccccccacagaacccugcugaugaacgagcugggcgugcccuuccaccugggcaccaagcaggugugcaucgccuggagcagcagcagcugcuacgacggcaaggccuggcugcacaucugcgugaccggcgacgacaagaacgccaccgccagcaucaucuacgacggcaugcugguggacagcaucggcagcuggagcaagaacauccugagaacccaggagagcgagugcgugugcaucaacggcaccugcgccguggugaugaccgacggcagcgccagcggcaaggccgacaccagaauccuguucaucagagagggcaagaucaucaacaucagcccccugagcggcagcgcccagcacguggaggagugcagcugcuaccccagauaccccgaggugagaugcgugugcagagacaacuggaagggcagcaacagacccgugcuguacaucaacauggccgacuacagcaucgagagcagcuacgugugcagcggccuggugggcgacacccccagaaacgacgacagcagcagcagcagcaacugcagagaccccaacaacgagagaggcgcccccggcgugaagggcugggccuucgacgacggcaacgacguguggaugggcagaaccaucagaaacaacagcagaagcggcuacgagaccuucagaguggugaacggcuggaccaccgccaacagcaagagccagaucaacagacaggugaucguggacagcgagaacuggagcggcuacagcggcaucuucagcguggagggcaagaacugcaucaacagaugcuucuacguggagcugaucagaggcagaccccaggagcccagagugugguggaccagcaacagcaucaucguguucugcggcaccagcggcaccuacggcaccggcagcuggcccgacggcgccaacaucaacuucaugcccaucuga

SEQ ID NO: 183649 - RNA, 1401 nt, Artificial Sequence
  derived and/or modified CDS sequence (opt4) from neuraminidase__InfluenzaA__AGQ81811
augaaccccaaccagaagaucaucgccaucggcagcgugagccugaccaucgccaucaucugcuuccugaugcagaucgccauccugaccaccaccaugacccugcacuucaagcagaacgagugcagcaaccccagcaacaaccagguggugcccugcgagcccauccugaucgagagaaacaccgugcaccugaacagcaccaccaucgagaaggaggugugccccaagguggccgaguacaagaacuggagcaagccccagugccagaucaccggcuucgcccccuucagcaaggacaacagcaucagacugagcgccggcggcgacaucugggugaccagagagcccuacgugagcugcagccugggcaagugcuaccaguucgcccugggccagggcaccacccugaagaacaagcacagcaacggcaccacccacgacagaaccccccacagaacccugcugaugaacgagcugggcgugcccuuccaccugggcaccaagcaggugugcaucgccuggagcagcagcagcugcuacgacggcaaggccuggcugcacaucugcgugaccggcgacgacaagaacgccaccgccagcaucaucuacgacggcaugcugguggacagcaucggcagcuggagcaagaacauccugagaacccaggagagcgagugcgugugcaucaacggcaccugcgccguggugaugaccgacggcagcgccagcggcaaggccgacaccagaauccuguucaucagagagggcaagaucgugaacaucagcccccugagcggcagcgcccagcacguggaggagugcagcugcuaccccagauaccccgaggugagaugcgugugcagagacaacuggaagggcagcaacagacccgugcuguacaucaacauggccgacuacagcguggagagcagcuacgugugcagcggccuggugggcgacacccccagaaacgacgacagcuucagcagcagcaacugcagagaccccaacaacgagagaggcgcccccggcgugaagggcugggccuucgacgacggcaacgacguguggaugggcagaaccaucagaaacgacagcagaagcggcuacgagaccuucagaguggugaacggcuggaccaccgccaacagcaagagccagaucaacagacaggugaucguggacagcgagagcuggagcggcuacagcggcaucuucagcguggagggcaagaacugcaucaacagaugcuucuacguggagcugaucagaggcagaccccaggagcccagagugugguggaccagcaacagcaucaucguguucugcggcaccagcggcaccuacggcaccggcagcuggcccgacggcgccaacaucaacuucaugcccaucuga

SEQ ID NO: 183650 - RNA, 1410 nt, Artificial Sequence
  derived and/or modified CDS sequence (opt4) from neuraminidase__InfluenzaA__AGQ81812
augaaccccaaccagaagaucaucaccaucggcagcgugagccugaccaucgccaccaucugcuuccugaugcagaucgccauccuggugaccaccaucacccugcacuucaagcagaacgagugcagcauccccagcaacaaccagguggugcccugcgagcccaucaucguggagagaaacaucaccgagaucguguaccugaacaacaccaccaucgagaaggagcugugccccaagcugaccgaguacagagacuggagcaagccccagugccagaucaccggcuucgcccccuucagcaaggacaacagcaucagacugagcgccggcggcgacaucugggugaccagagagcccuacgugagcugcagccccaacaagugcuaccaguucgcccugggccagggcaccacccuggacaacaagcacagcaacggcaccauccacgacagaaucccccacagaacccugcugaugaacgagcugggcgugcccuuccaccugggcaccaagcaggugugcaucgccuggagcagcagcagcugccacgacggcaaggccuggcugcacgugugcgugaccggcgacgacagaaacgccaccgccagcuucaucuacgacggcaugcugguggacagcaucggcagcuggagccagaacauccugagaacccaggagagcgagugcgugugcaucaacggcaccugcaccguggugaugaccgacggcagcgccagcggcagagccgacaccagaauccuguucaucaaggagggcaagaucgugcacgugagcccccugagcggcagcgcccagcacaucgaggagugcagcugcuaccccagauaccccgacgugagaugcgugugcagagacaacuggaagggcagcaacagacccaucaucgacaucaacguggccgacuacagcaucgacagcagcuacgugugcagcggccuggugggcgacacccccagaaacgacgacagcagcagcaacagcaacugcaaggaccccaacaacgagagaggcaaccccggcgugaagggcugggccuucgacuacggcaacgacguguggaugggcagaaccaucagcaaggacagcagaagcggcuacgagaccuucagagugaucggcggcuggaccaccgccaacagcaagagccaggugaacagacaggugaucguggacaacaacaacuggagcggcuacagcggcaucuucagcguggagggcaagagcugcaucaacagaugcuucuacguggagcugaucagaggcagaccccaggagaccagagugugguggaccagcaacagcaucgugguguucugcggcaccagcggcaccuacggcaccggcagcuggcccgacggcgccaacaucaacuucaugcccaucuga

SEQ ID NO: 183651 - RNA, 1401 nt, Artificial Sequence
  derived and/or modified CDS sequence (opt4) from neuraminidase__InfluenzaA__AGQ81814
augaaccccaaccagaagaucaucgccaucggcagcgugagccugaccaucgccaucaugugcuuccugaugcagaucgccauccugaccaccaccaugacccugcacuucaagcagaacgagugcagcaaccccagcaacaaccagguggugcccugcgagcccauccugaucgagagaaacaccgugcaccugaacagcaccaccaucgagaaggaggugugccccaagguggccgaguacaagaacuggagcaagccccagugccagaucaccggcuucgcccccuucagcaaggacaacagcaucagacugagcgccggcggcgacaucugggugaccagagagcccuacgugagcugcagccugggcaagugcuaccaguucgcccugggccagggcaccacccugaagaacaaccacagcaacggcaccacccacgacagaaccccccacagaacccugcugaugaacgagcugggcgugcccuuccaccugggcaccaagcaggugugcaucgccuggagcagcagcagcugcuacgacggcaaggccuggcugcacaucugcgugaccggcgacgacaagaacgccaccgccagcaucaucuacgacggcaugcugguggacagcaucggcagcuggagcaagaacauccugagaacccaggagagcgagugcgugugcaucaacggcaccugcgccguggugaugaccgacggcagcgccagcggcaaggccgacaccagaauccuguucaucagagagggcaagaucaucaacaucagcccccugagcggcagcgcccagcacguggaggagugcagcugcuaccccagauaccccgaggugagaugcgugugcagagacaacuggaagggcagcaacagacccgugcuguacaucaacauggccgacuacagcguggagagcagcuacgugugcagcggccuggugggcgacacccccagaaacgacgacagcagcagcagcagcaacugcagagaccccaacaacgagagaggcgcccccggcgugaagggcugggccuucgacgacggcaacgacguguggaugggcagaaccaucagaaacaacagcagaagcggcuacgagaccuucagaguggugaacggcuggaccaccgccaacagcaagagccagaucaacagacaggugaucguggacagcgagaacuggagcggcuacagcggcaucuucagcguggagggcaagaacugcaucaacagaugcuucuacguggagcugaucagaggcagaccccaggagcccagagugugguggaccagcaacagcaucaucguguucugcggcaccagcggcaccuacggcaccggcagcuggcccgacggcgccaacaucaacuucaugcccaucuga

SEQ ID NO: 183652 - RNA, 1401 nt, Artificial Sequence
  derived and/or modified CDS sequence (opt4) from neuraminidase__InfluenzaA__AGQ81815
augaaccccaaccagaagaucaucgccaucggcagcgugagccugaccaucgccaucaucugcuuccugaugcagaucgccauccugaccaccaccaugacccugcacuucaagcagaacgagugcagcaaccccagcaacaaccagguggugcccugcgagcccauccugaucgagagaaacaccgugcaccugaacagcaccaccaucgagaaggaggugugccccaagguggccgaguacaagaacuggagcaagccccagugccagaucaccggcuucgcccccuucagcaaggacaacagcaucagacugagcgccggcggcgacaucugggugaccagagagcccuacgugagcugcagccugggcaagugcuaccaguucgcccugggccagggcaccacccugaagaacaagcacagcaacggcaccacccacgacagaaccccccacagaacccugcugaugaacgagcugggcgugcccuuccaccugggcaccaagcaggugugcaucgccuggagcagcagcagcugcuacgacggcaaggccuggcugcacaucugcgugaccggcgacgacaagaacgccaccgccagcaucaucuacgacggcaugcugguggacagcaucggcagcuggagcaagaacauccugagaacccaggagagcgagugcgugugcaucaacggcaccugcgccguggugaugaccgacggcagcgccagcggcaaggccgacaccagaauccuguucaucagagagggcaagaucaucaacaucagcccccugagcggcagcgcccagcacguggaggagugcagcugcuaccccagauaccccgaggugagaugcgugugcagagacaacuggaagggcagcaacagacccgugcuguacaucaacauggccgacuacagcguggagagcagcuacgugugcagcggccuggugggcgacacccccagaaacgacgacagcagcagcagcagcaacugcagagaccccaacaacgagagaggcacccccggcgugaagggcugggccuucgacgacggcaacgacguguggaugggcagaaccaucagaaacgacagcagaagcggcuacgagaccuucagagugaucaacggcuggaccaccgccaacagcaagagccagaucaacagacaggugaucguggacagcgagaacuggagcggcuacagcggcaucuucagcguggagggcaagaacugcaucaacagaugcuucuacguggagcugaucagaggcagaccccaggagcccagagugugguggaccagcaacagcaucaucguguucugcggcaccagcggcaccuacggcaccggcagcuggcccgacggcgccaacaucaacuacaugcccaucuga

SEQ ID NO: 183653 - RNA, 1401 nt, Artificial Sequence
  derived and/or modified CDS sequence (opt4) from neuraminidase__InfluenzaA__AGQ81816
augaaccccaaccagaagaucaucgccaucggcagcgugagccugaccaucgccaucaucugcuuccugaugcagaucgccauccugaccaccaccaugacccugcacuucaagcagaacggcugcagcaaccccagcaacaaccagguggugcccugcgagcccauccugaucgagagaaacaccgugcaccugaacagcaccaccaucgagaaggaggugugccccaagguggccgaguacaagaacuggagcaagccccagugccagaucaccggcuucgcccccuucagcaaggacaacagcaucagacugagcgccggcggcgacaucugggugaccagagagcccuacgugagcugcagccugggcaagugcuaccaguucgcccugggccagggcaccacccugaagaacaagcacagcaacggcaccacccacgacagaaccccccacagaacccugcugaugaacgagcugggcgugcccuuccaccugggcaccaagcaggugugcaucgccuggagcagcagcagcugcuacgacggcaaggccuggcugcacaucugcgugaccggcgacgacaagaacgccaccgccagcaucaucuacgacggcaugcugguggacagcaucggcagcuggagcaagaacauccugagaacccaggagagcgagugcgugugcaucaacggcaccugcgccguggugaugaccgacggcagcgccagcggcaaggccgacaccagaauccuguucaucagagagggcaagaucaucaacaucagcccccugagcggcagcgcccagcacguggaggagugcagcugcuaccccagauaccccgaggugagaugcgugugcagagacaacuggaagggcagcaacagacccgugcuguacaucaacauggccgacuacagcguggagagcagcuacgugugcagcggccuggugggcgacacccccagaaacgacgacagcagcagcagcagcaacugcagagaccccaacaacgagagaggcacccccggcgugaagggcugggccuucgacgacggcaacgacguguggaugggcagaaccaucagaaacgacagcagaagcggcuacgagaccuucagagugaucaacggcuggaccaccgccaacagcaagagccagaucaacagacaggugaucguggacagcgagaacuggagcggcuacagcggcaucuucagcguggagggcaagaacugcaucaacagaugcuucuacguggagcugaucagaggcagaccccaggagcccagagugugguggaccagcaacagcaucaucguguucugcggcaccagcggcaccuacggcaccggcagcuggcccgacggcgccaacaucaacuacaugcccaucuga

SEQ ID NO: 183654 - RNA, 1401 nt, Artificial Sequence; identical to SEQ ID NO: 183652
  derived and/or modified CDS sequence (opt4) from neuraminidase__InfluenzaA__AGQ81817

SEQ ID NO: 183655 - RNA, 1401 nt, Artificial Sequence; identical to SEQ ID NO: 183652
  derived and/or modified CDS sequence (opt4) from neuraminidase__InfluenzaA__AGQ81818

SEQ ID NO: 183656 - RNA, 1401 nt, Artificial Sequence; identical to SEQ ID NO: 183652
  derived and/or modified CDS sequence (opt4) from neuraminidase__InfluenzaA__AGQ81819

SEQ ID NO: 183657 - RNA, 1401 nt, Artificial Sequence
  derived and/or modified CDS sequence (opt4) from neuraminidase__InfluenzaA__AGQ81820
augaaccccaaccagaagaucaucgccaucggcagcgugagccugaccaucgccaucaucugcuuccugaugcagaucgccauccugaccaccaccaugacccugcacuucaagcagaacgagugcagcaaccccagcaacaaccagguggugcccugcgagcccauccugaucgagagaaacaccgugcaccugaacagcaccaccaucgagaaggaggugugccccaagguggccgaguacaagaacuggagcaagccccagugccagaucaccggcuucgcccccuucagcaaggacaacagcaucagacugagcgccggcggcgacaucugggugaccagagagcccuacgugagcugcagccugggcaagugcuaccaguucgcccugggccagggcaccacccugaagaacaagcacagcaacggcaccacccacgacagaaccccccacagaacccugcugaugaacgagcugggcgugcccuuccaccugggcaccaagcaggugugcaucgccuggagcagcagcagcugcuacgacggcaaggccuggcugcacaucugcgugaccggcgacgacaagaacgccaccgccagcaucaucuacgacggcaugcugguggacagcaucggcagcuggagcaagaacauccugagaacccaggagagcgagugcgugugcaucaacggcaccugcgccguggugaugaccgacggcagcgccagcggcaaggccgacaccagaauccuguucaucagagagggcaagaucaucaacaucagcccccugagcggcagcgcccagcacguggaggagugcagcugcuaccccagauaccccgaggugagaugcgugugcagagacaacuggaagggcagcaacagacccgugcuguacaucaacauggccgacuacagcaucgagagcagcuacgugugcagcggccuggugggcgacacccccagaaacgacgacagcagcagcagcagcaacugcagagaccccaacaacgagagaggcacccccggcgugaagggcugggccuucgacgacggcaacgacguguggaugggcagaaccaucagaaacgacagcagaagcggcuacgagaccuucagagugaucaacggcuggaccaccgccaacagcaagagccagaucaacagacaggugaucguggacagcgagaacuggagcggcuacagcggcaucuucagcguggagggcaagaacugcaucaacagaugcuucuacguggagcugaucagaggcagaccccaggagcccaaggugugguggaccagcaacagcaucaucguguucugcggcaccagcggcaccuacggcaccggcagcuggcccgacggcgccaacaucaacuucaugcccaucuga

SEQ ID NO: 183658 - RNA, 1401 nt, Artificial Sequence
  derived and/or modified CDS sequence (opt4) from neuraminidase__InfluenzaA__AGQ81822
augaaccccaaccagaagaucaucgccaucggcagcgugagccugaccaucgccaucaucugcuuccugaugcagaucgccauccugaccaccaccaugacccugcacuucaagcagaacgagugcagcaaccccagcaacaaccagguggugcccugcgagcccauccugaucgagagaaacaccgugcaccugaacagcaccaccaucgagaagaaggugugccccaagguggccgaguacaagaacuggagcaagccccagugccagaucaccggcuucgcccccuucagcaaggacaacagcaucagacugagcgccggcggcgacaucugggugaccagagagcccuacgugagcugcagccugggcaagugcuaccaguucgcccugggccagggcaccacccugaagaacaagcacagcaacggcaccacccacgacagaaccccccacagaacccugcugaugaacgagcugggcgugcccuuccaccugggcaccaagcaggugugcaucgccuggagcagcagcagcugcuacgacggcaaggccuggcugcacaucugcgugaccggcgacgacaagaacgccaccgccagcaucaucuacgacggcaugcugguggacagcaucggcagcuggagcaagaacauccugagaacccaggagagcgagugcgugugcaucaacggcaccugcgccguggugaugaccgacggcagcgccagcggcaaggccgacaccagaauccuguucaucagagagggcaagaucaucaacaucagcccccugagcggcagcgcccagcacguggaggagugcagcugcuaccccagauaccccgaggugagaugcgugugcagagacaacuggaagggcagcaacagacccgugcuguacaucaacauggccgacuacagcguggagagcagcuacgugugcagcggccuggugggcgacacccccagaaacgacgacagcagcagcagcagcaacugcagagaccccaacaacgagagaggcacccccggcgugaagggcugggccuucgacgacggcaacgacguguggaugggcagaaccaucagaaacgacagcagaagcggcuacgagaccuucagagugaucaacggcuggaccaccgccaacagcaagagccagaucaacagacaggugaucguggacagcgagaacuggagcggcuacagcggcaucuucagcguggagggcaagaacugcaucaacagaugcuucuacguggagcugaucagaggcagaccccaggagcccagagugugguggaccagcaacagcaucaucguguucugcggcaccagcggcaccuacggcaccggcagcuggcccgacggcgccaacaucaacuacaugcccaucuga

SEQ ID NO: 183659 - RNA, 1401 nt, Artificial Sequence
  derived and/or modified CDS sequence (opt4) from neuraminidase__InfluenzaA__AGQ81823
augaaccccaaccagaagaucaucgccaucggcagcgugagccugaccaucgccaucaucugcuuccugaugcagaucgccauccugaccaccaccaugacccugcacuucaagcagaacgagugcagcaaccccagcaacaaccagguggugcccugcgagcccauccugaucgagagaaacaccgugcaccugaacagcaccaccaucgagaaggaggugugccccaagguggccgaguacaagaacuggagcaagccccagugccagaucaccggcuucgcccccuucagcaaggacaacagcaucagacugagcgccggcggcgacaucugggugaccagagagcccuacgugagcugcagccugggcaagugcuaccaguucgcccugggccagggcaccacccugaagaacaagcacagcaacggcaccacccacgacagaaccccccacagaacccugcugaugaacgagcugggcgugcccuuccaccugggcaccaagcaggugugcaucgccuggagcagcagcagcugcuacgacggcaaggccuggcugcacaucugcgugaccggcgacgacaagaacgccaccgccagcaucaucuacgacggcaugcugguggacagcaucggcagcuggagcaagaacauccugagaacccaggagagcgagugcgugugcaucaacggcaccugcgccguggugaugaccgacggcagcgccagcggcaaggccgacaccagaauccuguucaucagagagggcaagaucaucaacaucagcccccugagcggcagcgcccagcacguggaggagugcagcugcuaccccagauaccccgaggugagaugcgugugcagagacaacuggaagggcagcaacagacccgugcuguacaucaacauggccgacuacagcguggagagcagcuacgugugcagcggccuggugggcgacacccccagaaacgacgacagcagcagcagcagcaacugcagagaccccaacaacgagagaggcgcccccggcgugaagggcugggccuucgacgacggcaacgacguguggaugggcagaaccaucagaaacgacagcagaagcggcuacgagaccuucagaguggugaacggcuggaccaccgccaacagcaagagccagaucaacagacaggugaucguggacagcgagaacuggagcggcuacagcggcaucuucagcguggagggcaagaacugcaucaacagaugcuucuacguggagcugaucagaggcagaccccaggagcccagagugugguggaccagcaacagcaucaucguguucugcggcaccagcggcaccuacggcaccggcagcuggcccgacggcgccaacaucaacuucaugcccaucuga

SEQ ID NO: 183660 - RNA, 1401 nt, Artificial Sequence; identical to SEQ ID NO: 183659
  derived and/or modified CDS sequence (opt4) from neuraminidase__InfluenzaA__AGQ81824

SEQ ID NO: 183661 - RNA, 1401 nt, Artificial Sequence; identical to SEQ ID NO: 183659
  derived and/or modified CDS sequence (opt4) from neuraminidase__InfluenzaA__AGQ81825

SEQ ID NO: 183662 - RNA, 1401 nt, Artificial Sequence
  derived and/or modified CDS sequence (opt4) from neuraminidase__InfluenzaA__AGQ81831
augaaccccaaccagaagauccuggccaucggcagcgugagccugaccaucgccaucaucugcuuccugaugcagaucgccauccugaccaccaccaugacccugcacuucaagcagaacgagugcagcaaccccagcaacaaccagguggugcccugcgagcccauccugaucgagagaaacaccgugcaccugaacagcaccaccaucgagaaggaggugugccccaagguggccgaguacaagaacuggagcaagccccagugccagaucaccggcuucgcccccuucagcaaggacaacagcaucagacugagcgccggcggcgacaucugggugaccagagagcccuacgugagcugcagccugggcaagugcuaccaguucgcccugggccagggcaccacccugaagaacaagcacagcaacggcaccacccacgacagaaccccccacagaacccugcugaugaacgagcugggcgugcccuuccaccugggcaccaagcaggugugcaucgccuggagcagcagcagcugcuacgacggcaaggccuggcugcacaucugcgugaccggcgacgacaagaacgccaccgccagcaucaucuacgacggcaugcugguggacagcaucggcagcuggagcaagaacauccugagaacccaggagagcgagugcgugugcaucaacggcaccugcgccguggugaugaccgacggcagcgccagcggcaaggccgacaccagaauccuguucaucagagagggcaagaucgugaacaucagcccccugagcggcagcgcccagcacguggaggagugcagcugcuaccccagauaccccgaggugagaugcgugugcagagacaacuggaagggcagcaacagacccgugcuguacaucaacauggccgacuacagcguggagagcagcuacgugugcagcggccuggugggcgacacccccagaaacgacgacagcuucagcagcagcaacugcagagaccccaacaacgagagaggcgcccccggcgugaagggcugggccuucgacgacggcaacgacguguggaugggcagaaccaucagaaacgacagcagaagcggcuacgagaccuucagaguggugaacggcuggaccaccgccaacagcaagagccagaucaacagacaggugaucguggacagcgagagcuggagcggcuacagcggcaucuucagcguggagggcaagaacugcaucaacagaugcuucuacguggagcugaucagaggcagaccccaggagcccagagugugguggaccagcaacagcaucaucguguucugcggcaccagcggcaccuacggcaccggcagcuggcccgacggcgccaacaucaacuucaugcccaucuga

SEQ ID NO: 183663 - RNA, 1401 nt, Artificial Sequence; identical to SEQ ID NO: 183652
  derived and/or modified CDS sequence (opt4) from neuraminidase__InfluenzaA__AGQ81837

SEQ ID NO: 183664 - RNA, 1401 nt, Artificial Sequence; identical to SEQ ID NO: 183652
  derived and/or modified CDS sequence (opt4) from neuraminidase__InfluenzaA__AGQ81838

SEQ ID NO: 183665 - RNA, 1401 nt, Artificial Sequence; identical to SEQ ID NO: 183659
  derived and/or modified CDS sequence (opt4) from neuraminidase__InfluenzaA__AGQ81839

SEQ ID NO: 183666 - RNA, 1401 nt, Artificial Sequence; identical to SEQ ID NO: 183659
  derived and/or modified CDS sequence (opt4) from neuraminidase__InfluenzaA__AGQ81840

SEQ ID NO: 183667 - RNA, 1401 nt, Artificial Sequence; identical to SEQ ID NO: 183652
  derived and/or modified CDS sequence (opt4) from neuraminidase__InfluenzaA__AGQ81841

SEQ ID NO: 183668 - RNA, 1410 nt, Artificial Sequence
  derived and/or modified CDS sequence (opt4) from neuraminidase__InfluenzaA__AGQ81843
augaaccccaaccagaagaucaucaccaucggcguggugaacaccacccugagcaccaucgcccugcugaucggcaucggcaaccugaucuucaacaccgugauccacgagaagaucggcgugcaccagaccgugguguaccccaccaucaccccccccgugauccccaacugcagcgacaccaccaucaccuacaacaacaccguggugaacaacaucaccaccaccaucaucaacaaggccgagaagcaguucaagcccagccugccccugugccccuucagaggcuucuuccccuuccacaaggacaacgccaucagacugggcgagaacaaggacgugaucgugaccagagagcccuacgugagcugcgacaacgacgacugcuggagcuucgcccuggcccagggcgcccugcugggcaccaagcacagcaacggcaccaucaaggacagaacccccuacagaagccugaucagauuccccaucggcaccgcccccgugcugggcaacuacaaggagaucugcguggccuggagcagcagcagcugcuucgacggcaaggaguggaugcacgugugcaugaccggcaacgacaacgacgccagcggccagaucaucuacgccggcaagaugaccgacagcaucaagagcuggagaagagacauccugagaacccaggagagcgagugccagugcaucgacggcaccugcaucguggccgugaccgacggccccgccgccagcagcgccgaccacagaaucuacuggaucagagagggcaagaucaucaaguacgaggacauccccaagaccaagauccagcaccuggaggagugcagcugcuacguggacaccgacguguacugcaucugcagagacaacuggaagggcagcaacagacccuggaugagaaucaacaacgagaccauccuggagaccggcuacgugugcagcaaguuccacagcgacacccccagacccgccgaccccagcaccgugagcugcgacagccccagcaacaucaacggcggccccggcgugaagggcuucggcuucagagccggcaacgacguguggcugggcagaaccgugagcaccaccggcagaagcggcuucgaggugaucaaggugaccgagggcuggaucaacagccugaaccacgccaagagcgugacccagacccuggugagcaacaacgacuggagcggcuacagcggcagcuucaucguggagaacaacggcugcuuccagcccugcuucuacaucgagcugaucagaggcagacccaacagaaacgacgacgugagcuggaccagcaacagcaucgugaccuucugcggccuggacaacgagcccggcagcggcaacuggcccgacggcagcaacaucggcuucaugcccaaguga

SEQ ID NO: 183669 - RNA, 1410 nt, Artificial Sequence
  derived and/or modified CDS sequence (opt4) from neuraminidase__InfluenzaA__AGQ81845
augaaccccaaccagaagaucaucaccaucggcguggugaacaccacccugagcaccaucgcccugcugaucggcaucggcaaccugaucuucaacaccgugauccacgagaagaucggcgugcaccagaccgugaucuaccccaccaucaccagccccguggugcccaacugcagcgacaccaccaucaccuacaacaacaccguggugaacaacaucaccaccaccgugaucaacaaggccgagaagcacuucaagcccagccugccccugugccccuucaagggcuucuuccccuuccacaaggacaacgccaucagacugggcgagaacaaggacgugaucgugaccagagagcccuacgugagcugcgacaacgacgacugcuggagcuucgcccuggcccagggcgcccugcugggcaccaagcacagcaacggcaccaucaaggacagaacccccuacagaagccugaucagauuccccaucggcaccgcccccgugcugggcaacuacaaggagaucugcguggccuggagcagcagcagcugcuucgacggcaaggaguggaugcacgugugcaugaccggcaacgacaacgacgccagcggccagaucaucuacgccggcaagaugaccgacagcaucaagagcuggagaagagacauccugagaacccaggagagcgagugccagugcaucgacggcaccugcaucguggccgugaccgacggccccgccgccaacagcgccgaccacagaaucuacuggaucagagagggcaagaucaucaaguacgagaacauccccaagaccaagauccagcaccuggaggagugcagcugcuacguggacaccgacguguacugcaucugcagagacaacuggaagggcagcaacagacccuggaugagaaucaacaacgagaccauccuggagaccggcuacgugugcagcaaguuccacagcgacacccccagacccgccgaccccagcaccgugagcugcgacagccccagcaacaucaacggcggccccggcgugaagggcuucggcuucagaaccggcaacgacguguggcugggcagaaccgugagcaccaccggcagaagcggcuucgaggugaucaaggugaccgagggcuggaucaacagccugaaccacgccaagagcgugacccagacccuggugagcaacagcgacuggagcggcuacagcggcagcuucaucguggagaacaacggcugcuuccagcccugcuucuacaucgagcugaucagaggcagacccaacaagaacgacgacgugagcuggaccagcaacagcaucgugaccuucugcggccuggacaacgagcccggcagcggcaacuggcccgacggcagcaacaucggcuucaugcccaaguga

SEQ ID NO: 183670 - RNA, 1410 nt, Artificial Sequence; identical to SEQ ID NO: 183669
  derived and/or modified CDS sequence (opt4) from neuraminidase__InfluenzaA__AGQ81846

SEQ ID NO: 183671 - RNA, 1410 nt, Artificial Sequence; identical to SEQ ID NO: 183669
  derived and/or modified CDS sequence (opt4) from neuraminidase__InfluenzaA__AGQ81847

SEQ ID NO: 183672 - RNA, 1410 nt, Artificial Sequence
  derived and/or modified CDS sequence (opt4) from neuraminidase__InfluenzaA__AGQ81848
augaaccccaaccagaagaucaucaccaucggcguggugaacaccacccugagcaccaucgcccugcugaucggcaucggcaaccugaucuucaacaccgugauccacgagaagaucggcgugcaccagaccgugaucuaccccaccaucaccagccccguggugcccaacugcagcgacaccaccaucaccuacaacaacaccguggugaacaacaucaccaccaccgugaucaacaaggccgagaagcacuucaagcccagccugccccugugccccuucaagggcuucuuccccuuccacaaggacaacgccaucagacugggcgagaacaaggacgugaucgugaccagagagcccuacgugagcugcgacaacgacgacugcuggagcuucgcccuggcccagggcgcccugcugggcaccaagcacagcaacggcaccaucaaggacagaacccccuacagaagccugaucagauuccccaucggcaccgcccccgugcugggcaacuacaaggagaucugcguggccuggagcagcagcagcugcuucgacggcaaggaguggaugcacgugugcaugaccggcaacgacaacgacgccagcggccagaucaucuacgccggcaagaugaccgacagcaucaagagcuggagaagagacauccugagaacccaggagagcgagugccagugcaucgacggcaucugcaucguggccgugaccgacggccccgccgccaacagcgccgaccacagaaucuacuggaucagagagggcaagaucaucaaguacgagaacauccccaagaccaagauccagcaccuggaggagugcagcugcuacguggacaccgacguguacugcaucugcagagacaacuggaagggcagcaacagacccuggaugagaaucaacaacgagaccauccuggagaccggcuacgugugcagcaaguuccacagcgacacccccagacccgccgaccccagcaccgugagcugcgacagccccagcaacaucaacggcggccccggcgugaagggcuucggcuucagaaccggcaacgacguguggcugggcagaaccgugagcaccaccggcagaagcggcuucgaggugaucaaggugaccgagggcuggaucaacagccugaaccacgccaagagcgugacccagacccuggugagcaacagcgacuggagcggcuacagcggcagcuucaucguggagaacaacggcugcuuccagcccugcuucuacaucgagcugaucagaggcagacccaacaagaacgacgacgugagcuggaccagcaacagcaucgugaccuucugcggccuggacaacgagcccggcagcggcaacuggcccgacggcagcaacaucggcuucaugcccaaguga

SEQ ID NO: 183673 - RNA, 1410 nt, Artificial Sequence
  derived and/or modified CDS sequence (opt4) from neuraminidase__InfluenzaA__AGQ81850
augaaccccaaccagaagaucaucaccaucggcguggugaacaccacccugagcaccaucgcccugcugaucggcaucggcaaccugaucuucaacaccgugauccacgagaagaucggcgugcaccagaccgugaucuaccccaccaucaccagccccguggugcccaacugcagcgacaccaccaucaccuacaacaacaccguggugaacaacaucaccaccaccgugaucaacaaggccgagaagcacuucaagcccagccugccccugugccccuucaagggcuucuuccccuuccacaaggacaacgccaucagacugggcgagaacaaggacgugaucgugaccagagagcccuacgugagcugcgacaacgacgacugcuggagcuucgcccuggcccagggcgcccugcugggcaccaagcacagcaacggcaccaucaaggacagaacccccuacagaagccugaucagauuccccaucggcaccgcccccgugcugggcaacuacaaggagaucugcguggccuggagcagcagcagcugcuucgacggcaaggaguggaugcacgugugcaugaccggcaacgacaacgacgccaccggccagaucaucuacgccggcaagaugaccgacagcaucaagagcuggagaagagacauccugagaacccaggagagcgagugccagugcaucgacggcaccugcaucguggccgugaccgacggccccgccgccaacagcgccgaccacagaaucuacuggaucagagagggcaagaucaucaaguacgagaacauccccaagaccaagauccagcaccuggaggagugcagcugcuacguggacaccgacguguacugcaucugcagagacaacuggaagggcagcaacagacccuggaugagaaucaacaacgagaccauccuggagaccggcuacgugugcagcaaguuccacagcgacacccccagacccgccgaccccagcaccgugagcugcgacagccccagcaacaucaacggcggccccggcgugaagggcuucggcuucagaaccggcaacgacguguggcugggcagaaccgugagcaccaccggcagaagcggcuucgaggugaucaaggugaccgagggcuggaucaacagccugaaccacgccaagagcgugacccagacccuggugagcaacagcgacuggagcggcuacagcggcagcuucaucguggagaacaacggcugcuuccagcccugcuucuacaucgagcugaucagaggcagacccaacaagaacgacgacgugagcuggaccagcaacagcaucgugaccuucugcggccuggacaacgagcccggcagcggcaacuggcccgacggcagcaacaucggcuucaugcccaaguga

SEQ ID NO: 183674 - RNA, 1410 nt, Artificial Sequence
  derived and/or modified CDS sequence (opt4) from neuraminidase__InfluenzaA__AGQ81852
augaaccccaaccagaagaucaucaccaucggcguggugaacaccacccugagcaccaucgcccugcugaucggcaucggcaaccugaucuucaacaccgugauccacgagaagaucggcgugcaccagaccgugaccuaccccaccaucaccagccccguggugcccaacugcagcgacaccaccaucaccuacaacaacaccguggugaacaacaucaccaccaccgugaucaacaaggccgagaagcacuucaagcccagccugccccugugccccuucaagggcuucuuccccuuccacaaggacaacgccaucagacugggcgagaacaaggacgugaucgugaccagagagcccuacgugagcugcgacaacgacgacugcuggagcuucgcccuggcccagggcgcccugcugggcaccaagcacagcaacggcaccaucaaggacagaacccccuacagaagccugaucagauuccccaucggcaccgcccccgugcugggcaacuacaaggagaucugcguggccuggagcagcagcagcugcuucgacggcaaggaguggaugcacgugugcaugaccggcaacgacaacgacgccaccggccagaucaucuacgccggcaagaugaccgacagcaucaagagcuggagaagagacauccugagaacccaggagagcgagugccagugcaucgacggcaccugcaucguggccgugaccgacggccccgccgccaacagcgccgaccacagaaucuacuggaucagagagggcaagaucaucaaguacgagaacauccccaagaccaagauccagcaccuggaggagugcagcugcuacguggacaccgacguguacugcaucugcagagacaacuggaagggcagcaacagacccuggaugagaaucaacaacgagaccauccuggagaccggcuacgugugcagcaaguuccacagcgacacccccagacccgccgaccccagcaccgugagcugcgacagccccagcaacaucaacggcggccccggcgugaagggcuucggcuucagaaccggcaacgacguguggcugggcagaaccgugagcaccaccggcagaagcggcuucgaggugaucaaggugaccgagggcuggaucaacagccugaaccacgccaagagcgugacccagacccuggugagcaacagcgacuggagcggcuacagcggcagcuucaucguggagaacaacggcugcuuccagcccugcuucuacaucgagcugaucagaggcagacccaacagaaacgacgacgugagcuggaccagcaacagcaucgugaccuucugcggccuggacaacgagcccggcagcggcaacuggcccgacggcagcaacaucggcuucaugcccaaguga

SEQ ID NO: 183675 - RNA, 1410 nt, Artificial Sequence
  derived and/or modified CDS sequence (opt4) from neuraminidase__InfluenzaA__AGQ81853
augaaccccaaccagaagaucaucaccaucggcguggugaacaccacccugagcaccaucgcccugcugaucggcaucggcaaccugaucuucaacaccgugauccacgagaagaucggcgugcaccagaccgugaccuaccccaccaucaccagccccguggugcccaacugcagcgacaccaccaucaccuacaacaacaccguggugaacaacaucaccaccaccgugaucaacaaggccgagaagcacuucaagcccagccugccccugugccccuucaagggcuucuuccccuuccacaaggacaacgccaucagacugggcgagaacaaggacgugaucgugaccagagagcccuacgugagcugcgacaacgacgacugcuggagcuucgcccuggcccagggcgcccugcugggcaccaagcacagcaacggcaccaucaaggacagaacccccuacagaagccugaucagauuccccaucggcaccgcccccgugcugggcaacuacaaggagaucugcguggccuggagcagcagcagcugcuucgacggcaaggaguggaugcacgugugcaugaccggcaacgacaacgacgccaccggccagaucaucuacgccggcaagaugaccgacagcaucaagagcuggagaagagacauccugagaacccaggagagcgagugccagugcaucgacggcaccugcaucguggccgugaccgacggccccgccgccaacagcgccgaccacagaaucuacuggaucagagagggcaagaucaucaaguacgagaacauccccaagaccaagauccagcaccuggaggagugcagcugcuacguggacaccgacguguacugcaucugcagagacaacuggaagggcagcaacagacccuggaugagaaucaacaacgagaccauccuggagaccggcuacgugugcagcaaguuccacagcgacacccccagacccgccgaccccagcaccgugagcugcgacagccccagcaacaucaacggcggccccggcgugaagggcuucggcuucagaaccggcaacgacguguggcugggcagaaccgugagcaccaccggcagaagcggcuucgaggugaucaaggugaccgagggcuggaucaacagccugaaccacgccaagagcgugacccagacccuggugagcaacagcgacuggagcggcuacagcggcagcuucaucguggagaacaacggcugcuuccagcccugcuucuacaucgagcugaucagaggcagacccaacaagaacgacgacgugagcuggaccagcaacagcaucgugaccuucugcggccuggacaacgagcccggcagcggcaacuggcccgacggcagcaacaucggcuucaugcccaaguga

SEQ ID NO: 183676 - RNA, 1410 nt, Artificial Sequence; identical to SEQ ID NO: 183675
  derived and/or modified CDS sequence (opt4) from neuraminidase__InfluenzaA__AGQ81854

SEQ ID NO: 183677 - RNA, 1410 nt, Artificial Sequence; identical to SEQ ID NO: 183675
  derived and/or modified CDS sequence (opt4) from neuraminidase__InfluenzaA__AGQ81855

SEQ ID NO: 183678 - RNA, 1410 nt, Artificial Sequence; identical to SEQ ID NO: 183668
  derived and/or modified CDS sequence (opt4) from neuraminidase__InfluenzaA__AGQ81856

SEQ ID NO: 183679 - RNA, 1410 nt, Artificial Sequence
  derived and/or modified CDS sequence (opt4) from neuraminidase__InfluenzaA__AGQ81857
augaaccccaaccagaagaucaucaccaucggcguggugaacaccacccugagcaccaucgcccugcugaucggcaucggcaaccugaucuucaacaccgugauccacgagaagaucggcgugcaccagaccgugguguaccccaccaucaccccccccgugauccccaacugcagcgacaccaccaucaccuacaacaacaccguggugaacaacaucaccaccaccaucaucaacaaggccgagaagcaguucaagcccagccugccccugugccccuucagaggcuucuuccccuuccacaaggacaacgccaucagacugggcgagaacaaggacgugaucgugaccagagagcccuacgugagcugcgacaacgacgacugcuggagcuucgcccuggcccagggcgcccugcugggcaccaagcacagcaacggcaccaucaaggacagaacccccuacagaagccugaucagauuccccaucggcaccgcccccgugcugggcaacuacaaggagaucugcguggccuggagcagcagcagcugcuucgacggcaaggaguggaugcacgugugcaugaccggcaacgacaacgacgccagcggccagaucaucuacgccggcaagaugaccgacagcaucaagagcuggagaagagacauccugagaacccaggagagcgagugccagugcaucgacggcaccugcaucguggccgugaccgacggccccgccgccagcagcgccgaccacagaaucuacuggaucagagagggcaagaucaucaaguacgaggacauccccaagaccaagauccagcaccuggaggagugcagcugcuacguggacaccgacguguacugcaucugcagagacaacuggaagggcagcaacagacccuggaugagaaucaacaacgagaccauccuggagaccggcuacgugugcagcaaguuccacagcgacacccccagacccgccgaccccagcaccgugagcugcgacagccccagcaacaucaacggcggccccggcgugaagggcuucggcuucagagccggcaacgacguguggcugggcagaaccgugagcaccaccggcagaagcggcuucgaggugaucaaggugaccgagggcuggaucaacagccugaaccacgccaagagcgugacccagacccuggugagcaacaacgacuggagcggcuacagcggcagcuucaucguggagagcaacggcugcuuccagcccugcuucuacaucgagcugaucagaggcagacccaacagaaacgacgacgugagcuggaccagcaacagcaucgugaccuucugcggccuggacaacgagcccggcagcggcaacuggcccgacggcagcaacaucggcuucaugcccaaguga

SEQ ID NO: 183680 - RNA, 1410 nt, Artificial Sequence
  derived and/or modified CDS sequence (opt4) from neuraminidase__InfluenzaA__AGQ81858
augaaccccaaccagaagaucaucaccaucggcguggugaacaccacccugagcaccaucgcccugcugaucggcgugggcaaccugaucuucaacaccgugauccacgagaagaucggcgaccaccagaucgugguguaccccaccaccaccgccagcguggugcccaacugcagcgacaccaucaucaccuacaacaacaccguggugaacaacaucaccaccaccaucaucaccaaggaggagacccacuucaagagcagccugccccugugccccuucagaggcuucuuccccuuccacaaggacaacgccaucagacugggcgagaacaaggacgugaucgugaccagagagcccuacgugagcugcgacaacgacgacugcuggagcuucgcccuggcccagggcgcccugcugggcaccaagcacagcaacggcaccaucaaggacagaacccccuacagaagccugaucagauuccccaucggcaccgcccccgugcugggcaacuacaaggagaucugcguggccuggagcagcagcagcugcuucgacggcaaggaguggaugcacgugugcaugaccggcaacgacaacgacgccagcggccagaucauguacgccggcaagaugaccgacagcaucaagagcuggagaaaggacauccugagaacccaggagagcgagugccagugcaucgacggcaccugcaucguggccgugaccgacggccccgccaccaacagcgccgaccacagaaucuacuggaucagagagggcaagaucaucaaguacgagaacauccccaagaccaagauccagcaccuggaggagugcagcugcuacguggacaucgacguguacugcgugugcagagacaacuggaagggcagcaacagacccuggaugagaaucaacaacgagaccauccuggagaccggcuacgugugcagcaaguuccacagcgacacccccagacccgccgaccccagcaccgugagcugcgacagccccagcaacgugaacggcggccccggcgugaagggcuucggcuucaagaccggcaacgacguguggcugggcagaaccgugagcaccagcggcagaagcggcuucgagaucaucaaggugaccgagggcuggaucaacagccccaaccacgccaagagcgugacccagacccuggugagcaacaacgacuggagcggcuacagcggcagcuucaucguggagaacaacggcugcuuccagcccugcuucuacaucgagcugaucagaggcagacccaacaagaacgacgacgugagcuggaccagcaacagcaucgugaccuucugcggccuggacaacgagcccggcagcggcaacuggcccgacggcagcaacaucggcuucaugcccaaguga

SEQ ID NO: 183681 - RNA, 1410 nt, Artificial Sequence
  derived and/or modified CDS sequence (opt4) from neuraminidase__InfluenzaA__AGQ81859
augaaccccaaccagaagaucaucaccaucggcguggugaacaccacccugagcaccaucgcccugcugaucggcaucggcaaccugaucuucaacaccgugauccacgagaagaucggcgugcaccagaccguggugugccccaccaucaccccccccguggugcccaacugcagcgacaccaccaucaccuacaacaacaccguggugaacaacaucaccaccaccaucaucaacaaggccgagaagcaguucaagagcagccugccccugugccccuucagaggcuucuuccccuuccacaaggacaacgccaucagacugggcgagaacaaggacgugaucgugaccagagagcccuacgugagcugcgacaacgacgacugcuggagcuucgcccuggcccagggcgcccugcugggcaccaagcacagcaacggcaccaucaaggacagaacccccuacagaagccugaucagauuccccaucggcaccgcccccgugcugggcaacuacaaggagaucugcguggccuggagcagcagcagcugcuucgacggcaaggaguggaugcacaucugcaugaccggcaacgacaacgacgccagcggccagaucaucuacgccggcaagaugaccgacagcaucaagagcuggagaagagacauccugagaacccaggagagcgagugccagugcaucgacggcaccugcaucguggccaucaccgacggccccgccgccagcagcgccgaccacagaaucuacuggaucagagagggcaagaucaucaaguacgagaacauccccaagaccaagauccagcaccuggaggagugcagcugcuacguggacaucgacguguacugcaucugcagagacaacuggaagggcagcaacagacccuggaugagaaucaacaacgagaccauccuggagaccggcuacgugugcagcaaguuccacagcgacacccccagacccgccgaccccagcaccgugagcugcgacagccccagcaacaucaacggcggccccggcgugaagggcuucggcuucagagccggcaacgacguguggcugggcagaaccgugagcaccaccggcagaagcggcuucgaggugaucaaggugaccgagggcuggaucaacagccugaaccacgccaagagcgugacccagacccuggugagcaacagcgacuggagcggcuacagcggcagcuucaucguggagaacaacggcugcuuccagcccugcuucuacaucgagcugaucagaggcagacccaacagaaacgacgacgugagcuggaccagcaacagcaucgugaccuucugcggccuggacaacgagcccggcagcggcaacuggcccgacggcagcaacaucggcuucaugcccaaguga

SEQ ID NO: 183682 - RNA, 1413 nt, Artificial Sequence
  derived and/or modified CDS sequence (opt4) from neuraminidase__InfluenzaA__AGQ81860
augaaccccaaccagaagaucaucugcaucagcgccaccggcaugacccugagcguggugagccugcugaucggcaucgccaaccugggccugaacaucggccugcacuacaaggugggcgacacccccgacgugagcauccccaacaugaacgagaccaacagcaccaccaccaucaucaacaacaacacccagaacaacuucaccaacaucaccaacaucaucgugaacaagaacgaggagaagaccuuccugaaccugaccaagccccugugcgaggugaacagcuggcacauccugagcaaggacaacgccaucagaaucggcgaggacgcccacauccuggugaccagagagcccuaccugagcugcgacccccagggcugcagaauguucgcccugagccagggcaccacccugagaggcagacacgccaacggcaccauccacgacagaagccccuucagagcccuggugagcugggagaugggccaggcccccagccccuacaacgugaagguggagugcgugggcuggagcagcaccagcugccacgacggcaucagcagaaugagcaucugcaugagcggccccaacaacaacgccagcgccguggugugguacggcggcagacccgugaccgagauccccagcugggccggcaacauccugagaacccaggagagcgagugcgugugccacaagggcaucugccccguggugaugaccgacggccccgccaacaacagagccgccaccaagaucaucuacuucaaggagggcaagauccagaagaucgaggagcuggccggcagcgcccagcacaucgaggagugcagcugcuacggcgccguggaggugaucaagugcaucugcagagacaacuggaagggcgccaacagacccgugaucaccaucaaccccgagaugaugacccacaccagcaaguaccugugcagcaaggugcugaccgacaccagcagacccaacgaccccaccaacggcaacugcgacgcccccaucaccggcggcagccccgaccccggcgugaagggcuucgccuuccuggacggcgagaacagcuggcugggcagaaccaucagcaaggacagcagaagcggcuacgagaugcugaaggugcccaacgccgagaccgacacccagagcggccccaccagccaccaggugaucgugaacaaccagaacuggagcggcuacagcggcgccuucaucgacuacugggccaacaaggagugcuucaaccccugcuucuacguggagcugaucagaggcagacccaaggagagcagcgugcuguggaccagcaacagcaucguggcccugugcggcagcaaggagagacugggcagcuggagcuggcacgacggcgccgagaucaucuacuucaaguga

SEQ ID NO: 183683 - RNA, 1413 nt, Artificial Sequence
  derived and/or modified CDS sequence (opt4) from neuraminidase__InfluenzaA__AGQ81861
augaaccccaaccagaagaucaucugcaucagcgccaccggcaugacccugagcguggugagccugcugaucggcaucgccaaccugggccugaacaucggccugcacuacaaggugggcgacacccccgacgugagcauccccaacaugaacgagaccaacagcaccaccaccaucaucaacaacaacacccagaacaacuucaccaacaccaccaacaucaucgugaacaagaacgaggagaagaccuuccugaaccugaccaagccccugugcgaggugaacagcuggcacauccugagcaaggacaacgccaucagaaucggcgaggacgcccacauccuggugaccagagagcccuaccugagcugcgacccccagggcugcagaauguucgcccugagccagggcaccacccugagaggcagacacgccaacggcaccauccacgacagaagccccuucagagcccuggugagcugggagaugggccaggcccccagccccuacaacgugaagguggagugcgugggcuggagcagcaccagcugccacgacggcaucagcagaaugagcaucugcaugagcggccccaacaacaacgccagcgccguggugugguacggcggcagacccgugaccgagauccccagcugggccggcaacauccugagaacccaggagagcgagugcgugugccacaagggcaucugccccguggugaugaccgacggccccgccaacaacagagccgccaccaagaucaucuacuucaaggagggcaagauccagaagaucgaggagcuggccggcagcgcccagcacaucgaggagugcagcugcuacggcgccguggaggugaucaagugcaucugcagagacaacuggaagggcgccaacagacccgugaucaccaucaaccccgagaugaugacccacaccagcaaguaccugugcagcaaggugcugaccgacaccagcagacccaacgaccccaccaacggcaacugcgacgcccccaucaccggcggcagccccgaccccggcgugaagggcuucgccuuccuggacggcgagaacagcuggcugggcagaaccaucagcaaggacagcagaagcggcuacgagaugcugaaggugcccaacgccgagaccgacacccagagcggccccaccagccaccaggugaucgugaacaaccagaacuggagcggcuacagcggcgccuucaucgacuacugggccaacaaggagugcuucaaccccugcuucuacguggagcugaucagaggcagacccaaggagagcagcgugcuguggaccagcaacagcaucguggcccugugcggcagcaaggagagacugggcagcuggagcuggcacgacggcgccgagaucaucuacuucaaguga

SEQ ID NO: 183684 - RNA, 1413 nt, Artificial Sequence
  derived and/or modified CDS sequence (opt4) from neuraminidase__InfluenzaA__AGQ81862
augaaccccaaccagaagaucaucugcaucagcgccaccggcaugacccugagcguggugagccugcugaucggcaucgccaaccugggccugaacaucggccugcacuacaaggugggcgacacccccgacgugaacauccccagcaugaacgagaccaacagcaccaccaccaucaucaacaacaacacccagaacaacuucaccaacaucaccaacaucaucgugaacaaggaggagggcagaaccuuccugaaccugaccaagccccugugcgaggugaacagcuggcacauccugagcaaggacaacgccaucagaaucggcgaggacgcccacauccuggugaccagagagcccuaccugagcugcgacccccagggcugcagaauguucgcccugagccagggcaccacccugagaggcagacacgccaacggcaccauccacgacagaagccccuucagagcccuggugagcugggagaugggccaggcccccagccccuacaacgugagaguggagugcaucggcuggagcagcaccagcugccacgacggcaucagcagaaugagcaucugcaugagcggccccaacaacaacgccagcgccguggugugguacggcggcagacccgugaccgagauccccagcugggccggcaacauccugagaacccaggagagcgagugcgugugccacaagggcaucugccccguggugaugaccgacggccccgccaacaacagagccgccaccaagaucaucuacuucaaggagggcaagauccagaagaucgaggagcuggagggcaacgcccagcacaucgaggagugcagcugcuacggcgccgccggcgugaucaagugcaucugcagagacaacuggaagggcgccaacagacccgugaucaucaucgaccccgagaugaugacccacaccagcaaguaccugugcagcagagugcugaccgacaccagcagacccaacgaccccaccagcggcaacugcgacgcccccaucaccggcggcagccccgaccccggcgugaagggcuucgccuuccuggacggcgagaacagcuggcugggcagaaccaucagcaaggacagcagaagcggcuacgagaugcugaaggugcccaacgccgagaccgacacccagagcggccccaccagccaccaggugaucgugaacaaccagaacuggagcggcuacagcggcgccuucaucgacuacugggccaacaaggagugcuucaaccccugcuucuacguggagcugaucagaggcagacccaaggagagcagcgugcuguggaccagcaacagcaucguggcccugugcggcagcaaggagagacugggcagcuggagcuggcacgacggcgccgagaucaucuacuucaaguga

SEQ ID NO: 183685 - RNA, 1413 nt, Artificial Sequence
  derived and/or modified CDS sequence (opt4) from neuraminidase__InfluenzaA__AGQ81863
augaaccccaaccagaagaucaucugcaucagcgccaccggcaugacccugagcguggugagccugcugaucggcaucgccaaccugggccugaacaucggccugcacuacaaggugggcgacacccccgacgugaacauccccagcaugaacgagaccaacagcaccaccaccaucaucaacaacaacacccagaacaacuucaccaacaucaccaacaucaucgugaacaaggaggaggagagaaccuuccugaaccugaccaagccccugugcgaggugaacagcuggcacauccugagcaaggacaacgccaucagaaucggcgaggacgcccacauccuggugaccagagagcccuaccugagcugcgacccccagggcugcagaauguucgcccugagccagggcaccacccugagaggcagacacgccaacggcaccauccacgacagaagccccuucagagcccuggugagcugggagaugggccaggcccccagccccuacaacgugagaguggagugcaucggcuggagcagcaccagcugccacgacggcaucagcagaaugagcaucugcaugagcggccccaacaacaacgccagcgccguggugugguacggcggcagacccgugaccgagauccccagcugggccggcaacauccugagaacccaggagagcgagugcgugugccacaagggcaucugccccguggugaugaccgacggccccgccaacaacagagccgccaccaagaucaucuacuucaaggagggcaagauccagaagaucgaggagcuggagggcaacgcccagcacaucgaggagugcagcugcuacggcgccgccggcgugaucaagugcaucugcagagacaacuggaagggcgccaacagacccgugaucaucaucgaccccgagaugaugacccacaccagcaaguaccugugcagcagagugcugaccgacaccagcagacccaacgaccccaucagcggcaacugcgacgcccccaucaccggcggcagccccgaccccggcgugaagggcuucgccuuccuggacggcgagaacagcuggcugggcagaaccaucagcaaggacagcagaagcggcuacgagaugcugaaggugcccaacgccgagaccgacacccagagcggccccaccagccaccaggugaucgugaacaaccagaacuggagcggcuacagcggcgccuucaucgacuacugggccaacaaggagugcuucaaccccugcuucuacguggagcugaucagaggcagacccaaggagagcagcgugcuguggaccagcaacagcaucguggcccugugcggcagcaaggagagacugggcagcuggagcuggcacgacggcgccgagaucaucuacuucaaguga

SEQ ID NO: 183686 - RNA, 1416 nt, Artificial Sequence
  derived and/or modified CDS sequence (opt4) from neuraminidase__InfluenzaA__AGQ81864
augaaccccaaccagaagcuguucgcccugagcggcguggccaucgcccugagcgugcugaaccugcugaucggcaucagcaacgugggccugaacgugagccugcaccugaaggagaagggccccaagcaggaggagaacagcaccugcaccaccaucaaccagaacaacaccaccaucguggagaacaccuacgugaacaacaccaccaucaucagcaaggagaccgagcugaagccccccaacuaccugcugcugaacaagagccugugcaacguggagggcuggguggugaucgccaaggacaacgccgugagauucggcgagagcgagcagaucaucgugaccagagagcccuacgugagcugcgaccccaccggcugcaagauguacgcccugcaccagggcaccaccaucagaaacaagcacagcaacggcaccauccacgacagaaccgccuucagaggccugaucagcaccccccugggcaccccccccaccgugagcaacagcgacuucaucugcgugggcuggagcagcaccaccugccacgacggcaucggcagaaugaccaucugcauccagggcaacaacgacaacgccaccgccaccguguacuacaacagaagacugaccaccaccaucaagaccugggccagaaacauccugagaacccaggagagcgagugcgugugccacaacggcaccugcgccguggugaugaccgacggcagcgccagcagccaggccuacaccaaggugauguacuuccacaagggccuggugaucaaggaggaggcccugaagggcagcgccagacacaucgaggagugcagcugcuacggccacagccagaaggccaccugcgugugcagagacaacuggcagggcgccaacagacccaucaucgagaucgacaugaacacccuggagcacaccagcagauacgugugcaccggcauccugaccgacaccagcagacccggcgacaagagcagcggcgacugcagcaaccccaucaccggcagccccggcgcccccggcgugaagggcuucggcuuccugaacggcgacaacaccuggcugggcagaaccaucagccccaagagcagaagcggcuucgagaugcugaagauccccaacgccggcaccgaccccaacagcagaaucgccgagagacaggagaucguggacaacaacaacuggagcggcuacagcggcagcuucaucgacuacugggacaacgacagcgagugcuacaaccccugcuucuacguggagcugaucagaggcagacccgaggaggccaaguacgugugguggaccagcaacagccugaucgcccugugcggcagccccuuccccgugggcagcggcagcuuccccgacggcgcccagauccaguacuucagcuga

SEQ ID NO: 183687 - RNA, 1416 nt, Artificial Sequence
  derived and/or modified CDS sequence (opt4) from neuraminidase__InfluenzaA__AGQ81865
augaaccccaaccagaagcuguucgcccugagcggcguggccaucgcccugagcgugcugaaccugcugaucggccugagcaacgugggccugaacgugagccugcaccugaaggagaccggccccaagcaggagggcaaccugaccugcaugaccaucaaccagaacaacaccaccgugguggagaacaccuacgugaacaacaccaccaucaucaccaaggagaccgagagcgagacccccaacuaccugcugcugaacaagagccugugcaacguggagggcuggguggugaucgccaaggacaacgccgugagauucggcgagagcgagcagaucaucgugaccagagagcccuacgugagcugcgaccccaacggcugcaagauguacgcccugcaccagggcaccaccaucagaaacaagcacagcaacggcaccauccacgacagaaccgccuucagaggccugaucagcaccccccugggcaccccccccaccgugagcaacagcgacuucaucugcgugggcuggagcagcaccaccugccacgacggcaucggcagaaugaccaucugcauccagggcaacaacgacaacgccaccgccaccguguacuacaacagaagacugaccaccaccaucaagaccugggccagaaacauccugagaacccaggagagcgagugcgugugccacaacggcaccugcgccguggugaugaccgacggcagcgccagcagccaggcccacaccaaggugauguacuuccacaagggccugguggugaaggaggaggcccugaagggcagcgccagacacaucgaggagugcagcugcuacggccacaaccagaaggugaccugcgugugcagagacaacuggcagggcgccaacagacccaucaucgagaucgacaugaacacccuggagcacaccagcagauacgugugcaccggcauccugaccgacaccagcagacccggcgacaagcccaccggcgacugcagcaaccccaucaccggcagccccggcgcccccggcgugaagggcuucggcuuccugaacggcggcaacaccuggcugggcagaaccaucagccccagaagcagaagcggcuucgagaugcugaagauccccaacgccggcaccgaccccaacagcagaaucgccgagagacaggagaucguggacaacagcaacuggagcggcuacagcggcagcuucaucgacuacuggaacgacaacagcgagugcuacaaccccugcuucuacguggagcugaucagaggcagacccgaggaggccaaguacgugugguggaccagcaacagccugaucgcccugugcggcagccccuuccccgugggcagcggcagcuuccccgacggcgcccagauccaguacuucagcuga

SEQ ID NO: 183688 - RNA, 1416 nt, Artificial Sequence
  derived and/or modified CDS sequence (opt4) from neuraminidase__InfluenzaA__AGQ81868
augaaccccaaccagaagcuguucgcccugagcggcguggccaucgcccugagcgugcugaaccugcugaucggcaucagcaacgugggccugaacgugagccugcaccugaaggagaagggccccaagcaggaggagaacagcaccugcaccaccaucaaccagaacaacaccaccgugguggagaacaccuacgugaacaacaccaccaucaucaccaaggagaccgagcugaagacccccagcuaccugcugcugaacaagagccugugcaacguggagggcuggguggugaucgccaaggacaacgccgugagauucggcgagagcgagcagaucaucgugaccagagagcccuacgugagcugcgaccccaccggcugcaagauguacgcccugcaccagggcaccaccaucagaaacaagcacagcaacggcaccauccacgacagaaccgccuucagaggccugaucagcaccagccugggcaccccccccaccaucagcaacagcgacuucaugugcgugggcuggagcagcaccaccugccacgacggcaucggcagaaugaccaucugcauccagggcaacaacgacaacgccaccgccaccguguacuacaacagaagacugaccaccaccaucaagaccugggccagaaacauccugagaacccaggagagcgagugcgugugccacaacggcaucugcgccguggugaugaccgacggcagcgccagcagccaggccuacaccaaggugauguacuuccacaagggccugguggugaaggaggaggcccugaagggcagcgccagacacaucgaggagugcagcugcuacggccacagccagaaggugaccugcgugugcagagacaacuggcagggcgccaacagacccaucaucgagaucgacaugaacacccuggagcacaccagcagauacgugugcaccggcauccugaccgacaccagcagacccggcgacaagagcagcggcgacugcagcaaccccaucgccggcagccccggcgcccccggcgugaagggcuucggcuuccugaacggcgacaacaccuggcugggcagaaccaucagccccagaagcagaagcggcuucgagaugcugaagauccccaacgccggcaccgaccccaacagcagaaucgccggcagacaggagaucguggacaacaacaacuggagcggcuacagcggcagcuucaucgacuacuggaacgacaacagcgagugcuacaaccccugcuucuacguggagcugaucagaggcagacccgaggaggccaaguacgugugguggaccagcaacagccugaucgcccugugcggcagccccuuccccgugggcagcggcagcuuccccgacggcgcccagauccaguacuucagcuga

SEQ ID NO: 183689 - RNA, 1416 nt, Artificial Sequence
  derived and/or modified CDS sequence (opt4) from neuraminidase__InfluenzaA__AGQ81869
augaaccccaaccagaagcuguucgcccugagcggcguggccaucgcccugagcgugcugaaccugcugaucggcaucagcaacgugggccugaacgugagccugcaccugaaggagaagggccccaagcaggaggagaacagcaccugcaccaccaucaaccagaacaacaccaccaucguggagaacaccuacgugaacaacaccaccaucaucagcaaggagaccgagcugaagacccccagcuaccugcugcugaacaagagccugugcaacguggagggcuggguggugaucgccaaggacaacgccgugagauucggcgagagcgagcagaucaucgugaccagagagcccuacgugagcugcgaccccaccggcugcaagauguacgcccugcaccagggcaccaccaucagaaacaagcacagcaacggcaccauccacgacagaaccgccuucagaggccugaucagcaccccccugggcaccccccccaccgugagcaacagcgacuucaucugcgugggcuggagcagcaccaccugccacgacggcaucggcagaaugaccaucugcauccagggcaacaacgacaacgccaccgccaccguguacuacaacagaagacugaccaccaccaucagaaccugggccagaaacauccugagaacccaggagagcgagugcgugugccacaacggcaccugcgccguggugaugaccgacggcagcgccagcagccaggccuacaccaaggugauguacuuccacaagggccuggugaucaaggaggaggcccugaagggcagcgccagacacaucgaggagugcagcugcuacggccacagccagaaggccaccugcgugugcagagacaacuggcagggcgccaacagacccaucaucgagaucgacaugaacacccuggagcacaccagcagauacgugugcaccggcauccugaccgacaccagcagacccggcgacaagagcagcggcgacugcagcaaccccaucaccggcagccccggcgcccccggcgugaagggcuucggcuuccugaacggcgacaacaccuggcugggcagaaccaucagccccagaagcagaagcggcuucgagaugcugaagauccccaacgccggcaccgaccccaacagcagaaucgccgagagacaggagaucguggacaacaacaacuggagcggcuacagcggcagcuucaucgacuacuggaacaacgacagcgagugcuacaaccccugcuucuacguggagcugaucagaggcagacccgaggaggccaaguacgugugguggaccagcaacagccugaucgcccugugcggcagccccuuccccgugggcagcggcagcuuccccgacggcgcccagauccaguacuucagcuga

SEQ ID NO: 183690 - RNA, 1416 nt, Artificial Sequence
  derived and/or modified CDS sequence (opt4) from neuraminidase__InfluenzaA__AGQ81870
augaaccccaaccagaagcuguucgcccugagcggcguggccaucgcccugagcgugcugaaccugcugaucggcaucagcaacgugggccugaacgugagccugcaccugaaggagaagggccccaagcaggaggagaacagcaccugcaccaccaucaaccagaacaacaccaccaucguggagaacaccuacgugaacaacaccaccaucaucagcaaggagaccgagcugaagccccccagcuaccugcugcugaacaagagccugugcaacguggagggcuggguggugaucgccaaggacaacgccgugagauucggcgagagcgagcagaucaucgugaccagagagcccuacgugagcugcgaccccaccggcugcaagauguacgcccugcaccagggcaccaccaucagaaacaagcacagcaacggcaccauccacgacagaaccgccuucagaggccugaucagcaccccccugggcaccccccccaccgugagcaacagcgacuucaucugcgugggcuggagcagcaccaccugccacgacggcaucggcagaaugaccaucugcauccagggcaacaacgacaacgccaccgccaccguguacuacaacagaagacugaccaccaccaucagaaccugggccagaaacauccugagaacccaggagagcgagugcgugugccacaacggcaccugcgccguggugaugaccgacggcagcgccagcagccaggccuacaccaaggugauguacuuccacaagggccuggugaucaaggaggaggcccugaagggcagcgccagacacaucgaggagugcagcugcuacggccacagccagaaggccaccugcgugugcagagacaacuggcagggcgccaacagacccaucaucgagaucgacaugaacacccuggagcacaccagcagauacgugugcaccggcauccugaccgacaccagcagacccggcgacaagagcagcggcgacugcagcaaccccaucaccggcagccccggcgcccccggcgugaagggcuucggcuuccugaacggcgacaacaccuggcugggcagaaccaucagccccagaagcagaagcggcuucgagaugcugaagauccccaacgccggcaccgaccccaacagcagaaucgccgagagacaggagaucguggacaacaacaacuggagcggcuacagcggcagcuucaucgacuacuggaacaacgacagcgagugcuacaaccccugcuucuacguggagcugaucagaggcagacccgaggaggccaaguacgugugguggaccagcaacagccugaucgcccugugcggcagccccuuccccgugggcagcggcagcuuccccgacggcgcccagauccaguacuucagcuga

SEQ ID NO: 183691 - RNA, 1416 nt, Artificial Sequence
  derived and/or modified CDS sequence (opt4) from neuraminidase__InfluenzaA__AGQ81871
augaaccccaaccagaagcuguucgcccugagcggcguggccaucgcccugagcgugcugaaccugcugaucggcaucagcaacgugggccugaacgugagccugcaccugaaggagaagggccccaagcaggaggagaacagcaccugcaccaccaucaaccagaacaacaccaccaucguggagaacaccuacgugaacaacaccaccaucaucagcaaggagaccgagcugaagacccccagcuaccugcugcugaacaagagccugugcaacguggagggcuggguggugaucgccaaggacaacgccgugagauucggcgagagcgagcagaucaucgugaccagagagcccuacgugagcugcgaccccaccggcugcaagauguacgcccugcaccagggcaccaccaucagaaacaagcacagcaacggcaccauccacgacagaaccgccuucagaggccugaucagcaccccccugggcaccccccccaccgugagcaacagcgacuucaucugcaucggcuggagcagcaccaccugccacgacggcaucggcagaaugaccaucugcauccagggcaacaacgacaacgccaccgccaccguguacuacaacagaagacugaccaccaccaucagaaccugggccagaaacauccugagaacccaggagagcgagugcgugugccacaacggcaccugcgccguggugaugaccgacggcagcgccagcagccaggccuacaccaaggugauguacuuccacaagggccuggugaucaaggaggaggcccugaagggcagcgccagacacaucgaggagugcagcugcuacggccacagccagaaggccaccugcgugugcagagacaacuggcagggcgccaacagacccaucaucgagaucgacaugaacacccuggagcacaccagcagauacgugugcaccggcauccugaccgacaccagcagacccggcgacaagagcagcggcgacugcagcaaccccaucaccggcagccccggcgcccccggcgugaagggcuucggcuuccugaacggcgacaacaccuggcugggcagaaccaucagccccagaagcagaagcggcuucgagaugcugaagauccccaacgccggcaccgaccccaacagcagaaucgccgagagacaggagaucguggacaacaacaacuggagcggcuacagcggcagcuucaucgacuacuggaacaacgacagcgagugcuacaaccccugcuucuacguggagcugaucagaggcagacccgaggaggccaaguacgugugguggaccagcaacagccugaucgcccugugcggcagccccuuccccgugggcagcggcagcuuccccgacggcgcccagauccaguacuucagcuga

SEQ ID NO: 183692 - RNA, 1416 nt, Artificial Sequence
  derived and/or modified CDS sequence (opt4) from neuraminidase__InfluenzaA__AGQ81872
augaaccccaaccagaagcuguucgcccugagcggcguggccaucgcccugagcgugcugaaccugcugaucggcaucagcaacgugggccugaacgugagccugcaccugaaggagaagggccccaagcaggaggagaacagcaccugcaccaccaucaaccagaacaacaccaccaucguggagaacaccuacgugaacaacaccaccaucaucagcaaggagaccgagcugaagacccccagcuaccugcugcugaacaagagccugugcaacguggagggcuggguggugaucgccaaggacaacgccgugagauucggcgagagcgagcagaucaucgugaccagagagcccuacgugagcugcgaccccaccggcugcaagauguacgcccugcaccagggcaccaccaucagaaacaagcacagcaacggcaccauccacgacagaaccgccuucagaggccugaucagcaccccccugggcaccccccccagcgugagcaacagcgacuucaucugcgugggcuggagcagcaccaccugccacgacggcaucggcagaaugaccaucugcauccagggcaacaacgacaacgccaccgccaccguguacuacaacagaagacugaccaccaccaucagaaccugggccagaaacauccugagaacccaggagagcgagugcgugugccacaacggcaccugcgccguggugaugaccgacggcagcgccagcagccaggccuacaccaaggugauguacuuccacaagggccuggugaucaaggaggaggcccugaagggcagcgccagacacaucgaggagugcagcugcuacggccacagccagaaggccaccugcgugugcagagacaacuggcagggcgccaacagacccaucaucgagaucgacaugaacacccuggagcacaccagcagauacgugugcaccggcauccugaccgacaccagcagacccggcgacaagagcagcggcgacugcagcaaccccaucaccggcagccccggcgcccccggcgugaagggcuucggcuuccugaacggcgacaacaccuggcugggcagaaccaucagccccagaagcagaagcggcuucgagaugcugaagauccccaacgccggcaccgaccccaacagcagaaucgccgagagacaggagaucguggacaacaacaacuggagcggcuacagcggcagcuucaucgacuacuggaacaacgacagcgagugcuacaaccccugcuucuacguggagcugaucagaggcagacccgaggaggccaaguacgugugguggaccagcaacagccugaucgcccugugcggcagccccuuccccgugggcagcggcagcuuccccgacggcgcccagauccaguacuucagcuga

SEQ ID NO: 183693 - RNA, 1416 nt, Artificial Sequence
  derived and/or modified CDS sequence (opt4) from neuraminidase__InfluenzaA__AGQ81875
augaaccccaaccagaagcuguucgcccugagcggcguggccaucgcccugagcgugcugaaccugcugaucggcaucagcaacgugggccugaacgugagccugcaccugaaggagaagggccccaagcaggaggagaacagcaccugcaugaccaucaaccagaacaacaccaccgugguggagaacaccuacgugaacaacaccaccaucaucaccaaggagaccgagcuggagacccccagcuaccugcugcugaacaagggccugugcaacguggagggcuggguggugaucgccaaggacaacgccgugagauucggcgagaccgagcagaucaucgugaccagagagcccuacgugagcugcgaccccaacggcugcaagauguacgcccugcaccagggcaccaccaucagaaacaagcacagcaacggcaccauccacgacagaaccgccuucagaggccugaucagcaccccccugggcaccccccccaccgugagcaacagcgacuucaucugcgugggcuggagcagcaccaccugccacgacggcaucggcagaaugaccaucugcauccagggcaacaacgacaacgccaccgccaccguguacuacaacagaagacugaccaccaccaucaagaccugggccagaaacauccugagaacccaggagagcgagugcgugugccacaacggcaccugcgccguggugaugaccgacggcagcgccagcagccaggcccacaccaaggugaucuacuuccacaagggccugaucgugaaggaggaggcccugaagggcagcgccagacacaucgaggagugcagcugcuacggccacagccagaaggugaccugcgugugcagagacaacuggcagggcgccaacagacccaucaucgagaucgacaugaacacccuggagcacaccagcagauacgugugcaccggcauccugaccgacaccagcagacccggcgacaagagcaccggcgacugcagcaaccccaucaccggcagccccggcgcccccggcgugaagggcuucggcuaccugaacggcgacaacaccuggcugggcagaaccaucagccccagaagcagaagcggcuucgagaugcugaagauccccaacgccggcaccgaccccaacagcagaaucaccgagagacaggagaucguggacaacaacaacuggagcggcuacagcggcagcuucguggacuacuggaacgacaacagcgagugcuacaaccccugcuucuacguggagcugaucagaggcagacccgaggaggccaaguacgugugguggaccagcaacagcaucaucgcccugugcggcagccccuuccccgugggcagcggcagcuuccccgacggcgcccagauccaguacuucagcuga

SEQ ID NO: 183694 - RNA, 1416 nt, Artificial Sequence
  derived and/or modified CDS sequence (opt4) from neuraminidase__InfluenzaA__AGQ81876
augaaccccaaccagaagcuguucgcccugagcggcguggccaucgcccugagcgugcugaaccugcugaucggcaucagcaacgugggccugaacgugagccugcaccugaaggagaagggccccaagcaggaggagaacagcaccugcaugaccaucaaccagaacaacaccaccgugguggagaacaccuacgugaacaacaccaccaucaucaccaaggagaccgagcuggagacccccagcuaccugcugcugaacaagggccugugcaacguggagggcuggguggugaucgccaaggacaacgccgugagauucggcgagaccgagcagaucaucgugaccagagagcccuacgugagcugcgaccccaacggcugcaagauguacgcccugcaccagggcaccaccaucagaaacaagcacagcaacggcaccauccacgacagaaccgccuucagaggccugaucagcaccccccugggcaccccccccaccgugagcaacagcgacuucaucugcgugggcuggagcagcaccaccugccacgacggcaucggcagaaugaccaucugcauccagggcgacaacgacaacgccaccgccaccguguacuacaacagaagacugaccaccaccaucaagaccugggccagaaacauccugagaacccaggagagcgagugcgugugccacaacggcaccugcgccguggugaugaccgacggcagcgccagcagccaggcccacaccaaggugaucuacuuccacaagggccugaucgugaaggaggaggcccugaagggcagcgccagacacaucgaggagugcagcugcuacggccacagccagaaggugaccugcgugugcagagacaacuggcagggcgccaacagacccaucaucgagaucgacaugaacacccuggagcacaccagcagauacgugugcaccggcauccugaccgacaccagcagacccggcgacaagagcaccggcgacugcagcaaccccaucaccggcagccccggcgcccccggcgugaagggcuucggcuaccugaacggcgacaacaccuggcugggcagaaccaucagccccagaagcagaagcggcuucgagaugcugaagauccccaacgccggcaccgaccccaacagcagaaucaccgagagacaggagaucguggacaacaacaacuggagcggcuacagcggcagcuucguggacuacuggaacgacaacagcgagugcuacaaccccugcuucuacguggagcugaucagaggcagacccgaggaggccaaguacgugugguggaccagcaacagcaucaucgcccugugcggcagccccuuccccgugggcagcggcagcuuccccgacggcgcccagauccaguacuucagcuga

SEQ ID NO: 183695 - RNA, 1416 nt, Artificial Sequence
  derived and/or modified CDS sequence (opt4) from neuraminidase__InfluenzaA__AGQ81877
augaaccccaaccagaagcuguucgcccugagcggcguggccaucgcccugagcgugcugaaccugcugaucggcaucagcaacgugggccugaacgugagccugcaccugaaggagaagggccccaagcaggaggagaacagcaccugcaccaccaucaaccagaacaacaccaccgugguggagaacaccuacgugaacaacaccaccaucaucaccaaggagaccgagcugaagacccccagcuaccugcugcugaacaagagccugugcaacguggagggcuggguggugaucgccaaggacaacgccgugagauucggcgagagcgagcagaucaucgugaccagagagcccuacgugagcugcgaccccaccggcugcaagauguacgcccugcaccagggcaccaccaucagaaacaagcacagcaacggcaccauccacgacagaaccgccuucagaggccugaucagcaccagccugggcaccccccccaccaucagcaacagcgacuucaugugcgugggcuggagcagcaccaccugccacgacggcaucggcagaaugaccaucugcauccagggcaacaacgacaacgccaccgccaccguguacuacaacagaagacugaccaccaccaucaagaccugggccagaaacauccugagaacccaggagagcgagugcgugugccacaacggcaucugcgccguggugaugaccgacggcagcgccagcagccaggccuacaccaaggugauguacuuccacaagggccugguggugaaggaggaggcccugaagggcagcgccagacacaucgaggagugcagcugcuacggccacagccagaaggugaccugcgugugcagagacaacuggcagggcgccaacagacccaucaucgagaucgacaugaacacccuggagcacaccagcagauacgugugcaccggcauccugaccgacaccagcagacccggcgacaagagcagcggcgacugcagcaaccccaucaccggcagccccggcgcccccggcgugaagggcuucggcuuccugaacggcgacaacaccuggcugggcagaaccaucagccccagaagcagaagcggcuucgagaugcugaagauccccaacgccggcaccgaccccaacagcagaaucgccggcagacaggagaucguggacaacaacaacuggagcggcuacagcggcagcuucaucgacuacuggaacgacaacagcgagugcuacaaccccugcuucuacguggagcugaucagaggcagacccgaggaggccaaguacgugugguggaccagcaacagccugaucgcccugugcggcagccccuuccccgugggcagcggcagcuuccccgacggcgcccagauccaguacuucagcuga

SEQ ID NO: 183696 - RNA, 1416 nt, Artificial Sequence
  derived and/or modified CDS sequence (opt4) from neuraminidase__InfluenzaA__AGQ81878
augaaccccaaccagaagcuguucgcccugagcggcguggccaucgcccugagcgugcugaaccugcugaucggcaucagcaacgugggccugaacgugagccugcaccugaaggagaagggccccaagcaggaggagaaccugaccugcaccaccaucaaccagaacaacaccaccgugguggagaacaccuacgugaacaacaccaccaucaucaccaaggagaccgaccugaaggcccccagcuaccugcugcugaacaagagccugugcaacguggagggcuggguggugaucgccaaggacaacgccgugagauucggcgagagcgagcagaucaucgugaccagagagcccuacgugagcugcgaccccaccggcugcaagauguacgcccugcaccagggcaccaccaucagaaacaagcacagcaacggcaccauccacgacagaaccgccuucagaggccugaucagcaccccccugggcaccccccccaccgugagcaacagcgacuucaugugcgugggcuggagcagcaccaccugccacgacggcaucggcagaaugaccaucugcauccagggcaacaacgacaacgccaccgccaccguguacuacaacagaagacugaccaccaccaucaagaccugggccagaaacauccugagaacccaggagagcgagugcgugugccacaacggcaccugcgccguggugaugaccgacggcagcgccagcagccaggccuacaccaaggugauguacuuccacaagggccugguggugaaggaggaggcccugaagggcagcgccagacacaucgaggagugcagcugcuacggccacagccagaaggugaccugcgugugcagagacaacuggcagggcgccaacagacccaucaucgagaucgacaugaacacccuggagcacaccagcagauacgugugcaccggcauccugaccgacaccagcagacccggcgacaagagcagcggcgacugcagcaaccccaucaccggcagccccggcgcccccggcgugaagggcuucggcuuccugaacggcgacaacaccuggcugggcagaaccaucagccccagaagcagaagcggcuucgagaugcugaagauccccaacgccggcaccgaccccaacagcagaaucgccgagagacaggagaucguggacaacaacaacuggagcggcuacagcggcagcuucaucgacuacuggaacgacaacagcgagugcuacaaccccugcuucuacguggagcugaucagaggcagacccgaggaggccaaguacgugugguggaccagcaacagccugaucgcccugugcggcagccccuuccccaucggcagcggcagcuuccccgacggcgcccagauccaguacuucagcuga

SEQ ID NO: 183697 - RNA, 1416 nt, Artificial Sequence
  derived and/or modified CDS sequence (opt4) from neuraminidase__InfluenzaA__AGQ81882
augaaccccaaccagaagcuguucgcccugagcggcguggccaucgcccugagcgugcugaaccugcugaucggcaucagcaacgugggccugaacgugagccugcaccugaaggagaagggcgccaagcaggaggagaaccugaccugcaccaccaucaaccagaacaacaccaccgugguggagaacaccuacgugaacaacaccaccgugaucaccaaggaggccgacuggaagacccccagcuaccugcugcugaacaagagccugugcaacguggagggcuggguggugaucgccaaggacaacgccaucagauucggcgagagcgagcagaucaucgugaccagagagcccuacgugagcugcgaccccaccggcugcaagauguacgcccugcaccagggcaccaccaucagaaacaagcacagcaacggcaccauccacgacagaaccgccuucagaggccugaucagcaccccccugggcaccccccccaccgugagcaacagcgacuucaugugcgugggcuggagcagcaccaccugccacgacggcaucggcagaaugaccaucugcauccagggcaacaacgacaacgccaccgccaccguguacuacaacggcagacugaccaccaccaucaagaccugggccagaaacauccugagaacccaggagagcgagugcgugugccacaacggcaccugcgccguggugaugaccgacggcagcgccagcagccaggccuacaccaaggugauguacuuccacaagggccuggugaucaaggaggaggcccugaagggcagcgccagacacaucgaggagugcagcugcuacggccacagccagaaggugaccugcgugugcagagacaacuggcagggcgccaacagacccaucaucgagaucgacaugaacacccuggagcacaccagcagauacgugugcaccggcauccugaccgacaccagcagacccggcgacaagagcagcggcgacugcagcaaccccaucaccggcagccccggcgcccccggcgugaagggcuucggcuuccugaacggcgacaacaccuggcugggcagaaccaucagccccagaagcagaagcggcuucgagaugcugaagauccccaacgccggcaucgaccccaacagcagaaucgccgagagacaggagaucguggacaacaacaacuggagcggcuacagcggcagcuucaucgacuacuggaacgacaacagcgagugcuacaaccccugcuucuacguggagcugaucagaggcagacccgaggaggccaaguacgugugguggaccagcaacagccugaucgcccugugcggcagccccuuccccgugggcagcggcagcuuccccgacggcgcccagauccaguacuucagcuga

SEQ ID NO: 183698 - RNA, 1416 nt, Artificial Sequence
  derived and/or modified CDS sequence (opt4) from neuraminidase__InfluenzaA__AGQ81883
augaaccccaaccagaagcuguucgcccugagcggcguggccaucgcccugagcgugcugaaccugcugaucggcaucagcaacgugggccugaacgugagccugcaccugaaggagaagggccccaagcaggaggagaaccugaccugcaccaccaucaaccagaacaacaccaccgugguggagaacaccuacgugaacaacaccaccgugaucaccaaggaggccgacuggaagacccccagcuaccugcugcugaacaagagccugugcaacguggagggcuggguggugaucgccaaggacaacgccaucagauucggcgagagcgagcagaucaucgugaccagagagcccuacgugagcugcgaccccaccggcugcaagauguacgcccugcaccagggcaccaccaucagaaacaagcacagcaacggcaccauccacgacagaaccgccuucagaggccugaucagcaccccccugggcaccccccccaccgugagcaacagcgacuucaugugcgugggcuggagcagcaccaccugccacgacggcaucggcagaaugaccaucugcauccagggcaacaacgacaacgccaccgccaccguguacuacaacggcagacugaccaccaccaucaagaccugggccagaaacauccugagaacccaggagagcgagugcgugugccacaacggcaccugcgccguggugaugaccgacggcagcgccagcagccaggccuacaccaaggugauguacuuccacaagggccuggugaucaaggaggaggcccugaagggcagcgccagacacaucgaggagugcagcugcuacggccacagccagaaggugaccugcgugugcagagacaacuggcagggcgccaacagacccaucaucgagaucgacaugaacacccuggagcacaccagcagauacgugugcaccggcauccugaccgacaccagcagacccggcgacaagagcagcggcgacugcagcaaccccaucaccggcagccccggcgcccccggcgugaagggcuucggcuuccugaacggcgacaacaccuggcugggcagaaccaucagccccagaagcagaagcggcuucgagaugcugaagauccccaacgccggcaucgaccccaacagcagaaucgccgagagacaggagaucguggacaacaacaacuggagcggcuacagcggcagcuucaucgacuacuggaacgacaacagcgagugcuacaaccccugcuucuacguggagcugaucagaggcagacccgaggaggccaaguacgugugguggaccagcaacagccugaucgcccugugcggcagccccuuccccgugggcagcggcagcuuccccgacggcgcccagauccaguacuucagcuga

SEQ ID NO: 183699 - RNA, 1416 nt, Artificial Sequence; identical to SEQ ID NO: 183698
  derived and/or modified CDS sequence (opt4) from neuraminidase__InfluenzaA__AGQ81884

SEQ ID NO: 183700 - RNA, 1416 nt, Artificial Sequence; identical to SEQ ID NO: 183698
  derived and/or modified CDS sequence (opt4) from neuraminidase__InfluenzaA__AGQ81885

SEQ ID NO: 183701 - RNA, 1416 nt, Artificial Sequence; identical to SEQ ID NO: 183698
  derived and/or modified CDS sequence (opt4) from neuraminidase__InfluenzaA__AGQ81886

SEQ ID NO: 183702 - RNA, 1356 nt, Artificial Sequence
  derived and/or modified CDS sequence (opt4) from neuraminidase__InfluenzaA__AGQ81888
augaaccccaaccagaagcuguucgcccugagcggcguggccaucgcccugagcgugcugaaccugcugaucggccugagcaacgugggccugaacgugagccugcaccugaaggaggccggccccaagcaggaggagaaccugaccugcaugaccaccaaggagaccgagcugggcacccccagcuaccugcugcugaacaagagccugugcaacguggagggcuggguggugaucgccaaggacaacgccgugagauucggcgagagcgagcagaucaucaucaccagagagcccuacgugagcugcgaccccaacggcugcaagauguacgcccugcaccagggcaccaccaucagaaacaagcacagcaacggcaccauccacgacagaaccgccuucagaggccugaucagcaccccccugggcaccccccccaccgugagcaacagcgacuucaucugcgugggcuggagcagcaccaccugccacgacggcaucggcagaaugaccaucugcauccagggcaacaacgacaacgccaccgccaccguguacuacaacagaagacugaccaccaccaucaagaccugggccagaaacauccugagaacccaggagagcgagugcgugugccacaacggcaccugcgccguggugaugaccgacggcagcgccagcagccaggcccacaccaaggugauguacuuccacaagggccugguggugaaggaggaggcccugaagggcagcgccaagcacaucgaggagugcagcugcuacggccacaaccagaaggugaccugcgugugcagagacaacuggcagggcgccaacagacccaucaucgagaucgacaugaacacccuggagcacaccagcagauacgugugcaccggcauccugaccgacaccagcagacccggcgacaagcccaccggcgacugcagcaaccccaucaccggcagccccggcgcccccggcgugaagggcuucggcuuccugaacggcgacaacaccuggcugggcagaaccaucagccccagaagcagaagcggcuucgagaugcugaagauccccaacgccggcaucgaccccaacagcagaaucgccgagagacaggagaucguggacaacagcaacuggagcggcuacagcggcagcuucaucgacuacuggaacgacaacagcgagugcuacaaccccugcuucuacguggagcugaucagaggcagacccgaggaggccaaguacgugugguggaccagcaacagccugaucgcccugugcggcagccccuuccccgugggcagcggcagcuuccccgacggcgcccagauccaguacuucagcuga

SEQ ID NO: 183703 - RNA, 1356 nt, Artificial Sequence
  derived and/or modified CDS sequence (opt4) from neuraminidase__InfluenzaA__AGQ81889
augaaccccaaccagaagcuguucgcccugagcggcguggccaucgcccugagcgugcugaaccugcugaucggccugagcaacgugggccugaacgugagccugcaccugaaggagaccggccccaagcaggaggagaaccugaccugcaugaccaccaaggagaccgagcugggcacccccagcuaccugcugcugaacaagagccugugcaacguggagggcuggguggugaucgccaaggacaacgccgugagauucggcgagagcgagcagaucaucaucaccagagagcccuacgugagcugcgaccccaacggcugcaagauguacgcccugcaccagggcaccaccaucagaaacaagcacagcaacggcaccauccacgacagaaccgccuucagaggccugaucagcaccccccugggcaccccccccaccgugagcaacagcgacuucaucugcgugggcuggagcagcaccaccugccacgacggcaucggcagaaugaccaucugcauccagggcaacaacgacaacgccaccgccaccguguacuacaacagaagacugaccaccaccaucaagaccugggccagaaacauccugagaacccaggagagcgagugcgugugccacaacggcaccugcgccguggugaugaccgacggcagcgccagcagccaggcccacaccaaggugauguacuuccacaagggccugguggugaaggaggaggcccugaagggcagcgccaagcacaucgaggagugcagcugcuacggccacaaccagaaggugaccugcgugugcagagacaacuggcagggcgccaacagacccaucaucgagaucgacaugaacacccuggagcacaccagcagauacgugugcaccggcauccugaccgacaccagcagacccggcgacaagcccaccggcgacugcagcaaccccaucaccggcagccccggcgcccccggcgugaagggcuucggcuuccugaacggcgacaacaccuggcugggcagaaccaucagccccagaagcagaagcggcuucgagaugcugaagauccccaacgccggcaucgaccccaacagcagaaucgccgagagacaggagaucguggacaacagcaacuggagcggcuacagcggcagcuucaucgacuacuggaacgacaacagcgagugcuacaaccccugcuucuacguggagcugaucagaggcagacccgaggaggccaaguacgugugguggaccagcaacagccugaucgcccugugcggcagccccuuccccgugggcagcggcagcuuccccgacggcgcccagauccaguacuucagcuga

SEQ ID NO: 183704 - RNA, 1356 nt, Artificial Sequence; identical to SEQ ID NO: 183703
  derived and/or modified CDS sequence (opt4) from neuraminidase__InfluenzaA__AGQ81890

SEQ ID NO: 183705 - RNA, 1356 nt, Artificial Sequence; identical to SEQ ID NO: 183703
  derived and/or modified CDS sequence (opt4) from neuraminidase__InfluenzaA__AGQ81891

SEQ ID NO: 183706 - RNA, 1356 nt, Artificial Sequence
  derived and/or modified CDS sequence (opt4) from neuraminidase__InfluenzaA__AGQ81893
augaaccccaaccagaagcuguucgcccugagcggcguggccaucgcccugagcgugcugaaccugcugaucggccugagcaacgugggccugaacgugagccugcaccugaaggagaccggccccaagcaggaggagaaccugaccugcaugaccaccaaggagaccgagcugggcacccccagcuaccugcugcugaacaagagccugugcaacguggagggcuggguggugaucgccaaggacaacgccgugagauucggcgagagcgagcagaucaucaucaccagagagcccuacgugagcugcgaccccaacggcugcaagauguacgcccugcaccagggcaccaccaucagaaacaagcacagcaacggcaccauccacgacagaaccgccuucagaggccugaucagcaccccccugggcaccccccccaccgugagcaacagcgacuucaucugcgugggcuggagcagcaccaccugccacgacggcaucggcagaaugaccaucugcauccagggcaacaacgacaacgccaccgccaccguguacuacaacagaagacugaccaccaccaucaagaccugggccagaaacauccugagaacccaggagagcgagugcgugugccacaacggcaccugcgccguggugaugaccgacggcagcgccagcagccaggcccacaccaaggugauguacuuccacaagggccugguggugaaggaggaggcccugaagggcagcgccaagcacaucgaggagugcagcugcuacggccacaaccagaaggugaccugcgugugcagagacaacuggcagggcgccaacagacccaucaucgagaucgacaugaacacccuggagcacaccagcagauacgugugcaccggcauccugaccgacaccagcagacccggcgacaagcccaccggcgacugcagcaaccccaucaccggcagccccggcgcccccggcgugaagggcuucggcuuccugaacggcgacaacaccuggcugggcagaaccaucagccccagaagcagaagcggcuucgagaugcugaagauccccaacgccggcaucgaccccaacagcagaaucgccgagagacaggagaucguggacaacagcaacuggagcggcuacagcggcagcuucaucgacuacuggaacgacaacagcgagugcuacaaccccugcuucuacguggagcugaucagaggcagacccgaggaggccgaguacgugugguggaccagcaacagccugaucgcccugugcggcagccccuuccccgugggcagcggcagcuuccccgacggcgcccagauccaguacuucagcuga

SEQ ID NO: 183707 - RNA, 1356 nt, Artificial Sequence; identical to SEQ ID NO: 183703
  derived and/or modified CDS sequence (opt4) from neuraminidase__InfluenzaA__AGQ81894

SEQ ID NO: 183708 - RNA, 1356 nt, Artificial Sequence; identical to SEQ ID NO: 183703
  derived and/or modified CDS sequence (opt4) from neuraminidase__InfluenzaA__AGQ81895

SEQ ID NO: 183709 - RNA, 1356 nt, Artificial Sequence; identical to SEQ ID NO: 183703
  derived and/or modified CDS sequence (opt4) from neuraminidase__InfluenzaA__AGQ81896

SEQ ID NO: 183710 - RNA, 1356 nt, Artificial Sequence; identical to SEQ ID NO: 183703
  derived and/or modified CDS sequence (opt4) from neuraminidase__InfluenzaA__AGQ81897

SEQ ID NO: 183711 - RNA, 1356 nt, Artificial Sequence; identical to SEQ ID NO: 183703
  derived and/or modified CDS sequence (opt4) from neuraminidase__InfluenzaA__AGQ81898

SEQ ID NO: 183712 - RNA, 1356 nt, Artificial Sequence; identical to SEQ ID NO: 183703
  derived and/or modified CDS sequence (opt4) from neuraminidase__InfluenzaA__AGQ81899

SEQ ID NO: 183713 - RNA, 1356 nt, Artificial Sequence; identical to SEQ ID NO: 183703
  derived and/or modified CDS sequence (opt4) from neuraminidase__InfluenzaA__AGQ81900

SEQ ID NO: 183714 - RNA, 1356 nt, Artificial Sequence; identical to SEQ ID NO: 183703
  derived and/or modified CDS sequence (opt4) from neuraminidase__InfluenzaA__AGQ81901

SEQ ID NO: 183715 - RNA, 1356 nt, Artificial Sequence; identical to SEQ ID NO: 183703
  derived and/or modified CDS sequence (opt4) from neuraminidase__InfluenzaA__AGQ81902

SEQ ID NO: 183716 - RNA, 1356 nt, Artificial Sequence; identical to SEQ ID NO: 183703
  derived and/or modified CDS sequence (opt4) from neuraminidase__InfluenzaA__AGQ81903

SEQ ID NO: 183717 - RNA, 1356 nt, Artificial Sequence
  derived and/or modified CDS sequence (opt4) from neuraminidase__InfluenzaA__AGQ81904
augaaccccaaccagaagcuguucgcccugagcggcguggccaucgcccugagcgugcugaaccugcugaucggccugagcaacgugggccugaacgugagccugcaccugaaggagaccggccccaagcaggaggagaaccugaccugcaugaccaccaaggagaccgagcugggcacccccagcuaccugcugcugaacaagagccugugcaacguggagggcuggguggugaucgccaaggacaacgccgugagauucggcgagagcgagcagaucaucaucaccagagagcccuacgugagcugcgaccccaacggcugcaagauguacgcccugcaccagggcaccaccaucagaaacaagcacagcaacggcaccauccacgacagaaccgccuucagaggccugaucagcaccccccugggcaccccccccaccgugagcaacagcgacuucaucugcgugggcuggagcagcaccaccugccacgacggcaucggcagaaugaccaucugcauccagggcaacaacgacaacgccaccgccaccguguacuacaacagaagacugaccaccaccaucaagaccugggccagaaacauccugagaacccaggagagcgagugcgugugccacaacggcaccugcgccguggugaugaccgacggcagcgccagcagccaggcccacaccaaggugauguacuuccacaagggccugguggugaaggaggaggcccugaagggcagcgccaagcacaucgaggagugcagcugcuacggccacaaccagaaggugaccugcgugugcagagacaacuggcagggcgccaacagacccaucaucgagaucgacaugaacacccuggagcacaccagcagauacgugugcaccggcauccugaccgacaccagcagacccggcgacaagcccaccggcgacugcagcaaccccaucaccggcagccccggcgcccccggcgugaagggcuucggcuuccugaacggcgacaacaccuggcugggcagaaccaucagccccagaagcagaagcggcuucgagaugcugaagauccccaacgccggcaucgaccccaacagcagaaucaccgagagacaggagaucguggacaacagcaacuggagcggcuacagcggcagcuucaucgacuacuggaacgacaacagcgagugcuacaaccccugcuucuacguggagcugaucagaggcagacccgaggaggccaaguacgugugguggaccagcaacagccugaucgcccugugcggcagccccuuccccgugggcagcggcagcuuccccgacggcgcccagauccaguacuucagcuga

SEQ ID NO: 183718 - RNA, 1356 nt, Artificial Sequence; identical to SEQ ID NO: 183703
  derived and/or modified CDS sequence (opt4) from neuraminidase__InfluenzaA__AGQ81905

SEQ ID NO: 183719 - RNA, 1356 nt, Artificial Sequence
  derived and/or modified CDS sequence (opt4) from neuraminidase__InfluenzaA__AGQ81906
augaaccccaaccagaagcuguucgcccugagcggcguggccaucgcccugagcgugcugaaccugcugaucggccugagcaacgugggccugaacgugagccugcaccugaaggagaccggccccaagcaggaggagaaccugaccugcaugaccaccaaggagaccgagcugggcacccccagcuaccugcugcugaacaagagccugugcaacguggagggcuggguggugaucgccaaggacaacgccgugagauucggcgagagcgagcagaucaucaucaccagagagcccuacgugagcugcgaccccaacggcugcaagauguacgcccugcaccagggcaccaccaucagaaacaagcacagcaacggcaccauccacgacagaaccgccuucagaggccugaucagcaccccccugggcaccccccccaccgugagcaacagcgacuucaucugcgugggcuggagcagcaccaccugccacgacggcaucggcagaaugaccaucugcauccagggcaacaacgacaacgccaccgccaccguguacuacaacagaagacugaccaccaccaucaagaccugggccagaaacauccugagaacccaggagagcgagugcgugugccacaacggcaccugcgccguggugaugaccgacggcagcgccagcagccaggcccacaccaaggugauguacuuccacaagggccugguggugaaggaggaggcccugaagggcagcgccagacacaucgaggagugcagcugcuacggccacaaccagaaggugaccugcgugugcagagacaacuggcagggcgccaacagacccaucaucgagaucgacaugaacacccuggagcacaccagcagauacgugugcaccggcauccugaccgacaccagcagacccggcgacaagcccaccggcgacugcagcaaccccaucaccggcagccccggcgcccccggcgugaagggcuucggcuuccugaacggcgacaacaccuggcugggcagaaccaucagccccagaagcagaagcggcuucgagaugcugaagauccccaacgccggcaucgaccccaacagcagaaucgccgagagacaggagaucguggacaacagcaacuggagcggcuacagcggcagcuucaucgacuacuggaacgacaacagcgagugcuacaaccccugcuucuacguggagcugaucagaggcagacccgaggaggccaaguacgugugguggaccagcaacagccugaucgcccugugcggcagccccuuccccgugggcagcggcagcuuccccgacggcgcccagauccaguacuucagcuga

SEQ ID NO: 183720 - RNA, 1356 nt, Artificial Sequence; identical to SEQ ID NO: 183703
  derived and/or modified CDS sequence (opt4) from neuraminidase__InfluenzaA__AGQ81907

SEQ ID NO: 183721 - RNA, 1356 nt, Artificial Sequence
  derived and/or modified CDS sequence (opt4) from neuraminidase__InfluenzaA__AGQ81908
augaaccccaaccagaagcuguucgcccugagcggcguggccaucgcccugagcgugcugaaccugcugaucggccugagcaacgugggccugaacgugagccugcaccugaaggagaccggccccaagcaggaggagaaccugaccugcaugaccaccaaggagaccgagcugggcacccccagcuaccugcugcugaacaagagccugugcaacguggagggcuggguggugaucgccaaggacaacgccgugagauucggcgagagcgagcagaucaucaucaccagagagcccuacgugagcugcgaccccaacggcugcaagauguacgcccugcaccagggcaccaccaucagaaacaagcacagcaacggcaccauccacgacagaaccgccuucagaggccugaucagcaccccccugggcaccccccccaccgugagcaacagcgacuucaucugcgugggcuggagcagcaccaccugccacgacggcaucggcagaaugaccaucugcauccagggcaacaacgacaacgccaccgccaccguguacuacaacagaagacugaccaccaccaucaagaccugggccagaaacauccugagaacccaggagagcgagugcgugugccacaacggcaccugcgccguggugaugaccgacggcagcgccagcaaccaggcccacaccaaggugauguacuuccacaagggccugguggugaaggaggaggcccugaagggcagcgccaagcacaucgaggagugcagcugcuacggccacaaccagaaggugaccugcgugugcagagacaacuggcagggcgccaacagacccaucaucgagaucgacaugaacacccuggagcacaccagcagauacgugugcaccggcauccugaccgacaccagcagacccggcgacaagcccaccggcgacugcagcaaccccaucaccggcagccccggcgcccccggcgugaagggcuucggcuuccugaacggcgacaacaccuggcugggcagaaccaucagccccagaagcagaagcggcuucgagaugcugaagauccccaacgccggcaucgaccccaacagcagaaucaccgagagacaggagaucguggacaacagcaacuggagcggcuacagcggcagcuucaucgacuacuggaacgacaacagcgagugcuacaaccccugcuucuacguggagcugaucagaggcagacccgaggaggccaaguacgugugguggaccagcaacagccugaucgcccugugcggcagccccuuccccgugggcagcggcagcuuccccgacggcgcccagauccaguacuucagcuga

SEQ ID NO: 183722 - RNA, 1356 nt, Artificial Sequence; identical to SEQ ID NO: 183703
  derived and/or modified CDS sequence (opt4) from neuraminidase__InfluenzaA__AGQ81909

SEQ ID NO: 183723 - RNA, 1356 nt, Artificial Sequence
  derived and/or modified CDS sequence (opt4) from neuraminidase__InfluenzaA__AGQ81910
augaaccccaaccagaagcuguucgcccugagcggcguggccaucgcccugagcgugcugaaccugcugaucggccugagcaacgugggccugaacgugagccugcaccugaaggagaccggccccaagcaggaggagaaccugaccugcaugaccaccaaggagaccgagcugggcacccccagcuaccugcugcugaacaagagccugugcaacguggagggcuggguggugaucgccaaggacaacgccgugagauucggcgagagcgagcagaucaucaucaccagagagcccuacgugagcugcgaccccaacggcugcaagauguacgcccugcaccagggcaccaccaucagaaacaagcacagcaacggcaccauccacgacagaaccgccuucagaggccugaucagcaccccccugggcaccccccccaccgugagcaacagcgacuucaucugcgugggcuggagcagcaccaccugccacgacggcaucggcagaaugaccaucugcauccagggcaacaacgacaacgccaccgccaccguguacuacaacagaagacugaccaccaccaucaagaccugggccagaaacauccugagaacccaggagagcgagugcgugugccacaacggcaccugcgccguggugaugaccgacggcagcgccagcggccaggcccacaccaaggugauguacuuccacaagggccugguggugaaggaggaggcccugaagggcagcgccaagcacaucgaggagugcagcugcuacggccacaaccagaaggugaccugcgugugcagagacaacuggcagggcgccaacagacccaucaucgagaucgacaugaacacccuggagcacaccagcagcuacgugugcaccggcauccugaccgacaccagcagacccggcgacaagcccaccggcgacugcagcaaccccaucaccggcagccccggcgcccccggcgugaagggcuucggcuuccugaacggcgacaacaccuggcugggcagaaccaucagccccagaagcagaagcggcuucgagaugcugaagauccccaacgccggcaucgaccccaacagcagaaucgccgagagacaggagaucguggacaacagcaacuggagcggcuacagcggcagcuucaucgacuacuggaacgacaacagcgagugcuacaaccccugcuucuacguggagcugaucagaggcagacccgaggaggccaaguacgugugguggaccagcaacagccugaucgcccugugcggcagccccuuccccgugggcagcggcagcuuccccgacggcgcccagauccaguacuucagcuga

SEQ ID NO: 183724 - RNA, 1356 nt, Artificial Sequence
  derived and/or modified CDS sequence (opt4) from neuraminidase__InfluenzaA__AGQ81911
augaaccccaaccagaagcuguucgcccugagcggcguggccaucgcccugagcgugcugaaccugcugaucggccugagcaacgugggccugaacgugagccugcaccugaaggagaccggccccaagcaggaggagaaccugaccugcaugaccaccaaggagaccgagcugggcacccccagcuaccugcugcugaacaagagccugugcaacguggagggcuggguggugaucgccaaggacaacgccgugagauucggcgagagcgagcagaucaucaucaccagagagcccuacgugagcugcgaccccaacggcugcaagauguacgcccugcaccagggcaccaccaucagaaacaagcacagcaacggcaccauccacgacagaaccgccuucagaggccugaucagcaccccccugggcaccccccccaccgugagcaacagcgacuucaucugcgugggcuggagcagcaccaccugccacgacggcaucggcagaaugaccaucugcauccagggcaacaacgacaacgccaccgccaccguguacuacaacagaagacugaccaccaccaucaagaccugggccagaaacauccugagaacccaggagagcgagugcgugugccacaacggcaccugcgccguggugaugaccgacggcagcgccagcggccaggcccacaccaaggugauguacuuccacaagggccugguggugaaggaggaggcccugaagggcagcgccaagcacaucgaggagugcagcugcuacggccacaaccagaacgugaccugcgugugcagagacaacuggcagggcgccaacagacccaucaucgagaucgacaugaacacccuggagcacaccagcagauacgugugcaccggcauccugaccgacaccagcagacccggcgacaagcccaccggcgacugcagcaaccccaucaccggcagccccggcgcccccggcgugaagggcuucggcuuccugaacggcgacaacaccuggcugggcagaaccaucagccccagaagcagaagcggcuucgagaugcugaagauccccaacgccggcaucgaccccaacagcagaaucgccgagagacaggagaucguggacaacagcaacuggagcggcuacagcggcagcuucaucgacuacuggaacgacaacagcgagugcuacaaccccugcuucuacguggagcugaucagaggcagacccgaggaggccaaguacgugugguggaccagcaacagccugaucgcccugugcggcagccccuuccccgugggcagcggcagcuuccccgacggcgcccagauccaguacuucagcuga

SEQ ID NO: 183725 - RNA, 1356 nt, Artificial Sequence; identical to SEQ ID NO: 183703
  derived and/or modified CDS sequence (opt4) from neuraminidase__InfluenzaA__AGQ81912

SEQ ID NO: 183726 - RNA, 1356 nt, Artificial Sequence
  derived and/or modified CDS sequence (opt4) from neuraminidase__InfluenzaA__AGQ81913
augaaccccaaccagaagcuguucgcccugagcggcguggccaucacccugagcgugcugaaccugcugaucggccugagcaacgugggccugaacgugagccugcaccugaaggagaccggccccaagcaggaggagaaccugaccugcaugaccaccaaggagaccgagcugggcacccccagcuaccugcugcugaacaagagccugugcaacguggagggcuggguggugaucgccaaggacaacgccgugagauucggcgagagcgagcagaucaucaucaccagagagcccuacgugagcugcgaccccaacggcugcaagauguacgcccugcaccagggcaccaccaucagaaacaagcacagcaacggcaccauccacgacagaaccgccuucagaggccugaucagcaccccccugggcaccccccccaccgugagcaacagcgacuucaucugcgugggcuggagcagcaccaccugccacgacggcaucggcagaaugaccaucugcauccagggcaacaacgacaacgccaccgccaccguguacuacaacagaagacugaccaccaccaucaagaccugggccagaaacauccugagaacccaggagagcgagugcgugugccacaacggcaccugcgccguggugaugaccgacggcagcgccagcggccaggcccacaccaaggugauguacuuccacaagggccugguggugaaggaggaggcccugaagggcagcgccaagcacaucgaggagugcagcugcuacggccacaaccagaaggugaccugcgugugcagagacaacuggcagggcgccaacagacccaucaucgagaucgacaugaacacccuggagcacaccagcagauacgugugcaccggcauccugaccgacaccagcagacccggcgacaagcccaccggcgacugcagcaaccccaucaccggcagccccggcgcccccggcgugaagggcuucggcuuccugaacggcgacaacaccuggcugggcagaaccaucagccccagaagcagaagcggcuucgagaugcugaagauccccaacgccggcaucgaccccaacagcagaaucgccgagagacaggagaucguggacaacagcaacuggagcggcuacagcggcagcuucaucgacuacuggaacgacaacagcgagugcuacaaccccugcuucuacguggagcugaucagaggcagacccgaggaggccaaguacgugugguggaccagcaacagccugaucgcccugugcggcagccccuuccccgugggcagcggcagcuuccccgacggcgcccagauccaguacuucagcuga

SEQ ID NO: 183727 - RNA, 1356 nt, Artificial Sequence; identical to SEQ ID NO: 183703
  derived and/or modified CDS sequence (opt4) from neuraminidase__InfluenzaA__AGQ81914

SEQ ID NO: 183728 - RNA, 1356 nt, Artificial Sequence; identical to SEQ ID NO: 183703
  derived and/or modified CDS sequence (opt4) from neuraminidase__InfluenzaA__AGQ81915

SEQ ID NO: 183729 - RNA, 1416 nt, Artificial Sequence
  derived and/or modified CDS sequence (opt4) from neuraminidase__InfluenzaA__AGQ81917
augaaccccaaccagaagcuguucgcccugagcggcguggccaucgcccugagcgugcugaaccugcugaucggccugagcaacgugggccugaacgugagccugcaccugaaggagaccggccccaagcaggaggagaaccugaccugcaugaccaucaaccagaacaacaccaccgugguggagaacaccuacgugaacaacaccaccaucaucaccaaggagaccgagcuggagacccccaacuaccugcugcugaacaagagccugugcaacguggagggcuggguggugguggccaaggacaacgccgugagauucggcgagagcgagcagaucaucgugaccagagagcccuacgugagcugcgaccccaacggcugcaagauguacgcccugcaccagggcaccaccaucagaaacaagcacagcaacggcaccauccacgacagaaccgccuucagaggccugaucagcaccccccugggcaccccccccaccgugagcaacagcgacuucaucugcgugggcuggagcagcaccaccugccacgacggcaucggcagaaugaccaucugcauccagggcaacaacgacaacgccaccgccaccguguacuacaacagaagacugaccaccaccaucaagaccugggccagaaacauccugagaacccaggagagcgagugcgugugccacaacggcaccugcgccguggugaugaccgacggcagcgccagcagccaggcccacaccaaggugauguacuuccacaagggccuggugaucaaggaggaggcccugaagggcagcgccaagcacaucgaggagugcagcugcuacggccacaaccagaaggugaccugcgugugcagagacaacuggcagggcgccaacagacccaucaucgagaucgacaugaacacccuggagcacaccagcagauacgugugcaccggcauccugaccgacaccagcagacccggcgacaagcccaccggcgacugcagcaaccccaucaccggcagccccggcgcccccggcgugaagggcuucggcuuccugaacggcgacaacaccuggcugggcagaaccaucagccccagaagcagaagcggcuucgagaugcugaagauccccaacgccggcaucgaccccaacagcagaaucgccgagagacaggagaucguggacaacagcaacuggagcggcuacagcggcagcuucaucgacuacuggaacgacaacagcgagugcuacaaccccugcuucuacguggagcugaucagaggcagacccgaggaggccaaguacgugugguggaccagcaacagccugaucgcccugugcggcagccccuuccccgugggcagcggcagcuuccccgacggcgcccagauccaguacuucagcuga

SEQ ID NO: 183730 - RNA, 1356 nt, Artificial Sequence
  derived and/or modified CDS sequence (opt4) from neuraminidase__InfluenzaA__AGQ81918
augaaccccaaccagaagcuguucgcccugagcggcguggccaucgcccugagcgugcugaaccugcugaucggccugagcaacgugggccugaacgugagccugcaccugaaggagaccggccccaagcaggaggagaaccugaccugcaugaccaccaaggagaccgagcugggcacccccagcuaccugcugcugaacaagggccugugcaacguggagggcuggguggugaucgccaaggacaacgccgugagauucggcgagagcgagcagaucaucaucaccagagagcccuacgugagcugcgaccccaacggcugcaagauguacgcccugcaccagggcaccaccaucagaaacaagcacagcaacggcaccauccacgacagaaccgccuucagaggccugaucagcaccccccugggcaccccccccaccgugagcaacagcgacuucaucugcgugggcuggagcagcaccaccugccacgacggcaucggcagaaugaccaucugcauccagggcaacaacgacaacgccaccgccaccguguacuacaacagaagacugaccaccaccaucaagaccugggccagaaacauccugagaacccaggagagcgagugcgugugccacaacggcaccugcgccguggugaugaccgacggcagcgccagcagccaggcccacaccaaggugauguacuuccacaagggccugguggugaaggaggaggcccugaagggcagcgccaagcacaucgaggagugcagcugcuacggccacaaccagaaggugaccugcgugugcagagacaacuggcagggcgccaacagacccaucaucgagaucgacaugaacacccuggagcacaccagcagauacgugugcaccggcauccugaccgacaccagcagacccggcgacaagcccaccggcgacugcagcaaccccaucaccggcagccccggcgcccccggcgugaagggcuucggcuuccugaacggcgacaacaccuggcugggcagaaccaucagccccagaagcagaagcggcuucgagaugcugaagauccccaacgccggcaucgaccccaacagcagaaucgccgagagacaggagaucguggacaacagcaacuggagcggcuacagcggcagcuucaucgacuacuggaacgacaacagcgagugcuacaaccccugcuucuacguggagcugaucagaggcagacccgaggaggccaaguacgugugguggaccagcaacagccugaucgcccugugcggcagccccuuccccgugggcagcggcagcuuccccgacggcgcccagauccaguacuucagcuga

SEQ ID NO: 183731 - RNA, 1356 nt, Artificial Sequence; identical to SEQ ID NO: 183703
  derived and/or modified CDS sequence (opt4) from neuraminidase__InfluenzaA__AGQ81919

SEQ ID NO: 183732 - RNA, 1356 nt, Artificial Sequence; identical to SEQ ID NO: 183703
  derived and/or modified CDS sequence (opt4) from neuraminidase__InfluenzaA__AGQ81920

SEQ ID NO: 183733 - RNA, 1356 nt, Artificial Sequence
  derived and/or modified CDS sequence (opt4) from neuraminidase__InfluenzaA__AGQ81921
augaaccccaaccagaagcuguucgcccugagcggcguggccaucgcccugagcgugcugaaccugcugaucggccugagcaacgugggccugaacgugagccugcaccugaaggagaccggccccaagcaggaggagaaccugaccugcaugaccaccaaggagaccgagcugggcacccccagcuaccugcugcugaacaagagccugugcaacguggagggcuggguggugaucgccaaggacaacgccgugagauucggcgagagcgagcagaucaucaucaccagagagcccuacgugagcugcgaccccaacggcugcaagauguacgcccugcaccagggcaccaccaucagaaacaagcacagcaacggcaccauccacgacagaaccgccuucagaggccugaucagcaccccccugggcaccccccccaccgugagcaacagcgacuucaucugcgugggcuggagcagcaccaccugccacgacggcaucggcagaaugaccaucugcauccagggcaacaacgacaacgccaccgccaccguguacuacaacagaagacugaccaccaccaucaagaccugggccagaaacauccugagaacccaggagagcgagugcgugugccacaacggcaccugcgccguggugaugaccgacggcagcgccagcggccaggcccacaccaaggugauguacuuccacaagggccugguggugaaggaggaggcccugaagggcagcgccaagcacaucgaggagugcagcugcuacggccacaaccagaaggugaccugcgugugcagagacaacuggcagggcgccaacagacccaucaucgagaucgacaugaacacccuggagcacaccagcagauacgugugcaccggcauccugaccgacaccagcagacccggcgacaagcccaccggcgacugcagcaaccccaucaccggcagccccggcgcccccggcgugaagggcuucggcuuccugaacggcgacaacaccuggcugggcagaaccaucagccccagaagcagaagcggcuucgagaugcugaagauccccaacgccggcaucgaccccaacagcagaaucgccgagagacaggagaucguggacaacagcaacuggagcggcuacagcggcagcuucaucgacuacuggaacgacaacagcgagugcuacaaccccugcuucuacguggagcugaucagaggcagacccgaggaggccaaguacgugugguggaccagcaacagccugaucgcccugugcggcagccccuuccccgugggcagcggcagcuuccccgacggcgcccagauccaguacuucagcuga

SEQ ID NO: 183734 - RNA, 1356 nt, Artificial Sequence; identical to SEQ ID NO: 183703
  derived and/or modified CDS sequence (opt4) from neuraminidase__InfluenzaA__AGQ81922

SEQ ID NO: 183735 - RNA, 1356 nt, Artificial Sequence; identical to SEQ ID NO: 183733
  derived and/or modified CDS sequence (opt4) from neuraminidase__InfluenzaA__AGQ81923

SEQ ID NO: 183736 - RNA, 1356 nt, Artificial Sequence
  derived and/or modified CDS sequence (opt4) from neuraminidase__InfluenzaA__AGQ81924
augaaccccaaccagaagcuguucgcccugagcggcguggccaucgcccugagcgugcugaaccugcugaucggccugagcaacgugggccugaacgugagccugcaccugaaggagaccggccccaagcaggaggagaaccugaccugcaugaccaccaaggagaccgagcugggcacccccagcuaccugcugcugaacaagagccugugcaacguggagggcuggguggugaucgccaaggacaacgccgugagauucggcgagagcgagcagaucaucaucaccagagagcccuacgugagcugcgaccccaacggcugcaagauguacgcccugcaccagggcaccaccaucagaaacaagcacagcaacggcaccauccacgacagaaccgccuucagaggccugaucagcaccccccugggcaccccccccaccgugagcaacagcgacuucaucugcgugggcuggagcagcaccaccugccacgacggcaucggcagaaugaccaucugcauccagggcaacaacgacaacgccaccgccaccguguacuacaacagaagacugaccaccaccaucaagaccugggccagaaacauccugagaacccaggagagcgagugcgugugccacaacggcaccugcgccguggugaugaccgacggcagcgccaacagccaggcccacaccaaggugauguacuuccacaagggccugguggugaaggaggaggcccugaagggcagcgccaagcacaucgaggagugcagcugcuacggccacaaccagaaggugaccugcgugugcagagacaacuggcagggcgccaacagacccaucaucgagaucgacaugaacacccuggagcacaccagcagauacgugugcaccggcauccugaccgacaccagcagacccggcgacaagcccaccggcgacugcagcaaccccaucaccggcagccccggcgcccccggcgugaagggcuucggcuuccugaacggcgacaacaccuggcugggcagaaccaucagccccagaagcagaagcggcuucgagaugcugaagauccccaacgccggcaucgaccccaacagcagaaucgccgagagacaggagaucguggacaacagcaacuggagcggcuacagcggcagcuucaucgacuacuggaacgacaacagcgagugcuacaaccccugcuucuacguggagcugaucagaggcagacccgaggaggccaaguacgugugguggaccagcaacagccugaucgcccugugcggcagccccuuccccgugggcagcggcagcuuccccgacggcgcccagauccaguacuucagcuga

SEQ ID NO: 183737 - RNA, 1356 nt, Artificial Sequence; identical to SEQ ID NO: 183703
  derived and/or modified CDS sequence (opt4) from neuraminidase__InfluenzaA__AGQ81925

SEQ ID NO: 183738 - RNA, 1356 nt, Artificial Sequence; identical to SEQ ID NO: 183703
  derived and/or modified CDS sequence (opt4) from neuraminidase__InfluenzaA__AGQ81926

SEQ ID NO: 183739 - RNA, 1356 nt, Artificial Sequence; identical to SEQ ID NO: 183703
  derived and/or modified CDS sequence (opt4) from neuraminidase__InfluenzaA__AGQ81927

SEQ ID NO: 183740 - RNA, 1356 nt, Artificial Sequence; identical to SEQ ID NO: 183703
  derived and/or modified CDS sequence (opt4) from neuraminidase__InfluenzaA__AGQ81928

SEQ ID NO: 183741 - RNA, 1356 nt, Artificial Sequence; identical to SEQ ID NO: 183703
  derived and/or modified CDS sequence (opt4) from neuraminidase__InfluenzaA__AGQ81929

SEQ ID NO: 183742 - RNA, 1413 nt, Artificial Sequence
  derived and/or modified CDS sequence (opt4) from neuraminidase__InfluenzaA__AGQ81930
augaaccccaaccagaagaucaucaccaucggcagcaucagccugggccuggugguguucaacgugcugcugcacguggugagcaucaucgugaccgugcuggugcugggcagaggcggcaacagcggcaucugcaacgagaccguggugagagaguacaacgagaccgugagaaucgagaagaucacccaguggcacaacaccagcgugguggaguacgugcccuacuggagcgagggcaacuacaugaacaacaccgaggccaucugcgacgugaagggcuucgcccccuucagcaaggacaacggcaucagaaucggcagcagaggccacguguucgugaucagagagcccuucgugagcugcagccccaccgagugcagaaccuucuuccugacccagggcagccugcugaacgacaagcacagcaacggcaccgugaaggacagaagccccuucagaacccugaugagcguggaggugggccagagccccaacguguaccaggccagauucgaggccguggccuggagcgccaccgccugccacgacggcaagaaguggaugaccaucggcgugaccggccccgacagcaaggccguggccguggugcacuacggcggcgugcccaccgacguggugaacagcugggccggcgacauccugagaacccaggagagcagcugcaccugcauccagggcaacugcuacugggugaugaccgacggccccgccaacagacaggcccaguacagaaucuacaaggccaaccagggcaagaucgugggccagaccgacaucagcuucaacggcggccacaucgaggagugcagcugcuaccccaacgacggcaagguggagugcgugugcagagacaacuggaccggcaccaacagacccgugcuggugaucagccccgaccugagcuacagagugggcuaccugugcgccggccugcccagcgacacccccagaggcgaggacgcccaguucaccggcagcugcaccagccccaugggcaaccagggcuacggcgugaagggcuucggcuucagacagggcaccgacguguggaugggcagaaccaucagcagaaccagcagaagcggcuucgagauccugagaaucaagaacggcuggacccagaccagcaaggagcaggugagaaagcagguggugguggacaaccugaacuggagcggcuacagcggcagcuucacccugcccguggagcugagcggcaaggacugccuggugcccugcuucuggguggagaugaucagaggcaagcccgaggagaagaccaucuggaccagcagcagcagcaucgugaugugcggcguggacuacgagguggccgacuggagcuggcacgacggcgccauccugcccuucgacaucgacaagauguga

SEQ ID NO: 183743 - RNA, 1413 nt, Artificial Sequence
  derived and/or modified CDS sequence (opt4) from neuraminidase__InfluenzaA__AGQ81931
augaaccccaaccagaagaucaucaccaucggcagccugagccugggccugguggugcugaacauccugcugcacaucaucagcaucaccaucaccgugcuggugauccccagaaacggcaacaccggcagcugcaacgagaccgugaucagagaguacaacgagaccgugagaaucgagaagaucacccaguggcacaacaccaacaucaucgaguacaucgagaagcccgagaacgaccuguucaugaacaacaccggcccccugugcgacgccaagggcuucgcccccuucagcaaggacaacggcaucagaaucggcagcaagggccacguguucgugaucagagagcccuucgugagcugcagccccaccgagugcagaaccuucuuccugacccagggcagccugcugaacgacaagcacagcaacggcaccgugaaggacagaagccccuacagaacccugaugagcguggagaucggccagagccccaacguguaccaggccagauucgaggccguggccuggagcgccaccgccugccacgacggcaagaaguggaugaccaucggcgugaccggccccgacgccaaggccguggccguggugcacuacggcggcauccccaccgacgugaucaacagcugggccggcgacauccugagaacccaggagagcagcugcaccugcauccagggcgagugcuacugggugaugaccgacggccccgccaacagacaggcccaguacagagccuucaaggccaagcagggcaagaucaucggccagaccgagaucagcuucaacggcggccacaucgaggagugcagcugcuaccccaacgagggcaagguggagugcgugugcagagacaacuggaccggcaccaacagacccgugcuggugaucagcagcgaccugagcuacagagugggcuaccugugcgccggccugcccagcgacacccccagaggcgaggacagccaguucaccggcagcugcaccagccccaugggcaaccagggcuacggcgugaagggcuucggcuucagacagggcaacgacguguggaugggcagaaccaucagcagaaccagcagaagcggcuucgagauccugaagaucagaaacggcuggauccagaacagcaaggagcagaucaagagacagguggugguggacaacagcaacuggagcggcuacagcggcagcuucacccugcccguggagcugaccagaagaaacugccuggugcccugcuucuggguggagaugaucagaggcaagcccgaggagaagaccaucuggaccagcagcagcagcaucgugaugugcggcguggaccacgagaucgccaacuggagcuggcacgacggcgccauccugcccuucgacaucgacaagauguga

SEQ ID NO: 183744 - RNA, 1413 nt, Artificial Sequence
  derived and/or modified CDS sequence (opt4) from neuraminidase__InfluenzaA__AGQ81932
augaaccccaaccagaagaucaucaccaucggcagcaucagccugggccuggugguguucaacgugcugcugcacguggugagcaucaucgugaccgugcugauccugggcagaggcggcaacaacggcaucugcaacgagaccguggugagagaguacaacgagaccgugagaaucgagaagaucacccaguggcacaacaccagcgugguggaguacgugcccuacuggaacgagggcaccuacaugaacaacaccgaggccaucugcgacgugaagggcuucgcccccuucagcaaggacaacggcaucagaaucggcagcagaggccacguguucgugaucagagagcccuucgugagcugcagccccaccgagugcagaaccuucuuccugacccagggcagccugcugaacgacaagcacagcaacggcaccgugaaggacagaagccccuucagaacccugaugagcguggaggugggccagagccccaacguguaccaggccagauucgaggccguggccuggagcgccaccgccugccacgacggcaagaaguggaugaccaucggcgugaccggcagcgacagcaaggccguggccguggugcacuacggcggcgugcccaccgacguggugaacagcugggccggcgacauccugagaacccaggagagcagcugcaccugcauccagggcaacugcuacugggugaugaccgacggccccgccaacagacaggcccaguacagaaucuacaaggccaaccagggcaaggugaucggccagaccgacaucagcuucaacggcggccacaucgaggagugcagcugcuaccccaacgacggcaagguggagugcgugugcagagacaacuggaccggcaccaacagacccgugcuggugaucagccccgaccugagcuacagagugggcuaccugugcgccggccugcccagcgacacccccagaggcgaggacgcccaguucaccggcagcugcaccagccccaugggcaaccagggcuacggcgugaagggcuucggcuucagacagggcaccgacguguggaugggcagaaccaucagccagaccagcagaagcggcuucgagauccugagagugaagaacggcuggacccagaccagcaaggagcaggugagaaagcagguggugguggacaaccugaacuggagcggcuacagcggcagcuucacccugcccaucgagcugagcggcaaggacugccuggugcccugcuucuggguggagaugaucagaggcaagcccgaggagaagagcaucuggaccagcagcagcagcaucgugaugugcggcguggacuacgagguggccgacuggagcuggcacgacggcgccauccugcccuucgacaucgacaagauguga

SEQ ID NO: 183745 - RNA, 1413 nt, Artificial Sequence
  derived and/or modified CDS sequence (opt4) from neuraminidase__InfluenzaA__AGQ81934
augaaccccaaccagaagauccugugcaccagcgccaccgccaucgugaucggcaccaucgccgugcugaucggcaucgccaaccugggccugaacaucggccugcaccugaagcccagcugcaacugcagccacagccagcccgagaccaccaacaccagccagaccaucaucaacaacuacuacaacgagaccaacaucacccagaucagcaacaccaacauccagauggaggagagagccagcagagacuucaacaaccugaccaagggccugugcaccaucaacagcuggcacaucuacggcaaggacaacgccgugagaaucggcgagaacagcgacgugcuggugaccagagagcccuacgugagcugcgaccccgacgagugcagauucuacgcccugagccagggcaccaccaucagaggcaagcacagcaacggcaccauccacgacagaagccaguacagagcccugaucagcuggccccugagcagcccccccaccguguacaacagcagaguggagugcaucggcuggagcagcaccagcugccacgacggcaagagcagaaugagcaucugcaucagcggccccaacaacaacgccagcgccguggugugguacaacagaagacccguggccgagaucaacaccugggccagaaacauccugagaacccaggagagcgagugcgugugccacaacggcgugugccccgugguguucaccgacggcagcgccaccggccccgccgacaccagaaucuacuacuucaaggagggcagaauccugaagugggagagccugaccggcaccgccaagcacaucgaggagugcagcugcuacggcgagagaaccggcaucaccugcaccugcagagacaacuggcagggcagcaacagacccgugaucagaaucgaccccguggccaugacccacaccagccaguacaucugcagccccgugcugaccgacaaccccagacccaacgaccccaacgugggcaagugcaacgaccccuaccccggcaacaacaacaacggcgugaagggcuucagcuaccuggacggcgugaacaccuggcugggcagaaccaucagcaccgccagcagaagcggcuacgagaugcugaaggugcccaacgcccugaccgacgacagaagcaagcccauccagggccagaccaucgugcugaacaccgacuggagcggcuacagcggcagcuucauggacuacugggccgagggcgacugcuacagagccugcuucuacguggagcugaucagaggcagacccaaggaggacaaggugugguggaccagcaacagcaucgugagcaugugcagcagcaccgaguuccugggccagugggacuggcccgacggcgccaagaucgaguacuuccuguga

SEQ ID NO: 183746 - RNA, 1413 nt, Artificial Sequence; identical to SEQ ID NO: 183745
  derived and/or modified CDS sequence (opt4) from neuraminidase__InfluenzaA__AGQ81935

SEQ ID NO: 183747 - RNA, 1413 nt, Artificial Sequence; identical to SEQ ID NO: 183745
  derived and/or modified CDS sequence (opt4) from neuraminidase__InfluenzaA__AGQ81936

SEQ ID NO: 183748 - RNA, 1413 nt, Artificial Sequence; identical to SEQ ID NO: 183745
  derived and/or modified CDS sequence (opt4) from neuraminidase__InfluenzaA__AGQ81937

SEQ ID NO: 183749 - RNA, 1413 nt, Artificial Sequence; identical to SEQ ID NO: 183745
  derived and/or modified CDS sequence (opt4) from neuraminidase__InfluenzaA__AGQ81938

SEQ ID NO: 183750 - RNA, 1413 nt, Artificial Sequence; identical to SEQ ID NO: 183745
  derived and/or modified CDS sequence (opt4) from neuraminidase__InfluenzaA__AGQ81939

SEQ ID NO: 183751 - RNA, 1413 nt, Artificial Sequence
  derived and/or modified CDS sequence (opt4) from neuraminidase__InfluenzaA__AGQ81940
augaaccccaaccagaagauccugugcaccagcgccaccgccaucaucaucggcgccaucgccgugcugaucggcaucgccaaccugggccugaacaucggccugcaccugaagcccagcugcaacugcagccacagccagcccgagaccaccaacaccagccagaccaucaucaacaacuacuacaacgagaccaacaucacccagaucagcaacaccaacauccagauggaggagagagccagcaagggcuucaacaaccugaccaagggccugugcaccaucaacagcuggcacaucuacggcaaggacaacgccgugagaaucggcgagagcagcgacgugcuggugaccagagagcccuacgugagcugcgaccccgacgagugcagauucuacgcccugagccagggcaccaccaucagaggcaagcacagcaacggcaccauccacgacagaagccaguacagagcccugaucagcuggccccugagcagcccccccaccguguacaacagcagaguggagugcaucggcuggagcagcaccagcugccacgacggcaagagcagaaugagcaucugcaucagcggccccaacaacaacgccagcgccguggugugguacaacagaagacccguggccgagaucaacaccugggccagaaacauccugagaacccaggagagcgagugcgugugccacaacggcgugugccccgugguguucaccgacggcagcgccaccggccccgccgacaccagaaucuacuacuucaaggagggcaagauccugaagugggagagccuggccggcaccgccaagcacaucgaggagugcagcugcuacggcgagagaaccggcaucaccugcaccugcagagacaacuggcagggcagcaacagacccgugauccagaucgaccccguggccaugacccacaccagccaguacaucugcagccccgugcugaccgacaaccccagacccaacgaccccaacaucggcaagugcaacgaccccuaccccggcaacaacaacaacggcgugaagggcuucagcuaccuggacggcgccaacaccuggcugggcagaaccaucagcaccgccagcagaagcggcuacgagaugcugaaggugcccaacgcccugaccgacgacagaagcaagcccauccagggccagaccaucgugcugaacaccgacuggagcggcuacagcggcagcuucauggacuacugggccgagggcgacugcuacagagccugcuucuacguggagcugaucagaggcagacccaaggaggacaaggugugguggaccagcaacagcaucgugagcaugugcagcagcaccgaguuccugggccaguggaacuggcccgacggcgccaagaucgaguacuuccuguga

SEQ ID NO: 183752 - RNA, 1413 nt, Artificial Sequence
  derived and/or modified CDS sequence (opt4) from neuraminidase__InfluenzaA__AGQ81941
augaaccccaaccagaagauccugugcaccagcgccaccgccaucaucaucggcaccaucgccgugcugaucggcguggccaaccugggccugaacaucggccugcaccugaagcccggcugcaacugcagccacagccagcccgaggccaccaacaccagccagaccaucaucaacaacuacuacaacgagaccaacaucacccagaucagcaacaccaacauccagauggaggagagacccaacagaggcuucaacaaccugaccaagggccugugcaccaucaacagcuggcacaucuacggcaaggacaacgccgugagaaucggcgagaacagcgacgugcuggugaccagagagcccuacgugagcugcgaccccgacgagugcagauucuacgcccugagccagggcaccaccaucagaggcaagcacagcaacggcaccauccacgacagaagccaguacagagcccugaucagcuggccccugagcagcccccccaccguguacaacagcagaguggagugcaucggcuggagcagcaccagcugccacgacggcaagagcagaaugagcaucugcaucagcggccccaacaacaacgccagcgccguggugugguacaacagaagacccguggccgagaucaacaccugggccagaaacauccugagaacccaggagagcgagugcgugugccacaacggcgugugccccgugguguucaccgacggcagcgccaccggccccgccgacaccagaguguacuacuucagagagggcaagauccugaagugggagagccugaccggcaccgccagacacaucgaggagugcagcugcuacggcgagagaaccggcaucaccugcaccugcagagacaacuggcagggcagcaacagacccgugauccagaucgaccccguggccaugacccacaccagccaguacaucugcagccccgugcugaccgacaaccccagacccaacgaccccaacgugggcaagugcaacgaccccuaccccggcaacaacaacaacggcgugaagggcuucagcuaccuggacggcgugaacaccuggcugggcagaaccaucagcaccgccagcagaagcggcuacgagaugcugaaggugcccaacgcccugaccgacgacagaagcaagcccauccagggccagaccaucgugcugaacaccgacuggagcggcuacagcggcagcuucauggacuacugggccgagggcgacugcuacagagccugcuucuacguggagcugaucagaggcagacccaaggaggacaaggugugguggaccagcaacagcaucgugagcaugugcagcagcaccgaguuccugggccagugggacuggcccgacggcgccaagaucgaguacuuccuguga

SEQ ID NO: 183753 - RNA, 1413 nt, Artificial Sequence
  derived and/or modified CDS sequence (opt4) from neuraminidase__InfluenzaA__AGQ81942
augaaccccaaccagaagauccugugcaccagcgccaccgccaucaucaucggcaccaucgccgugcugaucggcguggccaaccugggccugaacaucggccugcaccugaagcccggcugcaacugcagccacagccagcccgaggccaccaacaccagccagaccaucaucaacaacuacuacaacgagaccaacaucacccagaucagcaacaccaacauccagauggaggagagacccagcagaggcuucaacaaccugaccaagggccugugcaccaucaacagcuggcacaucuacggcaaggacaacgccgugagaaucggcgagaacagcgacgugcuggugaccagagagcccuacgugagcugcgaccccgacgagugcagauucuacgcccugagccagggcaccaccaucagaggcaagcacagcaacggcaccauccacgacagaagccaguacagagcccugaucagcuggccccugagcagcccccccaccguguacaacagcagaguggagugcaucggcuggagcagcaccagcugccacgacggcaagagcagaaugagcaucugcaucagcggccccaacaacaacgccagcgccaucgugugguacaacagaagacccguggccgagaucaacaccugggccagaaacauccugagaacccaggagagcgagugcgugugccacaacggcgugugccccgugguguucaccgacggcagcgccaccggccccgccgacaccagaguguacuacuucagagagggcaagauccugaagugggagagccugaccggcaccgccagacacaucgaggagugcagcugcuacggcgagagaaccggcaucaccugcaccugcagagacaacuggcagggcagcaacagacccgugauccagaucgaccccguggccaugacccacaccagccaguacaucugcagccccgugcugaccgacaaccccagacccaacgaccccaacgugggcaagugcaacgaccccuaccccggcaacaacaacaacggcgugaagggcuucagcuaccuggacggcgugaacaccuggcugggcagaaccaucagcaccgccagcagaagcggcuacgagaugcugaaggugcccaacgcccugaccgacgacagaagcaagcccauccagggccagaccaucauccugaacaccgacuggagcggcuacagcggcagcuucauggacuacugggccgagggcgacugcuacagagccugcuucuacguggagcugaucagaggcagacccaaggaggacaaggugugguggaccagcaacagcaucgugagcaugugcagcagcaccgaguuccugggccagugggacuggcccgacggcgccaagaucgaguacuuccuguga

SEQ ID NO: 183754 - RNA, 1413 nt, Artificial Sequence
  derived and/or modified CDS sequence (opt4) from neuraminidase__InfluenzaA__AGQ81943
augaaccccaaccagaagauccugugcaccagcgccaccgccaucaucaucggcgccaucgccgugcugaucggcaucgccaaccugggccugaacaucggccugcaccugaagcccagcugcaacugcagccacagccagcccgagaccaccaacaccagccagaccaucaucaacaacuacuacaacgagaccaacaucacccagaucagcaacaccaacauccagauggaggagagaaccagcagaggcuucaacaaccugaccaagggccugugcaccaucaacagcuggcacaucuacggcaaggacaacgccaucagaaucggcgagagcagcgacgugcuggugaccagagagcccuacgugagcugcgaccccgacgagugcagauucuacgcccugagccagggcaccaccaucagaggcaagcacagcaacggcaccauccacgacagaagccaguacagagcccugaucagcuggccccugagcagcccccccaccguguacaacagcagaguggagugcaucggcuggagcagcaccagcugccacgacggcaagagcagaaugagcaucugcaucagcggccccaacaacaacgccagcgccguggugugguacaacagaagacccguggccgagaucaacaccugggccagaaacauccugagaacccaggagagcgagugcgugugccacaacggcgugugccccgugguguucaccgacggcagcgccaccggccccgccgacaccagaaucuacuacuucaaggagggcagaauccugaagugggagagccugaccggcaccgccaagcacaucgaggagugcagcugcuacggcgagagaaccggcaucaccugcaccugcagagacaacuggcagggcagcaacagacccgugauccagaucgaccccguggccaugacccacaccagccaguacaucugcagccccgugcugaccgacaaccccagacccaacgaccccaacaucggcaagugcaacgaccccuaccccggcaacaacaacaacggcgugaagggcuucagcuaccuggacggcgccaacaccuggcugggcagaaccaucagcaccgccagcagaagcggcuacgagaugcugaaggugcccaacgcccugaccgacgacagaagcaagcccauccagggccagaccaucgugcugaacaccgacuggagcggcuacagcggcagcuucauggacuacugggccgagggcgacugcuacagagccugcuucuacguggagcugaucagaggcagacccaaggaggacaaggugugguggaccagcaacagcaucgugagcaugugcagcagcaccgaguuccugggccaguggaacuggcccgacggcgccaagaucgaguacuuccuguga

SEQ ID NO: 183755 - RNA, 1413 nt, Artificial Sequence; identical to SEQ ID NO: 183745
  derived and/or modified CDS sequence (opt4) from neuraminidase__InfluenzaA__AGQ81944

SEQ ID NO: 183756 - RNA, 1413 nt, Artificial Sequence
  derived and/or modified CDS sequence (opt4) from neuraminidase__InfluenzaA__AGQ81947
augaaccccaaccagaagauccugugcaccagcgccaccgcccuggugaucggcaccaucgccgugcugaucggcaucgccaaccugggccugaacaucggccugcaccugaagcccagcugcaacugcagccacagccagcccgaggccaccaacaccagccagaccaucaucaacaacuacuacaacgagaccaacaucacccagaucagcaacaccaacauccagauggaggagagagccagcagaagcuucaacaaccugaccaagggccugugcaccaucaacagcuggcacaucuacggcaaggacaacgccaucagaaucggcgagaacagcgacgugcuggugaccagagagcccuacgugagcugcgaccccgacgagugcagauucuacgcccugagccagggcaccaccaucagaggcaagcacagcaacggcaccauccacgacagaagccaguacagagcccugaucagcuggccccugagcagcccccccaccguguacaacagcagaguggagugcaucggcuggagcagcaccagcugccacgacggcaagagcagaaugagcaucugcaucagcggccccaacaacaacgccagcgccguggugugguacaacagaagacccguggccgagaucaacaccugggccagaaacauccugagaacccaggagagcgagugcgugugccacaacggcgugugccccgugguguucaccgacggcagcgccaccggccccgccgacaccagaaucuacuacuucaaggagggcaagauccugaagugggagagccugaccggcaccgccaagcacaucgaggagugcagcugcuacggcgagagaaccggcaucaccugcaccugcagagacaacuggcagggcagcaacagacccgugauccagaucgaccccguggccaugacccacaccagccaguacaucugcagccccgugcugaccgacaaccccagacccaacgaccccaacgugggcaagugcaacgaccccuaccccggcaacaacaacaacggcgugaagggcuucagcuaccuggacggcgugaacaccuggcugggcagaaccaucagcaccgccagcagaagcggcuacgagaugcugaaggugcccaacgcccugaccgacgacagaagcaagcccauccagggccagaccaucgugcugaacaccgacuggagcggcuacagcggcagcuucauggacuacugggccgagggcgacugcuacagagccugcuucuacguggagcugaucagaggcagacccaaggaggacaaggugugguggaccagcaacagcaucgugagcaugugcagcagcaccgaguuccugggccaguggaacuggcccgacggcgccaagaucgaguacuuccuguga

SEQ ID NO: 183757 - RNA, 1413 nt, Artificial Sequence
  derived and/or modified CDS sequence (opt4) from neuraminidase__InfluenzaA__AGQ81948
augaaccccaaccagaagauccugugcaccagcgccaccgccaucaucaucggcgccaucgccgugcugaucggcaucgccaaccugggccugaacaucggccugcaccugaagcccagcugcaacugcagccacagccagcccgagaccaccaacaccagccagaccaucaucaacaacuacuacaacgagaccaacaucacccagaucagcaacaccaacauccagauggaggagagaaccagcagaggcuucaacaaccugaccaagggccugugcaccaucaacagcuggcacaucuacggcaaggacaacgccaucagaaucggcgagagcagcgacgugcuggugaccagagagcccuacgugagcugcgaccccgacgagugcagauucuacgcccugagccagggcaccaccaucagaggcaagcacagcaacggcaccauccacgacagaagccaguacagagcccugaucagcuggccccugagcagcccccccaccguguacaacagcagaguggagugcaucggcuggagcagcaccagcugccacgacggcaagagcagaaugagcaucugcaucagcggccccaacaacaacgccagcgccguggugugguacaacagaagacccguggccgagaucaacaccugggccagaaacauccugagaacccaggagagcgagugcgugugccacaacggcgugugccccgugguguucaccgacggcagcgccaccggccccgccgacaccagaaucuacuacuucaaggagggcagaauccugaagugggagagccugaccggcaccgccaagcacaucgaggagugcagcugcuacggcgagagaaccggcaucaccugcaccugcagagacaacuggcagggcagcaacagacccgugauccagaucgaccccguggccaugacccacaccagccaguacaucugcagccccgugcugaccgacaaccccagacccaacgaccccaacaucggcaagugcaacgaccccuaccccggcaacaacaacaacggcgugaagggcuucagcuaccuggacggcgccaacaccuggcugggcagaaccaucagcaccgccagcagaagcggcuacgagaugcugaaggugcccaacgcccugaccgacgacagaagcaagcccauccagggccagaccaucgugcugaacaccgacuggagcggcuacagcggcagcuucauggacuacugggccgagggcgagugcuacagagccugcuucuacguggagcugaucagaggcagacccaaggaggacaaggugugguggaccagcaacagcaucgugagcaugugcagcagcaccgaguuccugggccaguggaacuggcccgacggcgccaagaucgaguacuuccuguga

SEQ ID NO: 183758 - RNA, 1413 nt, Artificial Sequence
  derived and/or modified CDS sequence (opt4) from neuraminidase__InfluenzaA__AGQ81951
augaaccccaaccagaagauccugugcaccagcgccaccgccaucgugaucggcaccaucgccgugcugaucggcguggccaaccugggccugaacaucggccugcaccugaagcccggcugcaacugcagccagagccagcccgaggccaccaacaccagccagaccaucaucaacaacuacuacaacgagaccaacaucacccagaucagcaacaccaacauccagauggaggagagagccaacagaggcuucaacaaccugaccaagggccugugcaccaucaacagcuggcacaucuacggcaaggacaacgccgugagaaucggcgagaacagcgacgugcuggugaccagagagcccuacgugagcugcgaccccgacgagugcagauucuacgcccugagccagggcaccaccaucagaggcaagcacagcaacggcaccauccacgacagaagccaguacagagcccugaucagcuggccccugagcagcccccccaccguguacaacagcagaguggagugcaucggcuggagcagcaccagcugccacgacggcaagagcagaaugagcaucugcaucagcggccccaacaacaacgccagcgccguggugugguacaacagaagacccguggccgagaucaacaccugggccagaaacauccugagaacccaggagagcgagugcgugugccacaacggcgugugccccgugguguucaccgacggcagcgccaccggccccgccgacaccagaguguacuacuucagagagggcaagauccugaagugggagagccugaccggcaccgccaagcacaucgaggagugcagcugcuacggcgagagaaccggcaucaccugcaccugcagagacaacuggcagggcagcaacagacccgugauccagaucgaccccguggccaugacccacaccagccaguacaucugcagccccgugcugaccgacaaccccagacccaacgaccccaacgugggcaagugcaacgaccccuaccccggcaacaacaacaacggcgugaagggcuucagcuaccuggacggcgugaacaccuggcugggcagaaccaucagcaccgccagcagaagcggcuacgagaugcugaaggugcccaacgcccugaccgacgacagaagcaagcccauccagggccagaccaucgugcugaacaccgacuggagcggcuacagcggcagcuucauggacuacugggccgagggcgacugcuacagagccugcuucuacguggagcugaucagaggcagacccaaggaggacaaggugugguggaccagcaacagcaucgugagcaugugcagcagcaccgaguuccugggccaguggaacuggcccgacggcgccaagaucgaguacuuccuguga

SEQ ID NO: 183759 - RNA, 1413 nt, Artificial Sequence
  derived and/or modified CDS sequence (opt4) from neuraminidase__InfluenzaA__AGQ81952
augaaccccaaccagaagauccugugcaccagcgccaccgccaucgugaucggcaccaucgccgugcugaucggcguggccaaccugggccugaacaucggccugcaccugaagcccggcugcaacugcagccacagccagcccgaggccaccaacaccagccagaccaucaucaacaacuacuacaacgagaccaacaucacccagaucagcaacaccaacauccagauggaggagagagccaacagaggcuucaacaaccugaccaagggccugugcaccaucaacagcuggcacaucuacggcaaggacaacgccgugagaaucggcgagaacagcgacgugcuggugaccagagagcccuacgugagcugcgaccccgacgagugcagauucuacgcccugagccagggcaccaccaucagaggcaagcacagcaacggcaccauccacgacagaagccaguacagagcccugaucagcuggccccugagcagcccccccaccguguacaacagcagaguggagugcaucggcuggagcagcaccagcugccacgacggcaagagcagaaugagcaucugcaucagcggccccaacaacaacgccagcgccguggugugguacaacagaagacccguggccgagaucaacaccugggccagaaacauccugagaacccaggagagcgagugcgugugccacaacggcgugugccccgugguguucaccgacggcagcgccaccggccccgccgacaccagaguguacuacuucagagagggcaagauccugaagugggagagccugaccggcaccgccaagcacaucgaggagugcagcugcuacggcgagagaaccggcaucaccugcaccugcagagacaacuggcagggcagcaacagacccgugauccagaucgaccccguggccaugacccacaccagccaguacaucugcagccccgugcugaccgacaaccccagacccaacgaccccaacgugggcaagugcaacgaccccuaccccggcaacaacaacaacggcgugaagggcuucagcuaccuggacggcgugaacaccuggcugggcagaaccaucagcaccgccagcagaagcggcuacgagaugcugaaggugcccaacgcccugaccgacgacagaagcaagcccauccagggccagaccaucgugcugaacaccgacuggagcggcuacagcggcagcuucauggacuacugggccgagggcgacugcuacagagccugcuucuacguggagcugaucagaggcagacccaaggaggacaaggugugguggaccagcaacagcaucgugagcaugugcagcagcaccgaguuccugggccaguggaacuggcccgacggcgccaagaucgaguacuuccuguga

SEQ ID NO: 183760 - RNA, 1413 nt, Artificial Sequence
  derived and/or modified CDS sequence (opt4) from neuraminidase__InfluenzaA__AGQ81954
augaaccccaaccagaagauccugugcaccagcgccaccgccaucgugaucggcaccaucgccgugcugaucggcguggccaaccugggccugaacaucggccugcaccugaagcccagcugcaacugcagccacagccagcccgaggccaccaacaccagccagaccaucaucaacaacuacuacaacgagaccaacaucacccagaucagcaacaccaacauccagauggaggagagagccagcagaggcuucaacaaccugaccaagggccugugcaccaucaacagcuggcacaucuacggcaaggacaacgccgugagaaucggcgagaacagcgacgugcuggugaccagagagcccuacgugagcugcgaccccgacgagugcagauucuacgcccugagccagggcaccaccaucagaggcaagcacagcaacggcaccauccacgacagaagccaguacagagcccugaucagcuggccccugagcagcccccccaccguguacaacagcagaguggagugcaucggcuggagcagcaccagcugccacgacggcaagagcagaaugagcaucugcaucagcggccccaacaacaacgccagcgccguggugugguacaacagaagacccguggccgagaucaacaccugggccagaaacauccugagaacccaggagagcgagugcgugugccacaacggcgugugccccgugguguucaccgacggcagcgccaccggccccgccgacaccagaguguacuacuucaaggagggcaagauccugaagugggagagccugaccggcaccgccaagcacaucgaggagugcagcugcuacggcgagagaaccggcaucaccugcaccugcagagacaacuggcagggcagcaacagacccgugauccagaucgaccccguggccaugacccacaccagccaguacaucugcagccccgugcugaccgacaaccccagacccaacgaccccaacgugggcaagugcaacgaccccuaccccggcaacaacaacaacggcgugaagggcuucagcuaccuggacggcgugaacaccuggcugggcagaaccaucagcaccgccagcagaagcggcuacgagaugcugaaggugcccaacgcccugaccgacgacagaagcaagcccauccagggccagaccaucgugcugaacaccgacuggagcggcuacagcggcagcuucauggacuacugggccgagggcgacugcuacagagccugcuucuacguggagcugaucagaggcagacccaaggaggacaaggugugguggaccagcaacagcaucgugagcaugugcagcagcaccgaguuccugggccaguggaacuggcccgacggcgccaagaucgaguacuuccuguga

SEQ ID NO: 183761 - RNA, 1413 nt, Artificial Sequence
  derived and/or modified CDS sequence (opt4) from neuraminidase__InfluenzaA__AGQ81956
augaaccccaaccagaagauccugugcaccagcgccaccgccaucgugaucggcaccaucgccgugcugaucggcguggccaaccugggccugaacaucggccugcaccugaagcccagcugcaacugcagccacagccagcccgaggccaccaacaccagccagaccaucaucaacaacuacuacaacgagaccaacaucacccagaucagcaacaccaacauccagauggaggagagagccagcagaggcuucaacaaccugaccaagggccugugcaccaucaacagcuggcacaucuacggcaaggacaacgccgugagaaucggcgagaacagcgacgugcuggugaccagagagcccuacgugagcugcgaccccgacgagugcagauucuacgcccugagccagggcaccaccaucagaggcaagcacagcaacggcaccauccacgacagaagccaguacagagcccugaucagcuggccccugagcagcccccccaccguguacaacagcagaguggagugcaucggcuggagcagcaccagcugccacgacggcaagagcagaaugagcaucugcaucagcggccccaacaacaacgccagcgccaucgugugguacaacagaagacccguggccgagaucaacaccugggccagaaacauccugagaacccaggagagcgagugcgugugccacaacggcgugugccccgugguguucaccgacggcagcgccaccggccccgccgacaccagaguguacuacuucaaggagggcaagauccugaagugggagagccugaccggcaccgccaagcacaucgaggagugcagcugcuacggcgagagaaccggcaucaccugcaccugcagagacaacuggcagggcagcaacagacccgugauccagaucgaccccguggccaugacccacaccagccaguacaucugcagccccgugcugaccgacaaccccagacccaacgaccccaacgugggcaagugcaacgaccccuaccccggcaacaacaacaacggcgugaagggcuucagcuaccuggacggcgugaacaccuggcugggcagaaccaucagcaccgccagcagaagcggcuacgagaugcugaaggugcccaacgcccugaccgacgacagaagcaagcccauccagggccagaccaucgugcugaacaccgacuggagcggcuacagcggcagcuucauggacuacugggccgagggcgacugcuacagagccugcuucuacguggagcugaucagaggcagacccaaggaggacaaggugugguggaccagcaacagcaucgugagcaugugcagcagcaccgaguuccugggccaguggaacuggcccgacggcgccaagaucgaguacuuccuguga

SEQ ID NO: 183762 - RNA, 1413 nt, Artificial Sequence
  derived and/or modified CDS sequence (opt4) from neuraminidase__InfluenzaA__AGQ81957
augaaccccaaccagaagauccugugcaccagcgccaccgccaucgugaucggcaccaucgccgugcugaucggcaucgccaaccugggccugaacaucggccugcaccugaagcccagcugcaacugcagccacagccagcccgaggccaccaacaccagccagaucaucaucaacaacuacuacaacgagaccaacaucacccaggugagcaacaccaacauccagauggaggagagagccagcagaggcuucaacaaccugaccaagggccugugcaccaucaacagcuggcacaucuacggcaaggacaacgccgugagaaucggcgagaacagcgacgugcuggugaccagagagcccuacgugagcugcgaccccgacgagugcagauucuacgcccugagccagggcaccaccaucagaggcaagcacagcaacggcaccauccacgacagaagccaguacagagcccugaucagcuggccccugagcagcccccccaccguguacaacagcagaguggagugcaucggcuggagcagcaccagcugccacgacggcaagagcagaaugagcaucugcaucagcggccccaacaacaacgccagcgccguggugugguacaacagaagacccguggccgagaucaacaccugggccagaaacauccugagaacccaggagagcgagugcgugugccacaacggcgugugccccgugguguucaccgacggcagcgccaccggccccgccgacaccagaaucuacuacuucaaggagggcaagauccugaagugggagagccugaccggcaccgccaagcacaucgaggagugcagcugcuacggcgagagaaccggcaucaccugcaccugcagagacaacuggcagggcagcaacagacccgugauccagaucgaccccguggccaugacccacaccagccaguacaucugcagccccgugcugaccgacaaccccagacccaacgaccccaacgugggcaagugcaacgaccccuaccccggcaacaacaacaacggcgugaagggcuucagcuaccuggacggcgugaacaccuggcugggcagaaccaucagcaccgccagcagaagcggcuacgagaugcugaaggugcccaacgcccugaccgacgacagaagcaagcccgugcagggccagaccaucgugcugaacaccgacuggagcggcuacagcggcagcuucauggacuacugggccgagggcgacugcuacagagccugcuucuacguggagcugaucagaggcagacccaaggaggacaaggugugguggaccagcaacagcaucgugagcaugugcagcagcaccgaguuccugggccaguggaacuggcccgacggcgccaagaucgaguacuuccuguga

SEQ ID NO: 183763 - RNA, 1413 nt, Artificial Sequence; identical to SEQ ID NO: 183745
  derived and/or modified CDS sequence (opt4) from neuraminidase__InfluenzaA__AGQ81958

SEQ ID NO: 183764 - RNA, 1413 nt, Artificial Sequence; identical to SEQ ID NO: 183745
  derived and/or modified CDS sequence (opt4) from neuraminidase__InfluenzaA__AGQ81959

SEQ ID NO: 183765 - RNA, 1413 nt, Artificial Sequence
  derived and/or modified CDS sequence (opt4) from neuraminidase__InfluenzaA__AGQ81960
augaaccccaaccagaagauccugugcaccagcgccaccgccaucgugaucggcaccaucgccgugcugaucggcaucgccaaccugggccugaacaucggccugcaccugaagcccaacugcaacugcagcagaagccagcccgagaccaccaacaccagccagaccaucaucaacaacuacuacaacgagaccaacaucacccagaucagcaacaccaacauccagauggaggagagagccagcagagacuucaacaaccugaccaagggccugugcaccaucaacagcuggcacaucuacggcaaggacaacgccgugagaaucggcgagaacagcgacgugcuggugaccagagagcccuacgugagcugcgaccccaacgagugcagauucuacgcccugagccagggcaccaccaucagaggcaagcacagcaacggcaccauccacgacagaagccaguacagagcccugaucagcuggccccugagcagcccccccaccguguacaacagcagaguggagugcaucggcuggagcagcaccagcugccacgacggcaagagcagaaugagcaucugcaucagcggccccaacaacaacgccagcgccguggugugguacaacagaagacccguggccgagaucaacaccugggccagaaacauccugagaacccaggagagcgagugcgugugccacaacggcgugugccccgugguguucaccgacggcagcgccaccggccccgccgacaccagaaucuacuacuucaaggagggcaagauccugaagugggagagccugaccggcaccgccaagcacaucgaggagugcagcugcuacggcgagagaaccgagaucaccugcaccugcagagacaacuggcagggcagcaacagacccgugauccagaucgaccccguggccaugacccacaccagccaguacaucugcagccccgugcugaccgacaaccccagacccaacgaccccaacgugggcaagugcaacgaccccuaccccggcaacaacaacaacggcgugaagggcuucagcuaccuggacggcgugaacaccuggcugggcagaaccaucagcaccgccagcagaagcggcuacgagaugcugaaggugcccaacgcccugaccgacgacagaagcaagcccauccagggccagaccaucgugcugaacaccgacuggagcggcuacagcggcagcuucauggacuacugggccgagggcgacugcuacagagccugcuucuacguggagcugaucagaggcagacccaaggaggacaaggugugguggaccagcaacagcaucgugagcaugugcagcagcaccgaguuccugggccagugggacuggcccgacggcgccaagaucgaguacuuccuguga

SEQ ID NO: 183766 - RNA, 1413 nt, Artificial Sequence; identical to SEQ ID NO: 183758
  derived and/or modified CDS sequence (opt4) from neuraminidase__InfluenzaA__AGQ81961

SEQ ID NO: 183767 - RNA, 1413 nt, Artificial Sequence; identical to SEQ ID NO: 183758
  derived and/or modified CDS sequence (opt4) from neuraminidase__InfluenzaA__AGQ81962

SEQ ID NO: 183768 - RNA, 1413 nt, Artificial Sequence
  derived and/or modified CDS sequence (opt4) from neuraminidase__InfluenzaA__AGQ81963
augaaccccaaccagaagauccugugcaccagcgccaccgccaucgugaucggcaccaucgccgugcugaucggcaucgccaaccugggccugaacaucggccugcaccugaagcccagcugcaacugcagccacagccagcccgaggagaccaacaccagccagaccaucaucaacaacuacuacaacgagaccaacaucacccagaucagcaacaccaacauccagauggaggagagagccagcagaggcuucaacaaccugaccaagggccugugcaccaucaacagcuggcacaucuacggcaaggacaacgccgugagaaucggcgagaacagcgacgugcuggugaccagagagcccuacgugagcugcgaccccaacgagugcagauucuacgcccugagccagggcaccaccaucagaggcaagcacagcaacggcaccauccacgacagaagccaguacagagcccugaucagcuggccccugagcagcccccccaccguguacaacagcagaguggagugcaucggcuggagcagcaccagcugccacgacggcaagagcagaaugagcgugugcaucagcggccccaacgacaacgccagcgccguggugugguacaacagaagacccguggccgagaucaacaccugggccagaaacauccugagaacccaggagagcgagugcgugugccacaacggcgugugccccgugguguucaccgacggcagcgccaccggccccgcccacaccagaaucuacuacuucaaggagggcaagauccugaagugggagagccugaccggcaccgccaagcacaucgaggagugcagcugcuacggcgagagaaccggcaucaccugcaccugcagagacaacuggcagggcagcaacagacccgugauccagaucgaccccguggccaugacccacaccagccaguacaucugcagccccgugcugaccgacaaccccagacccaacgaccccaacgugggcaagugcaacgaccccuaccccggcaacaacaacaacggcgugaagggcuucagcuaccuggacggcgugaacaccuggcugggcagaaccaucagcaccgccagcagaagcggcuacgagaugcugaaggugcccaacgcccugaccgacgacagaagcaagcccauccagggccagaccaucgugcugaacaccgacuggagcggcuacagcggcagcuucauggacuacuggaccgagggcgacugcuacagagccugcuucuacguggagcugaucagaggcagacccaaggaggacaaggugugguggaccagcaacagcaucgugagcaugugcagcagcaccgaguuccugggccagugggacuggcccgacggcgccaagaucgaguacuuccuguga

SEQ ID NO: 183769 - RNA, 1413 nt, Artificial Sequence
  derived and/or modified CDS sequence (opt4) from neuraminidase__InfluenzaA__AGQ81964
augaaccccaaccagaagauccugugcaccagcgccaccgccaucgugaucggcaccaucgccgugcugaucggcaucgccaaccugggccugaacaucggccugcaccugaagcccagcugcaacugcagccacagcaagcccgaggagaccaacgccagccagaccaucaucaacaacuacuacaacgagaccaacaucacccagaucagcaacaccaacauccagauggaggagagagccagcagaggcuucaacaaccugaccaagggccugugcaccaucaacagcuggcacaucuacggcaaggacaacgccgugagaaucggcgagagcagcgacgugcuggugaccagagagcccuacgugagcugcgaccccgacgagugcagauucuacgcccugagccagggcaccaccaucagaggcaagcacagcaacggcaccauccacgacagaagccaguacagagcccugaucagcuggccccugagcagcccccccaccguguacaacagcagaguggagugcaucggcuggagcagcaccagcugccacgacggcaagagcagaaugagcaucugcaucagcggccccaacaacaacgccagcgccguggugugguacaacagaagacccguggccgagaucaacaccugggccagaaacauccugagaacccaggagagcgagugcgugugccacaacggcgugugccccgugguguucaccgacggcagcgccaccggccccgccgacaccagaaucuacuacuucaaggagggcaagauccugaagugggagagccugaccggcaccgccaagcacaucgaggagugcagcugcuacggcgagagaaccggcaucaccugcaccugcagagacaacuggcagggcagcaacagacccgugauccagaucgaccccguggccaugacccacaccagccaguacaucugcagccccgugcugaccgacaaccccagacccaacgaccccaacgugggcaagugcaacgaccccuaccccggcaacaacaacaacggcgugaagggcuucagcuaccuggacggcgugaacaccuggcugggcagaaccaccagcaccaccagcagaagcggcuacgagaugcugaaggugcccaacgcccugaccgacgacagaagcaagcccauccagggccagaccaucgugcugaacaccgacuggagcggcuacagcggcagcuucauggacuacugggccgagggcgacugcuacagagccugcuucuacguggagcugaucagaggcagacccaaggaggacaaggugugguggaccagcaacagcaucgugagcaugugcagcagcaccgaguuccugggccaguggaacuggcccgacggcgccaagaucgaguacuuccuguga

SEQ ID NO: 183770 - RNA, 1413 nt, Artificial Sequence
  derived and/or modified CDS sequence (opt4) from neuraminidase__InfluenzaA__AGQ81966
augaaccccaaccagagaauccugugcaccagcgccaccgccaucgugaucggcaccaucgccgugcugaucggcguggccaaccugggccugaacaucggccugcaccugaagcccggcugcaacugcagccacagccagcccgaggccaccaacaccagccagaccaucaucaacaacuacuacaacgagaccaacaucacccagaucagcaacaccaacauccagauggaggagagagccaacagaggcuucaacaaccugaccaagggccugugcaccaucaacagcuggcacaucuacggcaaggacaacgccgugagaaucggcgagaacagcgacgugcuggugaccagagagcccuacgugagcugcgaccccgacgagugcagauucuacgcccugagccagggcaccaccaucagaggcaagcacagcaacggcaccauccacgacagaagccaguacagagcccugaucagcuggccccugagcagcccccccaccguguacaacagcagaguggagugcaucggcuggagcagcaccagcugccacgacggcaagagcagaaugagcaucugcaucagcggccccaacaacaacgccagcgccguggugugguacaacagaagacccguggccgagaucaacaccugggccagaaacauccugagaacccaggagagcgagugcgugugccacaacggcgugugccccgugguguucaccgacggcagcgccaccggccccgccgacaccagaguguacuacuucagagagggcaagauccugaagugggagagccugaccggcaccgccaagcacaucgaggagugcagcugcuacggcgagagaaccggcaucaccugcaccugcagagacaacuggcagggcagcaacagacccgugauccagaucgaccccguggccaugacccacaccagccaguacaucugcagccccgugcugaccgacaaccccagacccaacgaccccaacgugggcaagugcaacgaccccuaccccggcaacaacaacaacggcgugaagggcuucagcuaccuggacggcgugaacaccuggcugggcagaaccaucagcaccgccagcagaagcggcuacgagaugcugaaggugcccaacgcccugaccgacgacagaagcaagcccauccagggccagaccaucgugcugaacaccgacuggagcggcuacagcggcagcuucauggacuacugggccgagggcgacugcuacagagccugcuucuacguggagcugaucagaggcagacccaaggaggacaaggugugguggaccagcaacagcaucgugagcaugugcagcagcaccgaguuccugggccaguggaacuggcccgacggcgccaagaucgaguacuuccuguga

SEQ ID NO: 183771 - RNA, 1413 nt, Artificial Sequence
  derived and/or modified CDS sequence (opt4) from neuraminidase__InfluenzaA__AGQ81967
augaaccccaaccagaagauccugugcaccagcgccaccgccaucgugaucggcaucaucgccgugcugaucggcaucgccaaccugggccugaacaucggccugcaccugaagcccagcugcaacugcagccacagccagcccgaggccaccaacgccagccagaccaucaucaacaacuacuacaacgagaccaacaucacccagaucagcaacaccaacauccagauggaggagagagccagcagaggcuucaacaaccugaccaagggccugugcaccaucaacagcuggcacaucuacggcaaggacaacgccgugagaaucggcgagaacagcgacgugcuggugaccagagagcccuacgugagcugcgaccccgacgagugcagauucuacgcccugagccagggcaccaccaucagaggcaagcacagcaacggcaccauccacgacagaagccaguacagagcccugaucagcuggccccugagcagcccccccaccguguacaacagcagaguggagugcaucggcuggagcagcaccagcugccacgacggcaagagcagaaugagcaucugcaucagcggccccaacaacaacgccagcgccguggugugguacaacagaagacccguggccgagaucaacaccugggccagaaacauccugagaacccaggagagcgagugcgugugccacaacggcgugugccccgugguguucaccgacggcagcgccaccggccccgccgagaccagaaucuacuacuucaaggagggcaagauccugaagugggagagccugaccggcaccgccaagcacaucgaggagugcagcugcuacggcgagagaaccggcaucaccugcaccugcagagacaacuggcagggcagcaacagacccgugauccagaucgaccccguggccaugacccacaccagccaguacaucugcagccccgugcugaccgacaaccccagacccaacgaccccaacgugggcaagugcaacgaccccuaccccggcaacaacaacaacggcgugaagggcuucagcuaccuggacggcgugaacaccuggcugggcagaaccaucagcaccgccagcagaagcggcuacgagaugcugaaggugcccaacgcccugaccgacgacagaagcaagcccauccagggccagaucaucgugcugaacaccgacuggagcggcuacagcggcagcuucauggacuacugggccgagggcgacugcuacagagccugcuucuacguggagcugaucagaggcagacccaaggaggacaaggugugguggaccagcaacagcaucgugagcaugugcagcagcaccgaguuccugggccaguggaacuggcccgacggcgccaagaucgaguacuuccuguga

SEQ ID NO: 183772 - RNA, 1413 nt, Artificial Sequence
  derived and/or modified CDS sequence (opt4) from neuraminidase__InfluenzaA__AGQ81968
augaaccccaaccagaagauccugugcaccagcgccaccgccaucgugaucggcaucaucgccgugcugaucggcaucgccaaccugggccugaacaucggccugcaccugaagcccagcugcaacugcagccacagccagcccgaggccaccaacgccagccagaccaucaucaacaacuacuacaacgagaccaacaucacccagaucagcaacaccaacauccagauggaggagagagccagcagaggcuucaacaaccugaccaagggccugugcaccaucaacagcuggcacaucuacggcaaggacaacgccgugagaaucggcgagaacagcgacauccuggugaccagagagcccuacgugagcugcgaccccgacgagugcagauucuacgcccugagccagggcaccaccaucagaggcaagcacagcaacggcaccauccacgacagaagccaguacagaagccugaucagcuggccccugagcagcccccccaccguguacaacagcagaguggagugcaucggcuggagcagcaccagcugccacgacggcaagagcagaaugagcaucugcaucagcggccccaacaacaacgccagcgccguggugugguacaacagaagacccguggccgagaucaacaccugggccagaaacauccugagaacccaggagagcgagugcgugugccacaacggcgugugccccgugguguucaccgacggcagcgccaccggccccgccgagaccagaaucuacuacuucaaggagggcaagauccugaagugggagagccugaccggcaccgccaagcacaucgaggagugcagcugcuacggcgagagaaccggcaucaccugcaccugcagagacaacuggcagggcagcaacagacccgugauccagaucgaccccguggccaugacccacaccagccaguacaucugcagccccgugcugaccgacaaccccagacccaacgaccccaacgugggcaagugcaacgaccccuaccccggcaacaacaacaacggcgugaagggcuucagcuaccuggacggcgugaacaccuggcugggcagaaccaucagcaccgccagcagaagcggcuacgagaugcugaaggugcccaacgcccugaccgacgacagaagcaagcccauccagggccagaccaucgugcugaacaccgacuggagcggcuacagcggcagcuucaucgacuacugggccgagggcgacugcuacagagccugcuucuacguggagcugaucagaggcagacccaaggaggacaaggugugguggaccagcaacagcaucgugagcaugugcagcagcaccgaguuccugggccaguggaacuggcccgacggcgccaagaucgaguacuuccuguga

SEQ ID NO: 183773 - RNA, 1413 nt, Artificial Sequence
  derived and/or modified CDS sequence (opt4) from neuraminidase__InfluenzaA__AGQ81969
augaaccccaaccagaagauccugugcaccagcgccaccgccaucgugaucggcaucaucgccgugcugaucggcaucgccaaccugggccugaacaucggccugcaccugaagcccagcugcaacugcagccacagccagcccgaggagaccaacgccagccagaccaucaucaacaacuacuacaacgagaccaacaucacccagaucagcaacaccaacauccagauggaggagagagccagcagaggcuucaacaaccugaccaagggccugugcaccaucaacagcuggcacaucuacggcaaggacaacgccgugagaaucggcgagaacagcgacgugcuggugaccagagagcccuacgugagcugcgaccccgacgagugcagauucuacgcccugagccagggcaccaccaucagaggcaagcacagcaacggcaccauccacgacagaagccaguacagagcccugaucagcuggccccugagcagcccccccaccguguacaacagcagaguggagugcaucggcuggagcagcaccagcugccacgacggcaagagcagaaugagcaucugcaucagcggccccaacaacaacgccagcgccguggugugguacaacagaagacccguggccgagaucaacaccugggccagaaacauccugagaacccaggagagcgagugcgugugccacaacggcgugugccccgugguguucaccgacggcagcgccaccggccccgccgagaccagaaucuacuacuucaaggagggcaagauccugaagugggagagccugaccggcaccgccaagcacaucgaggagugcagcugcuacggcgagagaaccggcaucaccugcaccugcagagacaacuggcagggcagcaacagacccgugauccagaucgaccccguggccaugacccacaccagccaguacaucugcagccccgugcugaccgacaaccccagacccaacgaccccaacgugggcaagugcaacgaccccuaccccggcaacaacaacaacggcgugaagggcuucagcuaccuggacggcgugaacaccuggcugggcagaaccaucagcaccgccagcagaagcggcuacgagaugcugaaggugcccaacgcccugaccgacgacagaagcaagcccauccagggccagaucaucgugcugaacaccgacuggagcggcuacagcggcagcuucauggacuacugggccgagggcgacugcuacagagccugcuucuacguggagcugaucagaggcagacccaaggaggacaaggugugguggaccagcaacagcaucgugagcaugugcagcagcaccgaguuccugggccaguggaacuggcccgacggcgccaagaucgaguacuuccuguga

SEQ ID NO: 183774 - RNA, 1413 nt, Artificial Sequence
  derived and/or modified CDS sequence (opt4) from neuraminidase__InfluenzaA__AGQ81970
augaaccccaaccagaagauccugugcaccagcgccaccgccaucgugaucggcaccaucgccgugcugaucggcaucgccaaccugggccugaacaucggccugcaccugaagcccagcugcaacugcagccacagccagcccgaggagaccaacgccagccagaccaucaucaacaacuacuacaacgagaccaacaucacccagaucagcaacaccaacauccagauggaggagagagccagcagaggcuucaacaaccugaccaagggccugugcaccaucaacagcuggcacaucuacggcaaggacaacgccgugagaaucggcgagaacagcgacgugcuggugaccagagagcccuacgugagcugcgaccccgacgagugcagauucuacgcccugagccagggcaccaccaucagaggcaagcacagcaacggcaccauccacgacagaagccaguacagagcccugaucagcuggccccugagcagcccccccaccguguacaacagcagaguggagugcaucggcuggagcagcaccagcugccacgacggcaagagcagaaugagcaucugcaucagcggccccaacaacaacgccagcgccguggugugguacaacaagagacccguggccgagaucaacaccugggccagaaacauccugagaacccaggagagcgagugcgugugccacaacggcgugugccccgugguguucaccgacggcagcgccaccggccccgccgacaccagaaucuacuacuucaaggagggcaagauccugaagugggagccccugaccggcaccgccaagcacaucgaggagugcagcugcuacggcgagagaaccggcaucaccugcaccugcagagacaacuggcagggcagcaacagacccgugauccagaucgaccccguggccaugacccacaccagccaguacaucugcagccccgugcugaccgacaaccccagacccaacgaccccaacgugggcaagugcaacgaccccuaccccggcaacagcaacaacggcgugaagggcuucagcuaccuggacggcgugaacaccuggcugggcagaaccaucagcaccgccagcagaagcggcuacgagaugcugaaggugcccaacgcccugaccgacgacagaagcaagcccauccagggccagaccaucgugcugaacaccgacuggagcggcuacagcggcagcuucauggacuacugggccgagggcgacugcuacagagccugcuucuacguggagcugaucagaggcagacccaaggaggacaaggugugguggaccagcaacagcaucgugagcaugugcagcagcaccgaguuccugggccaguggaacuggcccgacggcgccaagaucgaguacuuccuguga

SEQ ID NO: 183775 - RNA, 1413 nt, Artificial Sequence
  derived and/or modified CDS sequence (opt4) from neuraminidase__InfluenzaA__AGQ81971
augaaccccaaccagaagauccugugcaccagcgccaccgccaucaucaucggcgccaucgccgugcugaucggcaucgccaaccugggccugaacaucggccugcaccugaagcccagcugcaacugcagccacagccagcccgagaccaccaacaccagccagaccaucaucaacaacuacuacaacgagaccaacaucacccagaucagcaacaccaacauccagauggaggagagaaccagcagaggcuucaacaaccugaccaagggccugugcaccaucaacagcuggcacaucuacggcaaggacaacgccgugagaaucggcgagagcagcgacgugcuggugaccagagagcccuacgugagcugcgaccccgacgagugcagauucuacgcccugagccagggcaccaccaucagaggcaagcacagcaacggcaccauccacgacagaagccaguacagagcccugaucagcuggccccugagcagcccccccaccguguacagcagcagaguggagugcaucggcuggagcagcaccagcugccacgacggcaagagcagaaugagcaucugcaucagcggccccaacaacaacgccagcgccguggugugguacaacagaagacccguggccgagaucaacaccugggccagaaacauccugagaacccaggagagcgagugcgugugccacaacggcgugugccccgugguguucaccgacggcagcgccaccggccccgccgacaccagaaucuacuacuucaaggagggcaagauccugaagugggagagccugaccggcaccgccaagcacaucgaggagugcagcugcuacggcgagagaaccggcaucaccugcaccugcagagacaacuggcagggcagcaacagacccgugauccagaucgaccccguggccaugacccacaccagccaguacaucugcagccccgugcugaccgacaaccccagacccaacgaccccaacaucggcaagugcaacgaccccuaccccggcaacaacaacaacggcgugaagggcuucagcuaccuggacggcgccaacaccuggcugggcagaaccaucagcaccgccagcagaagcggcuacgagaugcugaaggugcccaacgcccugaccgacgacagaagcaagcccauccagggccagaccaucgugcugaacaccgacuggagcggcuacagcggcagcuucauggacuacugggccgagggcgacugcuacagagccugcuucuacguggagcugaucagaggcagacccaaggaggacaaggugugguggaccagcaacagcaucgugagcaugugcagcagcaccgaguuccugggccaguggaacuggcccgacggcgccaagaucgaguacuuccuguga

SEQ ID NO: 183776 - RNA, 1413 nt, Artificial Sequence
  derived and/or modified CDS sequence (opt4) from neuraminidase__InfluenzaA__AGQ81972
augaaccccaaccagaagauccugugcaccagcgccaccgccaucaucaucggcgccaucgccgugcugaucggcaucgccaaccugggccugaacaucggccugcaccugaagcccagcugcaacugcagccacagccagcccgagaccaccaacaccagccagaccaucaucaacaacuacuacaacgagaccaacaucacccagaucagcaacaccaacauccagauggaggagagagccagcagaggcuucaacaaccugaccaagggccugugcaccaucaacagcuggcacaucuacggcaaggacaacgccgugagaaucggcgagagcagcgacgugcuggugaccagagagcccuacgugagcugcgaccccgacgagugcagauucuacgcccugagccagggcaccaccaucagaggcaagcacagcaacggcaccauccacgacagaagccaguacagagcccugaucagcuggccccugagcagcccccccaccguguacaacagcagaguggagugcaucggcuggagcagcaccagcugccacgacggcaagagcagaaugagcaucugcaucagcggccccaacaacaacgccagcgccguggugugguacaacagaagacccguggccgagaucaacaccugggccagaaacauccugagaacccaggagagcgagugcgugugccacaacggcgugugccccgugguguucaccgacggcagcgccaccggccccgccgacaccagaaucuacuacuucaaggagggcaagauccugaagugggagagccugaccggcaccgccaagcacaucgaggagugcagcugcuacggcgagagaaccggcaucaccugcaccugcagagacaacuggcagggcagcaacagacccgugauccagaucgaccccguggccaugacccacaccagccaguacaucugcagccccgugcugaccgacaaccccagacccaacgaccccaacaucggcaagugcaacgaccccuaccccggcaacaacaacaacggcgugaagggcuucagcuaccuggacggcgccaacaccuggcugggcagaaccaucagcaccgccagcagaagcggcuacgagaugcugaaggugcccaacgcccugaccgacgacagaagcaagcccauccagggccagaccaucgugcugaacaccgacuggagcggcuacagcggcagcuucauggacuacugggccgagggcgacugcuacagagccugcuucuacguggagcugaucagaggcagacccaaggaggacaaggugugguggaccagcaacagcaucgugagcaugugcagcagcaccgaguuccugggccaguggaacuggcccgacggcgccaagaucgaguacuuccuguga

SEQ ID NO: 183777 - RNA, 1413 nt, Artificial Sequence
  derived and/or modified CDS sequence (opt4) from neuraminidase__InfluenzaA__AGQ81973
augaaccccaaccagaagauccugugcaccagcgccaccgccaucaucaucggcgccaucgccgugcugaucggcaucgccaaccugggccugaacaucggccugcaccugaagcccagcugcaacugcagccacagccagcccgagaccaccaacaccagccagaccaucaucaacaacuacuacaacgagaccaacaucacccagaucagcaacaccaacauccagauggaggagagaaccagcagaggcuucaacaaccugaccaagggccugugcaccaucaacagcuggcacaucuacggcaaggacaacgccgugagaaucggcgagagcagcgacgugcuggugaccagagagcccuacgugagcugcgaccccgacgagugcagauucuacgcccugagccagggcaccaccaucagaggcaagcacagcaacggcaccauccacgacagaagccaguacagagcccugaucagcuggccccugagcagcccccccaccguguacaacagcagaguggagugcaucggcuggagcagcaccagcugccacgacggcaagagcagaaugagcaucugcaucagcggccccaacaacaacgccagcgccguggugugguacaacagaagacccguggccgagaucaacaccugggccagaaacauccugagaacccaggagagcgagugcgugugccacaacggcgugugccccgugguguucaccgacggcagcgccaccggccccgccgacaccagaaucuacuacuucaaggagggcaagauccugaagugggagagccugaccggcaccgccaagcacaucgaggagugcagcugcuacggcgagagaaccggcaucaccugcaccugcagagacaacuggcagggcagcaacagacccgugauccagaucgaccccguggccaugacccacaccagccaguacaucugcagccccgugcugaccgacaaccccagacccaacgaccccaacaucggcaagugcaacgaccccuaccccggcaacaacaacaacggcgugaagggcuucagcuaccuggacggcgccaacaccuggcugggcagaaccaucagcaccgccagcagaagcggcuacgagaugcugaaggugcccaacgcccugaccgacgacagaagcaagcccauccagggccagaccaucgugcugaacaccgacuggagcggcuacagcggcagcuucauggacuacugggccgagggcgacugcuacagagccugcuucuacguggagcugaucagaggcagacccaaggaggacaaggugugguggaccagcaacagcaucgugagcaugugcagcagcaccgaguuccugggccaguggaacuggcccgacggcgccaagaucgaguacuuccuguga

SEQ ID NO: 183778 - RNA, 1413 nt, Artificial Sequence; identical to SEQ ID NO: 183758
  derived and/or modified CDS sequence (opt4) from neuraminidase__InfluenzaA__AGQ81974

SEQ ID NO: 183779 - RNA, 1398 nt, Artificial Sequence
  derived and/or modified CDS sequence (opt4) from neuraminidase__InfluenzaA__AGQ81975
augaaccccaaccagaagauccugugcaccagcgccaccgccaucaucaucggcgccaucgccgugcugaucggcaucgccaaccugggccugaacaucggccugcaccugaagcccggcugcaacugcagccacagccagcccgagaccaccaacaccagccagaccaucaucaacaacuacuacaacgagaccaacaucaccaacauccagauggaggagagaaccagcagaaacuucaacaaccugaccaaguggcugugcaccaucaacagcuggcacaucuacggcaaggacaacgccgugagaaucggcgagaacagcgacgugcuggugaccagagagcccuacgugagcugcgaccccgacgagugcagauucuacgcccugagccagggcaccaccaucagaggcaagcacagcaacggcaccauccacgacagaagccaguacagagcccugaucagcuggccccugagcagcccccccaccguguacaacagcagaguggagugcaucggcuggagcagcaccagcugccacgacggcaagagcagaaugagcaucugcaucagcggccccaacaacaacgccagcgccguggugugguacaacagaagacccguggccgagaucaacaccugggccagaaacauccugagaacccaggagagcgagugcgugugccacaacggcgugugccccgugguguucaccgacggcagcgccaccggccccgccgacaccagaaucuacuacuucaaggagggcaagauccugaagugggagagccugaccggcaccgccaagcacaucgaggagugcagcugcuacggcgagagaaccggcaucaccugcaccugcagagacaacuggcagggcagcaacagacccgugauccagaucgaccccguggccaugacccacaccagccaguacaucugcagccccgugcugaccgacaaccccagacccgacgaccccaacaucggcaagugcaacgaccccuaccccggcaacaacaacaacggcgugaagggcuucagcuaccuggacggcgccaacaccuggcugggcagaaccaucagcaccgccagcagaagcggcuacgagaugcugaaggugcccaacgcccugaccgacgacagaagcaagcccauccagggccagaccaucgugcugaacgccgacuggagcggcuacagcggcagcuucauggacuacugggccgacggcgacugcuacagagccugcuucuacguggagcugaucagaggcagacccaaggaggacaaggugugguggaccagcaacagcaucgugagcaugugcagcagcaccgaguuccugggccaguggaacuggcccgacggcgccaagaucgaguacuuccuguga

SEQ ID NO: 183780 - RNA, 1398 nt, Artificial Sequence
  derived and/or modified CDS sequence (opt4) from neuraminidase__InfluenzaA__AGQ81977
augaaccccaaccagaagauccugugcaccagcgccaccgccaucaucaucggcgccaucgccgugcugaucggcaucgccaaccugggccugaacaucggccugcaccugaagcccggcugcaacugcagccacagccagcccgagaccaccaacaccagccagaccaucaucaacaacuacuacaacgagaccaacaucaccaacauccagauggaggagagaaccagcagaaacuucaacaaccugaccaagggccugugcaccaucaacagcuggcacaucuacggcaaggacaacgccgugagaaucggcgagagcagcgacgugcuggugaccagagagcccuacgugagcugcgaccccgacgagugcagauucuacgcccugagccagggcaccaccaucagaggcaagcacagcaacggcaccauccacgacagaagccaguacagagcccugaucagcuggccccugagcagcccccccaccguguacaacagcagaguggagugcaucggcuggagcagcaccagcugccacgacggcaagagcagaaugagcaucugcaucagcggccccaacaacaacgccagcgccguggugugguacaacagaagacccguggccgagaucaacaccugggccagaaacauccugagaacccaggagagcgagugcgugugccacaacggcgugugccccgugguguucaccgacggcagcgccaccggccccgccgacaccagaaucuacuacuucaaggagggcaagauccugaagugggagagccugaccggcaccgccaagcacaucgaggagugcagcugcuacggcgagagaaccggcaucaccugcaccugcagagacaacuggcagggcagcaacagacccgugauccagaucgaccccguggccaugacccacaccagccaguacaucugcagccccgugcugaccgacaaccccagacccgacgaccccaacaucggcaagugcaacgaccccuaccccggcaacaacaacaacggcgugaagggcuucagcuaccuggacggcgccaacaccuggcugggcagaaccaucagcaccgccagcagaagcggcuacgagaugcugaaggugcccaacgcccugaccgacgacagaagcaagcccauccagggccagaccaucgugcugaacgccgacuggagcggcuacagcggcagcuucauggacuacugggccgacggcgacugcuacagagccugcuucuacguggagcugaucagaggcagacccaaggaggacaaggugugguggaccagcaacagcaucgugagcaugugcagcagcaccgaguuccugggccaguggaacuggcccgacggcgccaagaucgaguacuuccuguga

SEQ ID NO: 183781 - RNA, 1398 nt, Artificial Sequence
  derived and/or modified CDS sequence (opt4) from neuraminidase__InfluenzaA__AGQ81979
augaaccccaaccagaagauccugugcaccagcgccaccgccaucaucaucggcgccaucgccgcccugaucggcaucgccaaccugggccugaacaucggccugcaccugaagcccggcugcaacugcagccacagccagcccgagaccaccaacaccagccagaccaucaucaacaacuacuacaacgagaccaacaucaccaacauccagauggaggagagaaccagcagaaacuucaacaaccugaccaagggccugugcaccaucaacagcuggcacaucuacggcaaggacaacgccgugagaaucggcgagagcagcgacgugcuggugaccagagagcccuacgugagcugcgaccccgacgagugcagauucuacgcccugagccagggcaccaccaucagaggcaagcacagcaacggcaccauccacgacagaagccaguacagagcccugaucagcuggccccugagcagcccccccaccguguacaacagcagaguggagugcaucggcuggagcagcaccagcugccacgacggcaagagcagaaugagcaucugcaucagcggccccaacaacaacgccagcgccguggugugguacaacagaagacccguggccgagaucaacaccugggccagaaacauccugagaacccaggagagcgagugcgugugccacaacggcgugugccccgugguguucaccgacggcagcgccaccggccccgccgacaccagaaucuacuacuucaaggagggcaagauccugaagugggagagccugaccggcaccgccaagcacaucgaggagugcagcugcuacggcgagagaaccggcaucaccugcaccugcagagacaacuggcagggcagcaacagacccgugauccagaucgaccccguggccaugacccacaccagccaguacaucugcagccccgugcugaccgacaaccccagacccgacgaccccaacaucggcaagugcaacgaccccuaccccggcaacaacaacaacggcgugaagggcuucagcuaccuggacggcgccaacaccuggcugggcagaaccaucagcaccgccagcagaagcggcuacgagaugcugaaggugcccaacgcccugaccgacgacagaagcaagcccauccagggccagaccaucgugcugaacgccgacuggagcggcuacagcggcagcuucauggacuacugggccgacggcgacugcuacagagccugcuucuacguggagcugaucagaggcagacccaaggaggacaaggugugguggaccagcaacagcaucgugagcaugugcagcagcaccgaguuccugggccaguggaacuggcccgacggcgccaagaucgaguacuuccuguga

SEQ ID NO: 183782 - RNA, 1398 nt, Artificial Sequence; identical to SEQ ID NO: 183780
  derived and/or modified CDS sequence (opt4) from neuraminidase__InfluenzaA__AGQ81980

SEQ ID NO: 183783 - RNA, 1350 nt, Artificial Sequence
  derived and/or modified CDS sequence (opt4) from neuraminidase__InfluenzaA__AGQ88501
augaaccccaaccagaagaucgugaccaucggcagcaucugcauggugaucggcaucgugagccugaugcugcagaucggcaacaugaucagcaucugggugagccacagcauccagaccggcaaccagcaccagaccgagcccaucagaaacaccaacuuccugaccgagaacgccguggccagcguggcccugagcggcaacagcagccugugccccaucagaggcugggccgugcacagcaaggacaacagcaucagaaucggcagcaagggcgacguguucgugaucagagagcccuucaucagcugcagcaaccuggagugcagaaccuucuuccugacccagggcgcccugcugaacgacaagcacagcaacggcaccgugaaggacagaagcccccacagaacccugaugagcugccccaucggcgaggcccccagccccuacaacagcagauucgagagcguggccuggagcgccagcgccugccacgacggcaucagcuggcugaccaucggcaucagcggccccgacaacggcgccguggccgugcugaaguacaacggcaucaucaccgacaccaucaagagcuggagaaacaacauccugagaacccaggagagcgagugcaccugcgugaacggcagcugcuucaccgugaugaccgacggccccagcaacggccaggccagcuacaagaucuucaagaucgagaagggcaagguggugaagagcguggagcugaacgcccccaacuaccacuacgaggagugcagcugcuaccccgacgccggcgagaucaucugcgugugcagagacaacuggcacggcagcaacagacccugggugagcuucaaccagaaccuggaguaccagaucggcuacaucugcagcggcguguucggcgacaaccccagacccaacgacggcgagggcagcugcggccccgugagccccaacggcgccuacggcgugaagggcuucagcuucaaguacggcaacggcguguggaucggcagaaccaagagcacccacagcagaagcggcuucgagaugaucugggaccccaacggcuggaccggcaccgacagcgaguucagcaugaagcaggacaucguggccaucaccgacuggagcggcuacagcggcagcuucgugcagcaccccgagcugaccggccuggacugcaucagacccugcuucuggguggagcugaucagaggcagacccaaggagagcaccaucuggaccagcggcagcagcaucagcuucugcggcgugaacagcgacaccgugagcuggagcuggcccgacggcgccgagcugcccuucaccaucgacaaguga

SEQ ID NO: 183784 - RNA, 1401 nt, Artificial Sequence; identical to SEQ ID NO: 183662
  derived and/or modified CDS sequence (opt4) from neuraminidase__InfluenzaA__AGR33906

SEQ ID NO: 183785 - RNA, 1401 nt, Artificial Sequence
  derived and/or modified CDS sequence (opt4) from neuraminidase__InfluenzaA__AGR33908
augaaccccaaccagaagaucaccgccaucggcagcgugagccugaucaucgccaucaucugccugcugaugcagaucgccauccugaccaccaccaugacccugcacuucagacagaacgagugcagcaaccccagcaacaaccaggugaugcccugcgagcccaucaucaucgagagaaacaccgugcaccugaacagcaccaccaucgagagagagaucugccccaagguggccgaguacaagaacuggagcaagccccagugccagaucaccggcuucgcccccuucagcaaggacaacagcaucagacugagcgccggcggcgacaucugggugaccagagagcccuacgugagcugcagccccgacaagugcuaccaguucgcccugggccagggcaccacccugaagaacaagcacagcaacggcaccacccacgacagaaccccccacagaacccugcugaugaacgagcugggcgugcccuuccaccugggcaccaagcaggugugcaucgccuggagcagcagcagcugcuacgacggcaaggccuggcugcacaucugcgugaccggcgacgacaagaacgccaccgccagcaucaucuacgacggcaugcugguggacagcaucggcagcuggagcaagaacauccugagaacccaggagagcgagugcgugugcaucaacggcaccugcgccguggugaugaccgacggcagcgccagcggcgaggccgacaccagaauccuguucaucagagagggcaagaucaucaacaucagcccccugagcggcagcgcccagcacguggaggagugcagcugcuaccccagauaccccgaggugagaugcgugugcagagacaacuggaagggcagcaacagacccaucaucuacaucaacaugguggacuacagcaucgagagcagauacgugugcagcggccuggugggcgacacccccagaaacgacgacagcaccagcagcagcaacugcagagaccccaacaacgagagaggcgcccccggcgugaagggcugggccuucgacgacggcaacgacguguggaugggcagaaccaucaagaacggcagcagaagcggcuacgagaccuucagagugaucaacggcuggaccauggccaacagcaagagccagaucaacagacaggugaucguggacagcgacaacuggagcggcuacagcggcaucuucagcguggagggcaagaagugcaucaacagaugcuucuacguggagcugaucagaggcagaccccaggagcccagagugugguggaccagcaacagcaucaucguguucugcggcaccagcggcaccuacggcaccggcagcuggcccgacggcgccgacaucaacuucaugcccaucuga

SEQ ID NO: 183786 - RNA, 1401 nt, Artificial Sequence
  derived and/or modified CDS sequence (opt4) from neuraminidase__InfluenzaA__AGR33910
augaaccccaaccagaagaucaucgccaucggcagcgugagccugaccaucgccaucaucugcuuccugaugcagaucgccauccugaccaccaccaugacccugcacuucaagcagaacgagugcagcaagcccagcaacaaccagguggugcccugcgagcccauccugaucgagagaaacaccgugcaccugaacagcaccaccaucgagaaggaggugugccccaagguggccgaguacaagaacuggagcaagccccagugccagaucaccggcuucgcccccuucagcaaggacaacagcaucagacugagcgccggcggcgacaucugggugaccagagagcccuacgugagcugcagcuucggcaagugcuaccaguucgcccugggccagggcaccacccugaagaacaagcacagcaacggcaccacccacgacagaaccccccacagaacccugcugaugaacgagcugggcgugcccuuccaccugggcaccaagcaggugugcaucgccuggagcagcagcagcugcuacgacggcaaggccuggcugcacaucugcgugaccggcgacgacaagaacgccaccgccagcaucaucuacgacggcaugcugguggacagcaucggcagcuggagcaagaacauccugagaacccaggagagcgagugcgugugcaucaacggcaccugcgccguggugaugaccgacggcagcgccagcggcaaggccgacaccagaauccuguucaucagagagggcaagaucaucaacaucagaccccugagcggcagcgcccagcacguggaggagugcagcugcuaccccagauaccccgaggugagaugcgugugcagagacaacuggaagggcagcaacagacccgugcuguacaucaacauggccgacuacagcguggagagcagcuacgugugcagcggccuggugggcgacacccccagaaacgacgacagcagcagcagcagcaacugcagagaccccaacaacgagagaggcgcccccggcgugaagggcugggccuucgacgacggcaacgacguguggaugggcagaaccaucagaaacgacagcagaagcggcuacgagaccuucagaguggugaacggcuggaccaccgccaacagcaagagccagaucaacagacaggugaucguggacagcgagaacuggagcggcuacagcggcaucuucagcguggagggcaagaacugcaucaacagaugcuucuacguggagcugaucagaggcagaccccaggagcccagagugugguggaccagcaacagcaucaucguguucugcggcaccagcggcaccuacggcaccggcagcuggcccgacggcgccaacaucaacuucaugcccaucuga

SEQ ID NO: 183787 - RNA, 1401 nt, Artificial Sequence
  derived and/or modified CDS sequence (opt4) from neuraminidase__InfluenzaA__AGR33911
augaaccccaaccagaagaucaucgccaucggcagcgugagccugaccaucgccaucaucugcuuccugaugcagaucgccauccugaccaccaccaugacccugcacuucaagcagaacgagugcagcaaccccagcaacaaccagguggugcccugcgagcccauccugaucgagagaaacaccgugcaccugaacagcaccaccaucgagaaggaggugugccccaagguggccgaguacaagaacuggagcaagccccagugccagaucaccggcuucgcccccuucagcaaggacaacagcaucagacugagcgccggcggcgacaucugggugaccagagagcccuacgugagcugcagccugggcaagugcuaccaguucgcccugggccagggcaccacccugaagaacaaccacagcaacggcaccacccacgacagaaccccccacagaacccugcugaugaacgagcugggcgugcccuuccaccugggcaccaagcaggugugcaucgccuggagcagcagcagcugcuacgacggcaaggccuggcugcacaucugcgugaccggcgacgacaagaacgccaccgccagcaucaucuacgacggcaugcugguggacagcaucggcagcuggagcaagaacauccugagaacccaggagagcgagugcgugugcaucaacggcaccugcgccguggugaugaccgacggcagcgccagcggcaaggccgacaccagaauccuguucaucagagagggcaagaucaucaacaucagcccccugagcggcagcgcccagcacguggaggagugcagcugcuaccccagauaccccgaggugagaugcgugugcagagacaacuggaagggcagcaacagacccgugcuguacaucaacauggccgacuacagcaucgagagcagcuacgugugcagcggccuggugggcgacacccccagaaacgacgacagcagcagcagcagcaacugcagagaccccaacaacgagagaggcgcccccggcgugaagggcugggccuucgacgacggcaacgacguguggaugggcagaaccaucagaaacaacagcagaagcggcuacgagaccuucagaguggugaacggcuggaccaccgccaacagcaagagccagaucaacagacaggugaucguggacagcgagaacuggagcggcuacagcggcaucuucagcguggagggcaagaacugcaucaacagaugcuucuacguggagcugaucagaggcagaccccaggagcccagagugugguggaccagcaacagcaucaucguguucugcggcaccagcggcaccuacggcaccggcagcuggcccgacggcgccaacaucaacuucaugcccaucuga

SEQ ID NO: 183788 - RNA, 1356 nt, Artificial Sequence; identical to SEQ ID NO: 183703
  derived and/or modified CDS sequence (opt4) from neuraminidase__InfluenzaA__AGR33912

SEQ ID NO: 183789 - RNA, 1356 nt, Artificial Sequence; identical to SEQ ID NO: 183733
  derived and/or modified CDS sequence (opt4) from neuraminidase__InfluenzaA__AGR33913

SEQ ID NO: 183790 - RNA, 1356 nt, Artificial Sequence; identical to SEQ ID NO: 183703
  derived and/or modified CDS sequence (opt4) from neuraminidase__InfluenzaA__AGR33915

SEQ ID NO: 183791 - RNA, 1356 nt, Artificial Sequence
  derived and/or modified CDS sequence (opt4) from neuraminidase__InfluenzaA__AGR33916
augaaccccaaccagaagcuguucgccagcagcggcguggccaucgcccugagcgugcugaaccugcugaucggccugagcaacgugggccugaacgugagccugcaccugaaggagaccggccccaagcaggaggagaaccugaccugcaugaccaccaaggagaccgagcugggcacccccagcuaccugcugcugaacaagagccugugcaacguggagggcuggguggugaucgccaaggacaacgccgugagauucggcgagagcgagcagaucaucaucaccagagagcccuacgugagcugcgaccccaacggcugcaagauguacgcccugcaccagggcaccaccaucagaaacaagcacagcaacggcaccauccacgacagaaccgccuucagaggccugaucagcaccccccugggcaccccccccaccgugagcaacagcgacuucaucugcgugggcuggagcagcaccaccugccacgacggcaucggcagaaugaccaucugcauccagggcaacaacgacaacgccaccgccaccguguacuacaacagaagacugaccaccaccaucaagaccugggccagaaacauccugagaacccaggagagcgagugcgugugccacaacggcaccugcgccguggugaugaccgacggcagcgccagcagccaggcccacaccaaggugauguacuuccacaagggccugguggugaaggaggaggcccugaagggcagcgccaagcacaucgaggagugcagcugcuacggccacaaccagaaggugaccugcgugugcagagacaacuggcagggcgccaacagacccaucaucgagaucgacaugaacacccuggagcacaccagcagauacgugugcaccggcauccugaccgacaccagcagacccggcgacaagcccaccggcgacugcagcaaccccaucaccggcagccccggcgcccccggcgugaagggcuucggcuuccugaacggcgacaacaccuggcugggcagaaccaucagccccagaagcagaagcggcuucgagaugcugaagauccccaacgccggcaucgaccccaacagcagaaucgccgagagacaggagaucguggacaacagcaacuggagcggcuacagcggcagcuucaucgacuacuggaacgacaacagcgagugcuacaaccccugcuucuacguggagcugaucagaggcagacccgaggaggccaaguacgugugguggaccagcaacagccugaucgcccugugcggcagccccuuccccgugggcagcggcagcuuccccgacggcgcccagauccaguacuucagcuga

SEQ ID NO: 183792 - RNA, 1356 nt, Artificial Sequence; identical to SEQ ID NO: 183733
  derived and/or modified CDS sequence (opt4) from neuraminidase__InfluenzaA__AGR33917

SEQ ID NO: 183793 - RNA, 1356 nt, Artificial Sequence; identical to SEQ ID NO: 183703
  derived and/or modified CDS sequence (opt4) from neuraminidase__InfluenzaA__AGR33918

SEQ ID NO: 183794 - RNA, 1398 nt, Artificial Sequence; identical to SEQ ID NO: 183780
  derived and/or modified CDS sequence (opt4) from neuraminidase__InfluenzaA__AGR33919

SEQ ID NO: 183795 - RNA, 1413 nt, Artificial Sequence
  derived and/or modified CDS sequence (opt4) from neuraminidase__InfluenzaA__AGR45094
augaaccccaaccagaagaucaucaccaucggcagcaucagcauggccaucggcaucaucagccugauccugcagaucggcaacaucaucagcaucugggccagccacagcauccagaccggcagccagaaccacaccggcaucugcaaccagagaaucaucaccuacgagaacagcaccugggugaaccagaccuacgugaacaucaacaacaccaacgugguggccggcaaggacaagaccagcgugacccuggccggcaacagcagccugugccccaucagaggcugggccaucuacaccaaggacaacagcaucagaaucggcagcaagggcgacguguucgugaucagagagcccuucaucagcugcagccaccuggagugcagaaccuucuuccugacccagggcgcccugcugaacgacaagcacagcaacggcaccgugaaggacagaagccccuacagagcccugaugagcugcccccugggcgaggcccccagccccuacaacagcagauucgagagcguggccuggagcgccagcgccugccacgacggcaugggcuggcugaccaucggcaucagcggccccgacaacggcgccguggccgugcugaaguacaacggcaucaucaccgagaccaucaagagcuggaagaagagaauccugagaacccaggagagcgagugcgugugcgugaacggcagcugcuucaccaucaugaccgacggccccagcaacggccccgccagcuacagaaucuucaagaucgagaagggcaagaucaccaagagcaucgagcuggacgcccccaacuaccacuacgaggagugcagcugcuaccccgacaccggcaccgugaugugcgugugcagagacaacuggcacggcagcaacagacccugggugagcuucaaccagaaccuggacuaccagaucggcuacaucugcagcggcguguucggcgacaaccccagacccaaggacggcgagggcagcugcaaccccgugaccguggacggcgccgacggcgugaagggcuucagcuacagauacggcaacggcguguggaucggcagaaccaagagcaacagcagcagaaagggcuucgagaugaucugggaccccaacggcuggaccgacaccgacagcgacuucagcgugaagcaggacguggugcccaugaccgacuggagcggcuacagcggcagcuucgugcagcaccccgagcugaccggccuggacugcaugagacccugcuucuggguggagcugaucagaggcagacccagagagaacaccaccaucuggaccagcggcagcagcaucagcuucugcggcgugaacagcgacaccgccaacuggagcuggcccgacgacgccgagcugccccugaccaucgacaaguga

SEQ ID NO: 183796 - RNA, 1413 nt, Artificial Sequence; identical to SEQ ID NO: 178990
  derived and/or modified CDS sequence (opt4) from neuraminidase__InfluenzaA__AGR49780

SEQ ID NO: 183797 - RNA, 1410 nt, Artificial Sequence
  derived and/or modified CDS sequence (opt4) from neuraminidase__InfluenzaA__AGR49804
augaaccccaaccagaagaucaucaccaucggcagcgugugcaugaccaucggcauggccaaccugauccugcagaucggcaacaucaucagcaucuggaucagccacagcauccagcugggcaaccagaaccagaucgagaccugcaaccagagcgugaucaccuacgagaacaacaccugggugaaccagaccuacgugaacaucagcaacaccaacuucgccgccggccagagcguggugagcgugaagcugaccggcaacagcagccugugccccgugagcggcugggccaucuacagcaaggacaacagcgugagaaucggcagcaagggcgacguguucgugaucagagagcccuucaucagcugcagcccccuggagugcagaaccuucuuccugacccagggcgcccugcugaacgacaagcacagcaacggcaccaucaaggacagaagccccuacagaacccugaugagcugccccaucggcgaggugcccagccccuacaacagcagauucgagagcguggccuggagcgccagcgccugccacgacggcaucaacuggcugaccaucggcaucagcggccccgacaacggcgccguggccgugcugaaguacaacggcaucaucaccgacaccaucaagagcuggagaaacaacauccugagaacccaggagagcgagugcgccugcgugaacggcagcugcuucaccgugaugaccgacggccccagcaacggccaggccagcuacaagaucuucagaaucgagaagggcaagaucgugaagagcguggagaugaacgcccccaacuaccacuacgaggagugcagcugcuaccccgacagcagcgagaucaccugcgugugcagagacaacuggcacggcagcaacagacccugggugagcuucaaccagaaccuggaguaccagaucggcuacaucugcagcggcaucuucggcgacaaccccagacccaacgacaagaccggcagcugcggccccgugagcagcaacggcgccaacggcgugaagggcuucagcuucaaguacggcaacggcguguggaucggcagaaccaagagcaucagcagcagaaacggcuucgagaugaucugggaccccaacggcuggaccggcaccgacaacaacuucagcaucaagcaggacaucgugggcaucaacgaguggagcggcuacagcggcagcuucgugcagcaccccgagcugaccggccuggacugcaucagacccugcuucuggguggagcugaucagaggcagacccaaggagaacaccaucuggaccagcggcagcagcaucagcuucugcggcgugaacagcgacaccgugggcuggagcuggcccgacggcgccgagcugcccuucaccaucgacaaguga

SEQ ID NO: 183798 - RNA, 1413 nt, Artificial Sequence; identical to SEQ ID NO: 178990
  derived and/or modified CDS sequence (opt4) from neuraminidase__InfluenzaA__AGR49820

SEQ ID NO: 183799 - RNA, 1410 nt, Artificial Sequence; identical to SEQ ID NO: 176150
  derived and/or modified CDS sequence (opt4) from neuraminidase__InfluenzaA__AGR49832

SEQ ID NO: 183800 - RNA, 1413 nt, Artificial Sequence; identical to SEQ ID NO: 178990
  derived and/or modified CDS sequence (opt4) from neuraminidase__InfluenzaA__AGR49844

SEQ ID NO: 183801 - RNA, 1413 nt, Artificial Sequence; identical to SEQ ID NO: 178990
  derived and/or modified CDS sequence (opt4) from neuraminidase__InfluenzaA__AGR49856

SEQ ID NO: 183802 - RNA, 1413 nt, Artificial Sequence; identical to SEQ ID NO: 178990
  derived and/or modified CDS sequence (opt4) from neuraminidase__InfluenzaA__AGR49868

SEQ ID NO: 183803 - RNA, 1410 nt, Artificial Sequence; identical to SEQ ID NO: 176788
  derived and/or modified CDS sequence (opt4) from neuraminidase__InfluenzaA__AGR49880

SEQ ID NO: 183804 - RNA, 1410 nt, Artificial Sequence; identical to SEQ ID NO: 178544
  derived and/or modified CDS sequence (opt4) from neuraminidase__InfluenzaA__AGR49891

SEQ ID NO: 183805 - RNA, 1410 nt, Artificial Sequence
  derived and/or modified CDS sequence (opt4) from neuraminidase__InfluenzaA__AGR49903
augaaccccaaccagaagaucaucaccaucggcagcgugagccugaccaucagcaccaucugcuucuucaugcagaucgccauccugaucaccaccgugacccugcacuucaagcaguacgaguucaacagcccccccaacaaccaggugaugcugugcgagcccaccaucaucgagagaaacaucaccgagaucguguaccugaccaacaccaccaucgagaaggagaucugccccaagcuggccgaguacagaaacuggagcaagccccagugcgacaucaccggcuucgcccccuucagcaaggacaacagcaucagacugagcgccggcggcgacaucugggugaccagagagcccuacgugagcugcgaccccgacaagugcuaccaguucgcccugggccagggcaccacccugaacaacgugcacagcaacgacaccgugcacgacagaacccccuacagaacccugcugaugaacgagcugggcgugcccuuccaccugggcaccaagcaggugugcaucgccuggagcagcagcagcugccacgacggcaaggccuggcugcacgugugcaucaccggcgacgacaagaacgccaccgccagcuucaucuacaacggcagacugguggacagcaucgugagcuggagcaaggagauccugagaacccaggagagcgagugcgugugcaucaacggcaccugcaccguggugaugaccgacggcagcgccagcggcaaggccgacaccaagauccuguucaucgaggagggcaagaucgugcacaccagcacccugagcggcagcgcccagcacguggaggagugcagcugcuaccccagauaccccggcgugagaugcgugugcagagacaacuggaagggcagcaacagacccaucguggacaucaacaucaaggaccacagcaucgugagcagcuacgugugcagcggccuggugggcgacacccccagaaagaacgacagcagcagcagcggccacugccuggaccccaacaacgaggagggcggccacggcgugaagggcugggccuucgacgacggcaacgacguguggaugggcagaaccaucagcgagaagagcagacugggcuacgagaccuucaaggugaucgagggcuggagcaaccccaagagcaagcugcagaucaacagacaggugaucguggacagaggcaacagaagcggcuacagcggcaucuucagcguggagggcaagagcugcaucaacagaugcuucuacguggagcugaucagaggcagaaaggaggagaccgaggugcuguggaccagcaacagcaucgugguguucugcggcaccagcggcaccuacggcaccggcagcuggcccgacggcgccgacaucaaccugaugcccaucuga

SEQ ID NO: 183806 - RNA, 1410 nt, Artificial Sequence; identical to SEQ ID NO: 176150
  derived and/or modified CDS sequence (opt4) from neuraminidase__InfluenzaA__AGR49915

SEQ ID NO: 183807 - RNA, 1410 nt, Artificial Sequence; identical to SEQ ID NO: 176150
  derived and/or modified CDS sequence (opt4) from neuraminidase__InfluenzaA__AGR49927

SEQ ID NO: 183808 - RNA, 1410 nt, Artificial Sequence
  derived and/or modified CDS sequence (opt4) from neuraminidase__InfluenzaA__AGR49939
augaaccccaacaagaagaucaucaccaucggcagcgugagccugaccaucagcaccaucugcuucuucaugcagaucgccauccugaucaccaccgugacccugcacuucaagcaguacgaguucaacagcccccccaacaaccaggugaugcugugcgagcccaccaucaucgagagaaacaucaccgagaucguguaccugaccaacaccaccaucgagaaggagaucugccccaagcuggccgaguacagaaacuggagcaagccccagugcgacaucaccggcuucgcccccuucagcaaggacaacagcaucagacugagcgccggcggcgacaucugggugaccagagagcccuacgugagcugcgaccccgacaagugcuaccaguucgcccugggccagggcaccacccugaacaacgugcacagcaacgacaccgugagagacagaacccccuacagaacccugcugaugaacgagcugggcgugcccuuccaccugggcaccaagcaggugugcaucgccuggagcagcagcagcugccacgacggcaaggccuggcugcacgugugcaucaccggcgacgacaagaacgccaccgccagcuucaucuacaacggcagacugguggacagcaucgugagcuggagcaaggagauccugagaacccaggagagcgagugcgugugcaucaacggcaccugcaccguggugaugaccgacggcagcgccagcggcaaggccgacaccaagauccuguucaucgaggagggcaagaucgugcacaccagcacccugagcggcagcgcccagcacguggaggagugcagcugcuaccccagauaccccggcgugagaugcgugugcagagacaacuggaagggcagcaacagacccaucguggacaucaacaucaaggaccacagcaucgugagcagcuacgugugcagcggccuggugggcgacacccccagaaagaacgacagcagcagcagcggccacugccuggaccccaacaacgaggagggcggccacggcgugaagggcugggccuucgacgacggcaacgacguguggaugggcagaaccaucagcgagaagagcagacugggcuacgagaccuucaaggugaucgagggcuggagcaaccccaagagcaagcugcagaucaacagacaggugaucguggacagaggcaacagaagcggcuacagcggcaucuucagcguggagggcaagagcugcaucaacagaugcuucuacguggagcugaucagaggcagaaaggaggagaccgaggugcuguggaccagcaacagcaucgugguguucugcggcaccagcggcaccuacggcaccggcagcuggcccgacggcgccgacaucaaccugaugcccaucuga

SEQ ID NO: 183809 - RNA, 1410 nt, Artificial Sequence; identical to SEQ ID NO: 176745
  derived and/or modified CDS sequence (opt4) from neuraminidase__InfluenzaA__AGR49951

SEQ ID NO: 183810 - RNA, 1410 nt, Artificial Sequence
  derived and/or modified CDS sequence (opt4) from neuraminidase__InfluenzaA__AGR49963
augaaccccaacaagaagaucaucaccaucggcagcgugagccugaccaucagcaccaucugcuucuucaugcagaucgccauccugaucaccaccgugacccugcacuucaagcaguacgaguucaacagcccccccaacaaccaggugaugcugugcgagcccaccaucaucgagagaaacaucaccgagaucguguaccugaccaacaccaccaucgagaaggagaucugccccaagcuggccgaguacagaaacuggagcaagccccagugcgacaucaccggcuucgcccccuucagcaaggacaacagcaucagacugagcgccggcggcgacaucugggugaccagagagcccuacgugagcugcgaccccgacaagugcuaccaguucgcccugggccagggcaccacccugaacaacgugcacagcaacgacaccgugagagacagaacccccuacagaacccugcugaugaacgagcugggcgugcccuuccaccugggcaccaagcaggugugcaucgccuggagcagcagcagcugccacgacggcaaggccuggcugcacgugugcaucaccggcgacgacaagaacgccaccgccagcuucaucuacaacggcagacugguggacagcaucgugagcuggagcaaggagauccugagaacccaggagagcgagugcgugugcaucaacggcaccugcaccguggugaugaccgacggcagcgccagcggcaaggccgacaccaagauccuguucaucgaggagggcaagaucgugcacaccagcacccugagcggcagcgcccagcacguggaggagugcagcugcuaccccagauaccccggcgugagaugcgugugcagagacaacuggaagggcagcaacagacccaucguggacaucaacaucaaggaccacagcaucgugagcagcuacgugugcagcggccuggugggcgacacccccagaaagaacgacagcagcagcagcggccacugccuggaccccaacaacgaggagggcggccacggcgugaagggcugggccuucgacgacggcaacgacguguggaugggcagaaccaucagcaagaagagcagacugggcuacgagaccuucaaggugaucgagggcuggagcaaccccaagagcaagcugcagaucaacagacaggugaucguggacagaggcaacagaagcggcuacagcggcaucuucagcguggagggcaagagcugcaucaacagaugcuucuacguggagcugaucagaggcagaaaggaggagaccgaggugcuguggaccagcaacagcaucgugguguucugcggcaccagcggcaccuacggcaccggcagcuggcccgacggcgccgacaucaaccugaugcccaucuga

SEQ ID NO: 183811 - RNA, 1410 nt, Artificial Sequence; identical to SEQ ID NO: 176788
  derived and/or modified CDS sequence (opt4) from neuraminidase__InfluenzaA__AGR49975

SEQ ID NO: 183812 - RNA, 1413 nt, Artificial Sequence; identical to SEQ ID NO: 178990
  derived and/or modified CDS sequence (opt4) from neuraminidase__InfluenzaA__AGR49986

SEQ ID NO: 183813 - RNA, 1413 nt, Artificial Sequence; identical to SEQ ID NO: 178990
  derived and/or modified CDS sequence (opt4) from neuraminidase__InfluenzaA__AGR49998

SEQ ID NO: 183814 - RNA, 1410 nt, Artificial Sequence; identical to SEQ ID NO: 176788
  derived and/or modified CDS sequence (opt4) from neuraminidase__InfluenzaA__AGR50010

SEQ ID NO: 183815 - RNA, 1410 nt, Artificial Sequence; identical to SEQ ID NO: 176788
  derived and/or modified CDS sequence (opt4) from neuraminidase__InfluenzaA__AGR50021

SEQ ID NO: 183816 - RNA, 1410 nt, Artificial Sequence; identical to SEQ ID NO: 176798
  derived and/or modified CDS sequence (opt4) from neuraminidase__InfluenzaA__AGR50032

SEQ ID NO: 183817 - RNA, 1410 nt, Artificial Sequence
  derived and/or modified CDS sequence (opt4) from neuraminidase__InfluenzaA__AGR50043
augaaccccaaccagaagaucaucaccaucggcagcgugagccugaccaucagcaccaucugcuucuucaugcagaucgccauccugaucaccaccgugacccugcacuucaagcaguacgaguucaacagcccccccaacaaccaggugaugcugugcgagcccaccaucaucgagagaaacaucaccgagaucguguaccugaccaacaccaccaucgagaaggagaucugccccaagcuggccgaguacagaaacuggagcaagccccagugcgacaucaccggcuucgcccccuucagcaaggacaacagcaucagacugagcgccggcggcgacaucugggugaccagagagcccuacgugagcugcgaccccgacaagugcuaccaguucgcccugggccagggcaccacccugaacaacgugcacagcaacaacaccgugagagacagaacccccuacagaacccugcugaugaacgagcugggcgugcccuuccaccugggcaccaagcaggugugcaucgccuggagcagcagcagcugccacgacggcaaggccuggcugcacgugugcaucaccggcgacgacaagaacgccaccgccagcuucaucuacaacggcagacugguggacagcguggugagcuggagcaaggacauccugagaacccaggagagcgagugcgugugcaucaacggcaccugcaccguggugaugaccgacggcagcgccagcggcaaggccgacaccaagauccuguucaucgaggagggcaagaucgugcacaccagcacccugagcggcagcgcccagcacguggaggagugcagcugcuaccccagauaccccggcgugagaugcgugugcagagacaacuggaagggcagcaacagacccaucguggacaucaacaucaaggaccacagcaucgugagcagcuacgugugcagcggccuggugggcgacacccccagaaagaacgacagcagcagcagcagccacugccuggaccccaacaacgaggagggcggccacggcgugaagggcugggccuucgacgacggcaacgacguguggaugggcagaaccaucagcgagaagagcagacugggcuacgagaccuucaaggugaucgagggcuggagcaaccccaagagcaagcugcagaucaacagacaggugaucguggacagaggcaacagaagcggcuacagcggcaucuucagcguggagggcaagagcugcaucaacagaugcuucuacguggagcugaucagaggcagaaaggaggagaccgaggugcuguggaccagcaacagcaucgugguguucugcggcaccagcggcaccuacggcaccggcagcuggcccgacggcgccgaccugaaccugaugcccaucuga

SEQ ID NO: 183818 - RNA, 1410 nt, Artificial Sequence; identical to SEQ ID NO: 176788
  derived and/or modified CDS sequence (opt4) from neuraminidase__InfluenzaA__AGR50055

SEQ ID NO: 183819 - RNA, 1410 nt, Artificial Sequence
  derived and/or modified CDS sequence (opt4) from neuraminidase__InfluenzaA__AGR50066
augaaccccaaccagaagaucaucaccaucggcagcgugugcaugaccaucggcauggccaaccugauccugcagaucggcaacaucaucagcaucuggaucagccacagcauccagcugggcaaccagaaccagaucgagaccugcaaccagagcgugaucaccuacgagaacaacaccugggugaaccagaccuacgugaacaucagcaacaccaacuucgccgccggccagagcguggugagcgugaagcuggccggcaacagcagccugugccccgugagcggcugggccaucuacagcaaggacaacagcgugagaaucggcagcaagggcgacguguucgugaucagagagcccuucaucagcugcagcccccuggagugcagaaccuucuuccugacccagggcgcccugcugaacgacaagcacagcaacggcaccaucaaggacagaagccccuacagaacccugaugagcugccccaucggcgaggugcccagccccuacaacagcagauucgagagcguggccuggagcgccagcgccugccacgacggcaucaacuggcugaccaucggcaucagcggccccgacaacggcgccguggccgugcugaaguacaacggcaucaucaccgacaccaucaagagcuggagaaacaacauccugagaacccaggagagcgagugcgccugcgugaacggcagcugcuucaccgugaugaccgacggccccagcaacggccaggccagcuacaagaucuucaagaucgagaagggcaagaucgugaagagcguggagaugaacgcccccaacuaccacuacgaggagugcagcugcuaccccgacagcagcgagaucaccugcgugugcagagacaacuggcacggcagcaacagacccugggugagcuucaaccagaaccuggaguaccagaucggcuacaucugcagcggcaucuucggcgacaaccccagacccaacgacaagaccggcagcugcggccccgugagcagcaacggcgccaacggcgugaagggcuucagcuucaaguacggcaacggcguguggaucggcagaaccaagagcaucagcagcagaaacggcuucgagaugaucugggaccccaacggcuggaccggcaccgacaacaacuucagcaucaagcaggacaucgugggcaucaacgaguggagcggcuacagcggcagcuucgugcagcaccccgagcugaccggccuggacugcaucagacccugcuucuggguggagcugaucagaggcagacccaaggagaacaccaucuggaccagcggcagcagcaucagcuucugcggcgugaacagcgacaccgugggcuggagcuggcccgacggcgccgagcugcccuucaccaucgacaaguga

SEQ ID NO: 183820 - RNA, 1410 nt, Artificial Sequence; identical to SEQ ID NO: 176788
  derived and/or modified CDS sequence (opt4) from neuraminidase__InfluenzaA__AGR50077

SEQ ID NO: 183821 - RNA, 1410 nt, Artificial Sequence; identical to SEQ ID NO: 176788
  derived and/or modified CDS sequence (opt4) from neuraminidase__InfluenzaA__AGR50088

SEQ ID NO: 183822 - RNA, 1410 nt, Artificial Sequence; identical to SEQ ID NO: 176788
  derived and/or modified CDS sequence (opt4) from neuraminidase__InfluenzaA__AGR50099

SEQ ID NO: 183823 - RNA, 1410 nt, Artificial Sequence; identical to SEQ ID NO: 176788
  derived and/or modified CDS sequence (opt4) from neuraminidase__InfluenzaA__AGR50110

SEQ ID NO: 183824 - RNA, 1410 nt, Artificial Sequence
  derived and/or modified CDS sequence (opt4) from neuraminidase__InfluenzaA__AGR50121
augaaccccaaccagaagaucaucaccaucggcagcgugugcaugaccaucggcauggccaaccugauccugcagaucggcaacaucaucagcaucuggaucagccacagcauccagcugggcaaccagaaccagaucgagaccugcaaccagagcgugaucaccuacgagaacaacaccugggugaaccagaccuacgugaacaucagcaacaccaacuucgccgccggccagagcguggugagcgugaagcuggccggcaacagcagccugugccccgugagcggcugggccaucuacagcaaggacaacagcgugagaaucggcagcaagggcgacguguucgugaucagagagcccuucaucagcugcagcccccuggagugcagaaccuucuuccugacccagggcgcccugcugaacgacaagcacagcaacggcaccaucaaggacagaagccccuacagaacccugaugagcugccccaucggcgaggugcccagccccuacaacagcagauucgagagcguggccuggagcgccagcgccugccacgacggcaucaacuggcugaccaucggcaucagcggccccgacaacggcgccguggccgugcugaaguacaacggcaucaucaccgacaccaucaagagcuggagaaacaacauccugagaacccaggagagcgagugcgccugcgugaacggcagcugcuucaccgugaugaccgacggccccagcaacggccaggccagcuacaagaucuucagaaucgagaagggcaagaucgugaagagcguggagaugaacgcccccaacuaccacuacgaggagugcagcugcuaccccgacagcagcgagaucaccugcgugugcagagacaacuggcacggcagcaacagacccugggugagcuucaaccagaaccuggaguaccagaucggcuacaucugcagcggcaucuucggcgacaaccccagacccaacgacaagaccggcagcugcggccccgugcccagcaacggcgccaacggcgugaagggcuucagcuucaaguacggcaacggcguguggaucggcagaaccaagagcaucagcagcagaaacggcuucgagaugaucugggaccccaacggcuggaccggcaccgacaacaacuucagcaucaagcaggacaucgugggcaucaacgaguggagcggcuacagcggcagcuucgugcagcaccccgagcugaccggccuggacugcaucagacccugcuucuggguggagcugaucagaggcagacccaaggagaacaccaucuggaccagcggcagcagcaucagcuucugcggcgugaacagcgacaccgugggcuggagcuggcccgacggcgccgagcugcccuucaccaucgacaaguga

SEQ ID NO: 183825 - RNA, 1410 nt, Artificial Sequence
  derived and/or modified CDS sequence (opt4) from neuraminidase__InfluenzaA__AGR50132
augaaccccaaccagaagaucaucaccaucggcagcgugugcaugaccaucggcauggccaaccugauccugcagaucggcaacaucaucagcaucuggaucagccacagcauccagcugggcaaccagaaccagaucgagaccugcaaccagagcgugaucaccuacgagaacaacaccugggugaaccagaccuacgugaacaucagcaacaccaacuucgccgccggccagagcguggugagcgugaagcuggccggcaacagcagccugugccccgugagcggcugggccaucuacagcaaggacaacagcgugagaaucggcagcaagggcgacguguucgugaucagagagcccuucaucagcugcagcccccuggagugcagaaccuucuuccugacccagggcgcccugcugaacgacaagcacagcaacggcaccaucaaggacagaagccccuacagaacccugaugagcugccccaucggcgaggugcccagccccuacaacagcagauucgagagcguggccuggagcgccagcgccugccacgacggcaucaacuggcugaccaucggcaucagcggccccgacaacggcgccguggccgugcugaaguacaacggcaucaucaccgacaccaucaagagcuggagaaacaacauccugagaacccaggagagcgagugcgccugcgccaacggcagcugcuucaccgugaugaccgacggccccagcaacggccaggccagcuacaagaucuucagaaucgagaagggcaagaucgugaagagcguggagaugaacgcccccaacuaccacuacgaggagugcagcugcuaccccgacagcagcgagaucaccugcgugugcagagacaacuggcacggcagcaacagacccugggugagcuucaaccagaaccuggaguaccagaucggcuacaucugcagcggcaucuucggcgacaaccccagacccaacgacaagaccggcagcugcggccccgugagcagcaacggcgccaacggcgugaagggcuucagcuucaaguacggcaacggcguguggaucggcagaaccaagagcaucagcagcagaaacggcuucgagaugaucugggaccccaacggcuggaccggcaccgacaacaacuucagcaucaagcaggacaucgugggcaucaacgaguggagcggcuacagcggcagcuucgugcagcaccccgagcugaccggccuggacugcaucagacccugcuucuggguggagcugaucagaggcagacccaaggagaacaccaucuggaccagcggcagcagcaucagcuucugcggcgugaacagcgacaccgugggcuggagcuggcccgacggcgccgagcugcccuucaccaucgacaaguga

SEQ ID NO: 183826 - RNA, 1410 nt, Artificial Sequence; identical to SEQ ID NO: 176788
  derived and/or modified CDS sequence (opt4) from neuraminidase__InfluenzaA__AGR50143

SEQ ID NO: 183827 - RNA, 1410 nt, Artificial Sequence; identical to SEQ ID NO: 176788
  derived and/or modified CDS sequence (opt4) from neuraminidase__InfluenzaA__AGR50154

SEQ ID NO: 183828 - RNA, 1413 nt, Artificial Sequence; identical to SEQ ID NO: 178990
  derived and/or modified CDS sequence (opt4) from neuraminidase__InfluenzaA__AGR50165

SEQ ID NO: 183829 - RNA, 1410 nt, Artificial Sequence; identical to SEQ ID NO: 176788
  derived and/or modified CDS sequence (opt4) from neuraminidase__InfluenzaA__AGR50177

SEQ ID NO: 183830 - RNA, 1410 nt, Artificial Sequence; identical to SEQ ID NO: 176788
  derived and/or modified CDS sequence (opt4) from neuraminidase__InfluenzaA__AGR50188

SEQ ID NO: 183831 - RNA, 1410 nt, Artificial Sequence; identical to SEQ ID NO: 176788
  derived and/or modified CDS sequence (opt4) from neuraminidase__InfluenzaA__AGR50199

SEQ ID NO: 183832 - RNA, 1410 nt, Artificial Sequence; identical to SEQ ID NO: 176788
  derived and/or modified CDS sequence (opt4) from neuraminidase__InfluenzaA__AGR50210

SEQ ID NO: 183833 - RNA, 1410 nt, Artificial Sequence; identical to SEQ ID NO: 176788
  derived and/or modified CDS sequence (opt4) from neuraminidase__InfluenzaA__AGR50221

SEQ ID NO: 183834 - RNA, 1410 nt, Artificial Sequence
  derived and/or modified CDS sequence (opt4) from neuraminidase__InfluenzaA__AGR50232
augaaccccaaccagaagaucaucaccaucggcagcgugugcaugaccaucggcauggccaaccugauccugcagaucggcaacaucaucagcaucuggaucagccacagcauccagcugggcaaccagaaccagaucgagaccugcaaccagagcgugaucaccuacgagaacaacaccugggugaaccagaccuacgugaacaucagcaacaccaacuucgccgccggccagagcguggugagcgugaagcuggccggcaacagcagccugugccccgugagcggcugggccaucuacagcaaggacaacagcgugagaaucggcagcaagggcgacguguucgugaucagagagcccuucaucagcugcagcccccuggagugcagaaccuucuuccugacccagggcgcccugcugaacgacaagcacagcaacggcaccaucaaggacagaagccccuacagaacccugaugagcugccccaucggcgaggugcccagccccuacaacagcagauucgagagcguggccuggagcgccagcgccugccacgacggcaucaacuggcugaccaucggcaucagcggccccgacaacggcgccguggccgugcugaaguacaacggcaucaucaccgacaccaucaagagcuggagaaacaacauccugagaacccaggagagcgagugcgccugcgugaacggcagcugcuucaccgugaugaccgacggccccaacaacggccaggccagcuacaagaucuucagaaucgagaagggcaagaucgugaagagcguggagaugaacgcccccaacuaccacuacgaggagugcagcugcuaccccgacagcagcgagaucaccugcgugugcagagacaacuggcacggcagcaacagacccugggugagcuucaaccagaaccuggaguaccagaucggcuacaucugcagcggcaucuucggcgacaaccccagacccaacgacaagaccggcagcugcggccccgugagcagcaacggcgccaacggcgugaagggcuucagcuucaaguacggcaacggcguguggaucggcagaaccaagagcaucagcagcagaaacggcuucgagaugaucugggaccccaacggcuggaccggcaccgacaacaacuucagcaucaagcaggacaucgugggcaucaacgaguggagcggcuacagcggcagcuucgugcagcaccccgagcugaccggccuggacugcaucagacccugcuucuggguggagcugaucagaggcagacccaaggagaacaccaucuggaccagcggcagcagcaucagcuucugcggcgugaacagcgacaccgugggcuggagcuggcccgacggcgccgagcugcccuucaccaucgacaaguga

SEQ ID NO: 183835 - RNA, 1410 nt, Artificial Sequence; identical to SEQ ID NO: 176788
  derived and/or modified CDS sequence (opt4) from neuraminidase__InfluenzaA__AGR50243

SEQ ID NO: 183836 - RNA, 1410 nt, Artificial Sequence; identical to SEQ ID NO: 176788
  derived and/or modified CDS sequence (opt4) from neuraminidase__InfluenzaA__AGR50254

SEQ ID NO: 183837 - RNA, 1410 nt, Artificial Sequence; identical to SEQ ID NO: 176788
  derived and/or modified CDS sequence (opt4) from neuraminidase__InfluenzaA__AGR50265

SEQ ID NO: 183838 - RNA, 1410 nt, Artificial Sequence
  derived and/or modified CDS sequence (opt4) from neuraminidase__InfluenzaA__AGR50276
augaaccccaaccagaagaucaucaccaucggcagcgugugcaugaccaucggcauggccaaccugauccugcagaucggcaacaucaucagcaucuggaucagccacagcauccagcugggcaaccagaaccagaucgagaccugcaaccagagcgugaucaccuacgagaacaacaccugggugaaccagaccuacgugaacaucagcaacaccaacuucgccgccgagcagagcguggugagcgugaagcuggccggcaacagcagccugugccccgugagcggcugggccaucuacagcaaggacaacagcgugagaaucggcagcaagggcgacguguucgugaucagagagcccuucaucagcugcagcccccuggagugcagaaccuucuuccugacccagggcgcccugcugaacgacaagcacagcaacggcaccaucaaggacagaagccccuacagaacccugaugagcugccccaucggcgaggugcccagccccuacaacagcagauucgagagcguggccuggagcgccagcgccugccacgacggcaucaacuggcugaccaucggcaucagcggccccgacaacggcgccguggccgugcugaaguacaacggcaucaucaccgacaccaucaagagcuggagaaacaacauccugagaacccaggagagcgagugcgccugcgugaacggcagcugcuucaccgugaugaccgacggccccagcaacggccaggccagcuacaagaucuucagaaucgagaagggcaagaucgugaagagcguggagaugaacgcccccaacuaccacuacgaggagugcagcugcuaccccgacagcagcgagaucaccugcgugugcagagacaacuggcacggcagcaacagacccugggugagcuucaaccagaaccuggaguaccagaucggcuacaucugcagcggcaucuucggcgacaaccccagacccaacgacaagaccggcagcugcggccccgugagcagcaacggcgccaacggcgugaagggcuucagcuucaaguacggcaacggcguguggaucggcagaaccaagagcaucagcagcagaaacggcuucgagaugaucugggaccccaacggcuggaccggcaccgacaacaacuucagcaucaagcaggacaucgugggcaucaacgaguggagcggcuacagcggcagcuucgugcagcaccccgagcugaccggccuggacugcaucagacccugcuucuggguggagcugaucagaggcagacccaaggagaacaccaucuggaccagcggcagcagcaucagcuucugcggcgugaacagcgacaccgugggcuggagcuggcccgacggcgccgagcugcccuucaccaucgacaaguga

SEQ ID NO: 183839 - RNA, 1410 nt, Artificial Sequence; identical to SEQ ID NO: 176788
  derived and/or modified CDS sequence (opt4) from neuraminidase__InfluenzaA__AGR50287

SEQ ID NO: 183840 - RNA, 1410 nt, Artificial Sequence
  derived and/or modified CDS sequence (opt4) from neuraminidase__InfluenzaA__AGR50298
augaaccccaaccagaagaucaucaccaucggcagcgugugcaugaccaucggcauggccaaccugauccugcagaucggcaacaccaucagcaucuggaucagccacagcauccagcccggcaaccagaaccagaucgagaccugcaaccagagcgugaucaccuacgagaacaacaccugggugaaccagaccuacgugaacaucagcaacaccaacuucgccgccggccagagcguggugagcgugaagcuggccggcaacagcagccugugccccgugagcggcugggccaucuacagcaaggacaacagcaucagaaucggcagcaagggcgacguguucgugaucagagagcccuucaucagcugcagcccccuggagugcagaaccuucuuccugacccagggcgcccugcugaacgacaagcacagcaacggcaccaucaaggacagaagccccuacagaacccugaugagcugccccaucggcgaggugcccagccccuacaacagcagauucgagagcguggccuggagcgccagcgccugccacgacggcaucaacuggcugaccaucggcaucagcggccccgacaacggcgccguggccgugcugaaguacaacggcaucaucaccgacaccaucaagagcuggagaaacaacauccugagaacccaggagagcgagugcgccugcgugaacggcagcugcuucaccgugaugaccgacggccccagcgacggccaggccagcuacaagaucuucagaaucgagaagggcaagaucgugaagagcguggagaugaacgcccccaacuaccacuacgaggagugcagcugcuaccccgacagcagcgagaucaccugcgugugcagagacaacuggcacggcagcaacagacccugggugagcuucaaccagaaccuggaguaccagaucggcuacaucugcagcggcaucuucggcgacaaccccagacccaacgacaagaccggcagcugcggccccgugagcagcaacggcgccaacggcgugaagggcuucagcuucaaguacggcaacggcguguggaucggcagaaccaagagcaucagcagcagaaacggcuucgagaugaucugggaccccaacggcuggaccggcaccgacaacaacuucagcaucaagcaggacaucgugggcaucaacgaguggagcggcuacagcggcagcuucgugcagcaccccgagcugaccggccuggacugcaucagacccugcuucuggguggagcugaucagaggcagacccaaggagaacaccaucuggaccagcggcagcagcaucagcuucugcggcgugaacagcgacaccgugggcuggagcuggcccgacggcgccgagcugcccuucaccaucgacaaguga

SEQ ID NO: 183841 - RNA, 1410 nt, Artificial Sequence; identical to SEQ ID NO: 176788
  derived and/or modified CDS sequence (opt4) from neuraminidase__InfluenzaA__AGR50309

SEQ ID NO: 183842 - RNA, 1410 nt, Artificial Sequence; identical to SEQ ID NO: 176788
  derived and/or modified CDS sequence (opt4) from neuraminidase__InfluenzaA__AGR50320

SEQ ID NO: 183843 - RNA, 1410 nt, Artificial Sequence; identical to SEQ ID NO: 176788
  derived and/or modified CDS sequence (opt4) from neuraminidase__InfluenzaA__AGR50331

SEQ ID NO: 183844 - RNA, 1410 nt, Artificial Sequence
  derived and/or modified CDS sequence (opt4) from neuraminidase__InfluenzaA__AGR50342
augaaccccaaccagaagaucaucaccaucggcagcgugugcaugaccaucggcauggccaaccugauccugcagaucggcaacaucaucagcaucuggaucagccacagcauccagcugggcaaccagaaccagaucgagaccugcaaccagagcgugaucaccuacgagaacaacaccugggugaaccagaccuacgugaacaucagcaacaccaacuucgccgccggccagagcgugaucagcgugaagcuggccggcaacagcagccugugccccgugagcggcugggccaucuacagcaaggacaacagcgugagaaucggcagcaagggcgacguguucgugaucagagagcccuucaucagcugcagcccccuggagugcagaaccuucuuccugacccagggcgcccugcugaacgacaagcacagcaacggcaccaucaaggacagaagccccuacagaacccugaugagcugccccaucggcgaggugcccagccccuacaacagcagauucgagagcguggccuggagcgccagcgccugccacgacggcaucaacuggcugaccaucggcaucagcggccccgacaacggcgccguggccgugcugaaguacaacggcaucaucaccgacaccaucaagagcuggagaaacaacauccugagaacccaggagagcgagugcgccugcgugaacggcagcugcuucaccgugaugaccgacggccccagcaacggccaggccagcuacaagaucuucagaaucgagaagggcaagaucgugaagagcguggagaugaacgcccccaacuaccacuacgaggagugcagcugcuaccccgacagcagcgagaucaccugcgugugcagagacaacuggcacggcagcaacagacccugggugagcuucaaccagaaccuggaguaccagaucggcuacaucugcagcggcaucuucggcgacaaccccagacccaacgacaagaccggcagcugcggccccgugagcagcaacggcgccaacggcgugaagggcuucagcuucaaguacggcaacggcguguggaucggcagaaccaagagcaucagcagcagaaacggcuucgagaugaucugggaccccaacggcuggaccggcaccgacaacaacuucagcaucaagcaggacaucgugggcaucaacgaguggagcggcuacagcggcagcuucgugcagcaccccgagcugaccggccuggacugcaucagacccugcuucuggguggagcugaucagaggcagacccaaggagaacaccaucuggaccagcggcagcagcaucagcuucugcggcgugaacagcgacaccgugggcuggagcuggcccgacggcgccgagcugcccuucaccaucgacaaguga

SEQ ID NO: 183845 - RNA, 1410 nt, Artificial Sequence; identical to SEQ ID NO: 176788
  derived and/or modified CDS sequence (opt4) from neuraminidase__InfluenzaA__AGR50353

SEQ ID NO: 183846 - RNA, 1413 nt, Artificial Sequence; identical to SEQ ID NO: 178990
  derived and/or modified CDS sequence (opt4) from neuraminidase__InfluenzaA__AGR50364

SEQ ID NO: 183847 - RNA, 1410 nt, Artificial Sequence
  derived and/or modified CDS sequence (opt4) from neuraminidase__InfluenzaA__AGR55170
augaaccccaaccagaagaucaucaccaucggcagcgugagccugaccaucagcaccaucugcuucuucaugcagaucgccauccugaucaccaccgugacccugcacuucaagcaguacgaguucaacagcccccccaacaaccaggugaugcugugcgagcccaccaucaucgagagaaacaucaccgagaucguguaccugaccaacaccaccaucgagaaggagaucugccccaagcuggccgaguacagaaacuggagcaagccccagugcgacaucaccggcuucgcccccuucagcaaggacaacagcaucagacugagcgccggcggcgacaucugggugaccagagagcccuacgugagcugcgaccccgacaagugcuaccaguucgcccugggccagggcaccacccugaacaacgugcacagcaacgacaccgugagagacagaacccccuacagaacccugcugaugaacgagcugggcgugcccuuccaccugggcaccaagcaggugugcaucgccuggagcagcagcagcugccacgacggcaaggccuggcugcacgugugcaucaccggcgacgacaagaacgccaccgccagcuucaucuacaacggcagacugguggacagcaucgugagcuggagcaaggagauccugagaacccaggagagcgagugcgugugcaucaacggcaccugcaccguggugaugaccgacggcagcgccagcggcaaggccgacaccaagauccuguucaucgaggagggcaagaucgugcacaccagcacccugagcggcagcgcccagcacguggaggagugcagcugcuaccccagauaccccggcgugagaugcgugugcagagacaacuggaagggcagcaacagacccaucguggacaucaacaucaaggaccacagcaucgugagcagcuacgugugcagcggccuggugggcgacacccccagaaagaacgacagcagcagcagcagccacugccuggaccccaacaacgaggagggcggccacggcgugaagggcugggccuucgacgacggcaacgacguguggaugggcagaaccaucagcgagaagagcagacugggcuacgagaccuucaaggugaucgagggcuggagcaaccccaacagcaagcugcagaucaacagacagaucaucguggacagaggcaacagaagcggcuacagcggcaucuucagcguggagggcaagagcugcaucaacagaugcuucuacguggagcugaucagaggcagaaaggaggagaccgaggugcuguggaccagcaacagcaucgugguguucugcggcaccagcggcaccuacggcaccggcagcuggcccgacggcgccgacaucaaccugaugcccaucuga

SEQ ID NO: 183848 - RNA, 1410 nt, Artificial Sequence; identical to SEQ ID NO: 174205
  derived and/or modified CDS sequence (opt4) from neuraminidase__InfluenzaA__AGR55180

SEQ ID NO: 183849 - RNA, 1410 nt, Artificial Sequence; identical to SEQ ID NO: 174205
  derived and/or modified CDS sequence (opt4) from neuraminidase__InfluenzaA__AGR55181

SEQ ID NO: 183850 - RNA, 1410 nt, Artificial Sequence; identical to SEQ ID NO: 174205
  derived and/or modified CDS sequence (opt4) from neuraminidase__InfluenzaA__AGR55183

SEQ ID NO: 183851 - RNA, 1410 nt, Artificial Sequence
  derived and/or modified CDS sequence (opt4) from neuraminidase__InfluenzaA__AGR55184
augaaccccaaccagaagaucaucaccaucggcagcgugagccugaccaucgccaccaucugcuuccugaugcagaucgccauccuggugaccaccgugacccugcacuucaagcagcacgagugcaacagcccccccaagaaccaggugaugcugugcgagcccaccaucaucgagagaaacaucaccgagaucguguaccugaccaacaccaccaucgagaaggagaucugccccaagcuggccgaguacagaaacuggagcaagccccagugcaacaucaccggcuucgcccccuucagcaaggacaacagcaucagacugagcgccggcggcgacaucugggugaccagagagcccuacgugagcugcgaccccgacaagugcuaccaguucgcccugggccagggcaccacccugaacaacggccacagcaacgacaccgugcacgacagaacccccuacagaacccugcugaugaacgagcugggcgugcccuuccaccugggcaccagacaggugugcaucgccuggagcagcagcagcugccacgacggcaaggccuggcugcacgugugcgugaccggcgacgacaagaacgccaccgccagcuucaucuacaacggcagacugguggacagcaucggcagcuggagcaagaagauccugagaacccaggagagcgagugcgugugcaucaacggcaccugcaccguggugaugaccgacggcagcgccagcggcaaggccgacaccaagauccuguucaucgaggagggcaagaucgugcacaucagcacccugagcggcagcgcccagcacguggaggagugcagcugcuaccccagauaccccggcgugagaugcgugugcagagacaacuggaagggcagcaacagacccaucguggacaucaacgugaaggacuacagcaucgugagcagcuacgugugcagcggccuggugggcgacacccccagaaagaacgacagcuucagcagcagccacugccuggaccccaacaacgaggagggcggccacggcgugaagggcugggccuucgacgacggcaacgacguguggaugggcagaaccaucagcgagaagcugagaagcggcuacgagaccuucaaggugaucgagggcuggagcaagcccaacagcaagcugcagaucaacagacaggugaucguggagagaggcaacagaagcggcuacagcggcaucuucagcguggagggcaagagcugcaucaacagaugcuucuacguggagcugaucagaggcagaaaggaggagaccgaggugugguggaccagcaacagcaucgugguguucugcggcaccagcggcaccuacggcaccggcagcuggcccgacggcgccgacaucaaccugaugcccaucuga

SEQ ID NO: 183852 - RNA, 1410 nt, Artificial Sequence
  derived and/or modified CDS sequence (opt4) from neuraminidase__InfluenzaA__AGR55185
augaaccccaaccagaagaucaucaccaucggcagcgugagccugaccaucgccaccaucugcuuccugaugcagaucgccauccuggugaccaccgugacccugcacuucaagcagcacgagugcaacagcccccccaagaaccaggugaugcugugcgagcccaccaucaucgagagaaacaucaccgagaucguguaccugaccaacaccaccaucgagaaggagaucugccccaagcuggccgaguacagaaacuggagcaagccccagugcaacaucaccggcuucgcccccuucagcaaggacaacagcaucagacugagcgccggcggcgacaucugggugaccagagagcccuacgugagcugcgaccccgacaagugcuaccaguucgcccugggccagggcaccacccugaacaacggccacagcaacgacaccgugcacgacagaacccccuacagaacccugcugaugaacgagcugggcgugcccuuccaccugggcaccagacaggugugcaucgccuggagcagcagcagcugccacgacggcaaggccuggcugcacgugugcgugaccggcgacgacaagaacgccaccgccagcuucaucuacaacggcagacugguggacagcaucggcagcuggagcaagaagauccugagaacccaggagagcgagugcgugugcaucaacggcaccugcaccguggugaugaccgacggcagcgccagcggcaaggccgacaccaagauccuguucaucgaggagggcaagaucgugcacaucagcacccugagcggcagcgcccagcacguggaggagugcagcugcuaccccagauaccccggcgugagaugcgugugcagagacaacuggaagggcagcaacagacccaucguggacaucaacgugaaggacuacagcaucgugagcagcuacgugugcagcggccuggugggcgacacccccagaaagaacgacagcuucagcagcagccacugccuggaccccaacaacgaggagggcggccacggcgugaagggcugggccuucgacgacggcaacgacguguggaugggcagaaccaucagcgagaagcugagaagcggcuacgagaccuucaaggugaucgagggcuggagcaagcccaacagcaagcugcagaucaacagacaggugaucguggagagaggcaacagaagcggcuacagcggcaucuucagcguggagggcaagagcugcaucaacagaugcuucuacguggagcugaucagaggcagaaaggaggagaccgaggugugguggaccagcaacagcaucgugguguucugcggcaccagcagaaccuacggcaccggcagcuggcccgacggcgccgacaucaaccugaugcccaucuga

SEQ ID NO: 183853 - RNA, 1410 nt, Artificial Sequence
  derived and/or modified CDS sequence (opt4) from neuraminidase__InfluenzaA__AGR55186
augaaccccaaccagaagaucaucaccaucggcagcgugagccugaccaucagcaccaucugcuucuucaugcagaucgccauccugaucaccaccgugacccugcacuucaagcaguacgaguucaacagcccccccaacaaccaggugaugcugugcgagcccaccaucaucgagagaaacaucaccgagaucguguaccugaccaacaccaccaucgagaaggagaucugccccaagcuggccgaguacagaaacuggagcaagccccagugcgacaucaccggcuucgcccccuucagcaaggacaacagcaucagacugagcgccggcggcgacaucugggugaccagagagcccuacgugagcugcgaccccgacaagugcuaccaguucgcccugggccagggcaccacccugaacaacgugcacagcaacgacaccgugcacgacagaacccccuacagaacccugcugaugaacgagcugggcgugcccuuccaccugggcaccaagcaggugugcaucgccuggagcagcagcagcugccacgacggcaaggccuggcugcacgugugcgugaccggcgacgacaagaacgccaccgccagcuucaucuacaacggcagacugguggacagcaucgugagcuggagcaagaagauccugagaacccaggagagcgagugcgugugcaucaacggcaccugcaccguggugaugaccgacggcagcgccagcggcaaggccgacaccaagauccuguucaucgaggagggcaagaucgugcacaccagcacccugagcggcagcgcccagcacguggaggagugcagcugcuaccccagauaccccggcgugagaugcgugugcagagacaacuggaagggcagcaacagacccaucguggacaucaacaucaaggacuacagcaucgugagcagcuacgugugcagcggccuggugggcgacacccccagaaagaacgacagcagcagcagcagccacugccuggagcccaacaacgaggagggcggccacggcgugaagggcugggccuucgacgacggcaacgacguguggaugggcagaaccaucagcgagaagcugagaagcggcuacgagaccuucaaggugaucgagggcuggagcaaccccaacagcaagcugcagaucaacagacaggugaucguggacagaggcaacagaagcggcuacagcggcaucuucagcguggagggcaagagcugcaucaacagaugcuucuacguggagcugaucagaggcagaaagcaggagaccgaggugcuguggaccagcaacagcaucgugguguucugcggcaccagcggcaccuacggcaccggcagcuggcccgacggcgccgacaucaaccugaugcccaucuga

SEQ ID NO: 183854 - RNA, 1410 nt, Artificial Sequence; identical to SEQ ID NO: 174205
  derived and/or modified CDS sequence (opt4) from neuraminidase__InfluenzaA__AGR55187

SEQ ID NO: 183855 - RNA, 1410 nt, Artificial Sequence; identical to SEQ ID NO: 174774
  derived and/or modified CDS sequence (opt4) from neuraminidase__InfluenzaA__AGR55192

SEQ ID NO: 183856 - RNA, 1410 nt, Artificial Sequence
  derived and/or modified CDS sequence (opt4) from neuraminidase__InfluenzaA__AGR55195
augaaccccaaccagaagaucaucaccaucggcagcgugagccugaccaucagcaccaucugcuucuucaugcagaucgccauccugaucaccaccgugacccugcacuucaagcaguacgaguucaacagcccccccaacaaccaggugaugcugugcgagcccaccaucaucgagagaaacaucaccgagaucguguaccugaccaacaccaccaucgagaaggagaucugccccaagcuggccgaguacagaaacuggagcaagccccagugcgacaucaccggcuucgcccccuucagcaaggacaacagcaucagacugagcgccggcggcgacaucugggugaccagagagcccuacgugagcugcgaccccgacaagugcuaccaguucgcccugggccagggcaccacccugaacaacgugcacagcaacgacaccgugcacgacagaacccccuacagaacccugcugaugaacgagcugggcgugcccuuccaccugggcaccaagcaggugugcaucgccuggagcagcagcagcugccacgacggcaaggccuggcugcacgugugcgugaccggcgacgacaagaacgccaccgccagcuucaucuacaacggcagacugguggacagcaucgugagcuggagcaaggagauccugagaacccaggagagcgagugcgugugcaucaacggcaccugcaccguggugaugaccgacggcagcgccagcggcaaggccgacaccaagauccuguucaucgaggagggcaagaucgugcacaccagcacccugagcggcagcgcccagcacguggaggagugcagcugcuaccccagauaccccggcgugagaugcgugugcagagaccacuggaagggcagcaacagacccaucguggacaucaacaucaaggacuacagcaucgugagcagcuacgugugcagcggccuggugggcgacacccccagaaagaacgacagcagcagcagcagccacugccuggaccccaacaacgaggagggcggccacggcgugaagggcugggccuucgacgacggcaacgacguguggaugggcagaaccaucagcgagaagcugagacugggcuacgagaccuucaaggugaucgagggcuggagcaaccccaacagcaagcugcagaucaacagacaggugaucguggacagaggcaacagaagcggcuacagcggcaucuucagcguggagggcaagagcugcaucaacagaugcuucuacguggagcugaucagaggcagaaaggaggagaccgaggugcuguggaccagcaacagcaucgugguguucugcggcaccagcggcaccuacggcaccggcagcuggcccgacggcgccgacaucaaccugaugcccaucuga

SEQ ID NO: 183857 - RNA, 1410 nt, Artificial Sequence
  derived and/or modified CDS sequence (opt4) from neuraminidase__InfluenzaA__AGR55204
augaaccccaaccagaagaucaucaccaucggcagcgugagccugaccaucagcaccaucugcuucuucaugcagaucgccauccugaucaccaccgugacccugcacuucaagcaguacgaguucaacagcccccccaacaaccaggugaugcugugcgagcccaccaucaucgagagaaacaucaccgagaucguguaccugaccaacaccaccaucgagaaggagaucugccccaagcuggccgaguacagaaacuggagcaagccccagugcgacaucaccggcuucgcccccuucagcaaggacaacagcaucagacugagcgccggcggcgacaucugggugaccagagagcccuacgugagcugcgaccccgacaagugcuaccaguucgcccugggccagggcaccacccugaacaacgugcacagcaacgacaccgugagagacagaacccccuacagaacccugcugaugaacgagcugggcgugcccuuccaccugggcaccaagcaggugugcaucgccuggagcagcagcagcugccacgacggcaaggccuggcugcacgugugcaucaccggcgacgacaagaacgccaccgccagcuucaucuacaacggcagacugguggacagcaucgugagcuggagcaaggagauccugagaacccaggagagcgagugcgugugcaucaacggcaccugcaccguggugaugaccgacggcagcgccagcggcgaggccgacaccaagauccuguucaucgaggagggcaagaucgugcacaccagcacccugagcggcagcgcccagcacguggaggagugcagcugcuaccccagauaccccggcgugagaugcgugugcagagacaacuggaagggcagcaacagacccaucguggacaucaacaucaaggaccacagcaucgugagcagcuacgugugcagcggccuggugggcgacacccccagaaagaacgacagcagcagcagcagccacugccuggaccccaacaacgaggagggcggccacggcgugaagggcugggccuucgacgacggcaacgacguguggaugggcagaaccaucagcgagaagagcagacugggcuacgagaccuucaaggugaucgagggcuggagcaaccccaagagcaagcugcagaucaacagacaggugaucguggacagaggcaacagaagcggcuacagcggcaucuucagcguggagggcaagagcugcaucaacagaugcuucuacguggagcugaucagaggcagaaaggaggagaccgaggugcuguggaccagcaacagcaucgugguguucugcggcaccagcagaaccuacggcaccggcagcuggcccgacggcgccgacaucaaccugaugcccaucuga

SEQ ID NO: 183858 - RNA, 1410 nt, Artificial Sequence
  derived and/or modified CDS sequence (opt4) from neuraminidase__InfluenzaA__AGR55218
augaaccccaaccagaagaucaucaccaucggcagcgugagccugaccaucagcaccaucugcuucuucaugcagaucgccauccugaucaccaccgugacccugcacuucaagcaguacgaguucaacagcccccccaacaaccagguggugcugugcgagcccaccaucaucgagagaaacaucaccgagaucguguaccugaccaacaccaccaucgagaaggagaucugccccaagcuggccgaguacagaaacuggagcaagccccagugcgacaucaccggcuucgcccccuucagcaaggacaacagcaucagacugagcgccggcggcgacaucugggugaccagagagcccuacgugagcugcgaccccgacaagugcuaccaguucgcccugggccagggcaccacccugaacaacgugcacagcaacaacaccgugagagacagaacccccuacagaacccugcugaugaacgagcugggcgugcccuuccaccugggcaccaagcaggugugcaucgccuggagcagcagcagcugccacgacggcaaggccuggcugcacgugugcaucaccggcgacgacaagaacgccaccgccagcuucaucuacaacggcagacugguggacagcaucgugagcuggagcaaggagauccugagaacccaggagagcgagugcgugugcaucaacggcaccugcaccguggugaugaccgacggcagcgccagcggcaaggccgacaccaagauccuguucaucgaggagggcaagaucgugcacaccagcacccugagcggcagcgcccagcacguggaggagugcagcugcuaccccagauaccccggcgugagaugcgugugcagagacaacuggaagggcagcaacagacccaucguggacaucaacaucaaggaccacagcaucgugagcagcuacgugugcagcggccuggugggcgacacccccagaaagaacgacagcagcagcagcagccacugccuggaccccaacaacgaggagggcggccacggcgugaagggcugggccuucgacgacggcaacgacguguggaugggcagaaccaucagcgagaagagcagacugggcuacgagaccuucaaggugaucgagggcuggagcaaccccaagagcaagcugcagaucaacagacaggugaucguggacagaggcaacagaagcggcuacagcggcaucuucagcguggagggcaagagcugcaucaacagaugcuucuacguggagcugaucagaggcagaaaggaggagaccgaggugcuguggaccagcaacagcaucgugguguucugcggcaccagcggcaccuacggcaccggcagcuggcccgacggcgccgacaucaaccugaugcccaucuga

SEQ ID NO: 183859 - RNA, 1410 nt, Artificial Sequence; identical to SEQ ID NO: 183449
  derived and/or modified CDS sequence (opt4) from neuraminidase__InfluenzaA__AGT18726

SEQ ID NO: 183860 - RNA, 1410 nt, Artificial Sequence
  derived and/or modified CDS sequence (opt4) from neuraminidase__InfluenzaA__AGT18727
augaaccccaaccagaagaucaucaccaucggcagcgugugcaugaccaucggcauggccaaccugauccugcagaucggcaacaucaucagcaucuggaucagccacagcauccagcugggcagccagaaccagaucgagaccugcaaccagagcgugaucaccuacgagaacaacaccugggugaaccagaccuacgugaacaucagcaacaccaacuucgccgccggccagagcguggugagcgugaagcuggccggcaacagcagccugugccccgugagcggcugggccaucuacagcaaggacaacagcgugagaaucggcagcaagggcgacguguucgugaucagagagcccuucaucagcugcagcccccuggagugcagaaccuucuuccugacccagggcgcccugcugaacgacaagcacagcaacggcaccaucaaggacagaagccccuacagaacccugaugagcugccccaucggcgaggugcccagccccuacaacagcagauucgagagcguggccuggagcgccagcgccugccacgacggcaucaacuggcugaccaucggcaucagcggccccgacagcggcgccguggccgugcugaaguacaacggcaucaucaccgacaccaucaagagcuggagaaacaacauccugagaacccaggagagcgagugcgccugcgugaacggcagcugcuucaccaucaugaccgacggccccagcgacggccaggccagcuacaagaucuucagaaucgagaagggcaagaucgugaagagcguggagaugaacgcccccaacuaccacuacgaggagugcagcugcuaccccgacagcagcgagaucaccugcgugugcagagacaacuggcacggcagcaacagacccugggugagcuucaaccagaaccuggaguaccagaucggcuacaucugcagcggcaucuucggcgacaaccccagacccaacgacaagaccggcagcugcggccccgugagcagcaacggcgccaacggcgugaagggcuucagcuucaaguacggcaacggcguguggaucggcagaaccaagagcaucagcagcagaaagggcuucgagaugaucugggaccccaacggcuggagcggcaccgacaacaacuucagcaucaagcaggacaucgugggcaucaacgaguggagcggcuacagcggcagcuucgugcagcaccccgagcugaccggccuggacugcaucagacccugcuucuggguggagcugaucagaggcagacccaaggagaacaccaucuggaccagcggcagcagcaucagcuucugcggcgugaacagcgacaccgugggcuggagcuggcccgacggcgccgagcugcccuucaccaucgacaaguga

SEQ ID NO: 183861 - RNA, 1410 nt, Artificial Sequence; identical to SEQ ID NO: 183449
  derived and/or modified CDS sequence (opt4) from neuraminidase__InfluenzaA__AGT18728

SEQ ID NO: 183862 - RNA, 1410 nt, Artificial Sequence
  derived and/or modified CDS sequence (opt4) from neuraminidase__InfluenzaA__AGT18729
augaaccccaaccagaagaucaucaccaucggccaggugugcaugaccaucggcauggccaaccugauccugcagaucggcaacaucaucagcaucuggaucagccacagcauccagcugggcagccagaaccagaucgagaccugcaaccagagcgugaucaccuacgagaacaacaccugggugaaccagaccuacgugaacaucagcaacaccaacuucgccgccggccagagcguggugagcgugaagcuggccggcaacagcagccugugccccgugagcggcugggccaucuacagcaaggacaacagcgugagaaucggcagcaagggcgacguguucgugaucagagagcccuucaucagcugcagcccccuggagugcagaaccuucuuccugacccagggcgcccugcugaacgacaagcacagcaacggcaccaucaaggacagaagccccuacagaacccugaugagcugccccaucggcgaggugcccagccccuacaacagcagauucgagagcguggccuggagcgccagcgccugccacgacggcaucaacuggcugaccaucggcaucagcggccccgacagcggcgccguggccgugcugaaguacaacggcaucaucaccgacaccaucaagagcuggagaaacaacauccugagaacccaggagagcgagugcgccugcgugaacggcagcugcuucaccaucaugaccgacggccccagcgacggccaggccagcuacaagaucuucagaaucgagaagggcaagaucgugaagagcguggagaugaacgcccccaacuaccacuacgaggagugcagcugcuaccccgacagcagcgagaucaccugcgugugcagagacaacuggcacggcagcaacagacccugggugagcuucaaccagaaccuggaguaccagaucggcuacaucugcagcggcaucuucggcgacaaccccagacccaacgacaagaccggcagcugcggccccgugagcagcaacggcgccaacggcgugaagggcuucagcuucaaguacggcaacggcguguggaucggcagaaccaagagcaucagcagcagaaagggcuucgagaugaucugggaccccaacggcuggaccggcaccgacaacaacuucagcaucaagcaggacaucgugggcaucaacgaguggagcggcuacagcggcagcuucgugcagcaccccgagcugaccggccuggacugcaucagacccugcuucuggguggagcugaucagaggcagacccaaggagaacaccaucuggaccagcggcagcagcaucagcuucugcggcgugaacagcgacaccgugggcuggagcuggcccgacggcgccgagcugcccuucaccaucgacaaguga

SEQ ID NO: 183863 - RNA, 1410 nt, Artificial Sequence
  derived and/or modified CDS sequence (opt4) from neuraminidase__InfluenzaA__AGT18730
augaaccccaaccagaagaucaucaccaucggcagcgugugcaugaccaucggcauggccaaccugauccugcagaucggcaacaucaucagcaucuggaucagccacagcauccagcugggcaaccagagccagaucgagaccugcaaccagagcgugaucaccuacgagaacaacaccugggugaaccagaccuacgugaacaucagcaacaccaacuucgccgccggccagagcguggugagcgugaagcuggccggcaacagcagccugugccccgugagcggcugggccaucuacagcaaggacaacagcgugagaaucggcagcaagggcgacguguucgugaucagagagcccuucaucagcugcagcccccuggagugcagaaccuucuuccugacccagggcgcccugcugaacgacaagcacagcaacggcaccaucaaggacagaagccccuacagaacccugaugagcugccccaucggcgaggugcccagccccuacaacagcagauucgagagcguggccuggagcgccagcgccugccacgacggcaucaacuggcugaccaucggcaucagcggccccgacagcggcgccguggccgugcugaaguacaacggcaucaucaccgacaccaucaagagcuggagaaacaacauccugagaacccaggagagcgagugcgccugcgugaacggcagcugcuucaccaucaugaccgacggccccagcgacggccaggccagcuacaagaucuucagaaucgagaagggcaagaucgugaagagcguggagaucaacgcccccaacuaccacuacgaggagugcagcugcuaccccgacagcagcgagaucaccugcgugugcagagacaacuggcacggcagcaacagacccugggugagcuucaaccagaaccuggaguaccagaucggcuacaucugcagcggcaucuucggcgacaaccccagacccaacgacaagaccggcagcugcggccccgugagcagcaacggcgccaacggcgugaagggcuucagcuucaaguacggcaacggcguguggaucggcagaaccaagagcaucagcagcagaaagggcuucgagaugaucugggaccccaacggcuggaccggcaccgacaacaacuucagcaucaagcaggacaucgugggcaucaacgaguggagcggcuacagcggcagcuucgugcagcaccccgagcugaccggccuggacugcaucagacccugcuucuggguggagcugaucagaggcagacccaaggagaacaccaucuggaccagcggcagcagcaucagcuucugcggcgugaacagcgacaccgugggcuggagcuggcccgacggcgccgagcugcccuucaccaucgacaaguga

SEQ ID NO: 183864 - RNA, 1410 nt, Artificial Sequence; identical to SEQ ID NO: 183449
  derived and/or modified CDS sequence (opt4) from neuraminidase__InfluenzaA__AGT18731

SEQ ID NO: 183865 - RNA, 1410 nt, Artificial Sequence
  derived and/or modified CDS sequence (opt4) from neuraminidase__InfluenzaA__AGT18732
augaaccccaaccagaagaucaucaccaucggcagcgugugcaugaccaucggcauggccaaccugauccugcagaucggcaacaucaucagcaucuggaucagccacagcauccagcugggcaaccagagccagaucgagaccugcaaccagagcgugaucaccuacgagaacaacaccugggugaaccagaccuacgugaacaucagcaacaccaacuucgccgccggccagagcguggugagcgugaagcuggccggcaacagcagccugugccccgugagcggcugggccaucuacagcaaggacaacagcgugagaaucggcagcaagggcgacguguucgugaucagagagcccuucaucagcugcagcccccuggagugcagaaccuucuuccugacccagggcgcccugcugaacgacaagcacagcaacggcaccaucaaggacagaagccccuacagaacccugaugagcugccccaucggcgaggugcccagccccuacaacagcagauucgagagcguggccuggagcgccagcgccugccacgacggcaucaacuggcugaccaucggcaucagcggccccgacagcggcgccguggccgugcugaaguacaacggcaucaucaccgacaccaucaagagcuggagaaacaacauccugagaacccaggagagcgagugcgccugcgugaacggcagcugcuucaccaucaugaccgacggccccagcgacggccaggccagcuacaagaucuucagaaucgagaagggcaagaucgugaagagcguggagaugaacgcccccaacuaccacuacgaggagugcagcugcuaccccgacagcagcgagaucaccugcgugugcagagacaacuggcacggcagcaacagacccugggugagcuucaaccagaaccuggaguaccagaucggcuacaucugcagcggcaucuucggcgacaaccccagacccaacgacaagaccggcagcugcggccccgugagcagcaacggcgccaacggcgugaagggcuucagcuucaaguacggcaacggcguguggaucggcagaaccaagagcaucagcagcagaaagggcuucgagaugaucugggaccccaacggcuggaccggcaccgacaacaacuucagcaucaagcaggacaucgugggcaucaacgaguggagcggcuacagcggcagcuucgugcagcaccccgagcugaccggccuggacugcaucagacccugcuucuggguggagcugaucagaggcagacccaaggagaacaccaucuggaccagaggcagcagcaucagcuucugcggcgugaacagcgacaccgugggcuggagcuggcccgacggcgccgagcugcccuucaccaucgacaaguga

SEQ ID NO: 183866 - RNA, 1410 nt, Artificial Sequence
  derived and/or modified CDS sequence (opt4) from neuraminidase__InfluenzaA__AGT18733
augaaccccaaccagaagaucaucaccaucggcagcgugugcaugaccaucggcauggccaaccugauccugcagaucggcaacaucaucagcaucuggaucagccacagcauccagcugggcaaccagagccagaucgagaccugcaaccagagcgugaucaccuacgagaacaacaccugggugaaccagaccuacgugaacaucagcaacaccaacuucgccgccggccagagcguggugagcgugaagcuggccggcaacagcagccugugccccgugagcggcugggccaucuacagcaaggacaacagcgugagaaucggcagcaagggcgacguguucgugaucagagagcccuucaucagcugcagcccccuggagugcagaaccuucuuccugacccagggcgcccugcugaacgacaagcacagcaacggcaccaucaaggacagaagccccuacagaacccugaugagcugccccaucggcgaggugcccagccccuacaacagcagauucgagagcguggccuggagcgccagcgccugccacgacggcaucaacuggcugaccaucggcaucagcggccccgacagcggcgccguggccgugcugaaguacaacggcaucaucaccgacaccaucaagagcuggagaaacaacauccugagaacccaggagagcgagugcgccugcgugaacggcagcugcuucaccaucaugaccgacggccccagcgacggccaggccagcuacaagaucuucagaaucgagaagggcaagaucgugaagagcguggagaugaacgcccccaacuaccacuacgaggagugcagcugcuaccccgacagcagcgagagcaccugcgugugcagagacaacuggcacggcagcaacagacccugggugagcuucaaccagaaccuggaguaccagaucggcuacaucugcagcggcaucuucggcgacaaccccagacccaacgacaagaccggcagcugcggccccgugagcagcaacggcgccaacggcgugaagggcuucagcuucaaguacggcaacggcguguggaucggcagaaccaagagcaucagcagcagaaagggcuucgagaugaucugggaccccaacggcuggaccggcaccgacaacaacuucagcaucaagcaggacaucgugggcaucaacgaguggagcggcuacagcggcagcuucgugcagcaccccgagcugaccggccuggacugcaucagacccugcuucuggguggagcugaucagaggcagacccaaggagaacaccaucuggaccagcggcagcagcagaagcuucugcggcgugaacagcgacaccgugggcuggagcuggcccgacggcgccgagcugcccuucaccaucgacaaguga

SEQ ID NO: 183867 - RNA, 1410 nt, Artificial Sequence
  derived and/or modified CDS sequence (opt4) from neuraminidase__InfluenzaA__AGT18762
augaaccccaaccagaagaucaucaccaucggcagcgugagccugaccaucagcaccaucugcuucuucaugcagaucgccauccugaucaccaccgugacccugcacuucaagcaguacgaguucaacagcccccccaacaaccaggugacccugugcgagcccaucaucaucgagagaaacaucaccgagaucguguaccugaccaacaccaccaucgagaaggagaucugccccaagcccgccgaguacagaaacuggagcaagccccagugcggcaucaccggcuucgcccccuucagcaaggacaacagcaucagacugagcgccggcggcgacaucugggugaccagagagcccuacgugagcugcgaccccgacaagugcuaccaguucgcccugggccagggcaccacccugaacaacgugcacagcaacaacaccgugagagacagaacccccuacagaacccugcugaugaacgagcugggcgugcccuuccaccugggcaccaagcaggugugcaucgccuggagcagcagcagcugccacgacggcaaggccuggcugcacgugugcaucaccggcgacgacaagaacgccaccgccagcuucaucuacaacggcagacugguggacagcguggugagcuggagcaaggagauccugagaacccaggagagcgagugcgugugcaucaacggcaccugcaccguggugaugaccgacggcagcgccagcggcaaggccgacaccaagauccuguucaucgaggagggcaagaucgugcacaccagcacccugagcggcagcgcccagcacguggaggagugcagcugcuaccccagauaccccggcgugagaugcgugugcagagacaacuggaagggcagcaacagacccaucguggacaucaacaucaaggaccacagcaucgugagcagcuacgugugcagcggccuggugggcgacacccccagaaagaacgacagcagcagcagcagccacugccuggaccccaacaacgaggagggcggccacggcgugaagggcugggccuucgacgacggcaacgacguguggaugggcagaaccaucaacgagaccagcagacugggcuacgagaccuucaaggugaucgagggcuggagcaaccccaagagcaagcugcagaucaacagacaggugaucguggacagaggcgacagaagcggcuacagcggcaucuucagcguggagggcaagagcugcaucaacagaugcuucuacguggagcugaucagaggcagaaaggaggagaccgaggugcuguggaccagcaacagcaucgugguguucugcggcaccagcggcaccuacggcaccggcagcuggcccgacggcgccgaccugaaccugaugcccaucuga

SEQ ID NO: 183868 - RNA, 1410 nt, Artificial Sequence
  derived and/or modified CDS sequence (opt4) from neuraminidase__InfluenzaA__AGT18764
augaaccccaaccagaugaucaucaccaucggcagcgugagccugaccagcagcaccaucugcuucuucaugcagaccgccagcuucaucaccaccgugacccugcacaucaagcagcacgaguuccacagcccccccaacaaccaggugaugcugugcgagcccaccaucaucgagagaaacaucaccgagaucguguaccugaccaacaccaccaucgagaaggagaucugccccaagcuggccgaguacagaaacuggagcaagccccagugcgacaucaccggcuucgcccccuucagcaaggacaacagcaucagacugagcgccggcggcgacaucugggugaccagagagcccuacgugagcugcgaccccgacaagugcuaccaguucgcccugggccagggcaccacccugaacaacgugcacagcaacaacaccgugagagacagaacccccuacagaacccugcugaugaacgagcugggcgugcccuuccaccugggcaccaagcaggugugcaucgccuggagcagcagcagcugccacgacggcaaggccuggcugcacgugugcaucaccggcgacgacaagaacgccaccgccagcuucaucuacaacggcaagcugguggacagcguggugagcuggagcaaggagauccugagaacccaggagagcgagugcgugugcaucaacggcaccugcaccguggugaugaccgacggcagcgccagcggcaaggccgacaccaagauccuguucaucgaggagggcaagaucgugcacaccagcacccugagcggcagcgcccagcacguggaggagugcagcugcuaccccagauaccccggcgugagaugcgugugcagagacaacuggaagggcagcaacagacccaucguggacaucaacaugaaggaccacagcaucgugagcagcuacgugugcagcggccuggugggcgacacccccagaaagaacgacagaagcagcaacagccacugccuggaccccaacaacgaggagggcggccacggcgugaagggcugggccuucgacgacggcaacgacguguggaugggcagaaccaucaacgagaccagcagacugggcuacgagaccuucaaggugaucgagggcuggagcaaccccaagagcaagcugcagaucaacagacaggugaucguggacagaggcaacagaagcggcuacagcggcaucuucagcguggagggcaagagcugcaucaacagaugcuucuacguggagcugaucagaggcagaaaggaggagaccgaggugcuguggaccagcaacagcaucgugguguucugcggcaccagcggcaccuacggcaccggcagcuggcccgacggcgccgaccugaaccugaugcccaucuga

SEQ ID NO: 183869 - RNA, 1410 nt, Artificial Sequence
  derived and/or modified CDS sequence (opt4) from neuraminidase__InfluenzaA__AGT18765
augaaccccaaccagaagaucaucaccaucggcagcgugagccugaccaucagcaccaucugcuucuucaugcagaucgccauccugaucaccaccgugacccugcacuucaagcagcacgaguuccacagcccccccaacaaccaggugaugcugugcgagcccaccaucaucgagagaaacaucaccgagaucguguaccugaccaacaccaccaucgagaaggagaucugccccaagcuggccgaguacagaaacuggagcaagccccagugcgacaucaccggcuucgcccccuucagcaaggacaacagcaucagacugagcgccggcggcgacaucugggugaccagagagcccuacgugagcugcgaccccgacaagugcuaccaguucgcccugggccagggcaccacccugaacaacgugcacagcaacaacaccgugagagacagaacccccuacagaacccugcugaugaacgagcugggcgugcccuuccaccugggcaccaagcaggugugcaucgccuggagcagcagcagcugccacgacggcaaggccuggcugcacgugugcaucaccggcgacgacaagaacgccaccgccagcuucaucuacaacggcagacugguggacagcguggugagcuggagcaaggagauccugagaacccaggagagcgagugcgugugcaucaacggcaccugcaccguggugaugaccgacggcagcgccagcggcaaggccgacaccaagauccuguucaucgaggagggcaagaucgugcacaccagcacccugagcggcagcgcccagcacguggaggagugcagcugcuaccccagauaccccggcgugagaugcgugugcagagacaacuggaagggcagcaacagacccaucguggacaucaacaugaaggaccacagcaucgugagcagcuacgugugcagcggccuggugggcgacacccccagaaagaacgacagaagcagcaacagccacugccuggaccccaacaacgaggagggcggccacggcgugaagggcugggccuucgacgacggcaacgacguguggaugggcagaaccaucaacgagaccagcagacugggcuacgagaccuucaaggugaucgagggcuggagcaaccccaagagcaagcugcagaucaacagacaggugaucguggacagaggcaacagaagcggcuacagcggcaucuucagcguggagggcaagagcugcaucaacagaugcuucuacguggagcugaucagaggcagaaaggaggagaccgaggugcuguggaccagcaacagcaucgugguguucugcggcaccagcggcaccuacggcaccggcagcuggcccgacggcgccgaccugaaccugaugcccaucuga

SEQ ID NO: 183870 - RNA, 1410 nt, Artificial Sequence
  derived and/or modified CDS sequence (opt4) from neuraminidase__InfluenzaA__AGT18766
augaaccccaaccagaagaucaucaccaucggcagcgugagccugaccaucagcaccaucugccuguucaugcagaucgccauccugaucaccaccgugacccugcacuucaagcagcacgaguuccacagcccccccaacaaccaggugaugcugugcgagcccaccaucaucgagagaaacaucaccgagaucguguaccugaccaacaccaccaucgagaaggagaucugccccaagcuggccgaguacagaaacuggagcaagccccagugcgacaucaccggcuucgcccccuucagcaaggacaacagcaucagacugagcgccggcggcgacaucugggugaccagagagcccuacgugagcugcgaccccgacaagugcuaccaguucgcccugggccagggcaccacccugaacaacgugcacagcaacaacaccgugagagacagaacccccuacagaacccugcugaugaacgagcugggcgugcccuuccaccugggcaccaagcaggugugcaucgccuggagcagcagcagcugccacgacggcaaggccuggcugcacgugugcaucaccggcgacgacaagaacgccaccgccagcuucaucuacaacggcagacugguggacagcguggugagcuggagcaaggagauccugagaacccaggagagcgagugcgugugcaucaacggcaccugcaccguggugaugaccgacggcagcgccagcggcaaggccgacaccaagauccuguucaucgaggagggcaagaucgugcacaccagcacccugagcggcagcgcccagcacguggaggagugcagcugcuaccccagauaccccggcgugagaugcgugugcagagacaacuggaagggcagcaacagacccaucguggacaucaacaugaaggaccacagcaucgugagcagcuacgugugcagcggccuggugggcgacacccccagaaagaacgacagaagcagcaacagccacugccuggaccccaacaacgaggagggcggccacggcgugaagggcugggccuucgacgacggcaacgacguguggaugggcagaaccaucaacgagaccagcagacugggcuacgagaccuucaaggugaucgagggcuggagcaaccccaagagcaagcugcagaucaacagacaggugaucguggacagaggcaacagaagcggcuacagcggcaucuucagcguggagggcaagagcugcaucaacagaugcuucuacguggagcugaucagaggcagaaaggaggagaccgaggugcuguggaccagcaacagcaucgugguguucugcggcaccagcggcaccuacggcaccggcagcuggcccgacggcgccgaccugaaccugaagcccaucuga

SEQ ID NO: 183871 - RNA, 1410 nt, Artificial Sequence
  derived and/or modified CDS sequence (opt4) from neuraminidase__InfluenzaA__AGT18767
augaaccccaaccagaagaucaucaccaucggcagcgugagccugaccaucagcaccaucugcuucuucaugcagaccgccagccugaucaccaccgugacccugcacuucaagcagcacgaguuccacagcccccccaacaaccaggugaugcugugcgagcccaccaucaucgagagaaacaucaccgagaucguguaccugaccaacaccaccaucgagaaggagaucugccccaagcuggccgaguacagaaacuggagcaagccccagugcgacaucaccggcuucgcccccuucagcaaggacaacagcaucagacugagcgccggcggcgacaucugggugaccagagagcccuacgugagcugcgaccccgacaagugcuaccaguucgcccugggccagggcaccacccugaacaacgugcacagcaacaacaccgugagagacagaacccccuacagaacccugcugaugaacgagcugggcgugcccuuccaccugggcaccaagcaggugugcaucgccuggagcagcagcagcugccacgacggcaaggccuggcugcacgugugcaucaccggcgacgacaagaacgccaccgccagcuucaucuacaacggcagacugguggacagcguggugagcuggagcaaggagauccugagaacccaggagagcgagugcgugugcaucaacggcaccugcaccguggugaugaccgacggcagcgccagcggcaaggccgacaccaagauccuguucaucgaggagggcaagaucgugcacaccagcacccugagcggcagcgcccagcacguggaggagugcagcugcuaccccagauaccccggcgugagaugcgugugcagagacaacuggaagggcagcaacagacccaucguggacaucaacaugaaggaccacagcaucgugagcagcuacgugugcagcggccuggugggcgacacccccagaaagaacgacagaagcagcaacagccacugccuggaccccaacaacgaggagggcggccacggcgugaagggcugggccuucgacgacggcaacgacguguggaugggcagaaccaucaacgagaccagcagacugggcuacgagaccuucaaggugaucgagggcuggagcaaccccaagagcaagcugcagaucaacagacaggugaucguggacagaggcaacagaagcggcuacagcggcaucuucagcguggagggcaagagcugcaucaacagaugcuucuacguggagcugaucagaggcagaaaggaggagaccgaggugcuguggaccagcaacagcaucgugguguucugcggcaccagcggcaccuacggcaccggcagcuggcccgacggcgccgaccugaaccugaugcccaucuga

SEQ ID NO: 183872 - RNA, 1410 nt, Artificial Sequence
  derived and/or modified CDS sequence (opt4) from neuraminidase__InfluenzaA__AGT18768
augaaccccaaccagaagaucaucaccaucggcagcgugagccugaccaucagcaccaucugcuucuucaugcagaccgccagcuucaucaccaccgugacccugcacuucaagcaguacgaguucaacagcccccccaacaaccaggugaugcugugcgagcccaccaucaucgagagaaacaucaccgagaucguguaccugaccaacaccaccaucgagaaggagaucugccccaagcuggccgaguacagaaacuggagcaagccccagugcgacaucaccggcuucgcccccuucagcaaggacaacagcaucagacugagcgccggcggcgacaucugggugaccagagagcccuacgugagcugcgaccccgacaagugcuaccaguucgcccugggccagggcaccacccugaacaacgugcacagcaacaacaccgugagagacagaacccccuacagaacccugcugaugaacgagcugggcgugcccuuccaccugggcaccaagcaggugugcaucgccuggagcagcagcagcugccacgacggcaaggccuggcugcacgugugcaucaccggcgacgacaagaacgccaccgccagcuucaucuacaacggcagacugguggacagcguggugagcuggagcaaggagauccugagaacccaggagagcgagugcgugugcaucaacggcaccugcaccguggugaugaccgacggcagcgccagcggcaaggccgacaccaagauccuguucaucgaggagggcaagaucgugcacaccagcacccugagcggcagcgcccagcacguggaggagugcagcugcuaccccagauaccccggcgugagaugcgugugcagagacaacuggaagggcagcaacagacccaucguggacaucaacaugaaggaccacagcaucgugagcagcuacgugugcagcggccuggugggcgacacccccagaaagaacgacagaagcagcaacagccacugccuggaccccaacaacgaggagggcggccacggcgugaagggcugggccuucgacgacggcaacgacguguggaugggcagaaccaucaacgagaccagcagacugggcuacgagaccuucaaggugaucgagggcuggagcaaccccaagagcaagcugcagaucaacagacaggugaucguggacagaggcaacagaagcggcuacagcggcaucuucagcguggagggcaagagcugcaucaacagaugcuucuacguggagcugaucagaggcagaaaggaggagaccgaggugcuguggaccagcaacagcaucgugguguucugcggcaccagcggcaccuacggcaccggcagcuggcccgacggcgccgaccugaaccugaugcccaucuga

SEQ ID NO: 183873 - RNA, 1410 nt, Artificial Sequence; identical to SEQ ID NO: 182206
  derived and/or modified CDS sequence (opt4) from neuraminidase__InfluenzaA__AGT18769

SEQ ID NO: 183874 - RNA, 1410 nt, Artificial Sequence
  derived and/or modified CDS sequence (opt4) from neuraminidase__InfluenzaA__AGT18770
augaaccccaaccagaagaucaucaccaucggcagcgugagccugaccaucagcaccaucugcuucuucaugcagaucgccauccugaucaccaccgugacccugcacuucaagcaguacgaguucaacagcccccccaacaacaaggugaugcugugcgagcccaccaucaucgagagaaacaucaccgagaucguguaccugaccaacaccaccaucgagaaggagaucugccccaagcccgccgaguacagaaacuggagcaagccccagugcggcaucaccggcuucgcccccuucagcaaggacaacagcaucagacugagcgccggcggcgacaucugggugaccagagagcccuacgugagcugcgaccccgacaagugcuaccaguucgcccugggccagggcaccacccugaacaacgugcacagcaacaacaccgugagagacagaacccccuacagaacccugcugaugaacgagcugggcgugcccuuccaccugggcaccaagcaggugugcaucgccuggagcagcagcagcugccacgacggcaaggccuggcugcacgugugcaucaccggcgacgacaagaacgccaccgccagcuucaucuacaacggcagacugguggacagcguggugagcuggagcaaggagauccugagaacccaggagagcgagugcgugugcaucaacggcaccugcaccguggugaugaccgacggcagcgccagcggcaaggccgacaccaagauccuguucaucgaggagggcaagaucgugcacaccagcacccugagcggcagcgcccagcacguggaggagugcagcugcuaccccagauaccccggcgugagaugcgugugcagagacaacuggaagggcagcaacagacccaucguggacaucaacaucaaggaccacagcaucgugagcagcuacgugugcagcggccuggugggcgacacccccagaaagaacgacagcagcagcagcagccacugccuggaccccaacaacgaggagggcggccacggcgugaagggcugggccuucgacgacggcaacgacguguggaugggcagaaccaucaacgagaccagcagacugggcuacgagaccuucaaggugaucgagggcuggagcaaccccaagagcaagcugcagaucaacagacaggugaucguggacagaggcgacagaagcggcuacagcggcaucuucagcguggagggcaagagcugcaucaacagaugcuucuacguggagcugaucagaggcagaaaggaggagaccgaggugcuguggaccagcaacagcaucgugguguucugcggcaccagcggcaccuacggcaccggcagcuggcccgacggcgccgaccugaaccugaugcccaucuga

SEQ ID NO: 183875 - RNA, 1410 nt, Artificial Sequence
  derived and/or modified CDS sequence (opt4) from neuraminidase__InfluenzaA__AGT18771
augaaccccaaccagaagaucaucaccaucggcagcgugagccugaccaucagcaccaucugcuucuucaugcagaucgccauccugaucaccaccgugacccugcacuucaagcaguacaaguucaacagcccccccaacaaccaggugaugcugugcgagcccaccaucaucgagagaaacaucaccgagaucguguaccugaccaacaccaccaucgagaaggagaucugccccaagcccgccgaguacagaaacuggagcaagccccagugcggcaucaccggcuucgcccccuucagcaaggacaacagcaucagacugagcgccggcggcgacaucugggugaccagagagcccuacgugagcugcgaccccgacaagugcuaccaguucgcccugggccagggcaccacccugaacaacgugcacagcaacaacaccgugagagacagaacccccuacagaacccugcugaugaacgagcugggcgugcccuuccaccugggcaccaagcaggugugcaucgccuggagcagcagcagcugccacgacggcaaggccuggcugcacgugugcaucaccggcgacgacaagaacgccaccgccagcuucaucuacaacggcagacugguggacagcguggugagcuggagcaaggagauccugagaacccaggagagcgagugcgugugcaucaacggcaccugcaccguggugaugaccgacggcagcgccagcggcaaggccgacaccaagauccuguucaucgaggagggcaagaucgugcacaccagcacccugagcggcagcgcccagcacguggaggagugcagcugcuaccccagauaccccggcgugagaugcgugugcagagacaacuggaagggcagcaacagacccaucguggacaucaacaucaaggaccacagcaucgugagcagcuacgugugcagcggccuggugggcgacacccccagaaagaacgacagcagcagcagcagccacugccuggaccccaacaacgaggagggcggccacggcgugaagggcugggccuucgacgacggcaacgacguguggaugggcagaaccaucaacgagaccagcagacugggcuacgagaccuucaaggugaucgagggcuggagcaaccccaagagcaagcugcagaucaacagacaggugaucguggacagaggcgacagaagcggcuacagcggcaucuucagcguggagggcaagagcugcaucaacagaugcuucuacguggagcugaucagaggcagaaaggaggagaccgaggugcuguggaccagcaacagcaucgugguguucugcggcaccagcggcaccuacggcaccggcagcuggcccgacggcgccgaccugaaccugaugcccaucuga

SEQ ID NO: 183876 - RNA, 1410 nt, Artificial Sequence; identical to SEQ ID NO: 182206
  derived and/or modified CDS sequence (opt4) from neuraminidase__InfluenzaA__AGT18772

SEQ ID NO: 183877 - RNA, 1410 nt, Artificial Sequence
  derived and/or modified CDS sequence (opt4) from neuraminidase__InfluenzaA__AGT37104
augaaccccaaccagaagaucaucaccaucggcagcgugagccugaccaucgccaccaucugccugcugaugcagaucgccauccuggugaccaccgugacccugcacuucaagcaguacgagugcagcagcccccccaacaaccaggugaugcccugcgagcccaccaucaucgagagaaacaucaccaagaucguguaccugaccaacaccaccaucgagagagaggccugccccgagcuggccgaguacagacacuggagcaagccccagugcaagaucagaggcuucgcccccuucagcaaggacaacagcaucagacugagcgccggcggcgacaucugggugaccagagagcccuacgugagcugcgaccccggcaagugcuaccaguucgcccugggccagggcaccacccugaacaacagacacagcaacgacaccgugcacgacagaacccccuacagaacccugcugaugaacgagcugggcgugcccuuccaccugggcaccaagcaggugugcaucgccuggagcagcagcagcugccacgacggcaaggccuggcugcacgugugcaucaccggccacgacaagaacgccaccgccagcuucaucuacgacggcagacugguggacagcaucggcagcuggagccagaacauccugagaacccaggagagcgagugcgugugcaucaacggcaccugcaccguggugaugaccgacggcagcgccagcggcagagccgacaccaagaucauguucguggaggagggcaagaucgugcacaucagcccccuggccggcagcgcccagcacguggaggagugcagcugcuaccccaaguaccccggcgugagaugcgugugcagagacaacuggaagggcagcaacagacccaucguggacaucaacaugaaggacuacagcaucgugagcagcuacgugugcagcggccuggugggcgacacccccagaagaaacgacagcagcagcaccagcuacugccugaaccccaacaacgaggagggcggccacggcgugaagggcugggccuucgacgacggcgacgacguguggaugggcagaaccaucagcgagaagcugagacugggcuacgagaccuucaaggugaucggcggcuggagcaagcccaacagcaagcugcagaucaacagacagguggugguggacaucagcaacagaagcggcuacagcggcaucuucagcguggagggcaagagcugcaucaacagaugcuucuacguggagcugaucagaggcagaaagcaggagaacgaggugugguggaccagcaacagcaucgugguguucugcggcaccagcggcaccuacggcaccggcagcuggcccgacggcgccgacaucaaccugaugcccaucuga

SEQ ID NO: 183878 - RNA, 1410 nt, Artificial Sequence
  derived and/or modified CDS sequence (opt4) from neuraminidase__InfluenzaA__AGU69973
augaaccccaaccagaagaucaucaccaucggcagcgugagccugaccaucgccaccaucugcuuccugaugcagaucgccauccuggugaccaccgugacccugcacuucaagcaguacgagugcaacagcccccccaacaaccaggugaugcugugcgagcccaccaucaucgagagaaacaucaccgagaucguguaccugaccaacaccaccaucgagaaggagaucugccccaagcuggccgaguacagaaacuggagcaagccccagugcaacaucaccggcuucgcccccuucagcaaggacaacagcaucagacugagcgccggcggcgacaucugggugaccagagagcccuacgugagcugcgaccccgacaagugcuaccaguucgcccugggccagggcaccacccugaacaacggccacagcaacgacaccgugcacgacagaacccccuacagaacccugcugaugaacgagcugggcgugcccuuccaccugggcaccaagcaggugugcaucgccuggagcagcagcagcugccacgacggcaaggccuggcugcacgugugcgugaccggcgacgacgagaacgccaccgccagcuucaucuacaacggcagacugguggacagcaucggcagcuggagcaagaagauccugagaacccaggagagcgagugcgugugcaucaacggcaccugcaccguggugaugaccgacggcagcgccagcggcaaggccgacaccaagauccuguucaucgaggagggcaagaucgugcacaccagcccccugagcggcagcgcccagcacguggaggagugcagcugcuaccccagauaccccggcgugagaugcgugugcagagacaacuggaagggcagcaacagacccaucguggacaucaacgugaaggacuacagcaucgugagcagcuacgugagaagcggccuggugggcgacacccccagaaagaacgacagcagcagcagcagccacugccuggaccccaacaacgaggagggcggccacggcgugaagggcugggccuucgacgacggcaacgacguguggaugggcagaaccaucagcgagaagagcagaagcggcuacgagaccuucaaggugaucgagggcuggagcaagcccaacagcaagcugcagaucaacagacaggugaucguggacagaggcaacagaagcggcuacagcggcaucuucagcguggagggcaagagcugcaucaacagaugcuucuacguggagcugaucagaggcggcaagcaggagaccgaggugcuguggaccagcaacagcaucgugguguucugcggcaccagcggcaccuacggcaccggcagcuggcccgacggcgccgaccugaaccugaugcccaucuga

SEQ ID NO: 183879 - RNA, 1410 nt, Artificial Sequence
  derived and/or modified CDS sequence (opt4) from neuraminidase__InfluenzaA__AGU92648
augaaccccaaccagaagaucaucaccaucggcagcgugugcaugaccaucggcauggccaaccugauccugcagaucggcaacaucaucagcaucuggaucagccacagcauccagcugagaaaccagagccagaucgagaccugcaaccagagcgugaucaccuacgagaacaacaccugggugaaccagaccuacgugaacaucagcaacaccaacuucgccgccggccagagcguggugagcgugaagcuggccggcaacagcagccugugccccgugagcggcugggccaucuacagcaaggacaacagcaucagaaucggcagcaagggcgacguguucgugaucagagagcccuucaucagcugcagcccccuggagugcagaaccuucuuccugacccagggcgcccugcugaacgacaagcacagcaacggcaccaucaaggacagaagccccuacagaacccugaugagcugccccaucggcgaggugcccagccccuacaacagcagauucgagagcguggccuggagcgccagcgccugccacgacggcaucaacuggcugaccaucggcaucagcggccccgacaacggcgccguggccgugcugaaguacaacggcaucaucaccgacaccaucaagagcuggagaaacaacauccugagaacccaggagagcgagugcgccugcgugaacggcagcugcuucaccaucaugaccgacggccccagcgacggccaggccagcuacaagaucuucagaaucgagaagggcaagaucgugaagagcguggagaugaacgcccccaacuaccacuacgaggagugcagcugcuaccccgacagcagcgagaucaucugcgugugcagagacaacuggcacggcagcaacagacccugggugagcuucaaccagaaccuggaguaccagaucggcuacaucugcagcggcaucuucggcgacaaccccagacccaacgacaagaccggcagcugcggccccgugagcagcaacggcgccaacggcgugaagggcuucagcuucaaguacggcaacggcguguggaucggcagaaccaagagcaucagcagcagaaagggcuucgagaugaucugggaccccaacggcuggaccggcaccgacaacaacuucagcaucaagcaggacaucgugggcaucaacgaguggagcggcuacagcggcagcuucgugcagcaccccgagcugaccggccuggacugcaucagacccugcuucuggguggagcugaucagaggcagacccaaggagaacaccaucuggaccagcggcagcagcaucagcuucugcggcgugaacagcgacaccgugggcuggagcuggcccgacggcgccgagcugcccuucaccaucgacaaguga

SEQ ID NO: 183880 - RNA, 1410 nt, Artificial Sequence
  derived and/or modified CDS sequence (opt4) from neuraminidase__InfluenzaA__AGU92670
augaaccccaaccagaagaucaucaccaucggcagcgugugcaugaccaucggcauggccaaccugauccugcagaucggcaacaucaucagcaucuggaucagccacagcauccagcugagaaaccagagccagaucgagaccugcaaccagagcgugaucaccuacgagaacaacaccugggugaaccagaccuacgugaacaucagcaacaccaacuucgccgccggccagagcguggugagcgugaagcuggccggcaacagcagccugugccccgugagcggcugggccaucuacagcaaggacaacagcaucagaaucggcagcaagggcgacguguucgugaucagagagcccuucaucagcugcagcccccuggagugcagaaccuucuuccugacccagggcgcccugcugaacgacaagcacagcaacggcaccaucaaggacagaagccccuacagaacccugaugagcugccccaucggcgaggugcccagccccuacaacagcagauucgagagcguggccuggagcgccagcgccugccacgacggcaucaacuggcugaccaucggcaucagcggccccgacaacggcgccguggccgugcugaaguacaacggcaucaucaccgacaccaucaagagcuggagaaacaacauccugagaacccaggagagcgagugcgccugcgugaacggcagcugcuucaccaucaugaccgacggccccagcgacggccaggccagcuacaagaucuucagaaucgagaagggcaagaucgugaagagcguggagaugaacgcccccaacuaccacuacgaggagugcagcugcuaccccgacagcagcgagaucaucugcgugugcagagacaacuggcacggcagcaacagacccugggugagcuucaaccagaaccuggaguaccagaucggcuacaucugcagcggcaucuucggcgacaaccccagacccgacgacaagaccggcagcugcggccccgugagcagcaacggcgccaacggcgugaagggcuucagcuucaaguacggcaacggcguguggaucggcagaaccaagagcaucagcagcagaaagggcuucgagaugaucugggaccccaacggcuggaccggcaccgacaacaacuucagcaucaagcaggacaucgugggcaucaacgaguggagcggcuacagcggcagcuucgugcagcaccccgagcugaccggccuggacugcaucagacccugcuucuggguggagcugaucagaggcagacccaaggagaacaccaucuggaccagcggcagcagcaucagcuucugcggcgugaacagcgacaccgugggcuggagcuggcccgacggcgccgagcugcccuucaccaucgacaaguga

SEQ ID NO: 183881 - RNA, 1410 nt, Artificial Sequence
  derived and/or modified CDS sequence (opt4) from neuraminidase__InfluenzaA__AGU92681
augaaccccaaccagaagaucaucaccaucggcagcgugugcaugaccaucggcauggccaaccugauccugcagaucggcaacaucaucagcaucuggaucagccacagcauccagcugagaaaccagagccagaucgagaccugcaaccagagcgugaucaccuacgagaacaacaccugggugaaccagaccuacgugaacaucagcaacaccaacuucgccgccggccagagcguggugagcgugaagcuggccggcaacagcagccugugccccgugagcggcugggccaccuacagcaaggacaacagcaucagaaucggcagcaagggcgacguguucgugaucagagagcccuucaucagcugcagcccccuggagugcagaaccuucuuccugacccagggcgcccugcugaacgacaagcacagcaacggcaccaucaaggacagaagccccuacagaacccugaugagcugccccaucggcgaggugcccagccccuacaacagcagauucgagagcguggccuggagcgccagcgccugccacgacggcaucaacuggcugaccaucggcaucagcggccccgacaacggcgccguggccgugcugaaguacaacggcaucaucaccgacaccaucaagagcuggagaaacaacauccugagaacccaggagagcgagugcgccugcgugaacggcagcugcuucaccaucaugaccgacggccccagcgacggccaggccagcuacaagaucuucagaaucgagaagggcaagaucgugaagagcguggagaugaacgcccccaacuaccacuacgaggagugcagcugcuaccccgacagcagcgagaucaucugcgugugcagagacaacuggcacggcagcaacagacccugggugagcuucaaccagaaccuggaguaccagaucggcuacaucugcagcggcaucuucggcgacaaccccagacccaacgacaagaccggcagcugcggccccgugagcagcaacggcgccaacggcgugaagggcuucagcuucaaguacggcaacggcguguggaucggcagaaccaagagcaucagcagcagaaagggcuucgagaugaucugggaccccaacggcuggaccggcaccgacaacaacuucagcaucaagcaggacaucgugggcaucaacgaguggagcggcuacagcggcagcuucgugcagcaccccgagcugaccggccuggacugcaucagacccugcuucuggguggagcugaucagaggcagacccaaggagaacaccaucuggaccagcggcagcagcaucagcuucugcggcgugaacagcgacaccgugggcuggagcuggcccgacggcgccgagcugcccuucaccaucgacaaguga

SEQ ID NO: 183882 - RNA, 1410 nt, Artificial Sequence
  derived and/or modified CDS sequence (opt4) from neuraminidase__InfluenzaA__AGU92692
augaaccccaaccagaagaucaucaccaucggcagcgugugcaugaccaucggcauggccaaccugauccugcagaucggcaacaucaucagcaucuggaucagccacagcauccagcugggcaaccagaaccagaucgagaccugcaaccagagcgugaucaccuacgagaacaacaccugggugaaccagaccuacgugaacaucagcaacaccaacuucgccgccggccagagcguggugagcgugaagcuggccggcaacagcagccugugccccgugagcggcugggccaucuacagcaaggacaacagcgugagagugggcagcaagggcgacguguucgugaucagagagcccuucaucagcugcagcccccuggagugcagaaccuucuuccugacccagggcgcccugcugaacgacaagcacagcaacggcaccaucaaggacagaagccccuacagaacccugaugagcugccccaucggcgaggugcccagccccuacaacagcagauucgagagcguggccuggagcgccagcgccugccacgacggcaucaacuggcugaccaucggcaucagcggccccgacaacggcgccguggccgugcugaaguacaacggcaucaucaccgacaccaucaagagcuggagaaacaacauccugagaacccaggagagcgagugcgccugcgugaacggcagcugcuucaccgugaugaccgacggccccagcaacggccaggccagcuacaagaucuucagaaucgagaagggcaagaucgugaagagcguggagaugaacgcccccaacuaccacuacgaggagugcagcugcuaccccgacagcagcgagaucaccugcgugugcagagacaacuggcacggcagcaacagacccugggugagcuucaaccagaaccuggaguaccagaucggcuacaucugcagcggcaucuucggcgacaaccccagacccaacgacaagaccggcagcugcggccccgugagcagcaacggcgccaacggcgugaagggcuucagcuucaaguacggcaacggcguguggaucggcagaaccaagagcaucagcagcagaaacggcuucgagaugaucugggaccccaacggcuggaccggcaccgacaacaacuucagcaucaagcaggacaucgugggcaucaacgaguggagcggcuacagcggcagcuucauccagcaccccgagcugaccggccuggacugcaucagacccugcuucuggguggagcugaucagaggcagacccaaggagaacaccaucuggaccagcggcagcagcaucagcuucugcggcgugaacagcgacaccgugggcuggagcuggcccgacggcgccgagcugcccuucaccaucgacaaguga

SEQ ID NO: 183883 - RNA, 1410 nt, Artificial Sequence; identical to SEQ ID NO: 183882
  derived and/or modified CDS sequence (opt4) from neuraminidase__InfluenzaA__AGU92703

SEQ ID NO: 183884 - RNA, 1410 nt, Artificial Sequence; identical to SEQ ID NO: 183882
  derived and/or modified CDS sequence (opt4) from neuraminidase__InfluenzaA__AGU92714

SEQ ID NO: 183885 - RNA, 1410 nt, Artificial Sequence; identical to SEQ ID NO: 183882
  derived and/or modified CDS sequence (opt4) from neuraminidase__InfluenzaA__AGU92725

SEQ ID NO: 183886 - RNA, 1410 nt, Artificial Sequence; identical to SEQ ID NO: 183882
  derived and/or modified CDS sequence (opt4) from neuraminidase__InfluenzaA__AGU92736

SEQ ID NO: 183887 - RNA, 1410 nt, Artificial Sequence; identical to SEQ ID NO: 183882
  derived and/or modified CDS sequence (opt4) from neuraminidase__InfluenzaA__AGU92747

SEQ ID NO: 183888 - RNA, 1410 nt, Artificial Sequence; identical to SEQ ID NO: 183882
  derived and/or modified CDS sequence (opt4) from neuraminidase__InfluenzaA__AGU92758

SEQ ID NO: 183889 - RNA, 1410 nt, Artificial Sequence; identical to SEQ ID NO: 183879
  derived and/or modified CDS sequence (opt4) from neuraminidase__InfluenzaA__AGU92769

SEQ ID NO: 183890 - RNA, 1410 nt, Artificial Sequence; identical to SEQ ID NO: 183879
  derived and/or modified CDS sequence (opt4) from neuraminidase__InfluenzaA__AGU92780

SEQ ID NO: 183891 - RNA, 1410 nt, Artificial Sequence
  derived and/or modified CDS sequence (opt4) from neuraminidase__InfluenzaA__AGU92791
augaaccccaaccagaagaucaucaccaucggcagcgugugcaugaccaucggcauggccaaccugauccugcagaucggcaacaucaucagcaucuggaucagccacagcauccagcugagaaaccagagccagaucgagaccugcaaccagagcgugaucaccuacgagaacaacaccugggugaaccagaccuacgugaacaucagcaacaccaacuucgccgccggccagagcguggugagcgugaagcuggccggcaacagcagccugugccccgugagcggcugggccaucuacagcaaggacaacagcaucagaaucggcagcaagggcgacguguucgugaucagagagcccuucaucagcugcagcccccuggagugcagaaucuucuuccugacccagggcgcccugcugaacgacaagcacagcaacggcaccaucaaggacagaagccccuacagaacccugaugagcugccccaucggcgaggugcccagccccuacaacagcagauucgagagcguggccuggagcgccagcgccugccacgacggcaucaacuggcugaccaucggcaucagcggccccgacaacggcgccguggccgugcugaaguacaacggcaucaucaccgacaccaucaagagcuggagaaacaacauccugagaacccaggagagcgagugcgccugcgugaacggcagcugcuucaccaucaugaccgacggccccagcgacggccaggccagcuacaagaucuucagaaucgagaagggcaagaucgugaagagcguggagaugaacgcccccaacuaccacuacgaggagugcagcugcuaccccgacagcagcgagaucaucugcgugugcagagacaacuggcacggcagcaacagacccugggugagcuucaaccagaaccuggaguaccagaucggcuacaucugcagcggcaucuucggcgacaaccccagacccaacgacaagaccggcagcugcggccccgugagcagcaacggcgccaacggcgugaagggcuucagcuucaaguacggcaacggcguguggaucggcagaaccaagagcaucagcagcagaaagggcuucgagaugaucugggaccccaacggcuggaccggcaccgacaacaacuucagcaucaagcaggacaucgugggcaucaacgaguggagcggcuacagcggcagcuucgugcagcaccccgagcugaccggccuggacugcaucagacccugcuucuggguggagcugaucagaggcagacccaaggagaacaccaucuggaccagcggcagcagcaucagcuucugcggcgugaacagcgacaccgugggcuggagcuggcccgacggcgccgagcugcccuucaccaucgacaaguga

SEQ ID NO: 183892 - RNA, 1410 nt, Artificial Sequence; identical to SEQ ID NO: 183879
  derived and/or modified CDS sequence (opt4) from neuraminidase__InfluenzaA__AGU92802

SEQ ID NO: 183893 - RNA, 1410 nt, Artificial Sequence; identical to SEQ ID NO: 183879
  derived and/or modified CDS sequence (opt4) from neuraminidase__InfluenzaA__AGU92813

SEQ ID NO: 183894 - RNA, 1410 nt, Artificial Sequence; identical to SEQ ID NO: 183879
  derived and/or modified CDS sequence (opt4) from neuraminidase__InfluenzaA__AGU92824

SEQ ID NO: 183895 - RNA, 1410 nt, Artificial Sequence
  derived and/or modified CDS sequence (opt4) from neuraminidase__InfluenzaA__AGU92846
augaaccccaaccagaagaucaucaccaucggcagcgugugcaugaccaucggcauggccaaccugauccugcagaucggcaacaucaucagcaucuggaucagccacagcauccagcugggcaaccagaaccagaucgagaccugcaaccagagcgugaucaccuacgagaacaacaccugggugaaccagaccuacgugaacaucagcaacaccaacuucgccgccggccagagcguggugagcgugaagcuggccggcaacagcagccugugccccgugagcggcugggccaucuacagcaaggacaacagcgugagagugggcagcaagggcgacguguucgugaucagagagcccuucaucagcugcagcccccuggagugcagaaccuucuuccugacccagggcgcccugcugaacgacaagcacagcaacggcaccaucaaggacagaagccccuacagaacccugaugagcugccccaucggcgaggugcccagccccuacaacagcagauucgagagcguggccuggagcgccagcgccugccacgacggcaucaacuggcugaccaucggcaucagcggccccgacaacggcgccguggccgugcugaaguacaacggcaucaucaccgacaccaucaagagcuggagaaacaacauccugagaacccaggagagcgagugcgccugcgugaacggcagcugcuucaccgugaugaccgacggccccagcaacggccaggccagcuacaagaucuucagaaucgagaagggcaagaucgugaagagcguggagaugaacgcccccaacuaccacuacgaggagugcagcugcuaccccgacagcagcgagaucaccugcgugugcagagacaacuggcacggcagcaacagacccugggugagcuucaaccagaaccuggaguaccagaucggcuacaucugcagcggcaucuucggcgacaaccccagacccaacgacaagaccggcagcugcggccccgugagcagcaacggcgccaacggcgugaagggcuucgccuucaaguacggcaacggcguguggaucggcagaaccaagagcaucagcagcagaaacggcuucgagaugaucugggaccccaacggcuggaccggcaccgacaacaacuucagcaucaagcaggacaucgugggcaucaacgaguggagcggcuacagcggcagcuucauccagcaccccgagcugaccggccuggacugcaucagacccugcuucuggguggagcugaucagaggcagacccaaggagaacaccaucuggaccagcggcagcagcaucagcuucugcggcgugaacagcgacaccgugggcuggagcuggcccgacggcgccgagcugcccuucaccaucgacaaguga

SEQ ID NO: 183896 - RNA, 1410 nt, Artificial Sequence
  derived and/or modified CDS sequence (opt4) from neuraminidase__InfluenzaA__AGU92868
augaaccccaaccagaagaucaucaccaucggcagcgugugcaugaccaucggcauggccaaccugauccugcagaucggcaacaucaucagcaucuggaucagccacagcauccagcugggcaaccagaaccagaucgagaccugcaaccagagcgugaucaccuacgagaacaacaccugggugaaccagaccuacgugaacaucagcaacaccaacuucgccgccggccagagcguggugagcgugaaguucgccggcaacagcagccugugccccgugagcggcugggccaucuacagcaaggacaacagcgugagagugggcagcaagggcgacguguucgugaucagagagcccuucaucagcugcagcccccuggagugcagaaccuucuuccugacccagggcgcccugcugaacgacaagcacagcaacggcaccaucaaggacagaagccccuacagaacccugaugagcugccccaucggcgaggugcccagccccuacaacagcagauucgagagcguggccuggagcgccagcgccugccacgacggcaucaacuggcugaccaucggcaucagcggccccgacaacggcgccguggccgugcugaaguacaacggcaucaucaccgacaccaucaagagcuggagaaacaacauccugagaacccaggagagcgagugcgccugcgugaacggcagcugcuucaccgugaugaccgacggccccagcaacggccaggccagcuacaagaucuucagaaucgagaagggcaagaucgugaagagcguggagaugaacgcccccaacuaccacuacgaggagugcagcugcuaccccgacagcagcgagaucaccugcgugugcagagacaacuggcacggcagcaacagacccugggugagcuucaaccagaaccuggaguaccagaucggcuacaucugcagcggcaucuucggcgacaaccccagacccaacgacaagaccggcagcugcggccccgugagcagcaacggcgccaacggcgugaagggcuucagcuucaaguacggcaacggcguguggaucggcagaaccaagagcaucagcagcagaaacggcuucgagaugaucugggaccccaacggcuggaccggcaccgacaacaacuucagcaucaagcaggacaucgugggcaucaacgaguggagcggcuacagcggcagcuucauccagcaccccgagcugaccggccuggacugcaucagacccugcuucuggguggagcugaucagaggcagacccaaggagaacaccaucuggaccagcggcagcagcaucagcuucugcggcgugaacagcgacaccgugggcuggagcuggcccgacggcgccgagcugcccuucaccaucgacaaguga

SEQ ID NO: 183897 - RNA, 1410 nt, Artificial Sequence
  derived and/or modified CDS sequence (opt4) from neuraminidase__InfluenzaA__AGU92890
augaaccccaaccagaagaucaucaccaucggcagcgugugcaugaccaucggcauggccaaccugauccugcagaucggcaacaucaucagcaucuggaucagccacagcauccagcugggcaaccagaaccagaucgagaccugcaaccagagcgugaucaccuacgagaacaacaccugggugaaccagaccuacgugaacaucagcaacaccaacuucgccgccggccagagcguggugagcgugaagcuggccggcaacagcagccugugccccgugagcggcugggccaucuacagcaaggacaacagcgugagagugggcagcaagggcgacguguucgugaucagagagcccuucaucagcugcagcccccuggagugcagaaccuucuuccugacccagggcgcccugcugaacgacaagcacagcaacggcaccaucaaggacagaagccccuacagaacccugaugagcugccccaucggcgaggugcccagccccuacaacagcagauucgagagcguggccuggagcgccagcgccugccacgacggcaucaacuggcugaccaucggcaucagcggccccgacaacggcgccguggccgugcugaaguacaacggcaucaucaccgacaccaucaagagcuggagaaacaacauccugagaacccaggagagcgagugcgccugcgugaacggcagcugcuucaccgugaugaccgacggccccagcaacggccaggccagcuacaagaucuucagaaucgagaagggcaagaucgugaagagcguggagaugaacgcccccaacuaccacuacgaggagugcagcugcuaccccgacagcagcgagaucaccugcgugugcagagacaacuggcacggcagcaacagacccugggugagcuucaaccagaaccuggaguaccagaucggcuacaucugcagcggcaucuucggcgacaaccccagacccaacgacaagaccggcagcugcggccccgugagcagcaacggcgccaacggcgugaagggcuucagcuucaaguacggcaacggcguguggaucggcagaaccaagagcaucagcagcagaaacggcuucgagaugaucugggaccccaacggcuggaccgagaccgacaacaacuucagcaucaagcaggacaucgugggcaucaacgaguggagcggcuacagcggcagcuucauccagcaccccgagcugaccggccuggacugcaucagacccugcuucuggguggagcugaucagaggcagacccaaggagaacaccaucuggaccagcggcagcagcaucagcuucugcggcgugaacagcgacaccgugggcuggagcuggcccgacggcgccgagcugcccuucaccaucgacaaguga

SEQ ID NO: 183898 - RNA, 1410 nt, Artificial Sequence; identical to SEQ ID NO: 183879
  derived and/or modified CDS sequence (opt4) from neuraminidase__InfluenzaA__AGU92901

SEQ ID NO: 183899 - RNA, 1410 nt, Artificial Sequence; identical to SEQ ID NO: 183879
  derived and/or modified CDS sequence (opt4) from neuraminidase__InfluenzaA__AGU92912

SEQ ID NO: 183900 - RNA, 1410 nt, Artificial Sequence; identical to SEQ ID NO: 183879
  derived and/or modified CDS sequence (opt4) from neuraminidase__InfluenzaA__AGU92923

SEQ ID NO: 183901 - RNA, 1410 nt, Artificial Sequence; identical to SEQ ID NO: 183882
  derived and/or modified CDS sequence (opt4) from neuraminidase__InfluenzaA__AGU92934

SEQ ID NO: 183902 - RNA, 1410 nt, Artificial Sequence; identical to SEQ ID NO: 183882
  derived and/or modified CDS sequence (opt4) from neuraminidase__InfluenzaA__AGU92945

SEQ ID NO: 183903 - RNA, 1410 nt, Artificial Sequence; identical to SEQ ID NO: 183882
  derived and/or modified CDS sequence (opt4) from neuraminidase__InfluenzaA__AGU92956

SEQ ID NO: 183904 - RNA, 1410 nt, Artificial Sequence; identical to SEQ ID NO: 183879
  derived and/or modified CDS sequence (opt4) from neuraminidase__InfluenzaA__AGU92967

SEQ ID NO: 183905 - RNA, 1410 nt, Artificial Sequence; identical to SEQ ID NO: 183879
  derived and/or modified CDS sequence (opt4) from neuraminidase__InfluenzaA__AGU92978

SEQ ID NO: 183906 - RNA, 1410 nt, Artificial Sequence
  derived and/or modified CDS sequence (opt4) from neuraminidase__InfluenzaA__AGU92989
augaaccccaaccagaagaucaucaccaucggcagcgugugcaugaccaucggcauggccaaccugauccugcagaucggcaacaucaucagcaucuggaucagccacagcauccagcugggcaaccagaaccagaucgagaccugcaaccagagcgugaucaccuacgagaacaacaccugggugaaccagaccuacgugaacaucagcaacaccaacuucgccgccggccagagcguggugagcgugaagcuggccggcaacagcagccugugccccgugagcggcugggccaucuacagcaaggacaacagcgugagagugggcagcaagggcgacguguucgugaucagagagcccuucaucagcugcagcccccuggagugcagaaccuucuuccugacccagggcgcccugcugaacgacaagcacagcaacggcaccaucaaggacagaagccccuacagaacccugaugagcugccccaucggcgaggugcccagccccuacaacagcagauucgagagcguggccuggagcgccagcgccugccacgacggcaucaacuggcugaccaucggcaucagcggccccgacaacggcgccguggccgugcugaaguacaacggcaucaucaccgacaccaucaagagcuggagaaacaacauccugagaacccaggagagcgagugcgccugcgugaacggcagcugcuucaccgugaugaccgacggccccagcaacggccaggccagcuacaagaucuucagaaucgagaagggcaagaucgugaagagcguggagaugaacgcccccaacuaccacuacgaggagugcagcugcuaccccgacagcagcgagaucaccugcgugugcagagacaacuggcacggcagcaacagacccugggugagcuucaaccagaaccuggaguaccagaucggcuacaucugcagcggcaucuucggcgacaaccccagacccaacgacaagaccggcagcugcggccccgugagcagcaacggcgccaacggcgugaagggcuucagcuucaaguacggcaacggcguguggaucggcagaaccaagagcaucagcagcagaaacggcuucgagaugaucugggaccccaacggcuggaccggcaccgacaacaacuucagcaucaagcaggacaucgugggcaucaacgaguggagcggcuacagcggcagcuucgugcagcaccccgagcugaccggccuggacugcaucagacccugcuucuggguggagcugaucagaggcagacccaaggagaacaccaucuggaccagcggcagcagcaucagcuucugcggcgugaacagcgacaccgugggcuggagcuggcccgacggcgccgagcugcccuucaccaucgacaaguga

SEQ ID NO: 183907 - RNA, 1410 nt, Artificial Sequence; identical to SEQ ID NO: 183896
  derived and/or modified CDS sequence (opt4) from neuraminidase__InfluenzaA__AGU93000

SEQ ID NO: 183908 - RNA, 1410 nt, Artificial Sequence; identical to SEQ ID NO: 183897
  derived and/or modified CDS sequence (opt4) from neuraminidase__InfluenzaA__AGU93011

SEQ ID NO: 183909 - RNA, 1365 nt, Artificial Sequence; identical to SEQ ID NO: 180450
  derived and/or modified CDS sequence (opt4) from neuraminidase__InfluenzaA__AGU93022

SEQ ID NO: 183910 - RNA, 1410 nt, Artificial Sequence
  derived and/or modified CDS sequence (opt4) from neuraminidase__InfluenzaA__AGU93034
augaaccccacccagaagaucaucaccaucggcagcgugugcaugaccaucggcauggccaaccugauccugcagaucggcaacaucaucagcaucuggaucagccacagcauccagcugggcaaccagaaccagaucgagaccugcaaccagagcgugaucaccuacgagaacaacaccugggugaaccagaccuacgugaacaucagcaacaccaacuucgccgccggccagagcguggccagcgugaagcuggccggcaacagcagccugugccccgugagcggcugggccaucuacagcaaggacaacagcaucagaaucggcagcaagggcgacguguucgugaucagagagcccuucaucagcugcagcccccuggagugcagaaccuucuuccugacccagggcgcccugcugaacgacaagcacagcaacggcaccaucaaggacagaagccccuacagaacccugaugagcugccccaucggcgaggugcccagccccuacaacagcagauucgagagcguggccuggagcgccagcgccugccacgacggcaucaacuggcugaccaucggcaucagcggccccgacaacggcgccguggccgugcugaaguacaacggcaucaucaccgacaccaucaagagcuggagaaacaacauccugagaacccaggagagcgagugcgccugcgugaacggcagcugcuucaccaucaugaccgacggccccagcgacggccaggccagcuacaagaucuucagaaucgagaagggcaagaucgugaagagcguggagaugaacgcccccaacuaccacuacgaggagugcagcugcuaccccgacagcagcgagaucaccugcgugugcagagacaacuggcacggcagcaacagacccugggugagcuucaaccagaaccuggaguaccagaucggcuacaucugcagcggcaucuucggcgacaaccccagacccaacgacaagaccggcagcugcggccccgugagcagcaacggcgccaacggcgugaagggcuucagcuucaaguacggcaacggcguguggaucggcagaaccaagagcaucagcagcagaaagggcuucgagaugaucugggaccccaacggcuggaccggcaccgacaacaacuucagcaucaagcaggacaucgugggcaucaacgaguggagcggcuacagcggcagcuucgugcagcaccccgagcugaccggccuggacugcaucagacccugcuucuggguggagcugaucagaggcagacccaaggagaacaccaucuggaccagcggcagcagcaucagcuucugcggcgugaacagcgacaccgugggcuggagcuggcccgacggcgccgagcugcccuucaccaucgacaaguga

SEQ ID NO: 183911 - RNA, 1410 nt, Artificial Sequence; identical to SEQ ID NO: 183218
  derived and/or modified CDS sequence (opt4) from neuraminidase__InfluenzaA__AGU93045

SEQ ID NO: 183912 - RNA, 1410 nt, Artificial Sequence; identical to SEQ ID NO: 183879
  derived and/or modified CDS sequence (opt4) from neuraminidase__InfluenzaA__AGU93056

SEQ ID NO: 183913 - RNA, 1410 nt, Artificial Sequence; identical to SEQ ID NO: 182206
  derived and/or modified CDS sequence (opt4) from neuraminidase__InfluenzaA__AGV98980

SEQ ID NO: 183914 - RNA, 1410 nt, Artificial Sequence; identical to SEQ ID NO: 182206
  derived and/or modified CDS sequence (opt4) from neuraminidase__InfluenzaA__AGV98993

SEQ ID NO: 183915 - RNA, 1410 nt, Artificial Sequence; identical to SEQ ID NO: 182206
  derived and/or modified CDS sequence (opt4) from neuraminidase__InfluenzaA__AGV99005

SEQ ID NO: 183916 - RNA, 1410 nt, Artificial Sequence; identical to SEQ ID NO: 182206
  derived and/or modified CDS sequence (opt4) from neuraminidase__InfluenzaA__AGV99017

SEQ ID NO: 183917 - RNA, 1410 nt, Artificial Sequence; identical to SEQ ID NO: 182206
  derived and/or modified CDS sequence (opt4) from neuraminidase__InfluenzaA__AGV99040

SEQ ID NO: 183918 - RNA, 1410 nt, Artificial Sequence
  derived and/or modified CDS sequence (opt4) from neuraminidase__InfluenzaA__AGV99052
augaaccccaaccagaagaucaucaccaucggcagcgugagccugaccaucagcaccaucugcuucuucaugcagaucgccauccugaucaccaccgugacccugcacuucaagcaguacgaguucaacagcccccccaacaaccaggugaugcugugcgagcccaccaucaucgagagaaacaucaccgagaucguguaccugaccaacaccaccaucgagaaggagaucugccccaagcccgccgaguacagaaacuggagcaagccccagugcggcaucaccggcuucgcccccuucagcaaggacaacagcaucagacugagcgccggcggcgacaucugggugaccagagagcccuacgugagcugcgaccccgacaagugcuaccaguucgcccugggccagggcaccacccugaacaacgugcacagcaacaacaccgugagagacagaacccccuacagaacccugcugaugaacgagcugggcgugcccuuccaccugggcaccaagcaggugugcaucgccuggagcagcagcagcugccacgacggcaaggccuggcugcacgugugcaucaccggcgacgacaagaacgccaccgccagcuucaucuacaacggcagacugguggacagcguggugagcuggagcaaggagauccugagaacccaggagagcgagugcgugugcaucaacggcaccugcaccguggugaugaccgacggcagcgccagcggcaaggccgacaccaagauccuguucaucgaggagggcaagaucgugcacaccagcacccugagcggcagcgcccagcacguggaggagugcagcugcuaccccagauaccccggcgugagaugcgugugcagagacaacuggaagggcagcaacagacccaucguggacaucaacaucaaggaccacagcgugaucagcagcuacgugugcagcggccuggugggcgacacccccagaaagaacgacagcagcagcagcagccacugccuggaccccaacaacgaggagggcggccacggcgugaagggcugggccuucgacgacggcaacgacguguggaugggcagaaccaucaacgagaccagcagacugggcuacgagaccuucaaggugaucgagggcuggagcaaccccaagagcaagcugcagaucaacagacaggugaucguggacagaggcgacagaagcggcuacagcggcaucuucagcguggagggcaagagcugcaucaacagaugcuucuacguggagcugaucagaggcagaaaggaggagaccgaggugcuguggaccagcaacagcaucgugguguucugcggcaccagcggcaccuacggcaccggcagcuggcccgacggcgccgaccugaaccugaugcccaucuga

SEQ ID NO: 183919 - RNA, 1410 nt, Artificial Sequence
  derived and/or modified CDS sequence (opt4) from neuraminidase__InfluenzaA__AGV99100
augaaccccaaccagaagaucaucaccaucggcagcgugagccugaccaucagcaccaucugcuucuucaugcagaucgccauccugaucaccaccgugacccugcacuucaagcaguacgaguucaacagcccccccaacaaccaggugaugcugugcgagcccaccaucaucgagagaaacaucaccgagaucguguaccugaccaacaccaccaucgagaaggagaucugccccaagcccgccgaguacagaaacuggagcaagccccagugcggcaucaccggcuucgcccccuucagcaaggacaacagcaucagacugagcgccggcggcgacaucugggugaccagagagcccuacgugagcugcgaccccgacaagugcuaccaguucgcccugggccagggcaccacccugaacaacgugcacagcaacaacaccgugagagacagaacccccuacagaacccugcugaugaacgagcugggcgugcccuuccaccugggcaccaagcaggugugcaucgccuggagcagcagcagcugccacgacggcaaggccuggcugcacgugugcaucaccggcgacgacaagaacgccaccgccagcuucaucuacaacggcagacugguggacagcguggugagcuggagcaaggagauccugagaacccaggagagcgagugcgugugcaucaacggcaccugcaccguggugaugaccgacggcagcgccagcggcaaggccgacaccaagauccuguucaucgaggagggcaagaucgugcacaccagcacccugagcggcagcgcccagcacguggaggagugcagcugcuaccccagauaccccggcgugagaugcgugugcagagacaacuggaagggcagcaacagacccaucguggacaucaacaucaaggaccacagcaucgugagcagcuacgugugcagcggccuggugggcgacacccccagaaagaacgacagcagcagcagcagccacugccuggaccccaacaacgaggagggcggccacggcgugaagggcugggccuucgacgacggcaacgacguguggaugggcagaaccaucaacgagaccagcagacugggcuacgagaccuucaaggugaucgagggcuggagcaaccccaagagcaagcugcagaucaacagacaggugaucguggacagaggcgacagaagcggcuacagcggcaucuucagcguggagggcaagagcugcgugaacagaugcuucuacguggagcugaucagaggcagaaaggaggagaccgaggugcuguggaccagcaacagcaucgugguguucugcggcaccagcggcaccuacggcaccggcagcuggcccgacggcgccgaccugaaccugaugcccaucuga

SEQ ID NO: 183920 - RNA, 1410 nt, Artificial Sequence; identical to SEQ ID NO: 182206
  derived and/or modified CDS sequence (opt4) from neuraminidase__InfluenzaA__AGV99112

SEQ ID NO: 183921 - RNA, 1410 nt, Artificial Sequence; identical to SEQ ID NO: 182206
  derived and/or modified CDS sequence (opt4) from neuraminidase__InfluenzaA__AGV99124

SEQ ID NO: 183922 - RNA, 1410 nt, Artificial Sequence; identical to SEQ ID NO: 182206
  derived and/or modified CDS sequence (opt4) from neuraminidase__InfluenzaA__AGV99136

SEQ ID NO: 183923 - RNA, 1410 nt, Artificial Sequence; identical to SEQ ID NO: 182206
  derived and/or modified CDS sequence (opt4) from neuraminidase__InfluenzaA__AGV99148

SEQ ID NO: 183924 - RNA, 1410 nt, Artificial Sequence; identical to SEQ ID NO: 182206
  derived and/or modified CDS sequence (opt4) from neuraminidase__InfluenzaA__AGV99160

SEQ ID NO: 183925 - RNA, 1410 nt, Artificial Sequence; identical to SEQ ID NO: 182206
  derived and/or modified CDS sequence (opt4) from neuraminidase__InfluenzaA__AGV99172

SEQ ID NO: 183926 - RNA, 1410 nt, Artificial Sequence; identical to SEQ ID NO: 182206
  derived and/or modified CDS sequence (opt4) from neuraminidase__InfluenzaA__AGV99196

SEQ ID NO: 183927 - RNA, 1410 nt, Artificial Sequence; identical to SEQ ID NO: 182206
  derived and/or modified CDS sequence (opt4) from neuraminidase__InfluenzaA__AGV99208

SEQ ID NO: 183928 - RNA, 1410 nt, Artificial Sequence; identical to SEQ ID NO: 182206
  derived and/or modified CDS sequence (opt4) from neuraminidase__InfluenzaA__AGV99959

SEQ ID NO: 183929 - RNA, 1410 nt, Artificial Sequence; identical to SEQ ID NO: 183417
  derived and/or modified CDS sequence (opt4) from neuraminidase__InfluenzaA__AGW00005

SEQ ID NO: 183930 - RNA, 1410 nt, Artificial Sequence; identical to SEQ ID NO: 182206
  derived and/or modified CDS sequence (opt4) from neuraminidase__InfluenzaA__AGW00068

SEQ ID NO: 183931 - RNA, 1410 nt, Artificial Sequence
  derived and/or modified CDS sequence (opt4) from neuraminidase__InfluenzaA__AGW00080
augaaccccaaccagaagaucaucaccaucggcagcgugagccugaccaucagcaccaucugcuucuucaugcagaucgccauccugaucaccaccgugacccugcacuucaagcaguacgaguucgacagcccccccaacaaccaggugaugcugugcgagcccaccaucaucgagagaaacaucaccgagaucguguaccugaccaacaccaccaucgagaaggagaucugccccaagcccgccgaguacagaaacuggagcaagccccagugcggcaucaccggcuucgcccccuucagcaaggacaacagcaucagacugagcgccggcggcgacaucugggugaccagagagcccuacgugagcugcgaccccgacaagugcuaccaguucgcccugggccagggcaccacccugaacaacgugcacagcaacaacaccgugagagacagaacccccuacagaacccugcugaugaacgagcugggcgugcccuuccaccugggcaccaagcaggugugcaucgccuggagcagcagcagcugccacgacggcaaggccuggcugcacgugugcaucaccggcgacgacaagaacgccaccgccagcuucaucuacaacggcagacugguggacagcguggugagcuggagcaaggagauccugagaacccaggagagcgagugcgugugcaucaacggcaccugcaccguggugaugaccgacggcagcgccagcggcaaggccgacaccaagauccuguucaucgaggagggcaagaucgugcacaccagcacccugagcggcagcgcccagcacguggaggagugcagcugcuaccccagauaccccggcgugagaugcgugugcagagacaacuggaagggcagcaacagacccaucguggacaucaacaucaaggaccacagcaucgugagcagcuacgugugcagcggccuggugggcgacacccccagaaagaacgacagcagcagcagcagccacugccuggaccccaacaacgaggagggcggccacggcgugaagggcugggccuucgacgacggcaacgacguguggaugggcagaaccaucaacgagaccagcagacugggcuacgagaccuucaaggugaucgagggcuggagcaaccccaagagcaagcugcagaucaacagacaggugaucguggacagaggcgacagaagcggcuacagcggcaucuucagcguggagggcaagagcugcaucaacagaugcuucuacguggagcugaucagaggcagaaaggaggagaccgaggugcuguggaccagcaacagcaucgugguguucugcggcaccagcggcaccuacggcaccggcagcuggcccgacggcgccgaccugaaccugaugcccaucuga

SEQ ID NO: 183932 - RNA, 1410 nt, Artificial Sequence
  derived and/or modified CDS sequence (opt4) from neuraminidase__InfluenzaA__AGW00104
augaaccccaaccagaagaucaucaccaucggcagcgugagccugaccaucagcaccaucugcuucuucaugcagaucgccauccugaucaccaccgugacccugcacuucaagcaguacgaguucaacagcccccccaacaaccaggugaugcugugcgagcccaccaucaucgagagaaacaucaccgagaucguguaccugaccaacaccaccaucgagaaggagaucugccccaagcccgccgaguacagaaacuggagcaagccccagugcggcaucaccggcuucgcccccuucagcaaggacaacagcaucagacugagcgccggcggcgacaucugggugaccagagagcccuacgugagcugcgaccccgacaagugcuaccaguucgcccugggccagggcaccacccugaacaacgugcacagcaacaacaccgugagagacagaacccccuacagaacccugcugaugaacgagcugggcgugcccuuccaccugggcaccaagcaggugugcaucgccuggagcagcagcagcugccacgacggcaaggccuggcugcacgugugcaucaccggcgacgacaagaacgccaccgccagcuucaucuacaacggcagacugguggacagcguggugagcuggagcaaggagauccugagaacccaggagagcgagugcgugugcaucaacggcaccugcaccguggugaugaccgacggcagcgccagcggcgaggccgacaccaagauccuguucaucgaggagggcaagaucgugcacaccagcacccugagcggcagcgcccagcacguggaggagugcagcugcuaccccagauaccccggcgugagaugcgugugcagagacaacuggaagggcagcaacagacccaucguggacaucaacaucaaggaccacagcaucgugagcagcuacgugugcagcggccuggugggcgacacccccagaaagaacgacagcagcagcagcagccacugccuggaccccaacaacgaggagggcggccacggcgugaagggcugggccuucgacgacggcaacgacguguggaugggcagaaccaucaacgagaccagcagacugggcuacgagaccuucaaggugaucgagggcuggagcaaccccaagagcaagcugcagaucaacagacaggugaucguggacagaggcgacagaagcggcuacagcggcaucuucagcguggagggcaagagcugcaucaacagaugcuucuacguggagcugaucagaggcagaaaggaggagaccgaggugcuguggaccagcaacagcaucgugguguucugcggcaccagcggcaccuacggcaccggcagcuggcccgacggcgccgaccugaaccugaugcccaucuga

SEQ ID NO: 183933 - RNA, 1410 nt, Artificial Sequence; identical to SEQ ID NO: 183931
  derived and/or modified CDS sequence (opt4) from neuraminidase__InfluenzaA__AGW00116

SEQ ID NO: 183934 - RNA, 1410 nt, Artificial Sequence; identical to SEQ ID NO: 183931
  derived and/or modified CDS sequence (opt4) from neuraminidase__InfluenzaA__AGW00128

SEQ ID NO: 183935 - RNA, 1410 nt, Artificial Sequence; identical to SEQ ID NO: 182206
  derived and/or modified CDS sequence (opt4) from neuraminidase__InfluenzaA__AGW00140

SEQ ID NO: 183936 - RNA, 1410 nt, Artificial Sequence; identical to SEQ ID NO: 182206
  derived and/or modified CDS sequence (opt4) from neuraminidase__InfluenzaA__AGW00152

SEQ ID NO: 183937 - RNA, 1410 nt, Artificial Sequence; identical to SEQ ID NO: 183931
  derived and/or modified CDS sequence (opt4) from neuraminidase__InfluenzaA__AGW00164

SEQ ID NO: 183938 - RNA, 1410 nt, Artificial Sequence; identical to SEQ ID NO: 182206
  derived and/or modified CDS sequence (opt4) from neuraminidase__InfluenzaA__AGW00176

SEQ ID NO: 183939 - RNA, 1410 nt, Artificial Sequence; identical to SEQ ID NO: 182206
  derived and/or modified CDS sequence (opt4) from neuraminidase__InfluenzaA__AGW00188

SEQ ID NO: 183940 - RNA, 1410 nt, Artificial Sequence; identical to SEQ ID NO: 182206
  derived and/or modified CDS sequence (opt4) from neuraminidase__InfluenzaA__AGW00712

SEQ ID NO: 183941 - RNA, 1410 nt, Artificial Sequence; identical to SEQ ID NO: 182206
  derived and/or modified CDS sequence (opt4) from neuraminidase__InfluenzaA__AGW00724

SEQ ID NO: 183942 - RNA, 1410 nt, Artificial Sequence
  derived and/or modified CDS sequence (opt4) from neuraminidase__InfluenzaA__AGW00736
augaaccccaaccagaagaucaucaccaucggcagcgugagccugaccaucagcaccaucugcuucuucaugcagaucgccauccugaucaccaccgugacccugcacuucaagcaguacgaguucaacagcccccccaacaaccagaugaugcugugcgagcccaccaucaucgagagaaacaucaccgagaucguguaccugaccaacaccaccaucgagaaggagaucugccccaagcccgccgaguacagaaacuggagcaagccccagugcggcaucaccggcuucgcccccuucagcaaggacaacagcaucagacugagcgccggcggcgacaucugggugaccagagagcccuacgugagcugcgaccccgacaagugcuaccaguucgcccugggccagggcaccacccugaacaacgugcacagcaacaacaccgugagagacagaacccccuacagaacccugcugaugaacgagcugggcgugcccuuccaccugggcaccaagcaggugugcaucgccuggagcagcagcagcugccacgacggcaaggccuggcugcacgugugcaucaccggcgacgacaagaacgccaccgccagcuucaucuacaacggcagacugguggacagcguggugagcuggagcaaggagauccugagaacccaggagagcgagugcgugugcaucaacggcaccugcaccguggugaugaccgacggcagcgccagcggcaaggccgacaccaagauccuguucaucgaggagggcaagaucgugcacaccagcacccugagcggcagcgcccagcacguggaggagugcagcugcuaccccagauaccccggcgugagaugcgugugcagagacaacuggaagggcagcaacagacccaucguggacaucaacaucaaggaccacagcaucgugagcagcuacgugugcagcggccuggugggcgacacccccagaaagaacgacagcagcagcagcagccacugccuggaccccaacaacgaggagggcggccacggcgugaagggcugggccuucgacgacggcaacgacguguggaugggcagaaccaucaacgagaccagcagacugggcuacgagaccuucaaggugaucgagggcuggagcgaccccaagagcaagcugcagaucaacagacaggugaucguggacagaggcgacagaagcggcuacagcggcaucuucagcguggagggcaagagcugcaucaacagaugcuucuacguggagcugaucagaggcagaaaggaggagaccgaggugcuguggaccagcaacagcaucgugguguucugcggcaccagcggcaccuacggcaccggcagcuggcccgacggcgccgaccugaaccugaugcccaucuga

SEQ ID NO: 183943 - RNA, 1410 nt, Artificial Sequence
  derived and/or modified CDS sequence (opt4) from neuraminidase__InfluenzaA__AGW00748
augaaccccaaccagaagaucaucaccaucggcagcgugagccugaccaucagcaccaucugcuucuucaugcagaucgccauccugaucaccaccgugacccugcacuucaagcaguacgaguucaacagcccccccaacaaccaggugaugcugugcgagcccaccaucaucgagagaaacaucaccgagaucguguaccugaccaacaccaccaucgagaaggagaucugccccaagcccgccgaguacagaaacuggagcaagccccagugcggcaucaccggcuucgcccccuucagcaaggacaacagcaucagacugagcgccggcggcgacaucugggugaccagagagcccuacgugagcugcgaccccgacaagugcuaccaguucgcccugggccagggcaccacccugaacaacaugcacagcaacaacaccgugagagacagaacccccuacagaacccugcugaugaacgagcugggcgugcccuuccaccugggcaccaagcaggugugcaucgccuggagcagcagcagcugccacgacggcaaggccuggcugcacgugugcaucaccggcgacgacaagaacgccaccgccagcuucaucuacaacggcagacugguggacagcguggugagcuggagcaaggagauccugagaacccaggagagcgagugcgugugcaucaacggcaccugcaccguggugaugaccgacggcagcgccagcggcaaggccgacaccaagauccuguucaucgaggagggcaagaucgugcacaccagcacccugagcggcagcgcccagcacguggaggagugcagcugcuaccccagauaccccggcgugagaugcgugugcagagacaacuggaagggcagcaacagacccaucguggacaucaacaucaaggaccacagcaucgugagcagcuacgugugcagcggccuggugggcgacacccccagaaagaacgacagcagcagcagcagccacugccuggaccccaacaacgaggagggcggccacggcgugaagggcugggccuucgacgacggcaacgacguguggaugggcagaaccaucaacgagaccagcagacugggcuacgagaccuucaaggugaucgagggcuggagcaaccccaagagcaagcugcagaucaacagacaggugaucguggacagaggcgacagaagcggcuacagcggcaucuucagcguggagggcaagagcugcaucaacagaugcuucuacguggagcugaucagaggcagaaaggaggagaccgaggugcuguggaccagcaacagcaucgugguguucugcggcaccagcggcaccuacggcaccggcagcuggcccgacggcgccgaccugaaccugaugcccaucuga

SEQ ID NO: 183944 - RNA, 1410 nt, Artificial Sequence
  derived and/or modified CDS sequence (opt4) from neuraminidase__InfluenzaA__AGW00760
augaaccccaaccagaagaucaucaccaucggcagcgugagccugaccaucagcaccaucugcuucuucaugcagaucgccauccugaucaccaccgugacccugcacuucaagcaguacgaguucaacagcccccccaacaaccaggugaugcugugcgagcccaccaucaucgagagaaacaucaccgagaucguguaccugaccaacaccaccaucgagaaggagaucugccccaagcccgccgaguacagaaacuggagcaagccccagugcggcaucaccggcuucgcccccuucagcaaggacaacagcaucagacugagcgccggcggcgacaucugggugaccagagagcccuacgugagcugcgaccccgacaagugcuaccaguucgcccugggccagggcaccacccugaacaacgugcacagcaacaacaccgugagagacagaacccccuacagaacccugcugaugaacgagcugggcgugcccuuccaccugggcaccaagcaggugugcaucgccuggagcagcagcagcugccacgacggcaaggccuggcugcacgugugcaucaccggcgacgacaagaacgccaccgccagcuucaucuacaacggcagacugguggacagcguggugagcuggagcaaggagauccugagaacccaggagagcgagugcgugugcaucaacggcaccugcaccguggugaugaccgacggcagcgccagcggcaaggccgacaccaagauccuguucaucgaggagggcaagaucgugcacaccagcacccugagcggcagcgcccagcacguggaggagugcagcugcuaccccagauaccccggcgugagaugcgugugcagagacaacuggaagggcagcaacagacccaucguggacaucaacaucaaggaccacagcaucgugagcagcuacgugugcagcggccuggugggcgacacccccagaaagaacgacagcagcagcagcagccacugccuggaccccaacaacgaggagggcggccacggcgugaagggcugggccuucgacgacggcaacgacguguggaugggcagaaccaucaacgagaccagcagacugggcuacgagaccuucaaggugaucgagggcuggagcaaccccaagagcaagcugcaggugaacagacaggugaucguggacagaggcgacagaagcggcuacagcggcaucuucagcguggagggcaagagcugcaucaacagaugcuucuacguggagcugaucagaggcagaaaggaggagaccgaggugcuguggaccagcaacagcaucgugguguucugcggcaccagcggcaccuacggcaccggcagcuggcccgacggcgccgaccugaaccugaugcccaucuga

SEQ ID NO: 183945 - RNA, 1410 nt, Artificial Sequence; identical to SEQ ID NO: 182206
  derived and/or modified CDS sequence (opt4) from neuraminidase__InfluenzaA__AGW00784

SEQ ID NO: 183946 - RNA, 1410 nt, Artificial Sequence; identical to SEQ ID NO: 182206
  derived and/or modified CDS sequence (opt4) from neuraminidase__InfluenzaA__AGW00796

SEQ ID NO: 183947 - RNA, 1410 nt, Artificial Sequence; identical to SEQ ID NO: 183931
  derived and/or modified CDS sequence (opt4) from neuraminidase__InfluenzaA__AGW00808

SEQ ID NO: 183948 - RNA, 1410 nt, Artificial Sequence; identical to SEQ ID NO: 183435
  derived and/or modified CDS sequence (opt4) from neuraminidase__InfluenzaA__AGW00820

SEQ ID NO: 183949 - RNA, 1410 nt, Artificial Sequence; identical to SEQ ID NO: 182206
  derived and/or modified CDS sequence (opt4) from neuraminidase__InfluenzaA__AGW00832

SEQ ID NO: 183950 - RNA, 1410 nt, Artificial Sequence
  derived and/or modified CDS sequence (opt4) from neuraminidase__InfluenzaA__AGW00844
augaaccccaaccagaagaucaucaccaucggcagcgugagccugaccaucagcaccaucugcuucuucaugcagaucgccauccugaucaccaccgugacccugcacuucaagcaguacgaguucaacuucccccccaacaaccaggugaugcugugcgagcccaccaucaucgagagaaacaucaccgagaucguguaccugaccaacaccaccaucgagaaggagaucugccccaagcccgccgaguacagaaacuggagcaagccccagugcggcaucaccggcuucgcccccuucagcaaggacaacagcaucagacugagcgccggcggcgacaucugggugaccagagagcccuacgugagcugcgaccccgacaagugcuaccaguucgcccugggccagggcaccacccugaacaacgugcacagcaacaacaccgugagagacagaacccccuacagaacccugcugaugaacgagcugggcgugcccuuccaccugggcaccaagcaggugugcaucgccuggagcagcagcagcugccacgacggcaaggccuggcugcacgugugcaucaccggcgacgacaagaacgccaccgccagcuucaucuacaacggcagacugguggacagcguggugagcuggagcaaggagauccugagaacccaggagagcgagugcgugugcaucaacggcaccugcaccguggugaugaccgacggcagcgccagcggcaaggccgacaccaagauccuguucaucgaggagggcaagaucgugcacaccagcacccugagcggcagcgcccagcacguggaggagugcagcugcuaccccagauaccccggcgugagaugcgugugcagagacaacuggaagggcagcaacagacccaucguggacaucaacaucaaggaccacagcaucgugagcagcuacgugugcagcggccuggugggcgacacccccagaaagaacgacagcagcagcagcagccacugccuggaccccaacaacgaggagggcggccacggcgugaagggcugggccuucgacgacggcaacgacguguggaugggcagaaccaucaacgagaccagcagacugggcuacgagaccuucaaggugaucgagggcuggagcaaccccaagagcaagcugcagaucaacagacaggugaucguggacagaggcgacagaagcggcuacagcggcaucuucagcguggagggcaagagcugcaucaacagaugcuucuacguggagcugaucagaggcagaaaggaggagaccgaggugcuguggaccagcaacagcaucgugguguucugcggcaccagcggcaccuacggcaccggcagcuggcccgacggcgccgaccugaaccugaugcccaucuga

SEQ ID NO: 183951 - RNA, 1410 nt, Artificial Sequence; identical to SEQ ID NO: 183943
  derived and/or modified CDS sequence (opt4) from neuraminidase__InfluenzaA__AGW00868

SEQ ID NO: 183952 - RNA, 1410 nt, Artificial Sequence
  derived and/or modified CDS sequence (opt4) from neuraminidase__InfluenzaA__AGW00880
augaaccccaaccagaagaucaucaccaucggcagcgugagccugaccaucagcaccaucugcuucuucaugcagaucgccauccugaucaccaccgugacccugcacuucaagcaguacgaguucaacagcccccccaacaaccaggugaugcugugcgagcccaccaucaucgagagaaacaucaccgagaucguguaccugaccaacaccaccaucgagaaggagaucugccccaagcccgccgaguacagaaacuggagcaagccccagugcgacaucaccggcuucgcccccuucagcaaggacaacagcaucagacugagcgccggcggcgacgugugggugaccagagagcccuacgugagcugcgaccccgacaagugcuaccaguucgcccugggccagggcaccacccugaacaacgugcacagcaacaacaccgugagagacagaacccccuacagaacccugcugaugaacgagcugggcgugcccuuccaccugggcaccaagcaggugugcaucgccuggagcagcagcagcugccacgacggcaaggccuggcugcacgugugcaucaccggcgacgacaagaacgccaccgccagcuucaucuacaacggcaagcugguggacagcguggugagcuggagcaaggagauccugagaacccaggagagcgagugcgugugcaucaacggcaccugcaccguggugaugaccgacggcagcgccagcggcaaggccgacaccaagauccuguucaucgaggagggcaagaucgugcacaccagcacccugagcggcagcgcccagcacguggaggagugcagcugcuaccccagauaccccgacgugagaugcgugugcagagacaacuggaagggcagcaacagacccaucguggacaucaacaucaaggaccacagcaucgugagcagauacgugugcagcggccuggugggcgacacccccagaaagaacgacagcagcagcagcagccacugccuggaccccaacaacgaggagggcggccacggcgugaagggcugggccuucgacgacggcaacgacguguggaugggcagaaccaucaacgagaccagcagacugggcuacgagaccuucaaggugaucgagggcuggagcaaccccaagagcaagcugcagaucaacagacaggugaucguggacagaggcgacagaagcggcuacagcggcaucuucagcguggagggcaagagcugcaucaacagaugcuucuacguggagcugaucagaggcagaaaggaggagaccgaggugcuguggaccagcaacagcaucgugguguucugcggcaccagcggcaccuacggcaccggcagcuggcccgacggcgccgaccugaaccugaugcccaucuga

SEQ ID NO: 183953 - RNA, 1410 nt, Artificial Sequence
  derived and/or modified CDS sequence (opt4) from neuraminidase__InfluenzaA__AGW00892
augaaccccaaccagaagaucaucaccaucggcagcgugagccugaccaucagcaccaucugcuucuucaugcagaucgccauccugaucaccaccgugacccugcacuucaagcaguacgaguucaaccccccccccaacaaccaggugaugcugugcgagcccaccaucaucgagagaaacaucaccgagaucguguaccugaccaacaccaccaucgagaaggagaucugccccaagcccgccgaguacagaaacuggagcaagccccagugcggcaucaccggcuucgcccccuucagcaaggacaacagcaucagacugagcgccggcggcgacaucugggugaccagagagcccuacgugagcugcgaccccgacaagugcuaccaguucgcccugggccagggcaccacccugaacaacgugcacagcaacaacaccgugagagacagaacccccuacagaacccugcugaugaacgagcugggcgugcccuuccaccugggcaccaagcaggugugcaucgccuggagcagcagcagcugccacgacggcaaggccuggcugcacgugugcaucaccggcgacgacaagaacgccaccgccagcuucaucuacaacggcagacugguggacagcguggugagcuggagcaaggagauccugagaacccaggagagcgagugcgugugcaucaacggcaccugcaccguggugaugaccgacggcagcgccagcggcaaggccgacaccaagauccuguucaucgaggagggcaagaucgugcacaccagcacccugagcggcagcgcccagcacguggaggagugcagcugcuaccccagauaccccggcgugagaugcgugugcagagacaacuggaagggcagcaacagacccaucguggacaucaacaucaaggaccacagcaucgugagcagcuacgugugcagcggccuggugggcgacacccccagaaagaacgacagcagcagcagcagccacugccuggaccccaacaacgaggagggcggccacggcgugaagggcugggccuucgacgacggcaacgacguguggaugggcagaaccaucaacgagaccagcagacugggcuacgagaccuucaaggugaucgagggcuggagcaaccccaagagcaagcugcagaugaacagacaggugaucguggacagaggcgacagaagcggcuacagcggcaucuucagcguggagggcaagagcugcaucaacagaugcuucuacguggagcugaucagaggcagaaaggaggagaccgaggugcuguggaccagcaacagcaucgugguguucugcggcaccagcggcaccuacggcaccggcagcuggcccgacggcgccgaccugaaccugaugcccaucuga

SEQ ID NO: 183954 - RNA, 1410 nt, Artificial Sequence
  derived and/or modified CDS sequence (opt4) from neuraminidase__InfluenzaA__AGW00904
augaaccccaaccagaagaucaucaccaucggcagcgugagccugaccaucagcaccaucugcuucuucaugcagaucgccauccugaucaccaccgugacccugcacuucaagcaguacgaguucaacagcccccccaacaaccaggugaugcugugcgagcccaccaucaucgagagaaacaucaccgagaucguguaccugaccaacaccaccaucgagaaggagaucugccccaagcccgccgaguacagaaacuggagcaagccccagugcggcaucaccggcuucgcccccuucagcaaggacaacagcaucagacugagcgccggcggcgacaucugggugaccagagagcccuacgugagcugcggccccgacaagugcuaccaguucgcccugggccagggcaccacccugaacaacaugcacagcaacaacaccgugagagacagaacccccuacagaacccugcugaugaacgagcugggcgugcccuuccaccugggcaccaagcaggugugcaucgccuggagcagcagcagcugccacgacggcaaggccuggcugcacgugugcaucaccggcgacgacaagaacgccaccgccagcuucaucuacaacggcagacugguggacagcguggugagcuggagcaaggagauccugagaacccaggagagcgagugcgugugcaucaacggcaccugcaccguggugaugaccgacggcagcgccagcggcaaggccgacaccaagauccuguucaucgaggagggcaagaucgugcacaccagcacccugagcggcagcgcccagcacguggaggagugcagcugcuaccccagauaccccggcgugagaugcgugugcagagacaacuggaagggcagcaacagacccaucguggacaucaacaucaaggaccacagcaucgugagcagcuacgugugcagcggccuggugggcgacacccccagaaagaacgacagcagcagcagcagccacugccuggaccccaacaacgaggagggcggccacggcgugaagggcugggccuucgacgacggcaacgacguguggaugggcagaaccaucaacgagaccagcagacugggcuacgagaccuucaaggugaucgagggcuggagcaaccccaagagcaagcugcagaucaacagacaggugaucguggacagaggcgacagaagcggcuacagcggcaucuucagcguggagggcaagagcugcaucaacagaugcuucuacguggagcugaucagaggcagaaaggaggagaccgaggugcuguggaccagcaacagcaucgugguguucugcggcaccagcggcaccuacggcaccggcagcuggcccgacggcgccgaccugaaccugaugcccaucuga

SEQ ID NO: 183955 - RNA, 1410 nt, Artificial Sequence
  derived and/or modified CDS sequence (opt4) from neuraminidase__InfluenzaA__AGW00916
augaaccccaaccagaagaucaucaccaucggcagcgugagccugaccaucagcaccaucugcuucuucaugcagaucgccauccugaucaccaccgugacccugcacuucaagcaguacgaguucaacagcccccccaacaaccaggugaugcugugcgagcccaccaucaucgagagaaacaucaccgagaucguguaccugaccaacaccaccaucgagaaggagaucugccccaagcccgccgaguacagaaacuggagcaagccccagugcggcaucaccggcuucgcccccuucagcaaggacaacagcaucagacugagcgccggcggcgacaucugggugaccagagagcccuacgugagcugcgaccccgacaagugcuaccaguucgcccugggccagggcaccacccugaacaacaugcacagcaacaacaccgugugcgacagaacccccuacagaacccugcugaugaacgagcugggcgugcccuuccaccugggcaccaagcaggugugcaucgccuggagcagcagcagcugccacgacggcaaggccuggcugcacgugugcaucaccggcgacgacaagaacgccaccgccagcuucaucuacaacggcagacugguggacagcguggugagcuggagcaaggagauccugagaacccaggagagcgagugcgugugcaucaacggcaccugcaccguggugaugaccgacggcagcgccagcggcaaggccgacaccaagauccuguucaucgaggagggcaagaucgugcacaccagcacccugagcggcagcgcccagcacguggaggagugcagcugcuaccccagauaccccggcgugagaugcgugugcagagacaacuggaagggcagcaacagacccaucguggacaucaacaucaaggaccacagcaucgugagcagcuacgugugcagcggccuggugggcgacacccccagaaagaacgacagcagcagcagcagccacugccuggaccccaacaacgaggagggcggccacggcgugaagggcugggccuucgacgacggcaacgacguguggaugggcagaaccaucaacgagaccagcagacugggcuacgagaccuucaaggugaucgagggcuggagcaaccccaagagcaagcugcagaucaacagacaggugaucguggacagaggcgacagaagcggcuacagcggcaucuucagcguggagggcaagagcugcaucaacagaugcuucuacguggagcugaucagaggcagaaaggaggagaccgaggugcuguggaccagcaacagcaucgugguguucugcggcaccagcggcaccuacggcaccggcagcuggcccgacggcgccgaccugaaccugaugcccaucuga

SEQ ID NO: 183956 - RNA, 1410 nt, Artificial Sequence; identical to SEQ ID NO: 183931
  derived and/or modified CDS sequence (opt4) from neuraminidase__InfluenzaA__AGW00934

SEQ ID NO: 183957 - RNA, 1410 nt, Artificial Sequence
  derived and/or modified CDS sequence (opt4) from neuraminidase__InfluenzaA__AGW01247
augaaccccaaccagaagaucaucaccaucggcagcgugagccugaccaucagcaccaucugcuucuucaugcagaucgccauccugaucaccaccgugacccugcacuucaagcaguacgaguucaacagcccccccaacaaccaggugaugcugugcgagcccaccaucaucgagagaaacaucaccgagaucguguaccugaccaacaccaccaucgagaaggagaucugccccaagcccgccgaguacagaaacuggagcaagccccagugcggcaucaccggcuucgcccccuucagcaaggacaacagcaucagacugagcgccggcggcgacaucugggugaccagagagcccuacgugagcugcgaccccgacaagugcuaccaguucgcccugggccagggcaccacccugaacaacgugcacagcaacaacaccgugagagacagaacccccuacagaacccugcugaugaacgagcugggcgugcccuuccaccugggcaccaagcaggugugcaucgccuggagcagcagcagcugccacgacggcaaggccuggcugcacgugugcaucaccggcgacgacaagaacgccaccgccagcuucaucuacaacggcagacugguggacagcguggugagcuggagcaaggagauccugagaacccaggagagcgagugcgugugcaucaacggcaccugcaccguggugaugaccgacggcagcgccagcggcaaggccgacaccaagauccuguucaucgaggagggcaagaucgugcacaccagcacccugagcggcagcgcccagcacguggaggagugcagcugcuaccccagauaccccggcgugagaugcgugugcagagacaacuggaagggcagcaacagacccaucguggacaucaacaucaaggaccacagcaucgugagcagcuacgugugcagcggccuggugggcgacacccccagaaagaaggacagcagcagcagcagccacugccuggaccccaacaacgaggagggcggccacggcgugaagggcugggccuucgacgacggcaacgacguguggaugggcagaaccaucaacgagaccagcagacugggcuacgagaccuucaaggugaucgagggcuggagcaaccccaagagcaagcugcagaucaacagacaggugaucguggacagaggcgacagaagcggcuacagcggcaucuucagcguggagggcaagagcugcaucaacagaugcuucuacguggagcugaucagaggcagaaaggaggagaccgaggugcuguggaccagcaacagcaucgugguguucugcggcaccagcggcaccuacggcaccggcagcuggcccgacggcgccgaccugaaccugaugcccaucuga

SEQ ID NO: 183958 - RNA, 1410 nt, Artificial Sequence; identical to SEQ ID NO: 182206
  derived and/or modified CDS sequence (opt4) from neuraminidase__InfluenzaA__AGW01259

SEQ ID NO: 183959 - RNA, 1410 nt, Artificial Sequence; identical to SEQ ID NO: 183943
  derived and/or modified CDS sequence (opt4) from neuraminidase__InfluenzaA__AGW01298

SEQ ID NO: 183960 - RNA, 1410 nt, Artificial Sequence; identical to SEQ ID NO: 183435
  derived and/or modified CDS sequence (opt4) from neuraminidase__InfluenzaA__AGW01322

SEQ ID NO: 183961 - RNA, 1410 nt, Artificial Sequence
  derived and/or modified CDS sequence (opt4) from neuraminidase__InfluenzaA__AGW01334
augaaccccaaccagaagaucaucaccaucggcagcgugagccugaccaucagcaccaucugcuucuucaugcagaucgccauccugaucaccaccgugacccugcacuucaagcaguacgaguucaacagcccccccaacaaccaggugaugcugugcgagcccaccaucaucgagagaaacaucaccgagaucguguaccugaccaacaccaccaucgagaaggagaucugccccaagcccgccgaguacagaaacuggagcaagccccagugcggcaucaccggcuucgcccccuucagcaaggacaacagcaucagacugagcgccggcggcgacaucugggugaccagagagcccuacgugagcugcgaccccgacaagugcuaccaguucgcccugggccagggcaccacccugaacaacgugcacagcaacaacaccgugagagacagaacccccuacagaacccugcugaugaacgagcugggcgugcccuuccaccugggcaccaagcaggugugcaucgccuggagcagcagcagcugccacgacggcaaggccuggcugcacgugugcaucaccggcgacgacaagaacgccaccgccagcuucaucuacaacggcagacugguggacagcguggugagcuggagcaaggagauccugagaacccaggagagcgagugcgugugcaucaacggcaccugcaccguggugaugaccgacggcagcgccagcggcaaggccgacaccaagauccuguucaucgaggagggcaagaucgugcacaccagcacccugagcggcagcgcccagcacguggaggagugcagcugcuaccccagauaccccggcgugagaugcgugugcagagacaacuggaagggcagcaacagacccaucguggacaucaacaucaaggaccacagcaucgugagcagcuacgugugcagcggccuggugggcgacacccccagaaagaacgacagcagcagcagcagccacugccuggaccccaacaacgaggagggcggccacggcgugaagggcugggccuucgacgacggcaacgacguguggaugggcagaaccaucaacgagaccagcagacugggcuacgagaccuucaaggugaucgagggcuggagcaaccccaagagcaagcugcagaucaacagacaggugaucguggacagaggcgacagaagcggcuacagcggcaucuucagcguggagggcaagagcugcaucaacagaugcuucuacguggagcugaucagaggcagaaaggaggaggccgaggugcuguggaccagcaacagcaucgugguguucugcggcaccagcggcaccuacggcaccggcagcuggcccgacggcgccgaccugaaccugaugcccaucuga

SEQ ID NO: 183962 - RNA, 1410 nt, Artificial Sequence; identical to SEQ ID NO: 182206
  derived and/or modified CDS sequence (opt4) from neuraminidase__InfluenzaA__AGW01346

SEQ ID NO: 183963 - RNA, 1410 nt, Artificial Sequence
  derived and/or modified CDS sequence (opt4) from neuraminidase__InfluenzaA__AGW01358
augaaccccaaccagaagaucaucaccaucggcagcgugagccugaccaucagcaccaucugcuucuucaugcagaucgccauccugaucaccaccgugacccugcacuucaagcaguacgaguucaacagcccccccaacaaccaggugaugcugugcgagcccaccaucaucgagagaaacaucaccgagaucguguaccugaccaacaccaccaucgagaaggagaucugccccaagcccaccgaguacagaaacuggagcaagccccagugcggcaucaccggcuucgcccccuucagcaaggacaacagcaucagacugagcgccggcggcgacaucugggugaccagagagcccuacgugagcugcgaccccgacaagugcuaccaguucgcccugggccagggcaccacccugaacaacgugcacagcaacaacaccgugagagacagaacccccuacagaacccugcugaugaacgagcugggcgugcccuuccaccugggcaccaagcaggugugcaucgccuggagcagcagcagcugccacgacggcaaggccuggcugcacgugugcaucaccggcgacgacaagaacgccaccgccagcuucaucuacaacggcagacugguggacagcguggugagcuggagcaaggagauccugagaacccaggagagcgagugcgugugcaucaacggcaccugcaccguggugaugaccgacggcagcgccagcggcaaggccgacaccaagauccuguucaucgaggagggcaagaucgugcacaccagcacccugagcggcagcgcccagcacguggaggagugcagcugcuaccccagauaccccggcgugagaugcgugugcagagacaacuggaagggcagcaacagacccaucguggacaucaacaucaaggaccacagcaucgugagcagcuacgugugcagcggccuggugggcgacacccccagaaagaacgacagcagcagcagcagccacugccuggaccccaacaacgaggagggcggccacggcgugaagggcugggccuucgacgacggcaacgacguguggaugggcagaaccaucaacgagaccagcagacugggcuacgagaccuucaaggugaucgagggcuggagcaaccccaagagcaagcugcagaucaacagacaggugaucguggacagaggcgacagaagcggcuacagcggcaucuucagcguggagggcaagagcugcaucaacagaugcuucuacguggagcugaucagaggcagaaaggaggagaccgaggugcuguggaccagcaacagcaucgugguguucugcggcaccagcggcaccuacggcaccggcagcuggcccgacggcgccgaccugaaccugaugcccaucuga

SEQ ID NO: 183964 - RNA, 1410 nt, Artificial Sequence; identical to SEQ ID NO: 182206
  derived and/or modified CDS sequence (opt4) from neuraminidase__InfluenzaA__AGW01370

SEQ ID NO: 183965 - RNA, 1410 nt, Artificial Sequence; identical to SEQ ID NO: 182206
  derived and/or modified CDS sequence (opt4) from neuraminidase__InfluenzaA__AGW01382

SEQ ID NO: 183966 - RNA, 1410 nt, Artificial Sequence
  derived and/or modified CDS sequence (opt4) from neuraminidase__InfluenzaA__AGW01394
augaaccccaaccagaagaucaucaccaucggcagcgugagccugaccaucagcaccaucugcuucuucaugcagaucgccauccugaucaccaccgugacccugcacuucaagcaguacgaguucgacagcccccccaacaaccaggugaugcugugcgagcccaccaucaucgagagaaacaucaccgagaucguguaccugaccaacaccaccaucgagaaggagaucugccccaagcccgccgaguacagaaacuggagcaagccccagugcggcaucaccggcuucgcccccuucagcaaggacaacagcaucagacugagcgccggcggcgacaucugggugaccagagagcccuacgugagcugcgaccccgacaagugcuaccaguucgcccugggccagggcaccacccugaacaacgugcacagcaacaacaccgugagagacagaacccccuacagaacccugcugaugaacgagcugggcgugcccuuccaccugggcaccaagcaggugugcaucgccuggagcagcagcagcugccacgacggcaaggccuggcugcacgugugcaucaccggcgacgacaagaacgccaccgccagcuucaucuacaacggcagacugguggacagcaucgugagcuggagcaaggacauccugagaacccaggagagcgagugcgugugcaucaacggcaccugcaccguggugaugaccgacggcagcgccagcggcaaggccgacaccaagauccuguucaucgaggagggcaagaucgugcacaccagcacccugagcggcagcgcccagcacguggaggagugcagcugcuaccccagauaccccggcgugagaugcgugugcagagacaacuggaagggcagcaacagacccaucguggacaucaacaucaaggaccacagcaucgugagcagcuacgugugcagcggccuggugggcgacacccccagaaagaacgacagcagcagcagcagccacugccuggaccccaacaacgaggagggcggccacggcgugaagggcugggccuucgacgacggcaacgacguguggaugggcagaaccaucaacgagaccagcagacugggcuacgagaccuucaaggugaucgagggcuggagcaaccccaagagcaagcugcagaucaacagacaggugaucguggacagaggcgacagaagcggcuacagcggcaucuucagcguggagggcaagagcugcaucaacagaugcuucuacguggagcugaucagaggcagaaaggaggagaccgaggugcuguggaccagcaacagcaucgugguguucugcggcaccagcggcaccuacggcaccggcagcuggcccgacggcgccgaccugaaccugaugcccaucuga

SEQ ID NO: 183967 - RNA, 1410 nt, Artificial Sequence
  derived and/or modified CDS sequence (opt4) from neuraminidase__InfluenzaA__AGW01406
augaaccccaaccagaagaucaucaccaucggcagcgugagccugaccaucagcaccaucugcuucuucaugcagaucgccauccugaucaccaccgugacccugcacuucaagcaguacgaguucaacagcccccccaacaaccaggugaugcugugcgagcccaccaucaucgagagaaacaucaccgagaucguguaccugaccaacaccaccaucgagaaggagaucugccccaagcccgccgaguacagaaacuggagcaagccccagugcgacaucaccggcuucgcccccuucagcaaggacaacagcaucagacugagcgccggcggcgacaucugggugaccagagagcccuacgugagcugcgaccccgacaagugcuaccaguucgcccugggccagggcaccacccugaacaacaugcacagcaacaacaccgugagagacagaacccccuacagaacccugcugaugaacgagcugggcgugcccuuccaccugggcaccaagcaggugugcaucgccuggagcagcagcagcugccacgacggcaaggccuggcugcacgugugcaucaccggcgacgacaagaacgccaccgccagcuucaucuacaacggcagacugguggacagcguggugagcuggagcaaggagauccugagaacccaggagagcgagugcgugugcaucaacggcaccugcaccguggugaucaccgacggcagcgccagcggcaaggccgacaccaagauccuguucaucgaggagggcaagaucgugcacaccagcacccugagcggcagcgcccagcacguggaggagugcagcugcuaccccagauaccccggcgugagaugcgugugcagagacaacuggaagggcagcaacagacccaucguggacaucaacaucaaggaccacagcaucgugagcagcuacgugugcagcggccuggugggcgacacccccagaaagaacgacagcagcagcagcagccacugccuggaccccaacaacgaggagggcggccacggcgugaagggcugggccuucgacgacggcaacgacguguggaugggcagaaccaucaacgagaccagcagacugggcuacgagaccuucaaggugaucgagggcuggagcaaccccaagagcaagcugcagaucaacagacaggugaucguggacagaggcgacagaagcggcuacagcggcaucuucagcguggagggcaagagcugcaucaacagaugcuucuacguggagcugaucagaggcagaaaggaggagaccgaggugcuguggaccagcaacagcaucgugguguucugcggcaccagcggcaccuacggcaccggcagcuggcccgacggcgccgaccugaaccugaugcccaucuga

SEQ ID NO: 183968 - RNA, 1410 nt, Artificial Sequence
  derived and/or modified CDS sequence (opt4) from neuraminidase__InfluenzaA__AGW01418
augaaccccaaccagaagaucaucaccaucggcagcgugagccugaccaucagcaccaucugcuucuucaugcagaucgccauccugaucaccaccgugacccugcacuucaagcaguacgaguucaacagcccccccaacaaccaggugaugcugugcgagcccaccaucaucgagagaaacaucaccgagaucguguaccugaccaacaccaccaucgagaaggagaucugccccaagcccgccgaguacagaaacuggagcaagccccagugcggcaucaccggcuucgcccccuucagcaaggacaacagcaucagacugagcgccggcggcgacaucugggugaccagagagcccuacgugagcugcgaccccgacaagugcuaccaguucgcccugggccagggcaccacccugaacaacaugcacagcaacaacaccgugagagacagaacccccuacagaacccugcugaugaacgagcugggcgugcccuuccaccugggcaccaagcaggugugcaucgccuggagcagcagcagcugccacgacggcaaggccuggcugcacgugugcaucaccggcgacgacaagaacgccaccgccagcuucaucuacaacggcagacugguggacagcguggugagcuggagcaaggagauccugagaacccaggagagcgagugcgugugcaucaacggcaccugcaccguggugaugaccgacggcagcgccagcggcaaggccgacaccaagauccuguucaucgaggagggcaagaucgugcacaccagcacccugagcggcagcgcccagcacguggaggagugcagcugcuaccccagauaccccggcgugagaugcgugugcagagacaacuggaagggcagcaacagacccaucguggacaucaacaucaaggaccacagcaucgugagcagcuacgugugcagcggccuggugggcgacacccccagaaagaacgacagcagcagcagcagccacugccuggaccccaacaacgaggagggcggccacggcgugaagggcugggccuucgacgacggcaacgacguguggaugggcagaaccaucaacgagaccagcagacugggcuacgagaccuucaaggugaucgagggcuggagcaaccccaagagcaagcugcagaucaacagacaggugaucguggacagaggcgacagaagcggcuacagcggcaucuucagcguggagggcaagagcugcaucaacagaugcuucuacguggagcugaucagaggcagaaaggaggagaccggcgugcuguggaccagcaacagcaucgugguguucugcggcaccagcggcaccuacggcaccggcagcuggcccgacggcgccgaccugaaccugaugcccaucuga

SEQ ID NO: 183969 - RNA, 1410 nt, Artificial Sequence; identical to SEQ ID NO: 182206
  derived and/or modified CDS sequence (opt4) from neuraminidase__InfluenzaA__AGW01430

SEQ ID NO: 183970 - RNA, 1410 nt, Artificial Sequence; identical to SEQ ID NO: 182206
  derived and/or modified CDS sequence (opt4) from neuraminidase__InfluenzaA__AGW01442

SEQ ID NO: 183971 - RNA, 1410 nt, Artificial Sequence; identical to SEQ ID NO: 182206
  derived and/or modified CDS sequence (opt4) from neuraminidase__InfluenzaA__AGW01454

SEQ ID NO: 183972 - RNA, 1410 nt, Artificial Sequence; identical to SEQ ID NO: 183931
  derived and/or modified CDS sequence (opt4) from neuraminidase__InfluenzaA__AGW01466

SEQ ID NO: 183973 - RNA, 1410 nt, Artificial Sequence; identical to SEQ ID NO: 182206
  derived and/or modified CDS sequence (opt4) from neuraminidase__InfluenzaA__AGW01478

SEQ ID NO: 183974 - RNA, 1410 nt, Artificial Sequence
  derived and/or modified CDS sequence (opt4) from neuraminidase__InfluenzaA__AGW01490
augaaccccaaccagaagaucaucaccaucagcagcgugagccugaccaucagcaccaucugcuucuucaugcagaucgccauccugaucaccaccgugacccugcacuucaagcaguacgaguucaacagcccccccaacaaccaggugaugcugugcgagcccaccaucaucgagagaaacaucaccgagaucguguaccugaccaacaccaccaucgagaaggagaucugccccaagcccgccgaguacagaaacuggagcaagccccagugcggcaucaccggcuucgcccccuucagcaaggacaacagcaucagacugagcgccggcggcgacaucugggugaccagagagcccuacgugagcugcgaccccgacaagugcuaccaguucgcccugggccagggcaccacccugaacaacgugcacagcaacaacaccgugagagacagaacccccuacagaacccugcugaugaacgagcugggcgugcccuuccaccugggcaccaagcaggugugcaucgccuggagcagcagcagcugccacgacggcaaggccuggcugcacgugugcaucaccggcgacgacaagaacgccaccgccagcuucaucuacaacggcagacugguggacagcguggugagcuggagcaaggagauccugagaacccaggagagcgagugcgugugcaucaacggcaccugcaccguggugaugaccgacggcagcgccagcggcaaggccgacaccaagauccuguucaucgaggagggcaagaucgugcacaccagcacccugagcggcagcgcccagcacguggaggagugcagcugcuaccccagauaccccggcgugagaugcgugugcagagacaacuggaagggcagcaacagacccaucguggacaucaacaucaaggaccacagcaucgugagcagcuacgugugcagcggccuggugggcgacacccccagaaagaacgacagcagcagcagcagccacugccuggaccccaacaacgaggagggcggccacggcgugaagggcugggccuucgacgacggcaacgacguguggaugggcagaaccaucaacgagaccagcagacugggcuacgagaccuucaaggugaucgagggcuggagcaacagcaagagcaagcugcagaucaacagacaggugaucguggacagaggcgacagaagcggcuacagcggcaucuucagcguggagggcaagagcugcaucaacagaugcuucuacguggagcugaucagaggcagaaaggaggagaccgaggugcuguggaccagcaacagcaucgugguguucugcggcaccagcggcaccuacggcaccggcagcuggcccgacggcgccgaccugaaccugaugcccaucuga

SEQ ID NO: 183975 - RNA, 1410 nt, Artificial Sequence; identical to SEQ ID NO: 182206
  derived and/or modified CDS sequence (opt4) from neuraminidase__InfluenzaA__AGW01538

SEQ ID NO: 183976 - RNA, 1410 nt, Artificial Sequence; identical to SEQ ID NO: 183931
  derived and/or modified CDS sequence (opt4) from neuraminidase__InfluenzaA__AGW01562

SEQ ID NO: 183977 - RNA, 1410 nt, Artificial Sequence; identical to SEQ ID NO: 182206
  derived and/or modified CDS sequence (opt4) from neuraminidase__InfluenzaA__AGW01574

SEQ ID NO: 183978 - RNA, 1410 nt, Artificial Sequence; identical to SEQ ID NO: 182206
  derived and/or modified CDS sequence (opt4) from neuraminidase__InfluenzaA__AGW01586

SEQ ID NO: 183979 - RNA, 1410 nt, Artificial Sequence; identical to SEQ ID NO: 182206
  derived and/or modified CDS sequence (opt4) from neuraminidase__InfluenzaA__AGW01598

SEQ ID NO: 183980 - RNA, 1410 nt, Artificial Sequence; identical to SEQ ID NO: 183931
  derived and/or modified CDS sequence (opt4) from neuraminidase__InfluenzaA__AGW01610

SEQ ID NO: 183981 - RNA, 1410 nt, Artificial Sequence; identical to SEQ ID NO: 182206
  derived and/or modified CDS sequence (opt4) from neuraminidase__InfluenzaA__AGW01622

SEQ ID NO: 183982 - RNA, 1410 nt, Artificial Sequence; identical to SEQ ID NO: 182206
  derived and/or modified CDS sequence (opt4) from neuraminidase__InfluenzaA__AGW01634

SEQ ID NO: 183983 - RNA, 1410 nt, Artificial Sequence
  derived and/or modified CDS sequence (opt4) from neuraminidase__InfluenzaA__AGW01646
augaaccccaaccagaagaucaucaccaucggcagcgugagccugaccaucagcaccaucugcuucuucaugcagaucgccauccugaucaccaccgugacccugcacuucaagcaguacgaguucaacagcccccccaacaaccaggugaugcugugcgagcccaccaucaucgagagaaacaucaccgagaucguguaccugaccaacaccaccaucgagaaggagaucugccccaagcccgccgaguacagaaacuggagcaagccccagugcggcaucaccggcuucgcccccuucagcaaggacaacagcaucagacugagcgccggcggcgacaucugggugaccagagagcccuacgugagcugcgaccccgacaagugcuaccaguucgcccugggccagggcaccacccugaacaacgugcacagcaacaacaccgugagagacagaacccccuacagaacccugcugaugaacgagcugggcgugcccuuccaccugggcaccaagcaggugugcaucgccuggagcagcagcagcugccacgacggcaaggccuggcugcacgugugcaucaccggcgacgacaagaacgccaccgccagcuucaucuacaacggcagacugguggacagcguggugagcuggagcaaggagauccugagaacccaggagagcgagugcgugugcaucgacggcaccugcaccguggugaugaccgacggcagcgccagcggcaaggccgacaccaagauccuguucaucgaggagggcaagaucgugcacaccagcacccugagcggcagcgcccagcacguggaggagugcagcugcuaccccagauaccccggcgugagaugcgugugcagagacaacuggaagggcagcaacagacccaucguggacaucaacaucaaggaccacagcaucgugagcagcuacgugugcagcggccuggugggcgacacccccagaaagaacgacagcagcagcagcagccacugccuggaccccaacaacgaggagggcggccacggcgugaagggcugggccuucgacgacggcaacgacguguggaugggcagaaccaucaacgagaccagcagacugggcuacgagaccuucaaggugaucgagggcuggagcaaccccaagagcaagcugcagaucaacagacaggugaucguggacagaggcgacagaagcggcuacagcggcaucuucagcguggagggcaagagcugcaucaacagaugcuucuacguggagcugaucagaggcagaaaggaggagaccgaggugcuguggaccagcaacagcaucgugguguucugcggcaccagcggcaccuacggcaccggcagcuggcccgacggcgccgaccugaaccugaugcccaucuga

SEQ ID NO: 183984 - RNA, 1410 nt, Artificial Sequence; identical to SEQ ID NO: 182206
  derived and/or modified CDS sequence (opt4) from neuraminidase__InfluenzaA__AGW01670

SEQ ID NO: 183985 - RNA, 1410 nt, Artificial Sequence; identical to SEQ ID NO: 182206
  derived and/or modified CDS sequence (opt4) from neuraminidase__InfluenzaA__AGW01682

SEQ ID NO: 183986 - RNA, 1410 nt, Artificial Sequence; identical to SEQ ID NO: 183943
  derived and/or modified CDS sequence (opt4) from neuraminidase__InfluenzaA__AGW01704

SEQ ID NO: 183987 - RNA, 1410 nt, Artificial Sequence
  derived and/or modified CDS sequence (opt4) from neuraminidase__InfluenzaA__AGW01716
augaaccccaaccagaagaucaucaccaucggcagcgugagccugaccaucagcaccaucugcuucuucaugcagaucgccauccugaucaccaccgugacccugcacuucaagcaguacgaguucaacagcccccccaacaaccaggugaugcugugcgagcccaccaucaucgagagaaacaucaccgagaucguguaccugaccaacaccaccaucgagaaggagaucugccccaagcccgccgaguacagaaacuggagcaagccccagugcggcaucaccggcuucgcccccuucagcaaggacaacagcaucagacugagcgccggcggcgacaucugggugaccagagagcccuacgugagcugcgaccccgacaagugcuaccaguucgcccugggccagggcaccacccugaacaacaugcacagcaacaacaccgugagagacagaacccccuacagaacccugcugaugaacgagcugggcgugcccuuccaccugggcaccaagcaggugugcaucgccuggagcagcagcagcugccacgacggcaaggccuggcugcacgugugcaucaccggcgacgacaagaacgccaccgccagcuucaucuacaacggcagacugguggacagcguggugagcuggagcaaggagauccugagaacccaggagagcgagugcgugugcaucaacggcaccugcaccguggugaugaccgacggcagcgccagcggcaaggccgacaccaagauccuguucaucgaggagggcaagaucgugcacaccagcacccugagcggcagcgcccagcacguggaggagugcagcugcuaccccagauaccccggcgugagaugcgugugcagagacaacuggaagggcagcaacagacccaucguggacaucaacaucaaggaccacagcaucgugagcagcuacgugugcagcggccuggugggcgacacccccagaaagaacgacagcagcagcagcagccacugccuggaccccaacaacgaggagggcggccacggcgugaagggcugggccuucgacgacggcaacgacguguggaugggcagaaccaucaacgagaccagcagacugggcuacgagaccuucaaggugaucgagggcuggagcaaccccaagagcaagcugcagaucaacagacaggugaucguggacagaggcgacagaagcggcuacagcggcaucuucagcguggagggcagaagcugcaucaacagaugcuucuacguggagcugaucagaggcagaaaggaggagaccgaggugcuguggaccagcaacagcaucgugguguucugcggcaccagcggcaccuacggcaccggcagcuggcccgacggcgccgaccugaaccugaugcccaucuga

SEQ ID NO: 183988 - RNA, 1410 nt, Artificial Sequence
  derived and/or modified CDS sequence (opt4) from neuraminidase__InfluenzaA__AGW01728
augaaccccaaccagaagaucaucaccaucggcagcgugagccugaccaucagcaccaucugcuucuucaugcagaucgccauccugaucaccaccgugacccugcacuucaagcaguacgaguucaacagcccccccaacaaccaggugaugcugugcgagcccaccaucaucgagagaaacaucaccgagaucguguaccugaccaacaccaccaucgagaaggagaucugccccaagcccgccgaguacagaaacuggagcaagccccagugcggcaucaccggcuucgcccccuucagcaaggacaacagcaucagacugagcgccggcggcgacaucugggugaccagagagcccuacgugagcugcgaccccgacaagugcuaccaguucgcccugggccagggcaccacccugaacaacaugcacagcaacaacaccgugagagacagaacccccuacagaacccugcugaugaacgagcugggcgugcccuuccaccugggcaccaagcaggugugcaucgccuggagcagcagcagcugccacgacggcaaggccuggcugcacgugugcaucaccggcgacgacaagaacgccaccgccagcuucaucuacaacggcagacugguggacagcguggugagcuggagcaaggagauccugagaacccaggagagcgagugcgugugcaucaacggcaccugcaccguggugaugaccgacggcagcgccagcggcaaggccgacaccaagauccuguucaucgaggagggcaagaucgugcacaccagcacccugagcggcagcgcccagcacguggaggagugcagcugcuaccccagauaccccggcgugagaugcgugugcagagacaacuggaagggcagcaacagacccaucguggacaucaacaucaaggaccacagcaucgugagcagcuacgugugcagcggccuggugggcgacacccccagaaagaacgacagcagcagcagcagccacugccuggaccccaacaacgaggagggcggccacggcgugaagggcugggccuucgacgacggcaacgacguguggaugggcagaaccaucaacgagaccagcagacugggcuacgagaccuucaaggugaucgagggcuggagcaaccccaagagcaagcugcagaucaacagacaggugaucguggacagaggcgacagaagcggcuacagcggcaucuucagcguggagggcaagagcugcaucaacagaugcuucuacguggagcugaucagaggcagaaaggaggagaccgaggugcuguggaccagcaacagcguggugguguucugcggcaccagcggcaccuacggcaccggcagcuggcccgacggcgccgaccugaaccugaugcccaucuga

SEQ ID NO: 183989 - RNA, 1410 nt, Artificial Sequence; identical to SEQ ID NO: 182206
  derived and/or modified CDS sequence (opt4) from neuraminidase__InfluenzaA__AGW01740

SEQ ID NO: 183990 - RNA, 1410 nt, Artificial Sequence
  derived and/or modified CDS sequence (opt4) from neuraminidase__InfluenzaA__AGW01752
augaaccccaaccagaagaucaucaccaucggcagcgugagccugaccaucagcaccaucugcuucuucaugcagaucgccauccugaucaccaccgugacccugcacuucaagcaguacgaguucaacagcccccccaacaaccaggugaugcugugcgagcccaccaucaucgagagaaacaucaccgagaucguguaccugaccaacaccaccaucgagaaggagaucugccccaagcccgccgaguacagaaacuggagcaagccccagugcggcaucaccggcuucgcccccuucagcaaggacaacagcaucagacugagcgccggcggcgacaucugggugaccagagagcccuacgugagcugcgaccccgacaagugcuaccaguucgcccugggccagggcaccacccugaacaacgugcacagcaacaacaccgugagagacagaacccccuacagaacccugcugaugaacgagcugggcgugcccuuccaccugggcaccaagcaggugugcaucgccuggagcagcagcagcugccacgacggcaaggccuggcugcacgugugcaucaccggcgacgacaagaacgccaccgccagcuucaucuacaacggcagacugguggacagcguggugagcuggagcaaggagauccugagaacccaggagagcgagugcgugugcaucaacggcaccugcaccguggugaugaccgacggcagcgccagcggcaaggccgacaccaagauccuguucaucgaggagggcaagaucgugcacaccagcacccugagcggcagcgcccagcacguggaggagugcagcugcuaccccagauaccccggcgugagaugcgugugcagagacaacuggaagggcagcaacagacccaucguggacaucaacaucaaggaccacagcaucgugagcagcuacgugugcagcggccuggugggcgacacccccagaaagaacgacagcagcagcagcagccacugccuggaccccaacaacgaggagggcggccacggcgugaagggcugggccuucgacgacggcaacgacguguggaugggcagaaccaucaacgagaccagcagacugggcuacgagaccuucaaggugaucggcggcuggagcaaccccaagagcaagcugcagaucaacagacaggugaucguggacagaggcgacagaagcggcuacagcggcaucuucagcguggagggcaagagcugcaucaacagaugcuucuacguggagcugaucagaggcagaaaggaggagaccgaggugcuguggaccagcaacagcaucgugguguucugcggcaccagcggcaccuacggcaccggcagcuggcccgacggcgccgaccugaaccugaugcccaucuga

SEQ ID NO: 183991 - RNA, 1410 nt, Artificial Sequence; identical to SEQ ID NO: 182206
  derived and/or modified CDS sequence (opt4) from neuraminidase__InfluenzaA__AGW01764

SEQ ID NO: 183992 - RNA, 1410 nt, Artificial Sequence; identical to SEQ ID NO: 183943
  derived and/or modified CDS sequence (opt4) from neuraminidase__InfluenzaA__AGW01776

SEQ ID NO: 183993 - RNA, 1410 nt, Artificial Sequence; identical to SEQ ID NO: 183931
  derived and/or modified CDS sequence (opt4) from neuraminidase__InfluenzaA__AGW01788

SEQ ID NO: 183994 - RNA, 1410 nt, Artificial Sequence; identical to SEQ ID NO: 183943
  derived and/or modified CDS sequence (opt4) from neuraminidase__InfluenzaA__AGW01800

SEQ ID NO: 183995 - RNA, 1410 nt, Artificial Sequence; identical to SEQ ID NO: 183931
  derived and/or modified CDS sequence (opt4) from neuraminidase__InfluenzaA__AGW01812

SEQ ID NO: 183996 - RNA, 1410 nt, Artificial Sequence; identical to SEQ ID NO: 183931
  derived and/or modified CDS sequence (opt4) from neuraminidase__InfluenzaA__AGW01824

SEQ ID NO: 183997 - RNA, 1410 nt, Artificial Sequence; identical to SEQ ID NO: 183954
  derived and/or modified CDS sequence (opt4) from neuraminidase__InfluenzaA__AGW01848

SEQ ID NO: 183998 - RNA, 1410 nt, Artificial Sequence
  derived and/or modified CDS sequence (opt4) from neuraminidase__InfluenzaA__AGW01860
augaaccccaaccagaagaucaucaccaucggcagcgugagccugaccaucagcaccaucugcuucuucaugcagaucgccauccugaucaccaccgugacccugcacuucaagcaguacgaguucaacagccugcccaacaaccaggugaugcugugcgagcccaccaucaucgagagaaacaucaccgagaucguguaccugaccaacaccaccaucgagaaggagaucugccccaagcccgccgaguacagaaacuggagcaagccccagugcggcaucaccggcuucgcccccuucagcaaggacaacagcaucagacugagcgccggcggcgacaucugggugaccagagagcccuacgugagcugcgaccccgacaagugcuaccaguucgcccugggccagggcaccacccugaacaacgugcacagcaacaacaccgugagagacagaacccccuacagaacccugcugaugaacgagcugggcgugcccuuccaccugggcaccaagcaggugugcaucgccuggagcagcagcagcugccacgacggcaaggccuggcugcacgugugcaucaccggcgacgacaagaacgccaccgccagcuucaucuacaacggcagacugguggacagcguggugagcuggagcaaggagauccugagaacccaggagagcgagugcgugugcaucaacggcaccugcaccguggugaugaccgacggcagcgccagcggcaaggccgacaccaagauccuguucaucgaggagggcaagaucgugcacaccagcacccugagcggcagcgcccagcacguggaggagugcagcugcuaccccagauaccccggcgugagaugcgugugcagagacaacuggaagggcagcaacagacccaucguggacaucaacaucaaggaccacagcaucgugagcagcuacgugugcagcggccuggugggcgacacccccagaaagaacgacagcagcagcagcagccacugcuucgaccccaacaacgaggagggcggccacggcgugaagggcugggccuucgacgacggcaacgacguguggaugggcagaaccaucaacgagaccagcagacugggcuacgagaccuucaaggugaucggcggcuggagcaaccccaagagcaagcugcagaucaacagacaggugaucguggacagaggcgacagaagcggcuacagcggcaucuucagcguggagggcaagagcugcaucaacagaugcuucuacguggagcugaucagaggcagaaaggaggagaccgaggugcuguggaccagcaacagcaucaucguguucugcggcaccagcggcaccuacggcaccggcagcuggcccgacggcgccgaccugaaccugaugcccaucuga

SEQ ID NO: 183999 - RNA, 1410 nt, Artificial Sequence
  derived and/or modified CDS sequence (opt4) from neuraminidase__InfluenzaA__AGW01884
augaaccccaaccagaagaucaucaccaucggcagcgugagccugaccaucagcaccaucugcuucuucaugcagaucgccauccugaucaccaccgugacccugcacuucaagcaguacgaguucaacagcccccccaacaaccaggugaugcugugcgagcccaccaucaucgagagaaacaucaccaagaucguguaccugaccaacaccaccaucgagaaggagaucugccccaagcccgccgaguacagaaacuggagcaagccccagugcggcaucaccggcuucgcccccuucagcaaggacaacagcaucagacugagcgccggcggcgacaucugggugaccagagagcccuacgugagcugcgaccccgacaagugcuaccaguucgcccugggccagggcaccacccugaacaacgugcacagcaacaacaccgugagagacagaacccccuacagaacccugcugaugaacgagcugggcgugcccuuccaccugggcaccaagcaggugugcaucgccuggagcagcagcagcugccacgacggcaaggccuggcugcacgugugcaucaccggcgacgacaagaacgccaccgccagcuucaucuacaacggcagacugguggacagcguggugagcuggagcaaggagauccugagaacccaggagagcgagugcgugugcaucaacggcaccugcaccguggugaugaccgacggcagcgccagcggcaaggccgacaccaagauccuguucaucgaggagggcaagaucgugcacaccagcacccugagcggcagcgcccagcacguggaggagugcagcugcuaccccagauaccccggcgugagaugcgugugcagagacaacuggaagggcagcaacagacccaucguggacaucaacaucaaggaccacagcaucgugagcagcuacgugugcagcggccuggugggcgacacccccagaaagaacgacagcagcagcagcagccacugccuggaccccaacaacgaggagggcggccacggcgugaagggcugggccuucgacgacggcaacgacguguggaugggcagaaccaucaacgagaccagcagacugggcuacgagaccuucaaggugaucgagggcuggagcaaccccaagagcaagcugcagaucaacagacaggugaucguggacagaggcgacagaagcggcuacagcggcaucuucagcguggagggcaagagcugcaucaacagaugcuucuacguggagcugaucagaggcagaaaggaggagaccgaggugcuguggaccagcaacagcaucgugguguucugcggcaccagcggcaccuacggcaccggcagcuggcccgacggcgccgaccugaaccugaugcccaucuga

SEQ ID NO: 184000 - RNA, 1410 nt, Artificial Sequence; identical to SEQ ID NO: 182206
  derived and/or modified CDS sequence (opt4) from neuraminidase__InfluenzaA__AGW01896

SEQ ID NO: 184001 - RNA, 1410 nt, Artificial Sequence; identical to SEQ ID NO: 182206
  derived and/or modified CDS sequence (opt4) from neuraminidase__InfluenzaA__AGW01908

SEQ ID NO: 184002 - RNA, 1410 nt, Artificial Sequence; identical to SEQ ID NO: 182206
  derived and/or modified CDS sequence (opt4) from neuraminidase__InfluenzaA__AGW01920

SEQ ID NO: 184003 - RNA, 1410 nt, Artificial Sequence; identical to SEQ ID NO: 182206
  derived and/or modified CDS sequence (opt4) from neuraminidase__InfluenzaA__AGW01932

SEQ ID NO: 184004 - RNA, 1410 nt, Artificial Sequence
  derived and/or modified CDS sequence (opt4) from neuraminidase__InfluenzaA__AGW01944
augaaccccaaccagaagaucaucaccaucggcagcgugagccugaccaucagcaccaucugcuucuucaugcagaucgccauccugaucaccaccgugacccugcacuucaagcaguacgaguucaacuucccccccaacaaccaggugaugcugugcgagcccaccaucaucgagagaaacaucaccgagaucguguaccugaccaacaccaccaucgagaaggagaucugccccaagcccgccgaguacagaaacuggagcaagccccagugcggcaucaccggcuucgcccccuucagcaaggacaacagcaucagacugagcgccggcggcgacaucugggugaccagagagcccuacgugagcugcgaccccgacaagugcuaccaguucgcccugggccagggcaccacccugaacaacgugcacagcaacaacaccgugagagacagaacccccuacagaacccugcugaugaacgagcugggcgugcccuuccaccugggcaccaagcaggugugcaucgccuggagcagcagcagcugccacgacggcaaggccuggcugcacgugugcaucaccggcgacgacaagaacgccaccgccagcuucaucuacaacggcagacugguggacagcguggugagcuggagcaaggagauccugagaacccaggagagcgagugcgugugcaucaacggcaccugcaccguggugaugaccgacggcagcgccagcggcaaggccgacaccaagauccuguucaucgaggagggcaagaucgugcacaccagcacccugagcggcagcgcccagcacguggaggagugcagcugcuaccccagauaccccggcgugagaugcgugugcagagacaacuggaagggcagcaacagacccaucguggacaucaacaucaaggaccacagcaucgugagcagcuacgugugcagcggccuggugggcgacacccccagaaagaacgacagcagcagcagcagccacugccuggcccccaacaacgaggagggcggccacggcgugaagggcugggccuucgacgacggcaacgacguguggaugggcagaaccaucaacgagaccagcagacugggcuacgagaccuucaaggugaucgagggcuggagcaaccccaagagcaagcugcagaucaacagacaggugaucguggacagaggcgacagaagcggcuacagcggcaucuucagcguggagggcaagagcugcaucaacagaugcuucuacguggagcugaucagaggcagaaaggaggagaccgaggugcuguggaccagcaacagcaucgugguguucugcggcaccagcggcaccuacggcaccggcagcuggcccgacggcgccgaccugaaccugaugcccaucuga

SEQ ID NO: 184005 - RNA, 1410 nt, Artificial Sequence; identical to SEQ ID NO: 182206
  derived and/or modified CDS sequence (opt4) from neuraminidase__InfluenzaA__AGW01956

SEQ ID NO: 184006 - RNA, 1410 nt, Artificial Sequence
  derived and/or modified CDS sequence (opt4) from neuraminidase__InfluenzaA__AGW01968
augaaccccaaccagaagaucaucaccaucggcagcgugagccugaccaucagcaccaucugcuucuucaugcagaucgccauccugaucaccaccgugacccugcacuucaagcaguacgaguucaacagcccccccaacaaccaggugaugcugugcgagcccaccaucaucgagagaaacaucaccgagaucguguaccugaccaacaccaccaucgagaaggagaucugccccaagcccgccgaguacagaaacuggagcaagccccagugcgacaucaccggcuucgcccccuucagcaaggacaacagcaucagacugagcgccggcggcgacaucugggugaccagagagcccuacgugagcugcgaccccgacaagugcuaccaguucgcccugggccagggcaccacccugaacaacgugcacagcaacaacaccaucagagacagaacccccuacagaacccugcugaugaacgagcugggcgugcccuuccaccugggcaccaagcaggugugcaucgccuggagcagcagcagcugccacgacggcaaggccuggcugcacgugugcaucaccggcgacgacgagaacgccaccgccagcuucaucuacaacggcagacugguggacagcguggugagcuggagcaaggagauccugagaacccaggagagcgagugcgugugcaucaacggcaccugcaccguggugaugaccgacggcagcgccagcggcaaggccgacaccaagauccuguucaucgaggagggcaagaucgugcacaccagcacccugagcggcagcgcccagcacguggaggagugcagcugcuaccccagauaccccggcgugagaugcgugugcagagacaacuggaagggcagcaacagacccaucguggacaucaacaucaaggaccacagcaucgugagcagauacgugugcagcggccuggugggcgacacccccagaaagaacgacagcagcagcagcagccacugccuggaccccaacaacgaggagggcggccacggcgugaagggcugggccuucgacgacggcaacgacguguggaugggcagaaccaucaacgagaccagcagacugggcuacgagaccuucaaggugaucgagggcuggagcaaccccaagagcaagcugcagaucaacagacaggugaucguggacagaggcgacagaagcggcuacagcggcaucuucagcguggagggcaagagcugcaucaacagaugcuucuacguggagcugaucagaggcagaaaggaggagaccgaggugcuguggaccagcaacagcaucgugguguucugcggcaccagcggcaccuacggcaccggcagcuggcccgacggcgccgaccugaaccugaugcccaucuga

SEQ ID NO: 184007 - RNA, 1410 nt, Artificial Sequence; identical to SEQ ID NO: 183931
  derived and/or modified CDS sequence (opt4) from neuraminidase__InfluenzaA__AGW01980

SEQ ID NO: 184008 - RNA, 1410 nt, Artificial Sequence; identical to SEQ ID NO: 182206
  derived and/or modified CDS sequence (opt4) from neuraminidase__InfluenzaA__AGW01992

SEQ ID NO: 184009 - RNA, 1410 nt, Artificial Sequence; identical to SEQ ID NO: 182206
  derived and/or modified CDS sequence (opt4) from neuraminidase__InfluenzaA__AGW02004

SEQ ID NO: 184010 - RNA, 1410 nt, Artificial Sequence; identical to SEQ ID NO: 182206
  derived and/or modified CDS sequence (opt4) from neuraminidase__InfluenzaA__AGW02016

SEQ ID NO: 184011 - RNA, 1410 nt, Artificial Sequence; identical to SEQ ID NO: 182206
  derived and/or modified CDS sequence (opt4) from neuraminidase__InfluenzaA__AGW02040

SEQ ID NO: 184012 - RNA, 1410 nt, Artificial Sequence
  derived and/or modified CDS sequence (opt4) from neuraminidase__InfluenzaA__AGW02064
augaaccccaaccagaagaucaucaccaucggcagcgugagccugaccaucagcaccaucugcuucuucaugcagaucgccauccugaucaccaccgugacccugcacuucaagcaguacgaguucgacagcccccccaacaaccaggugaugcugugcgagcccaccaucaucgagagaaacaucaccgagaucguguaccugaccaacaccaccaucgagaaggagaucugccccaagcccgccgaguacagaaacuggagcaagccccagugcggcaucaccggcuucgcccccuucagcaaggacaacagcaucagacugagcgccggcggcgacaucugggugaccagagagcccuacgugagcugcgaccccgacaagugcuaccaguucgcccugggccagggcaccacccugaacaacgugcacagcaacaacaccgugagagacagaacccccuacagaacccugcugaugaacgagcugggcgugcccuuccaccugggcaccaagcaggugugcaucgccuggagcagcagcagcugccacgacggcaaggccuggcugcacgugugcaucaccggcgacgacaagaacgccaccgccagcuucaucuacaacggcagacugguggacagcguggugagcuggagcaaggagauccugagaacccaggagagcgagugcgugugcaucaacggcaccugcaccguggugaugaccgacggcagcgccagcggcaaggccgacaccaagauccuguucaucgaggagggcaagaucgugcacaccagcacccugagcggcagcgcccagcacguggaggagugcagcugcuaccccagauaccccggcgugagaugcgugugcagagacaacuggaagggcagcaacagacccaucguggacaucaacaucaaggaccacagcaucgugagcagcuacgugugcagcggccuggugggcgacacccccagaaagaacgacagcagcagcagcggccacugccuggaccccaacaacgaggagggcggccacggcgugaagggcugggccuucgacgacggcaacgacguguggaugggcagaaccaucaacgagaccagcagacugggcuacgagaccuucaaggugaucgagggcuggagcaaccccaagagcaagcugcagaucaacagacaggugaucguggacagaggcgacagaagcggcuacagcggcaucuucagcguggagggcaagagcugcaucaacagaugcuucuacguggagcugaucagaggcagaaaggaggagaccgaggugcuguggaccagcaacagcaucgugguguucugcggcaccagcggcaccuacggcaccggcagcuggcccgacggcgccgaccugaaccugaugcccaucuga

SEQ ID NO: 184013 - RNA, 1410 nt, Artificial Sequence; identical to SEQ ID NO: 182206
  derived and/or modified CDS sequence (opt4) from neuraminidase__InfluenzaA__AGW02076

SEQ ID NO: 184014 - RNA, 1410 nt, Artificial Sequence; identical to SEQ ID NO: 182206
  derived and/or modified CDS sequence (opt4) from neuraminidase__InfluenzaA__AGW02088

SEQ ID NO: 184015 - RNA, 1410 nt, Artificial Sequence
  derived and/or modified CDS sequence (opt4) from neuraminidase__InfluenzaA__AGW02100
augaaccccaaccagaagaucaucaccaucggcagcgugagccugaccaucagcaccaucugcuucuucaugcagaucgccauccugaucaccaccgugacccugcacuucaagcaguacgagagcaacagcccccccaacaaccaggugaugcugugcgagcccaccaucaucgagagaaacaucaccgagaucguguaccugaccaacaccaccaucgagaaggagaucugccccaagcccgccgaguacagaaacuggagcaagccccagugcggcaucaccggcuucgcccccuucagcaaggacaacagcaucagacugagcgccggcggcgacaucugggugaccagagagcccuacgugagcugcgaccccgacaagugcuaccaguucgcccugggccagggcaccacccugaacaacgugcacagcaacaacaccgugagagacagaacccccuacagaacccugcugaugaacgagcugggcgugcccuuccaccugggcaccaagcaggugugcaucgccuggagcagcagcagcugccacgacggcaaggccuggcugcacgugugcaucaccggcgacgacaagaacgccaccgccagcuucaucuacaacggcagacugguggacagcguggugagcuggagcaaggagauccugagaacccaggagagcgagugcgugugcaucaacggcaccugcaccguggugaugaccgacggcagcgccagcggcaaggccgacaccaagauccuguucaucgaggagggcaagaucgugcacaccagcacccugagcggcagcgcccagcacguggaggagugcagcugcuaccccagauaccccggcgugagaugcgugugcagagacaacuggaagggcagcaacagacccaucguggacaucaacaucaaggaccacagcaucgugagcagcuacgugugcagcggccuggugggcgacacccccagaaagaacgacagcagcagcagcagccacugccuggaccccaacaacgaggagggcggccacggcgugaagggcugggccuucgacgacggcaacgacguguggaugggcagaaccaucaacgagaccagcagacugggcuacgagaccuucaaggugaucgagggcuggagcaaccccaagagcaagcugcagaucaacagacaggugaucguggacagaggcgacagaagcggcuacagcggcaucuucagcguggagggcaagagcugcaucaacagaugcuucuacguggagcugaucagaggcagaaaggaggagaccgaggugcuguggaccagcaacagcaucgugguguucugcggcaccagcggcaccuacggcaccggcagcuggcccgacggcgccgaccugaaccugaugcccaucuga

SEQ ID NO: 184016 - RNA, 1410 nt, Artificial Sequence; identical to SEQ ID NO: 183943
  derived and/or modified CDS sequence (opt4) from neuraminidase__InfluenzaA__AGW02112

SEQ ID NO: 184017 - RNA, 1410 nt, Artificial Sequence
  derived and/or modified CDS sequence (opt4) from neuraminidase__InfluenzaA__AGW02124
augaaccccaaccagaagaucaucaccaucggcagcgugagccugaccaucagcaccaucugcuucuucaugcagaucgccauccugaucaccaccgugacccugcacuucaagcaguacgaguucaacagcccccccaacaaccaggugaugcugugcgagcccaccaucaucgagagaaacaucaccgagaucguguaccugaccaacaccaccaucgagaaggagaucugccccaagcccgccgaguacagaaacuggagcaagccccagugcggcaucaccggcuucgcccccuucagcaaggacaacagcaucagacugagcgccggcggcgacaucugggugaccagagagcccuacgugagcugcgaccccgacaagugcuaccaguucgcccugggccagggcaccacccugaacaacgugcacagcaacaacaccgugagcgacagaacccccuacagaacccugcugaugaacgagcugggcgugcccuuccaccugggcaccaagcaggugugcaucgccuggagcagcagcagcugccacgacggcaaggccuggcugcacgugugcaucaccggcgacgacaagaacgccaccgccagcuucaucuacaacggcagacugguggacagcguggugagcuggagcaaggagauccugagaacccaggagagcgagugcgugugcaucaacggcaccugcaccguggugaugaccgacggcagcgccagcggcaaggccgacaccaagauccuguucaucgaggagggcaagaucgugcacaccagcacccugagcggcagcgcccagcacguggaggagugcagcugcuaccccagauaccccggcgugagaugcgugugcagagacaacuggaagggcagcaacagacccaucguggacaucaacaucaaggaccacagcaucgugagcagcuacgugugcagcggccuggugggcgacacccccagaaagaacgacagcagcagcagcagccacugccuggaccccaacaacgaggagggcggccacggcgugaagggcugggccuucgacgacggcaacgacguguggaugggcagaaccaucaacgagaccagcagacugggcuacgagaccuucaaggugaucgagggcuggagcaaccccaagagcaagcugcagaucaacagacaggugaucguggacagaggcgacagaagcggcuacagcggcaucuucagcguggagggcaagagcugcaucaacagaugcuucuacguggagcugaucagaggcagaaaggaggagaccgaggugcuguggaccagcaacagcaucgugguguucugcggcaccagcggcaccuacggcaccggcagcuggcccgacggcgccgaccugaaccugaugcccaucuga

SEQ ID NO: 184018 - RNA, 1410 nt, Artificial Sequence; identical to SEQ ID NO: 183931
  derived and/or modified CDS sequence (opt4) from neuraminidase__InfluenzaA__AGW02136

SEQ ID NO: 184019 - RNA, 1410 nt, Artificial Sequence; identical to SEQ ID NO: 183943
  derived and/or modified CDS sequence (opt4) from neuraminidase__InfluenzaA__AGW02148

SEQ ID NO: 184020 - RNA, 1410 nt, Artificial Sequence
  derived and/or modified CDS sequence (opt4) from neuraminidase__InfluenzaA__AGW02160
augaaccccaaccagaagaucaucaccaucggcagcgugagccugaccaucagcaccaucugcuucuucaugcagaucgccauccugaucaccaccgugacccugcacuucaagcaguacgaguucgacagcccccccaacaaccaggugaugcugugcgagcccaccaucaucgagagaaacaucaccgagaucguguaccugaccaacaccaccaucgagaaggagaucugccccaagcccgccgaguacagaaacuggagcaagccccagugcggcaucaccggcuucgcccccuucagcaaggacaacagcaucagacugagcgccggcggcgacaucugggugaccagagagcccuacgugagcugcgaccccgacaagugcuaccaguucgcccugggccagggcaccacccugaacaacgugcacagcaacaacaccgugagagacagaacccccuacagaacccugcugaugaacgagcugggcgugcccuuccaccugggcaccaagcaggugugcaucgccuggagcagcagcagcugccacgacggcaaggccuggcugcacgugugcaucaccggcgacgacaagaacgccaccgccagcuucaucuacaacggcagacugguggacagcguggugagcuggagcaaggagauccugagaacccaggagagcgagugcgugugcaucaacggcaccugcaccguggugaugaccgacggcagcgccagcggcaaggccgacaccaagauccuguucaucgaggagggcaagaucgugcacaccagcacccugagcggcagcgcccagcacguggaggagugcagcugcuaccccagauaccccggcgugagaugcgugugcagagacaacuggaagggcagcaacagacccaucguggacaucaacaucaaggaccacagcaucgugagcagcuacgugugcagcggccuggugggcgacacccccagaaagaacgacagcagcagcagcagccacugccuggaccccaacaacgaggagggcggccacggcgugaagggcugggccuucgacgacggcaacgacguguggaugggcagaaccaucaacgagaccagcagacugggcuacgagaccuucaaggugaucgagggcuggagcaaccccaagagcaagcugcagaucaacagacaggugaucguggacagaagcgacagaagcggcuacagcggcaucuucagcguggagggcaagagcugcaucaacagaugcuucuacguggagcugaucagaggcagaaaggaggagaccgaggugcuguggaccagcaacagcaucgugguguucugcggcaccagcggcaccuacggcaccggcagcuggcccgacggcgccgaccugaaccugaugcccaucuga

SEQ ID NO: 184021 - RNA, 1410 nt, Artificial Sequence; identical to SEQ ID NO: 182206
  derived and/or modified CDS sequence (opt4) from neuraminidase__InfluenzaA__AGW02172

SEQ ID NO: 184022 - RNA, 1410 nt, Artificial Sequence; identical to SEQ ID NO: 182206
  derived and/or modified CDS sequence (opt4) from neuraminidase__InfluenzaA__AGW02184

SEQ ID NO: 184023 - RNA, 1410 nt, Artificial Sequence
  derived and/or modified CDS sequence (opt4) from neuraminidase__InfluenzaA__AGW02196
augaaccccaaccagaagaucaucaccaucggcagcgugagccugaccaucagcaccaucugcuucuucaugcagaucgccauccugaucaccaccgugacccugcacuucaagcaguacgaguucaacagcccccccaacaaccaggugaugcugugcgagcccaccaucaucgagagaaacaucaccgagaucguguaccugaucaacaccaccaucgagaaggagaucugccccaagcccgccgaguacagaaacuggagcaagccccagugcggcaucaccggcuucgcccccuucagcaaggacaacagcaucagacugagcgccggcggcgacaucugggugaccagagagcccuacgugagcugcgaccccuacaagugcuaccaguucgcccugggccagggcaccacccugaacaacgugcacagcaacaacaccgugagagacagaacccccuacagaacccugcugaugaacgagcugggcgugcccuuccaccugggcaccaagcaggugugcaucgccuggagcagcagcagcugccacgacggcaaggccuggcugcacgugugcaucaccggcgacgacaagaacgccaccgccagcuucaucuacaacggcagacugguggacagcguggugagcuggagcaaggagauccugagaacccaggagagcgagugcgugugcaucaacggcaccugcaccguggugaugaccgacggcagcgccagcggcaaggccgacaccaagauccuguucaucgaggagggcaagaucgugcacaccagcacccugagcggcagcgcccagcacguggaggagugcagcugcuaccccagauaccccggcgugagaugcgugugcagagacaacuggaagggcagcaacagacccaucguggacaucaacaucaaggaccacagcaucgugagcagcuacgugugcagcggccuggugggcgacacccccagaaagaacgacagcagcagcagcagccacugccuggaccccaacaacgaggagggcggccacggcgugaagggcugggccuucgacgacggcaacgacguguggaugggcagaaccaucaacgagaccagcagacugggcuacgagaccuucaaggugaucgagggcuggagcaaccccaagagcaagcugcagaucaacagacaggugaucguggacagaggcgacagaagcggcuacagcggcaucuucagcguggagggcaagagcugcaucaacagaugcuucuacguggagcugaucagaggcagaaaggaggagaccgaggugcuguggaccagcaacagcaucgugguguucugcggcaccagcggcaccuacggcaccggcagcuggcccgacggcgccgaccugaaccugaugcccaucuga

SEQ ID NO: 184024 - RNA, 1410 nt, Artificial Sequence; identical to SEQ ID NO: 183435
  derived and/or modified CDS sequence (opt4) from neuraminidase__InfluenzaA__AGW04174

SEQ ID NO: 184025 - RNA, 1410 nt, Artificial Sequence
  derived and/or modified CDS sequence (opt4) from neuraminidase__InfluenzaA__AGW25784
augaaccccaaccagaagaucaucaccaucggcagcgugagccugaucaucgccaccaucugcuuccugaugcagaucgccauccuggugaccaccgugacccugcacuucaagcaguacggcuacaacagccugcccaacaaccaggugaugcugugcgagcccaccaucaucgagagaaacaucaccgagaucguguaccugaccaacaccaccaucgagaaggagaucugccccaagcuggccgaguacagaaacuggagcaagccccagugcaagaucaccggcuucgcccccuucagcaaggacaacagcaucagacugagcgccggcggcgacaucugggugaccagagagcccuacgugagcugcgaccccuacaagugcuaccaguucgcccugggccagggcaccacccugaacaacaagcacagcaacgacaccgugcacgacagaacccccuacagaacccugcugaugaacgagcugggcgugcccuuccaccugggcaccaagcaggugugcaucgccuggagcagcagcagcugccacgacggcaaggccuggcugcacaucugcgugaccggccacgacgagaacgccaccgccagcuucaucuacgacggcaagcugguggacagcaucggcagcuggagcaagaagauccugagaacccaggagagcgagugcgugugcaucaacggcaccugcaccguggugaugaccgacggcagcgccagcggcagagccgacaccaagauccuguucaucgaggagggcaagaucauccacaucagccagcugagcggcagcgcccagcacguggaggagugcagcugcuaccccagauaccccggcaucagaugcgugugcagagacaacuggaagggcagcaacagacccaucguggacaucaacgugaaggacuacagcaucaccagcagcuacgugugcagcggccuggugggcgacacccccagaaagaccgacaacagcagcagcagccacugccugaaccccaacaacgaggagggcggccacggcgugaagggcugggccuucgacgacggcaacgacguguggaugggcagaaccaucagcgagaaguucagaagcggcuacgagaccuucaaggugaucaagggcuggagcaagcccaacagcaagcugcagaucaacagacaggugaucguggacagagacaacagaagcggcuacagcggcaucuucagcguggagggcaagagcugcaucaacagaugcuucuacguggagcugaucagaggcagaaagagagaggccgaggugugguggaccagcaacagcaucgugguguucugcggcaccagcggcaccuacggcaccggcagcuggcccgacggcgccgacaucaaccugaugcccaucuga

SEQ ID NO: 184026 - RNA, 1350 nt, Artificial Sequence
  derived and/or modified CDS sequence (opt4) from neuraminidase__InfluenzaA__AGW27062
augaaccccaaccagaagaucgugaccaucggcagcaucugcauggugaucggcaccaucagccugaugcugcagaucggcaacaucaucagcaucugggugagccacagcauccagaccggcaaccagcaccagaccgagcccaucagaaacaccaacuuccugaccgagaacgccguggccagcgugacccuggccggcaacagcagccugugccccaucagaggcugggccgugcacagcaaggacaacagcaucagaaucggcagcaagggcgacguguucgugaucagagagcccuucaucagcugcagccaccuggagugcagaaccuucuuccugacccagggcgcccugcugaacgacaagcacagcaacggcaccgugaaggacagaagcccccacagaacccugaugagcugccccaucggcgaggcccccagccccuacaacagcagauucgagagcguggccuggagcgccagcgccugccacgacggcaccagcuggcuggugaucggcaucagcggccccgacaacggcgccguggccgugcugaaguacaacggcaucaucaccgacaccaucagaagcuggagaaacaacauccugagaacccaggagagcgagugcgccugcgugaacggcagcugcuucaccgugaugaccgacggccccagcaacggccaggccagcuacaagaucuucaagaucgagaagggcaagguggugaagagcguggagcugaacgcccccaacuaccacuacgaggagugcagcugcuaccccgacgccggcgagaucaccugcgugugcagagacaacuggcacggcagcaacagacccugggugagcuucaaccagaaccuggaguaccagaucggcuacaucugcagcggcguguucggcgacaaccccagacccaacgacggcaccggcagcugcggccccgugagcagcaacggcgccuacggcgugaagggcuucagcuucaaguacggcaacggcguguggaucggcagaaccaagagcacccacagcagaagcggcuucgagaugaucugggaccccaacggcuggaccggcaccgacagcgaguucagcaugaagcaggacaucguggccaucaccgacuggagcggcuacagcggcagcuucgugcagcaccccgagcugaccggccuggacugcaucagacccugcuucuggguggagcugaucagaggcagacccaaggagagcaccaucuggaccagcggcagcagcaucagcuucugcggcgugaacagcgacaccgugagcuggagcuggcccgacggcgccgagcugcccuucaccaucgacaaguga

SEQ ID NO: 184027 - RNA, 1410 nt, Artificial Sequence
  derived and/or modified CDS sequence (opt4) from neuraminidase__InfluenzaA__AGY14472
augaaccccaaccagaagaucaucaccaucggcagcgugagccugacccuggccaccaucugcuuccugaugcagaucgccauccuggugaccaccgugacccugcacuucaagcaguacgagugcaacagcacccccaacaaccaggugaugcugugcgagcccaccgugaucgagagaaacaucaccaagaucguguaccugaccaacaccaccguggagaaggagaucugccccaagcccgccgaguacagaaacuggagcaagccccagugcaagaucaccggcuucgcccccuucagcaaggacaacagcaucagacugagcgccggcggcgacaucugggugaccagagagcccuacgugagcugcgaccccaacaagugcuaccaguucgcccugggccagggcaccacccugaacaacagacacagcaacgacaccgugcacgacagaacccccuacagaacccugcugaugaacgagcugggcauccccuuccaccugggcaccaagcaggugugcaucgccuggagcagcagcagcugccacgacggcaaggccuggcugcacgugugcgugaccggccacgacaagaacgccaccgccagcuucaucuacgacggcaagcugguggacagcaucggcagcuggagcaagaagauccugagaacccaggagagcgagugcgugugcaucaacggcaccugcaccguggugaugaccgacggcagcgccagcggcagagccgacaccaagauccuguucaucgaggagggcaagaucauccacaucagccagcugagcggcagcgcccagcacguggaggagugcagcugcuaccccagauaccccggcaucagaugcgugugcagagacaacuggaagggcagcaacagacccaucguggacaucaacgugaaggacuacagcaucaccagcagcuacgugugcagcggccuggugggcgacacccccagaaagaccgacaacagcagcagcagccacugccugaaccccaacaacgaggagggcggccacggcgugaagggcugggccuucgacgacggcaacgacguguggaugggcagaaccaucagcgagaaguucagaagcggcuacgagaccuucaaggugaucaagggcuggagcaagcccaacagcaagcugcagaucaacagacaggugaucguggacagagacaacagaagcggcuacagcggcaucuucagcguggagggcaagagcugcaucaacagaugcuucuacguggagcugaucagaggcagaaagagagaggccgaggugugguggaccagcaacagcaucgugguguucugcggcaccagcggcaccuacggcaccggcagcuggcccgacggcgccgacaucaaccugaugcccaucuga

SEQ ID NO: 184028 - RNA, 1398 nt, Artificial Sequence
  derived and/or modified CDS sequence (opt4) from neuraminidase__InfluenzaA__AHA11501
augaaccccaaccagaagauccugugcaccagcgccaccgccaucaucaucggcgccaucgccgugcugaucggcaucgccaaccugggccugaacaucggccugcaccugaagcccggcugcaacugcagccacagccagcccgagaccaccaacaccagccagaccaucaucaacaacuacuacaacgagaccaacaucaccaacauccagauggaggagagaaccagcagaaacuucaacaaccugaccaagggccugugcaccaucaacagcuggcacaucuacggcaaggacaacgccgugagaaucggcgagagcagcgacgugcuggugaccagagagcccuacgugagcugcgaccccgacgagugcagauucuacgcccugagccagggcaccaccaucagaggcaagcacagcaacggcaccauccacgacagaagccaguacagagcccugaucagcuggccccugagcagcccccccaccguguacaacagcagaguggagugcaucggcuggagcagcaccagcugccacgacggcaagagcagaaugagcaucugcaucagcggccccaacaacaacgccagcgccguggugugguacaacagaagacccguggccgagaucaacaccugggccagaaacauccugagaacccaggagagcgagugcgugugccacaacggcgugugccccaucguguucaccgacggcagcgccaccggccccgccgacaccagaaucuacuacuucaaggagggcaagauccuggagugggagagccugaccggcaccgccaagcacaucgaggagugcagcugcuacggcgagagaaccggcaucaccugcaccugcagagacaacuggcagggcagcaacagacccgugauccagaucgaccccguggccaugacccacaccagccaguacaucugcagccccgugcugaccgacacccccagacccaacgaccccaacaucggcaagugcaacgaccccuaccccggcaacgacaacaacggcgugaagggcuucagcuaccuggacggcgccaacaccuggcugggcagaaccaucagcaccgccagcagaagcggcuacgagaugcugaaggugcccaacgcccugaccgacgacagaagcaagcccauccagggccagaccaucgugcugaacgccgacuggagcggcuacagcggcagcuucauggacuacugggccgagggcgacugcuacagagccugcuucuacguggagcugaucagaggcagacccaaggaggacaaggugugguggaccagcaacagcaucgugagcaugugcagcagcaccgaguuccugggccaguggaacuggcccgacggcgccagaaucgaguacuuccuguga

SEQ ID NO: 184029 - RNA, 1410 nt, Artificial Sequence
  derived and/or modified CDS sequence (opt4) from neuraminidase__InfluenzaA__AHC57462
augaaccccaaccagaagaucaucaccaucggcagcgugagccugaccaucagcaccaucugcuucuucaugcagaucgccauccugaucaccaccgugacccugcacuucaagcaguacgaguucaacagcccccccaacaaccaggugaugcugugcgagcccaccaucaucgagagaaacaucaccgagaucguguaccugaccaacaccaccaucgagaaggagaucugccccaagcuggccgaguacagaaacuggagcaagccccagugcgacaucaccggcuucgcccccuucagcaaggacaacagcaucagacugagcgccggcggcgacaucugggugaccagagagcccuacgugagcugcgaccccgacaagugcuaccaguucgcccugggccagggcaccacccugaacaacgugcacagcaacaacaccgugagagacagaacccccuacagaacccugcugaugaacgagcugggcgugcccuuccaccugggcaccaagcaggugugcaucgccuggagcagcagcagcugccacgacggcaaggccuggcugcacgugugcaucaccggcgacgacaagaacgccaccgccagcuucaucuacaacggcagacugguggacagcguggugagcuggagcaaggagauccugagaacccaggagagcgagugcgugugcaucaacggcaccugcaccguggugaugaccgacggcagcgccagcggcaaggccgacaccaagauccuguucaucgaggagggcaagaucgugcacaccagcacccugagcggcagcgcccagcacguggaggagugcagcugcuaccccagauaccccggcgugagaugcgugugcagagacaacuggaagggcagcaacagacccaucguggacaucaacaucaaggaccacagcaucgugagcagcuacgugugcagcggccuggugggcgacacccccagaaagaacgacagcagcagcagcagccacugcugggaccccaacaacgaggagggcggccacggcgugaagggcugggccuucgacgacggcaacgacguguggaugggcagaaccaucaacgagaccagcagacugggcuacgagaccuucaaggugaucgagggcuggagcaaccccaagagcaagcugcaggugaacagacaggugaucguggacagaggcgacagaagcggcuacagcggcaucuucagcguggagggcaagagcugcaucaacagaugcuucuacguggagcugaucagaggcagaaaggaggagaccgaggugcuguggaccagcaacagcaucgugguguucugcggcaccagcggcaccuacggcaccggcagcuggcccgacggcgccgaccugaaccugaugcccaucuga

SEQ ID NO: 184030 - RNA, 1410 nt, Artificial Sequence; identical to SEQ ID NO: 179578
  derived and/or modified CDS sequence (opt4) from neuraminidase__InfluenzaA__AHC57490

SEQ ID NO: 184031 - RNA, 1410 nt, Artificial Sequence
  derived and/or modified CDS sequence (opt4) from neuraminidase__InfluenzaA__AHC57514
augaaccccaaccagaagaucaucaccaucggcagcgugagccugaccaucagcaccaucugcuucuucaugcagaucgccauccugaucaccaccgugacccugcacuucaagcaguacgaguucuacagcccccccaacaaccaggugaugcugugcgagcccaccaucaucgagagaaacaucaccgagaucguguaccugaccaacaccaccaucgagaaggagaucugccccaagcuggccgaguacagaaacuggagcaagccccagugcgacaucaccggcuucgcccccuucagcaaggacaacagcaucagacugagcgccggcggcgacaucugggugaccagagagcccuacgugagcugcgaccccgacaagugcuaccaguucgcccugggccagggcaccacccugaacaacgugcacagcaacaacaccgugagagacagaacccccuacagaacccugcugaugaacgagcugggcgugcccuuccaccugggcaccaagcaggugugcaucgccuggagcagcagcagcugccacgacggcaaggccuggcugcacgugugcaucaccggcgacgacaagaacgccaccgccagcuucaucuacaacggcagacugguggacagcguggugagcuggagcaaggagauccugagaacccaggagagcgagugcgugugcaucaacggcaccugcaccguggugaugaccgacggcagcgccagcggcaaggccgacaccaagauccuguucaucgaggagggcaagaucgugcacaccagcacccugagcggcagcgcccagcacguggaggagugcagcugcuaccccagauaccccggcgugagaugcgugugcagagacaacuggaagggcagcaacagacccaucguggacaucaacaucaaggaccacagcaucgugagcagcuacgugugcagcggccuggugggcgacacccccagaaagaacgacagcagcagcagcagccacugccuggaccccaacaacgaggagggcggccacggcgugaagggcugggccuucgacgacggcaacgacguguggaugggcagaaccaucaacgagaccagcagacugggcuacgagaccuucaaggugaucgagggcuggagcaaccccaagagcaagcugcagaucaacagacaggugaucguggacagaggcaacagaagcggcuacagcggcaucuucagcguggagggcaagagcugcaucaacagaugcuucuacguggagcugaucagaggcagaaaggaggagaccgaggugcuguggaccagcaacagcaucgugguguucugcggcaccagcggcaccuacggcaccggcagcuggcccgacggcgccgaccugaaccugaugcccaucuga

SEQ ID NO: 184032 - RNA, 1410 nt, Artificial Sequence; identical to SEQ ID NO: 184031
  derived and/or modified CDS sequence (opt4) from neuraminidase__InfluenzaA__AHC57526

SEQ ID NO: 184033 - RNA, 1410 nt, Artificial Sequence; identical to SEQ ID NO: 184031
  derived and/or modified CDS sequence (opt4) from neuraminidase__InfluenzaA__AHC57806

SEQ ID NO: 184034 - RNA, 1410 nt, Artificial Sequence; identical to SEQ ID NO: 184031
  derived and/or modified CDS sequence (opt4) from neuraminidase__InfluenzaA__AHC57818

SEQ ID NO: 184035 - RNA, 1410 nt, Artificial Sequence
  derived and/or modified CDS sequence (opt4) from neuraminidase__InfluenzaA__AHC57830
augaaccccaaccagaagaucaucaccaucggcagcgugagccugaccaucagcaccaucugcuucuucaugcagaucgccauccugaucaccaccgugacccugcacuucaagcaguacgaguucaacagcccccccaacaaccaggugaugcugugcgagcccaccaucaucgagagaaacaucaccgagaucguguaccugaccaacaccaccaucgagaaggagaucugccccaagcuggccgaguacagaaacuggagcaagccccagugcgacaucaccggcuucgcccccuucagcaaggacaacagcaucagacugagcgccggcggcgacaucugggugaccagagagcccuacgugagcugcgaccccaacaagugcuaccaguucgcccugggccagggcaccacccugaacaacgugcacagcaacaacaccgugagagacagaacccccuacagaacccugcugaugaacgagcugggcgugcccuuccaccugggcaccaagcaggugugcaucgccuggagcagcagcagcugccacgacggcaaggccuggcugcacgugugcaucaccggcgacgacaagaacgccaccgccagcuucaucuacaacggcaagcugguggacagcguggugagcuggagcaaggagauccugagaacccaggagagcgagugcgugugcaucaacggcaccugcaccguggugaugaccgacggcagcgccagcggcaaggccgacaccaagauccuguucaucgaggagggcaagaucgugcacaccagcacccugagcggcagcgcccagcacguggaggagugcagcugcuaccccagauaccccggcgugagaugcgugugcagagacaacuggaagggcagcaacagacccaucguggacaucaacaucaaggaccacagcaucgugagcagcuacgugugcagcggccuggugggcgacacccccagaaagaacgacagcagcagcagcagccacugccuggaccccaacaacgaggagggcggccacggcgugaagggcugggccuucgacgacggcaacgacguguggaugggcagaaccaucaacgagaccagcagacugggcuacgagaccuucaaggugaucgagggcuggagcaaccccaagagcaagcugcagaucaacagacaggugaucguggacagaggcaacagaagcggcuacagcggcaucuucagcguggagggcaagagcugcaucaacagaugcuucuacguggagcugaucagaggcagaaaggaggagaccgaggugcuguggaccagcaacagcaucgugguguucugcggcaccagcggcaccuacggcaccggcagcuggcccgacggcgccgaccugaaccugaugcccaucuga

SEQ ID NO: 184036 - RNA, 1410 nt, Artificial Sequence; identical to SEQ ID NO: 184035
  derived and/or modified CDS sequence (opt4) from neuraminidase__InfluenzaA__AHC57971

SEQ ID NO: 184037 - RNA, 1410 nt, Artificial Sequence; identical to SEQ ID NO: 184031
  derived and/or modified CDS sequence (opt4) from neuraminidase__InfluenzaA__AHC57984

SEQ ID NO: 184038 - RNA, 1410 nt, Artificial Sequence
  derived and/or modified CDS sequence (opt4) from neuraminidase__InfluenzaA__AHC57996
augaaccccaaccagaagaucaucaccaucggcagcgugagccugaccaucagcaccaucugcuucuucaugcagaucgccauccugaucaccaccgugacccugcacuucaagcaguacgaguucuacagcccccccaacaaccaggugaugcugugcgagcccaccaucaucgagagaaacaucaccgagaucguguaccugaccaacaccaccaucgagaaggagaucugccccaagcuggccgaguacagaaacuggagcaagccccagugcgacaucaccggcuucgcccccuucagcaaggacaacagcaucagacugagcgccggcggcgacaucugggugaccagagagcccuacgugagcugcgaccccgacaagugcuaccaguucgcccugggccagggcaccacccugaacaacgugcacagcaacaacaccgugagagacagaaccccccacagaacccugcugaugaacgagcugggcgugcccuuccaccugggcaccaagcaggugugcaucgccuggagcagcagcagcugccacgacggcaaggccuggcugcacgugugcaucaccggcgacgacaagaacgccaccgccagcuucaucuacaacggcagacugguggacagcguggugagcuggagcaaggagauccugagaacccaggagagcgagugcgugugcaucaacggcaccugcaccguggugaugaccgacggcagcgccagcggcaaggccgacaccaagauccuguucaucgaggagggcaagaucgugcacaccagcacccugagcggcagcgcccagcacguggaggagugcagcugcuaccccagauaccccggcgugagaugcgugugcagagacaacuggaagggcagcaacagacccaucguggacaucaacaucaaggaccacagcaucgugagcagcuacgugugcagcggccuggugggcgacacccccagaaagaacgacagcagcagcagcagccacugccuggaccccaacaacgaggagggcggccacggcgugaagggcugggccuucgacgacggcaacgacguguggaugggcagaaccaucaacgagaccagcagacugggcuacgagaccuucaaggugaucgagggcuggagcaaccccaagagcaagcugcagaucaacagacaggugaucguggacagaggcaacagaagcggcuacagcggcaucuucagcguggagggcaagagcugcaucaacagaugcuucuacguggagcugaucagaggcagaaaggaggagaccgaggugcuguggaccagcaacagcaucgugguguucugcggcaccagcggcaccuacggcaccggcagcuggcccgacggcgccgaccugaaccugaugcccaucuga

SEQ ID NO: 184039 - RNA, 1410 nt, Artificial Sequence; identical to SEQ ID NO: 182982
  derived and/or modified CDS sequence (opt4) from neuraminidase__InfluenzaA__AHC58008

SEQ ID NO: 184040 - RNA, 1410 nt, Artificial Sequence; identical to SEQ ID NO: 179578
  derived and/or modified CDS sequence (opt4) from neuraminidase__InfluenzaA__AHC58020

SEQ ID NO: 184041 - RNA, 1410 nt, Artificial Sequence
  derived and/or modified CDS sequence (opt4) from neuraminidase__InfluenzaA__AHC58032
augaaccccaaccagaagaucaucaccaucggcagcgugagccugaccaucagcaccaucugcuucuucaugcagaucgccauccugaucaccaccgugacccugcacuucaagcaguacgaguucaacagcccccccaacaaccaggugaugcugugcgagcccaccaucaucgagagaaacaucaccgagaucguguaccugaccaacaccaccaucgagaaggagaucugccccaagcuggccgaguacagaaacuggagcaagccccagugcgacaucaccggcuucgcccccuucagcaaggacaacagcaucagacugagcgccggcggcgacaucugggugaccagagagcccuacgugagcugcgaccccaacaagugcuaccaguucgcccugggccagggcaccacccugaacaacgugcacagcaacaacaccgugagagacagaacccccuacagaacccugcugaugaacgagcugggcgugcccuuccaccugggcaccaagcaggugugcaucgccuggagcagcagcagcugccacgacggcaaggccuggcugcacgugugcaucaccggcgacgacaagaacgccaccgccagcuucaucuacaacggcaagcugguggacagcguggugagcuggagcaaggagauccugagaacccaggagagcgagugcgugugcaucaacggcaccugcaccguggugaugaccgacggcagcgccagcggcaaggccgacaccaagauccuguucaucgaggagggcaagaucgugcacaccagcacccugagcggcagcgcccagcacguggaggagugcagcugcuaccccagauaccccggcgugagaugcgugugcagagacaacuggaagggcagcaacagacccaucguggacaucaacaucaaggaccacagcaucgugagcagcuacgugugcagcggccuggugggcgacacccccagaaagaacgacagcagcagcagcagccacugccugaaccccaacaacgaggagggcggccacggcgugaagggcugggccuucgacgacggcaacgacguguggaugggcagaaccaucaacgagaccagcagacugggcuacgagaccuucaaggugaucgagggcuggagcaaccccaagagcaagcugcagaucaacagacaggugaucguggacagaggcaacagaagcggcuacagcggcaucuucagcguggagggcaagagcugcaucaacagaugcuucuacguggagcugaucagaggcagaaaggaggagaccgaggugcuguggaccagcaacagcaucgugguguucugcggcaccagcggcaccuacggcaccggcagcuggcccgacggcgccgaccugaaccugaugcccaucuga

SEQ ID NO: 184042 - RNA, 1410 nt, Artificial Sequence; identical to SEQ ID NO: 182982
  derived and/or modified CDS sequence (opt4) from neuraminidase__InfluenzaA__AHC58053

SEQ ID NO: 184043 - RNA, 1410 nt, Artificial Sequence
  derived and/or modified CDS sequence (opt4) from neuraminidase__InfluenzaA__AHC58077
augaaccccaaccagaagaucaucaccaucggcagcgugagccugaccaucagcaccaucugcuucuucaugcagaucgccauccugaucaccaccgugacccugcacuucaagcaguacgaguucuacagcccccccaacaaccaggugaugcugagagagcccaccaucaucgagagaaacaucaccgagaucguguaccugaccaacaccaccaccgagaaggagaucugccccaagcuggccgaguacagaaacuggagcaagccccagugcgacaucaccggcuucgcccccuucagcaaggacaacagcaucagacugagcgccggcggcgacaucugggugaccagagagcccuacgugagcugcgaccccgacaagugcuaccaguucgcccugggccagggcaccacccugaacaacgugcacagcaacaacaccgugagagacagaacccccuacagaacccugcugaugaacgagcugggcgugcccuuccaccugggcaccaagcaggugugcaucgccuggagcagcagcagcugccacgacggcaaggccuggcugcacgugugcaucaccggcgacgacaagaacgccaccgccagcuucaucuacaacggcagacugguggacagcguggugagcuggagcaaggagauccugagaacccaggagagcgagugcgugugcaucaacggcaccugcaccguggugaugaccgacggcagcgccagcggcaaggccgacaccaagauccuguucaucgaggagggcaagaucgugcacaccagcacccugagcggcagcgcccagcacguggaggagugcagcugcuaccccagauaccccggcgugagaugcgugugcagagacaacuggaagggcagcaacagacccaucguggacaucaacaucaaggaccacagcaucgugagcagcuacgugugcagcggccuggugggcgacacccccagaaagaacgacagcagcagcagcagccacugccuggaccccaacaacgaggagggcggccacggcgugaagggcugggccuucgacgacggcaacgacguguggaugggcagaaccaucaacgagaccagcagacugggcuacgagaccuucaaggugaucgagggcuggagcaaccccaagagcaagcugcagaucaacagacaggugaucguggacagaggcaacagaagcggcuacagcggcaucuucagcguggagggcaagagcugcaucaacagaugcuucuacguggagcugaucagaggcagaaaggaggagaccgaggugcuguggaccagcaacagcaucgugguguucugcggcaccagcggcaccuacggcaccggcagcuggcccgacggcgccgaccugaaccugaugcccaucuga

SEQ ID NO: 184044 - RNA, 1410 nt, Artificial Sequence; identical to SEQ ID NO: 184035
  derived and/or modified CDS sequence (opt4) from neuraminidase__InfluenzaA__AHC58089

SEQ ID NO: 184045 - RNA, 1410 nt, Artificial Sequence; identical to SEQ ID NO: 184031
  derived and/or modified CDS sequence (opt4) from neuraminidase__InfluenzaA__AHC58101

SEQ ID NO: 184046 - RNA, 1410 nt, Artificial Sequence
  derived and/or modified CDS sequence (opt4) from neuraminidase__InfluenzaA__AHC58113
augaaccccaaccagaagaucaucaccaucggcagcgugagccugaccaucagcaccaucugcuucuucaugcagaucgccauccugaucaccaccgugacccugcacuucaagcaguacgaguucuacagcccccccaacaaccaggugaugcugugcgagcccaccaucaucgagagaaacaucaccgagaucguguaccugaccaacaccaccaucgagaaggagaucugccccaagcuggccgaguacagaaacuggagcaagccccagugcgacaucaccggcuucgcccccuucagcaaggacaacagcaucagacugagcgccggcggcgacaucugggugaccagagagcccuacgugagcugcgaccccgacaagugcuaccaguucgcccugggccagggcaccacccugaacaacgugcacagcaacaacaccgugagagacagaacccccuacagaacccugcugaugaacgagcugggcgugcccuuccaccugggcaccaagcaggugugcaucgccuggagcagcagcagcugccacgacggcaaggccuggcugcacgugugcaucaccggcgacgacaagaacgccaccgccagcuucaucuacaacggcagacugguggacagcguggugagcuggagcaagaagauccugagaacccaggagagcgagugcgugugcaucaacggcaccugcaccguggugaugaccgacggcagcgccagcggcaaggccgacaccaagauccuguucaucgaggagggcaagaucgugcacaccagcacccugagcggcagcgcccagcacguggaggagugcagcugcuaccccagauaccccggcgugagaugcgugugcagagacaacuggaagggcagcaacagacccaucguggacaucaacaucaaggaccacagcaucgugagcagcuacgugugcagcggccuggugggcgacacccccagaaagaacgacagcagcagcagcagccacugccuggaccccaacaacgaggagggcggccacggcgugaagggcugggccuucgacgacggcaacgacguguggaugggcagaaccaucaacgagaccagcagacugggcuacgagaccuucaaggugaucgagggcuggagcaaccccaagagcaagcugcagaucaacagacaggugaucguggacagaggcaacagaagcggcuacagcggcaucuucagcguggagggcaagagcugcaucaacagaugcuucuacguggagcugaucagaggcagaaaggaggagaccgaggugcuguggaccagcaacagcaucgugguguucugcggcaccagcggcaccuacggcaccggcagcuggcccgacggcgccgaccugaaccugaugcccaucuga

SEQ ID NO: 184047 - RNA, 1410 nt, Artificial Sequence; identical to SEQ ID NO: 184031
  derived and/or modified CDS sequence (opt4) from neuraminidase__InfluenzaA__AHC58129

SEQ ID NO: 184048 - RNA, 1410 nt, Artificial Sequence; identical to SEQ ID NO: 184031
  derived and/or modified CDS sequence (opt4) from neuraminidase__InfluenzaA__AHC58153

SEQ ID NO: 184049 - RNA, 1410 nt, Artificial Sequence; identical to SEQ ID NO: 184031
  derived and/or modified CDS sequence (opt4) from neuraminidase__InfluenzaA__AHC58165

SEQ ID NO: 184050 - RNA, 1410 nt, Artificial Sequence; identical to SEQ ID NO: 184035
  derived and/or modified CDS sequence (opt4) from neuraminidase__InfluenzaA__AHC58177

SEQ ID NO: 184051 - RNA, 1410 nt, Artificial Sequence
  derived and/or modified CDS sequence (opt4) from neuraminidase__InfluenzaA__AHC58189
augaaccccaaccagaagaucaucaccaucggcagcgugagccugaccaucagcaccaucugcuucuucaugcagaucgccauccugaucaccaccgugacccugcacuucaagcaguacgaguucaacagcccccccaacaaccaggugaugcugugcgagcccaccaucaucgagagaaacaucaccgagaucguguaccugaccaacaccaccaucgagaaggagaucugccccaagcccgccgaguacagaaacuggagcaagccccagugcgacaucaccggcuucgcccccuucagcaaggacaacagcaucagacugagcgccggcggcgacaucugggugaccagagagcccuacgugagcugcgaccccgacaagugcuaccaguucgcccugggccagggcaccacccugaacaacgugcacagcaacaacaccgugagagacagaacccccuacagaacccugcugaugaacgagcugggcgugcccuuccaccugggcaccaagcaggugugcaucgccuggagcagcagcagcugccacgacggcaaggccuggcugcacgugugcaucaccggcgacgacaagaacgccaccgccagcuucaucuacaacggcagacugguggacagcguggugagcuggagcaaggagauccugagaacccaggagagcgagugcgugugcaucaacggcaccugcaccguggugaugaccgacggcagcgccagcggcaaggccgacaccaagauccuguucaucgaggagggcaagaucgugcacaccagcacccugagcggcagcgcccagcacguggaggagugcagcugcuaccccagauaccccggcgugagaugcgugugcagagacaacuggaagggcagcaacagacccaucguggacaucaacaucaaggaccacagcaucgugagcagcuacgugugcagcggccuggugggcgacacccccagaaagaacgacagcagcagcagcagccacugccuggaccccaacaacgaggagggcggccacggcgugaagggcugggccuucgacgacggcaacgacguguggaugggcagaaccaucaacgagaugagcagacugggcuacgagaccuucaaggugaucgagggcuggagcaaccccaagagcaagcugcagaucaacagacaggugaucguggacagaggcgacagaagcggcuacagcggcaucuucagcguggagggcaagagcugcaucaacagaugcuucuacguggagcugaucagaggcagaaaggaggagaccgaggugcuguggaccagcaacagcaucgugguguucugcggcaccagcggcaccuacggcaccggcagcuggcccgacggcgccgaccugaaccugaugcccaucuga

SEQ ID NO: 184052 - RNA, 1410 nt, Artificial Sequence; identical to SEQ ID NO: 184031
  derived and/or modified CDS sequence (opt4) from neuraminidase__InfluenzaA__AHC58201

SEQ ID NO: 184053 - RNA, 1410 nt, Artificial Sequence
  derived and/or modified CDS sequence (opt4) from neuraminidase__InfluenzaA__AHC58225
augaaccccaaccagaagaucaucaccaucggcagcgugagccugaccaucagcaccaucugcuucuucaugcagaucgccauccugaucaccaccgugacccugcacuucaagcaguacgaguucaacagcccccccaacaaccaggugaugcugugcgagcccaccaucaucgagagaaacaucaccgagaucguguaccugaccaacaccaccaucgagaaggagaucugccccaagcccgccgaguacagaaacuggagcaagccccagugcgacaucaccggcuucgcccccuucagcaaggacaacagcaucagacugagcgccggcggcgacaucugggugaccagagagcccuacgugagcugcgaccccgacaagugcuaccaguucgcccugggccagggcaccacccugaacaacgugcacagcaacaacaccgugagagacagaacccccuacagaacccugcugaugaacgagcugggcgugcccuuccaccugggcaccaagcaggugugcaucgccuggagcagcagcagcugccacgacggcaaggccuggcugcacgugugcaucaccggcgacgacaagaacgccaccgccagcuucaucuacaacggcagacugguggacagcguggugagcuggagcaaggagauccugagaacccaggagagcgagugcgugugcaucaacggcaccugcaccguggugaugaccgacggcagcgccagcggcaaggccgacaccaagauccuguucaucgaggagggcaagaucgugcacaccagcacccugagcggcagcgcccagcacguggaggagugcagcugcuaccccagauaccccggcgugagaugcgugugcagagacaacuggaagggcagcaacagacccaucguggacaucaacaucaaggaccacagcaucgugagcagcuacgugugcagcggccuggugggcgacacccccagaaagaacgacagcagcagcagcagccacugccuggaccccaacaacgaggagggcggccacggcgugaagggcugggccuucgacgacggcaacgacguguggaugggcagaaccaucaacgagaccagcagacugggcuacgagaccuucaaggugaucgagggcuggagcaaccccaagagcaagcugcagaucaacagacaggugaucgugaacagaggcgacagaagcggcuacagcggcaucuucagcguggagggcaagagcugcaucaacagaugcuucuacguggagcugaucagaggcagaaaggaggagaccgaggugcuguggaccagcaacagcaucgugguguucugcggcaccagcggcaccuacggcaccggcagcuggcccgacggcgccgaccugaaccugaugcccaucuga

SEQ ID NO: 184054 - RNA, 1410 nt, Artificial Sequence; identical to SEQ ID NO: 184035
  derived and/or modified CDS sequence (opt4) from neuraminidase__InfluenzaA__AHC58237

SEQ ID NO: 184055 - RNA, 1410 nt, Artificial Sequence; identical to SEQ ID NO: 184031
  derived and/or modified CDS sequence (opt4) from neuraminidase__InfluenzaA__AHC58249

SEQ ID NO: 184056 - RNA, 1410 nt, Artificial Sequence; identical to SEQ ID NO: 179578
  derived and/or modified CDS sequence (opt4) from neuraminidase__InfluenzaA__AHC58273

SEQ ID NO: 184057 - RNA, 1410 nt, Artificial Sequence; identical to SEQ ID NO: 184035
  derived and/or modified CDS sequence (opt4) from neuraminidase__InfluenzaA__AHC58363

SEQ ID NO: 184058 - RNA, 1410 nt, Artificial Sequence; identical to SEQ ID NO: 182982
  derived and/or modified CDS sequence (opt4) from neuraminidase__InfluenzaA__AHC58375

SEQ ID NO: 184059 - RNA, 1410 nt, Artificial Sequence; identical to SEQ ID NO: 184035
  derived and/or modified CDS sequence (opt4) from neuraminidase__InfluenzaA__AHC58387

SEQ ID NO: 184060 - RNA, 1410 nt, Artificial Sequence; identical to SEQ ID NO: 184035
  derived and/or modified CDS sequence (opt4) from neuraminidase__InfluenzaA__AHC58399

SEQ ID NO: 184061 - RNA, 1410 nt, Artificial Sequence; identical to SEQ ID NO: 184031
  derived and/or modified CDS sequence (opt4) from neuraminidase__InfluenzaA__AHC58411

SEQ ID NO: 184062 - RNA, 1410 nt, Artificial Sequence; identical to SEQ ID NO: 182982
  derived and/or modified CDS sequence (opt4) from neuraminidase__InfluenzaA__AHC58423

SEQ ID NO: 184063 - RNA, 1410 nt, Artificial Sequence; identical to SEQ ID NO: 184035
  derived and/or modified CDS sequence (opt4) from neuraminidase__InfluenzaA__AHC58459

SEQ ID NO: 184064 - RNA, 1410 nt, Artificial Sequence
  derived and/or modified CDS sequence (opt4) from neuraminidase__InfluenzaA__AHC58471
augaaccccaaccagaagaucaucaccaucggcagcgugugcaugaccaucggcauggccaaccugauccugcagaucggcaacaucaucagcaucuggaucagccacagcauccagcugggcaaccagaaccagaucgagaccugcaaccagagcgugaucaccuacgagaacaacaccugggugaaccagaccuacgugaacaucagcaacaccaacuucgccgccggccagcccguggugagcgugaagcuggccggcaacagcagccugugccccgugagcggcugggccaucuacagcaaggacaacagcaucagaaucggcagcaagggcgacguguucgugaucagagagcccuucaucagcugcagcccccuggagugcagaaccuucuuccugacccagggcgcccugcugaacgacaagcacagcaacggcaccaucaaggacagaagccccuacagaacccugaugagcugccccaucggcgaggugcccagccccuacaacagcagauucgagagcguggccuggagcgccagcgccugccacgacggcaucaacuggcugaccaucggcaucagcggccccgacaacggcgccguggccgugcugaaguacaacggcaucaucaccgacaccaucaagagcuggagaaacaacauccugagaacccaggagagcgagugcgccugcgugaacggcagcugcuucaccgugaugaccgacggccccagcgacggccaggccagcuacaagaucuucagaaucgagaagggcaagaucgugaagagcguggagaugaacgcccccaacuaccacuacgaggagugcagcugcuaccccgacagcagcgagaucaccugcgugugcagagacaacuggcacggcgccaacagacccugggugagcuucaaccagaaccuggaguaccagaucggcuacaucugcagcggcguguucggcgacaaccccagacccaacgacaagaccggcagcugcggccccgugagcagcaacggcgccaacggcgugaagggcuucagcuucaaguacggcaacggcguguggaucggcagaaccaagagcaucagcagcagaaacggcuucgagaugaucugggaccccaacggcuggaccggcaccgacaacaacuucagcaucaagcaggacaucgugggcaucaacgaguggagcggcuacagcggcagcuucgugcagcaccccgagcugaccggccuggacugcaucagacccugcuucuggguggagcugaucagaggcagacccaaggagaacaccaucuggaccagcggcagcagcaucagcuucugcggcgugaacagcgacaccgugggcuggagcuggcccgacggcgccgagcugcccuucaccaucgacaaguga

SEQ ID NO: 184065 - RNA, 1410 nt, Artificial Sequence; identical to SEQ ID NO: 184031
  derived and/or modified CDS sequence (opt4) from neuraminidase__InfluenzaA__AHC58482

SEQ ID NO: 184066 - RNA, 1410 nt, Artificial Sequence; identical to SEQ ID NO: 184035
  derived and/or modified CDS sequence (opt4) from neuraminidase__InfluenzaA__AHC58494

SEQ ID NO: 184067 - RNA, 1410 nt, Artificial Sequence
  derived and/or modified CDS sequence (opt4) from neuraminidase__InfluenzaA__AHC58518
augaaccccaaccagaagaucaucaccaucggcagcgugagccugaccaucagcaccaucugcuucuucaugcagguggccauccugaucaccaccgugacccugcacuucaagcaguacgaguucaacagcccccccaacaaccaggugaugcugugcgagcccaccaucaucgagagaaacaucaccgagaucguguaccugaccaacaccaccaucgagaaggagaucugccccaagcuggccgaguacagaaacuggagcaagccccagugcgacaucaccggcuucgcccccuucagcaaggacaacagcaucagacugagcgccggcggcgacaucugggugaccagagagcccuacgugagcugcgaccccgacaagugcuaccaguucgcccugggccagggcaccacccugaacaacgugcacagcaacaacaccgugagagacagaacccccuacagaacccugcugaugaacgagcugggcgugcccuuccaccugggcaccaagcaggugugcaucgccuggagcagcagcagcugccacgacggcaaggccuggcugcacgugugcaucaccggcgacgacaagaacgccaccgccagcuucaucuacaacggcaagcugguggacagcguggugagcuggagcaaggagauccugagaacccaggagagcgagugcgugugcaucaacggcaccugcaccguggugaugaccgacggcagcgccagcggcaaggccgacaccaagauccuguucaucgaggagggcaagaucgugcacaccagcacccugagcggcagcgcccagcacguggaggagugcagcugcuaccccagauaccccggcgugagaugcgugugcagagacaacuggaagggcagcaacagacccaucguggacaucaacaucaaggaccacagcaucgugagcagcuacgugugcagcggccuggugggcgacacccccagaaagaacgacagcagcagcagcagccacugccuggaccccaacaacgaggagggcggccacggcgugaagggcugggccuucgacgacggcaacgacguguggaugggcagaaccaucaacgagaccagcagacugggcuacgagaccuucaaggugaucgagggcuggagcaaccccaagagcaagcugcagaucaacagacaggugaucguggacagaggcaacagaagcggcuacagcggcaucuucagcguggagggcaagagcugcaucaacagaugcuucuacguggagcugaucagaggcagaaaggaggagaccgaggugcuguggaccagcaacagcaucgugguguucugcggcaccagcggcaccuacggcaccggcagcuggcccgacggcgccgaccugaaccugaugcccaucuga

SEQ ID NO: 184068 - RNA, 1410 nt, Artificial Sequence; identical to SEQ ID NO: 184031
  derived and/or modified CDS sequence (opt4) from neuraminidase__InfluenzaA__AHC58530

SEQ ID NO: 184069 - RNA, 1410 nt, Artificial Sequence; identical to SEQ ID NO: 184031
  derived and/or modified CDS sequence (opt4) from neuraminidase__InfluenzaA__AHC58554

SEQ ID NO: 184070 - RNA, 1410 nt, Artificial Sequence; identical to SEQ ID NO: 184031
  derived and/or modified CDS sequence (opt4) from neuraminidase__InfluenzaA__AHC58566

SEQ ID NO: 184071 - RNA, 1410 nt, Artificial Sequence
  derived and/or modified CDS sequence (opt4) from neuraminidase__InfluenzaA__AHC58578
augaaccccaaccagaagaucaucaccaucggcagcgugagccugaccgugagcaccaucugcuucuucaugcagaucgccauccugaucaccaccgugacccugcacuucaagcaguacgaguucuacagcccccccaacaaccaggugaugcugugcgagcccaccaucaucgagagaaacaucaccgagaucguguaccugaccaacaccaccaucgagaaggagaucugccccaagcuggccgaguacagaaacuggagcaagccccagugcgacaucaccggcuucgcccccuucagcaaggacaacagcaucagacugagcgccggcggcgacaucugggugaccagagagcccuacgugagcugcgaccccgacaagugcuaccaguucgcccugggccagggcaccacccugaacaacgugcacagcaacaacaccgugagagacagaacccccuacagaacccugcugaugaacgagcugggcgugcccuuccaccugggcaccaagcaggugugcaucgccuggagcagcagcagcugccacgacggcaaggccuggcugcacgugugcaucaccggcgacgacaagaacgccaccgccagcuucaucuacaacggcagacugguggacagcguggugagcuggagcaaggagauccugagaacccaggagagcgagugcgugugcaucaacggcaccugcaccguggugaugaccgacggcagcgccagcggcaaggccgacaccaagauccuguucaucgaggagggcaagaucgugcacaccagcacccugagcggcagcgcccagcacguggaggagugcagcugcuaccccagauaccccggcgugagaugcgugugcagagacaacuggaagggcagcaacagacccaucguggacaucaacaucaaggaccacagcaucgugagcagcuacgugugcagcggccuggugggcgacacccccagaaagaacgacagcagcagcagcagccacugccuggaccccaacaacgaggagggcggccacggcgugaagggcugggccuucgacgacggcaacgacguguggaugggcagaaccaucaacgagaccagcagacugggcuacgagaccuucaaggugaucgagggcuggagcaaccccaagagcaagcugcagaucaacagacaggugaucguggacagaggcaacagaagcggcuacagcggcaucuucagcguggagggcaagagcugcaucaacagaugcuucuacguggagcugaucagaggcagaaaggaggagaccgaggugcuguggaccagcaacagcaucgugguguucugcggcaccagcggcaccuacggcaccggcagcuggcccgacggcgccgaccugaaccugaugcccaucuga

SEQ ID NO: 184072 - RNA, 1410 nt, Artificial Sequence; identical to SEQ ID NO: 179578
  derived and/or modified CDS sequence (opt4) from neuraminidase__InfluenzaA__AHC58590

SEQ ID NO: 184073 - RNA, 1410 nt, Artificial Sequence; identical to SEQ ID NO: 184067
  derived and/or modified CDS sequence (opt4) from neuraminidase__InfluenzaA__AHC58602

SEQ ID NO: 184074 - RNA, 1410 nt, Artificial Sequence; identical to SEQ ID NO: 184031
  derived and/or modified CDS sequence (opt4) from neuraminidase__InfluenzaA__AHC58614

SEQ ID NO: 184075 - RNA, 1410 nt, Artificial Sequence; identical to SEQ ID NO: 184031
  derived and/or modified CDS sequence (opt4) from neuraminidase__InfluenzaA__AHC58626

SEQ ID NO: 184076 - RNA, 1410 nt, Artificial Sequence; identical to SEQ ID NO: 184031
  derived and/or modified CDS sequence (opt4) from neuraminidase__InfluenzaA__AHC58638

SEQ ID NO: 184077 - RNA, 1410 nt, Artificial Sequence; identical to SEQ ID NO: 184031
  derived and/or modified CDS sequence (opt4) from neuraminidase__InfluenzaA__AHC58650

SEQ ID NO: 184078 - RNA, 1410 nt, Artificial Sequence
  derived and/or modified CDS sequence (opt4) from neuraminidase__InfluenzaA__AHC58662
augaaccccaaccagaagaucaucaccaucggcagcgugagccugaccaucagcaccaucugcuucuucaugcagaccgccauccugaucaccaccgugacccugcacuucaagcaguacgaguucaacagcccccccaacaaccaggugaugcugugcgagcccaccaucaucgagagaaacaucaccgagaucguguaccugaccaacaccaccaucgagaaggagaucugccccaagcuggccgaguacagaaacuggagcaagccccagugcgacaucaccggcuucgcccccuucagcaaggacaacagcaucagacugagcgccggcggcgacaucugggugaccagagagcccuacgugagcugcgaccccgacaagugcuaccaguucgcccugggccagggcaccacccugaacaacgugcacagcaacaacaccgugagagacagaacccccuacagaacccugcugaugaacgagcugggcgugcccuuccaccugggcaccaagcaggugugcaucgccuggagcagcagcagcugccacgacggcaaggccuggcugcacgugugcaucaccggcgacgacaagaacgccaccgccagcuucaucuacaacggcaagcugguggacagcguggugagcuggagcaaggagauccugagaacccaggagagcgagugcgugugcaucaacggcaccugcaccguggugaugaccgacggcagcgccagcggcaaggccgacaccaagauccuguucaucgaggagggcaagaucgugcacaccagcacccugagcggcagcgcccagcacguggaggagugcagcugcuaccccagauaccccggcgugagaugcgugugcagagacaacuggaagggcagcaacagacccaucguggacaucaacaucaaggaccacagcaucgugagcagcuacgugugcagcggccuggugggcgacacccccagaaagaacgacagcagcagcagcagccacugccuggaccccaacaacgaggagggcggccacggcgugaagggcugggccuucgacgacggcaacgacguguggaugggcagaaccaucaacgagaccagcagacugggcuacgagaccuucaaggugaucgagggcuggagcaaccccaagagcaagcugcagaucaacagacaggugaucguggacagaggcaacagaagcggcuacagcggcaucuucagcguggagggcaagagcugcaucaacagaugcuucuacguggagcugaucagaggcagaaaggaggagaccgaggugcuguggaccagcaacagcaucgugguguucugcggcaccagcggcaccuacggcaccggcagcuggcccgacggcgccgaccugaaccugaugcccaucuga

SEQ ID NO: 184079 - RNA, 1410 nt, Artificial Sequence
  derived and/or modified CDS sequence (opt4) from neuraminidase__InfluenzaA__AHC58686
augaaccccaaccagaagaucaucaccaucggcagcgugagccugaccaucagcaccaucugcuucuucaugcagaucgccauccugaucaccaccgugacccugcacuucaagcaguacgaguucaacagcccccccaacaaccagguggugcugugcgagcccaccaucaucgagagaaacaucaccgagaucguguaccugaccaacaccaccaucgagaaggagaucugccccaagcccgccgaguacagaaacuggagcaagccccagugcgacaucaccggcuucgcccccuucagcaaggacaacagcaucagacugagcgccggcggcgacaucugggugaccagagagcccuacgugagcugcgaccccgacaagugcuaccaguucgcccugggccagggcaccacccugaacaacgugcacagcaacaacaccgugagagacagaacccccuacagaacccugcugaugaacgagcugggcgugcccuuccaccugggcaccaagcaggugugcaucgccuggagcagcagcagcugccacgacggcaaggccuggcugcacgugugcaucaccggcgacgacaagaacgccaccgccagcuucaucuacaacggcagacugguggacagcguggugagcuggagcaaggagauccugagaacccaggagagcgagugcgugugcaucaacggcaccugcaccguggugaugaccgacggcagcgccagcggcaaggccgacaccaagauccuguucaucgaggagggcaagaucgugcacaccagcacccugagcggcagcgcccagcacguggaggagugcagcugcuaccccagauaccccggcgugagaugcgugugcagagacaacuggaagggcagcaacagacccaucguggacaucaacaucaaggaccacagcaucgugagcagcuacgugugcagcggccuggugggcgacacccccagaaagaacgacagcagcagcagcagccacugccuggaccccaacaacgaggagggcggccacggcgugaagggcugggccuucgacgacggcaacgacguguggaugggcagaaccaucaacgagaccagcagacugggcuacgagaccuucaaggugaucgagggcuggagcaaccccaagagcaagcugcagaucaacagacaggugaucguggacagaggcgacagaagcggcuacagcggcaucuucagcguggagggcaagagcugcaucaacagaugcuucuacguggagcugaucagaggcagaaaggaggagaccgaggugcuguggaccagcaacagcaucgugguguucugcggcaccagcggcaccuacggcaccggcagcuggcccgacggcgccgaccugaaccugaugcccaucuga

SEQ ID NO: 184080 - RNA, 1410 nt, Artificial Sequence
  derived and/or modified CDS sequence (opt4) from neuraminidase__InfluenzaA__AHC58698
augaaccccaaccagaagaucaucaccaucggcagcgugagccugaccaucagcaccaucugcuucuucaugcagaucgccauccugaucaccaccgugacccugcacuucaagcaguacgaguucaacagcccccccaacaaccaggugaugcugugcgagcccaccaucaucgagagaaacaucaccgagaucguguaccugaccaacaccaccaucgagaaggagaucugccccaagcuggccgaguacagaaacuggagcaagccccagugcgacaucaccggcuucgcccccuucagcaaggacaacagcaucagacugagcgccggcggcgacaucugggugaccagagagcccuacgugagcugcgaccccgacaagugcuaccaguucgcccugggccagggcaccacccugaacaacgugcacagcaacaacaccgugagagacagaacccccuacagaacccugcugaugaacgagcugggcgugcccuuccaccugggcaccaagcaggugugcaucgccuggagcagcagcagcugccacgacggcaaggccuggcugcacgugugcaucaccggcgacgacaagaacgccaccgccagcuucaucuacaacggcagacugguggacagcguggugagcuggagcaaggagauccugagaacccaggagagcgagugcgugugcaucaacggcaccugcgccguggugaugaccgacggcagcgccagcggcaaggccgacaccaagauccuguucaucgaggagggcaagaucgugcacaccagcacccugagcggcagcgcccagcacguggaggagugcagcugcuaccccagauaccccggcgugagaugcgugugcagagacaacuggaagggcagcaacagacccaucguggacaucaacaucaaggaccacagcaucgugagcagcuacgugugcagcggccuggugggcgacacccccagaaagaacgacagcagcagcagcagccacugccuggaccccaacaacgaggagggcggccacggcgugaagggcugggccuucgacgacggcaacgacguguggaugggcagaaccaucaacgagaccagcagacugggcuacgagaccuucaaggugaucgagggcuggagcaaccccaagagcaagcugcagaucaacagacaggugaucguggacagaggcaacagaagcggcuacagcggcaucuucagcguggagggcaagagcugcaucaacagaugcuucuacguggagcugaucagaggcagaaaggaggagaccgaggugcuguggaccagcaacagcaucgugguguucugcggcaccagcggcaccuacggcaccggcagcuggcccgacggcgccgaccugaaccugaugcccaucuga

SEQ ID NO: 184081 - RNA, 1410 nt, Artificial Sequence; identical to SEQ ID NO: 182982
  derived and/or modified CDS sequence (opt4) from neuraminidase__InfluenzaA__AHC58710

SEQ ID NO: 184082 - RNA, 1410 nt, Artificial Sequence; identical to SEQ ID NO: 182982
  derived and/or modified CDS sequence (opt4) from neuraminidase__InfluenzaA__AHC58722

SEQ ID NO: 184083 - RNA, 1410 nt, Artificial Sequence
  derived and/or modified CDS sequence (opt4) from neuraminidase__InfluenzaA__AHC58734
augaaccccaaccagaagaucaucaccaucggcagcgugagccugaccaucagcaccaucugcuucuucaugcagaucgccauccugaucaccaccgugacccugcacuucaagcaguacgaguucaacagcccccccaacaaccaggugaugcugugcgagcccaccaucaucgagagaaacaucaccgagaucguguaccugaccaacaccaccaucgagaaggagaucugccccaagcuggccgaguacagaaacuggagcaagccccagugcgacaucaccggcuucgcccccuucagcaaggacaacagcaucagacugagcgccggcggcgacaucugggugaccagagagcccuacgugagcugcgaccccaacaagugcuaccaguucgcccugggccagggcaccacccugaacaacgugcacagcaacaacaccgugagagacagaacccccuacagaacccugcugaugaacgagcugggcgugcccuuccaccugggcaccaagcaggugugcaucgccuggagcagcagcagcugccacgacggcaaggccuggcugcacgugugcaucaccggcgacgacaagaacgccaccgccagcuucaucuacaacggcaagcugguggacagcguggugagcuggagcaaggagauccugagaacccaggagagcgagugcgugugcaucaacggcaccugcaccguggugaugaccgacggcagcgccagcggcaaggccgacaccaagauccuguucaucgaggagggcaagaucgugcacaccagcacccugagcggcagcgcccagcacguggaggagugcagcugcuaccccagauaccccggcaucagaugcgugugcagagacaacuggaagggcagcaacagacccaucguggacaucaacaucaaggaccacagcaucgugagcagcuacgugugcagcggccuggugggcgacacccccagaaagaacgacagcagcagcagcagccacugccuggaccccaacaacgaggagggcggccacggcgugaagggcugggccuucgacgacggcaacgacguguggaugggcagaaccaucaacgagaccagcagacugggcuacgagaccuucaaggugaucgagggcuggagcaaccccaagagcaagcugcagaucaacagacaggugaucguggacagaggcaacagaagcggcuacagcggcaucuucagcguggagggcaagagcugcaucaacagaugcuucuacguggagcugaucagaggcagaaaggaggagaccgaggugcuguggaccagcaacagcaucgugguguucugcggcaccagcggcaccuacggcaccggcagcuggcccgacggcgccgaccugaaccugaugcccaucuga

SEQ ID NO: 184084 - RNA, 1410 nt, Artificial Sequence; identical to SEQ ID NO: 184031
  derived and/or modified CDS sequence (opt4) from neuraminidase__InfluenzaA__AHC58746

SEQ ID NO: 184085 - RNA, 1410 nt, Artificial Sequence; identical to SEQ ID NO: 184035
  derived and/or modified CDS sequence (opt4) from neuraminidase__InfluenzaA__AHC58758

SEQ ID NO: 184086 - RNA, 1410 nt, Artificial Sequence; identical to SEQ ID NO: 184031
  derived and/or modified CDS sequence (opt4) from neuraminidase__InfluenzaA__AHC58770

SEQ ID NO: 184087 - RNA, 1410 nt, Artificial Sequence; identical to SEQ ID NO: 179578
  derived and/or modified CDS sequence (opt4) from neuraminidase__InfluenzaA__AHC58782

SEQ ID NO: 184088 - RNA, 1410 nt, Artificial Sequence; identical to SEQ ID NO: 184031
  derived and/or modified CDS sequence (opt4) from neuraminidase__InfluenzaA__AHC58806

SEQ ID NO: 184089 - RNA, 1410 nt, Artificial Sequence
  derived and/or modified CDS sequence (opt4) from neuraminidase__InfluenzaA__AHC58818
augaaccccaaccagaagaucaucaccaucggcagcgugagccugaccaucagcaccaucugcuucuucauccagaucgccauccugaucaccaccgugacccugcacuucaagcaguacgaguucaacagcccccccaacaaccaggugaugcugugcgagcccaccaucaucgagagaaacaucaccgagaucguguaccugaccaacaccaccaucgagaaggagaucugccccaagcuggccgaguacagaaacuggagcaagccccagugcgacaucaccggcuucgcccccuucagcaaggacaacagcaucagacugagcgccggcggcgacaucugggugaccagagagcccuacgugagcugcgaccccgacaagugcuaccaguucgcccugggccagggcaccacccugaacaacgugcacagcaacaacaccgugagagacagaacccccuacagaacccugcugaugaacgagcugggcgugcccuuccaccugggcaccaagcaggugugcaucgccuggagcagcagcagcugccacgacggcaaggccuggcugcacgugugcaucaccggcgacgacaagaacgccaccgccagcuucaucuacaacggcagacugguggacagcguggugagcuggagcaaggagauccugagaacccaggagagcgagugcgugugcaucaacggcaccugcaccguggugaugaccgacggcagcgccagcggcaaggccgacaccaagauccuguucaucgaggagggcaagaucgugcacaccagcacccugagcggcagcgcccagcacguggaggagugcagcugcuaccccagauaccccggcgugagaugcgugugcagagacaacuggaagggcagcaacagacccaucguggacaucaacaucaaggaccacagcaucgugagcagcuacgugugcagcggccuggugggcgacacccccagaaagaacgacagcagcagcagcagccacugccuggaccccaacaacgaggagggcggccacggcgugaagggcugggccuucgacgacggcaacgacguguggaugggcagaaccaucaacgagaccagcagacugggcuacgagaccuucaaggugaucgagggcuggagcaaccccaagagcaagcugcagaucaacagacaggugaucguggacagaggcaacagaagcggcuacagcggcaucuucagcguggagggcaagagcugcaucaacagaugcuucuacguggagcugaucagaggcagaaaggaggagaccgaggugcuguggaccagcaacagcaucgugguguucugcggcaccagcggcaccuacggcaccggcagcuggcccgacggcgccgaccugaaccugaugcccaucuga

SEQ ID NO: 184090 - RNA, 1410 nt, Artificial Sequence; identical to SEQ ID NO: 184080
  derived and/or modified CDS sequence (opt4) from neuraminidase__InfluenzaA__AHC58830

SEQ ID NO: 184091 - RNA, 1410 nt, Artificial Sequence; identical to SEQ ID NO: 184031
  derived and/or modified CDS sequence (opt4) from neuraminidase__InfluenzaA__AHC58842

SEQ ID NO: 184092 - RNA, 1410 nt, Artificial Sequence
  derived and/or modified CDS sequence (opt4) from neuraminidase__InfluenzaA__AHC58866
augaaccccaaccagaagaucaucaccaucggcagcgugagccugaccaucagcaccaucugcuucuucaugcagaucgccauccugaucaccaccgugacccugcacuucaagcagugcgaguucaacagcccccccaacaacagagugaugcugugcgagcccaccaucaucgagagaaacaucaccgagaucguguaccugaccaacaccaccaucgagaaggagaucugccccaagcuggccgaguacagaaacuggagcaagccccagugcgacaucaccggcuucgcccccuucagcaaggacaacagcaucagacugagcgccggcggcgacaucugggugaccagagagcccuacgugagcugcgaccccaacaagugcuaccaguucgcccugggccagggcaccacccugaacaacgugcacagcaacaacaccgugagagacagaacccccuacagaacccugcugaugaacgagcugggcgugcccuuccaccugggcaccaagcaggugugcaucgccuggagcagcagcagcugccacgacggcaaggccuggcugcacgugugcaucaccggcgacgacaagaacgccaccgccagcuucaucuacaacggcaagcugguggacagcguggugagcuggagcaaggagauccugagaacccaggagagcgagugcgugugcaucaacggcaccugcaccguggugaugaccgacggcagcgccagcggcaaggccgacaccaagauccuguucaucgaggagggcaagaucgugcacaccagcacccugagcggcagcgcccagcacguggaggagugcagcugcuaccccagauaccccggcgugagaugcgugugcagagacaacuggaagggcagcaacagacccaucguggacaucaacaucaaggaccacagcaucgugagcagcuacgugugcagcggccuggugggcgacacccccagaaagaacgacagcagcagcagcagccacugccuggaccccaacaacgaggagggcggccacggcgugaagggcugggccuucgacgacggcaacgacguguggaugggcagaaccaucaacgagaccagcagacugggcuacgagaccuucaaggugaucgagggcuggagcaaccccaagagcaagcugcagaucaacagacaggugaucguggacagaggcaacagaagcggcuacagcggcaucuucagcguggagggcaagagcugcaucaacagaugcuucuacguggagcugaucagaggcagaaaggaggagaccggcgugcuguggaccagcaacagcaucgugguguucugcggcaccagcggcaccuacggcaccggcagcuggcccgacggcgccgaccugaaccugaugcccaucuga

SEQ ID NO: 184093 - RNA, 1410 nt, Artificial Sequence; identical to SEQ ID NO: 184080
  derived and/or modified CDS sequence (opt4) from neuraminidase__InfluenzaA__AHC58878

SEQ ID NO: 184094 - RNA, 1410 nt, Artificial Sequence; identical to SEQ ID NO: 184031
  derived and/or modified CDS sequence (opt4) from neuraminidase__InfluenzaA__AHC58890

SEQ ID NO: 184095 - RNA, 1410 nt, Artificial Sequence; identical to SEQ ID NO: 184035
  derived and/or modified CDS sequence (opt4) from neuraminidase__InfluenzaA__AHC58902

SEQ ID NO: 184096 - RNA, 1410 nt, Artificial Sequence; identical to SEQ ID NO: 184031
  derived and/or modified CDS sequence (opt4) from neuraminidase__InfluenzaA__AHC58996

SEQ ID NO: 184097 - RNA, 1410 nt, Artificial Sequence; identical to SEQ ID NO: 184031
  derived and/or modified CDS sequence (opt4) from neuraminidase__InfluenzaA__AHC59008

SEQ ID NO: 184098 - RNA, 1410 nt, Artificial Sequence; identical to SEQ ID NO: 184035
  derived and/or modified CDS sequence (opt4) from neuraminidase__InfluenzaA__AHC59020

SEQ ID NO: 184099 - RNA, 1410 nt, Artificial Sequence
  derived and/or modified CDS sequence (opt4) from neuraminidase__InfluenzaA__AHC59032
augaaccccaaccagaagaucaucaccaucggcagcgugagccugaccaucagcaccaucugcuucuucaugcagaucgccauccugaucaccaccgugacccugcacuucaagcaguacgaguucaacagcccccccaacaaccaggugaugcugugcgagcccaccaucaucgagagaaacaucaccgagaucguguaccugaccaacaccaccaucgagaaggagaucugccccaagcuggccgaguacagaaacuggagcaagccccagugcgacaucaccggcuucgcccccuucagcaaggacaacagcaucagacugagcgccggcggcgacaucugggugaccagagagcccuacgugagcugcgaccccaacaagugcuaccaguucgcccugggccagggcaccacccugaacaacgugcacagcaacaacaccgugagagacagaacccccuacagaacccugcugaugaacgagcugggcgugcccuuccaccugggcaccaagcaggugugcaucgccuggagcagcagcagcugccacgacggcaaggccuggcugcacgugugcaucaccggcgacgacaagaacgccaccgccagcuucaucuacaacggcaagcugguggacagcguggugagcuggagcaaggagauccugagaacccaggagagcgagugcgugugcaucaacggcaccugcaccguggugaugaccgacggcagcgccagcggcaaggccgacaccaagauccuguucaucgaggagggcaagaucgugcacaccagcacccugagcggcagcgcccagcacguggaggagugcagcugcuaccccagauaccccagcgugagaugcgugugcagagacaacuggaagggcagcaacagacccaucguggacaucaacaucaaggaccacagcaucgugagcagcuacgugugcagcggccuggugggcgacacccccagaaagaacgacagcagcagcagcagccacugccuggaccccaacaacgaggagggcggccacggcgugaagggcugggccuucgacgacggcaacgacguguggaugggcagaaccaucaacgagaccagcagacugggcuacgagaccuucaaggugaucgagggcuggagcaaccccaagagcaagcugcagaucaacagacaggugaucguggacagaggcaacagaagcggcuacagcggcaucuucagcguggagggcaagagcugcaucaacagaugcuucuacguggagcugaucagaggcagaaaggaggagaccgaggugcuguggaccagcaacagcaucgugguguucugcggcaccagcggcaccuacggcaccggcagcuggcccgacggcgccgaccugaaccugaugcccaucuga

SEQ ID NO: 184100 - RNA, 1410 nt, Artificial Sequence; identical to SEQ ID NO: 184067
  derived and/or modified CDS sequence (opt4) from neuraminidase__InfluenzaA__AHC59044

SEQ ID NO: 184101 - RNA, 1410 nt, Artificial Sequence; identical to SEQ ID NO: 179578
  derived and/or modified CDS sequence (opt4) from neuraminidase__InfluenzaA__AHC59056

SEQ ID NO: 184102 - RNA, 1410 nt, Artificial Sequence; identical to SEQ ID NO: 184031
  derived and/or modified CDS sequence (opt4) from neuraminidase__InfluenzaA__AHC59068

SEQ ID NO: 184103 - RNA, 1410 nt, Artificial Sequence; identical to SEQ ID NO: 184031
  derived and/or modified CDS sequence (opt4) from neuraminidase__InfluenzaA__AHC59080

SEQ ID NO: 184104 - RNA, 1410 nt, Artificial Sequence
  derived and/or modified CDS sequence (opt4) from neuraminidase__InfluenzaA__AHC59092
augaaccccaaccagaagaucaucaccaucggcagcgugagccugaccaucagcaccaucugcuucuucaugcagaucgccauccuggugaccaccgugacccugcacuucaagcaguacgaguucaacagcccccccaacaaccaggugaugcugugcgagcccaccaucaucgagagaaacaucaccgagaucguguaccugaccaacaccaccaucgagaaggagaucugccccaagcccgccgaguacagaaacuggagcaagccccagugcgacaucaccggcuucgcccccuucagcaaggacaacagcaucagacugagcgccggcggcgacaucugggugaccagagagcccuacgugagcugcgaccccgacaagugcuaccaguucgcccugggccagggcaccacccugaacaacgugcacagcaacaacaccgugagagacagaacccccuacagaacccugcugaugaacgagcugggcgugcccuuccaccugggcaccaagcaggugugcaucgccuggagcagcagcagcugccacgacggcaaggccuggcugcacgugugcaucaccggcgacgacaagaacgccaccgccagcuucaucuacaacggcagacugguggacagcguggugagcuggagcaaggagauccugagaacccaggagagcgagugcgugugcaucaacggcaccugcaccguggugaugaccgacggcagcgccagcggcaaggccgacaccaagauccuguucaucgaggagggcaagaucgugcacaccagcacccugagcggcagcgcccagcacguggaggagugcagcugcuaccccagauaccccggcgugagaugcgugugcagagacaacuggaagggcagcaacagacccaucguggacaucaacaucaaggaccacagcaucgugagcagcuacgugugcagcggccuggugggcgacacccccagaaagaacgacagcagcagcagcggccacugccuggaccccaacaacgaggagggcggccacggcgugaagggcugggccuucgacgacggcaacgacguguggaugggcagaaccaucaacgagaccagcagacugggcuacgagaccuucaaggugaucgagggcuggagcaaccccaagagcaagcugcagaucaacagacaggugaucguggacagaggcgacagaagcggcuacagcggcaucuucagcguggagggcaagagcugcaucaacagaugcuucuacguggagcugaucagaggcagaaaggaggagaccgaggugcuguggaccagcaacagcaucgugguguucugcggcaccagcggcaccuacggcaccggcagcuggcccgacggcgccgaccugaaccugaugcccaucuga

SEQ ID NO: 184105 - RNA, 1410 nt, Artificial Sequence
  derived and/or modified CDS sequence (opt4) from neuraminidase__InfluenzaA__AHC59104
augaaccccaaccagaagaucaucaccaucggcagcgugagccugaccaucagcaccaucugcuucuucaugcagaucgccauccugaucaccaccgugacccugcacuucaagcaguacgaguucuacagcccccccaacaaccaggugaugcugugcgagcccaccaucaucaagagaaacaucaccgagaucguguaccugaccaacaccaccaucgagaaggagaucugccccaagcuggccgaguacagaaacuggagcaagccccagugcgacaucaccggcuucgcccccuucagcaaggacaacagcaucagacugagcgccggcggcgacaucugggugaccagagagcccuacgugagcugcgaccccgacaagugcuaccaguucgcccugggccagggcaccacccugaacaacgugcacagcaacaacaccgugagagacagaacccccuacagaacccugcugaugaacgagcugggcgugcccuuccaccugggcaccaagcaggugugcaucgccuggagcagcagcagcugccacgacggcaaggccuggcugcacgugugcaucaccggcgacgacaagaacgccaccgccagcuucaucuacaacggcagacugguggacagcguggugagcuggagcaaggagauccugagaacccaggagagcgagugcgugugcaucaacggcaccugcaccguggugaugaccgacggcagcgccagcggcaaggccgacaccaagauccuguucaucgaggagggcaagaucgugcacaccagcacccugagcggcagcgcccagcacguggaggagugcagcugcuaccccagauaccccggcgugagaugcgugugcagagacaacuggaagggcagcaacagacccaucguggacaucaacaucaaggaccacagcaucgugagcagcuacgugugcagcggccuggugggcgacacccccagaaagaacgacagcagcagcagcagccacugccuggaccccaacaacgaggagggcggccacggcgugaagggcugggccuucgacgacggcaacgacguguggaugggcagaaccaucaacgagaccagcagacugggcuacgagaccuucaaggugaucgagggcuggagcaaccccaagagcaagcugcagaucaacagacaggugaucguggacagaggcaacagaagcggcuacagcggcaucuucagcguggagggcaagagcugcaucaacagaugcuucuacguggagcugaucagaggcagaaaggaggagaccgaggugcuguggaccagcaacagcaucgugguguucugcggcaccagcggcaccuacggcaccggcagcuggcccgacggcgccgaccugaaccugaugcccaucuga

SEQ ID NO: 184106 - RNA, 1410 nt, Artificial Sequence
  derived and/or modified CDS sequence (opt4) from neuraminidase__InfluenzaA__AHC59116
augaaccccaaccagaagaucaucaccaucggcagcgugagccugaccaucagcaccaucugcuucuucaugcagaucgccauccugaucaccaccgugacccugcacuucaagcaguacgaguucaacagcccccccaacaaccaggugaugcugugcgagcccaccaucaucgagagaaacaucaccgagaucguguaccugaccaacaccaccaucgagaaggagaucugccccaagcuggccgaguacagaaacuggagcaagccccagugcgacaucaccggcuucgcccccuucagcaaggacaacagcaucagacugagcgccggcggcgacaucugggugaccagagagcccuacgugagcugcgaccccaacaagugcuaccaguucgcccugggccagggcaccacccugaacaacgugcacagcaacaacaccgugagagacagaacccccuacagaacccugcugaugaacgagcugggcgugcccuuccaccugggcaccaagcaggugugcaucgccuggagcagcagcagcugccacgacggcaaggccuggcugcacgugugcaucaccggcgacgacaagaacgccaccgccagcuucaucuacaacggcaagcugguggacagcguggugagcuggagcaaggagauccugagaacccaggagagcgagugcgugugcaucaacggcaccugcaccguggugaugaccgacggcagcgccagcggcaaggccgacaccaagauccuguucaucgaggagggcaagaucgugcacaccagcacccugagcggcagcgcccagcacguggaggagugcagcugcuaccccagauaccccggcgugagaugcgugugcagagacaacuggaagggcagcaacagacccaucguggacaucaacaucaaggaccacagcaucgugagcagcuacgugugcagcggccuggugggcgacacccccagaaagaacgacagcagcagcagcagccacugccuggaccccaacaacgaggagggcggccacggcgugaagggcugggccuucgacgacggcaacgacguguggaugggcagaaccaucaacgagaccagcagacugggcuacgagaccuucaaggugaucgagggcuggagcaaccccaagagcaagcugcagaucaacagacaggugaucguggacagaggcaacagaagcggcuacagcggcaucuucagcguggagggcaagagcugcaucaacagaugcuucuacguggagcugaucagaggcagagaggaggagaccgaggugcuguggaccagcaacagcaucgugguguucugcggcaccagcggcaccuacggcaccggcagcuggcccgacggcgccgaccugaaccugaugcccaucuga

SEQ ID NO: 184107 - RNA, 1410 nt, Artificial Sequence
  derived and/or modified CDS sequence (opt4) from neuraminidase__InfluenzaA__AHC59128
augaaccccaaccagaagaucaucaccaucggcagcgugagccugaccaucagcaccaucugcuucuucaugcagaucgccauccugaucaccaccgugacccugcacuucaagcaguacgaguucuacagcccccccaacaaccaggugaugcugugcgagcccaccaucauggagagaaacaucaccgagaucguguaccugaccaacaccaccaucgagaaggagaucugccccaagcuggccgaguacagaaacuggagcaagccccagugcgacaucaccggcuucgcccccuucagcaaggacaacagcaucagacugagcgccggcggcgacaucugggugaccagagagcccuacgugagcugcgaccccgacaagugcuaccaguucgcccugggccagggcaccacccugaacaacgugcacagcaacaacaccgugagagacagaacccccuacagaacccugcugaugaacgagcugggcgugcccuuccaccugggcaccaagcaggugugcaucgccuggagcagcagcagcugccacgacggcaaggccuggcugcacgugugcgugaccggcgacgacaagaacgccaccgccagcuucaucuacaacggcagacugguggacagcguggugagcuggagcaaggagauccugagaacccaggagagcgagugcgugugcaucaacggcaccugcaccguggugaugaccgacggcagcgccagcggcaaggccgacaccaagauccuguucaucgaggagggcaagaucgugcacaccagcacccugagcggcagcgcccagcacguggaggagugcagcugcuaccccagauaccccggcgugagaugcgugugcagagacaacuggaagggcagcaacagacccaucguggacaucaacaucaaggaccacagcaucgugagcagcuacgugugcagcggccuggugggcgacacccccagaaagaacgacagcagcagcagcagccacugccuggaccccaacaacgaggagggcggccacggcgugaagggcugggccuucgacgacggcaacgacguguggaugggcagaaccaucaacgagaccagcagacugggcuacgagaccuucaaggugaucgagggcuggagcaaccccaagagcaagcugcagaucaacagacaggugaucguggacagaggcaacagaagcggcuacagcggcaucuucagcguggagggcaagagcugcaucaacagaugcuucuacguggagcugaucagaggcagaaaggaggagaccgaggugcuguggaccagcaacagcaucgugguguucugcggcaccagcggcaccuacggcaccggcagcuggcccgacggcgccgaccugaaccugaugcccaucuga

SEQ ID NO: 184108 - RNA, 1410 nt, Artificial Sequence
  derived and/or modified CDS sequence (opt4) from neuraminidase__InfluenzaA__AHC59152
augaaccccaaccagaagaucaucaccaucggcagcgugagccugaccaucagcaccaucugcuucuucaugcagguggccauccugaucaccaccgugacccugcacuucaagcaguacgaguucaacagcccccccaacaaccaggugaugcugugcgagcccaccaucaucgagagaaacaucaccgagauccuguaccugaccaacaccaccaucgagaaggagaucugccccaagcuggccgaguacagaaacuggagcaagccccagugcgacaucaccggcuucgcccccuucagcaaggacaacagcaucagacugagcgccggcggcgacaucugggugaccagagagcccuacgugagcugcgaccccgacaagugcuaccaguucgcccugggccagggcaccacccugaacaacgugcacagcaacaacaccgugagagacagaacccccuacagaacccugcugaugaacgagcugggcgugcccuuccaccugggcaccaagcaggugugcaucgccuggagcagcagcagcugccacgacggcaaggccuggcugcacgugugcaucaccggcgacgacaagaacgccaccgccagcuucaucuacaacggcaagcugguggacagcguggugagcuggagcaaggagauccugagaacccaggagagcgagugcgugugcaucaacggcaccugcaccguggugaugaccgacggcagcgccagcggcaaggccgacaccaagauccuguucaucgaggagggcaagaucgugcacaccagcacccugagcggcagcgcccagcacguggaggagugcagcugcuaccccagauaccccggcgugagaugcgugugcagagacaacuggaagggcagcaacagacccaucguggacaucaacaucaaggaccacagcaucgugagcagcuacgugugcagcggccuggugggcgacacccccagaaagaacgacagcagcagcagcagccacugccuggaccccaacaacgaggagggcggccacggcgugaagggcugggccuucgacgacggcaacgacguguggaugggcagaaccaucaacgagaccagcagacugggcuacgagaccuucaaggugaucgagggcuggagcaaccccaagagcaagcugcagaucaacagacaggugaucguggacagaggcaacagaagcggcuacagcggcaucuucagcguggagggcaagagcugcaucaacagaugcuucuacguggagcugaucagaggcagaaaggaggagaccgaggugcuguggaccagcaacagcaucgugguguucugcggcaccagcggcaccuacggcaccggcagcuggcccgacggcgccgaccugaaccugaugcccaucuga

SEQ ID NO: 184109 - RNA, 1410 nt, Artificial Sequence
  derived and/or modified CDS sequence (opt4) from neuraminidase__InfluenzaA__AHC59188
augaaccccaaccagaagaucaucaccaucggcagcgugagccugaccaucagcaccaucugcuucuucaugcagaucgccauccugaucaccaccgugacccugcacuucaagcaguacgaguucaaccccccccccaacaaccagguggugcugugcgagcccaccaucaucgagagaaacaucaccgagaucguguaccugaccaacaccaccaucgagaaggagaucugccccaagcuggccgaguacagaaacuggagcaagccccagugcgacaucaccggcuucgcccccuucagcaaggacaacagcaucagacugagcgccggcggcgacaucugggugaccagagagcccuacgugagcugcgaccccgacaagugcuaccaguucgcccugggccagggcaccacccugaacaacgugcacagcaacaacaccgugagagacagaacccccuacagaacccugcugaugaacgagcugggcgugcccuuccaccugggcaccaagcaggugugcaucgccuggagcagcagcagcugccacgacggcaaggccuggcugcacgugugcaucaccggcgacgacaagaacgccaccgccagcuucaucuacaacggcagacugguggacagcguggugagcuggagcaaggagauccugagaacccaggagagcgagugcgugugcaucaacggcaccugcaccguggugaugaccgacggcagcgccagcggcaaggccgacaccaagauccuguucaucgaggagggcaagaucgugcacaccagcacccugagcggcagcgcccagcacguggaggagugcagcugcuaccccagauaccccggcgugagaugcgugugcagagacaacuggaagggcagcaacagacccaucguggacaucaacaucaaggaccacagcaucgugagcagcuacgugugcagcggccuggugggcgacacccccagaaagaacgacagcagcagcagcagccacugccuggaccccaacaacgaggagggcggccacggcgugaagggcugggccuucgacgacggcaacgacguguggaugggcagaaccaucaacgagaccagcagacugggcuacgagaccuucaaggugaucgagggcuggagcaaccccaagagcaagcugcagaucaacagacaggugaucguggacagaggcgacagaagcggcuacagcggcaucuucagcguggagggcaagagcugcaucaacagaugcuucuacguggagcugaucagaggcagaaaggaggagaccgaggugcuguggaccagcaacagcaucgugguguucugcggcaccagcggcaccuacggcaccggcagcuggcccgacggcgccgaccugaaccugaugcccaucuga

SEQ ID NO: 184110 - RNA, 1410 nt, Artificial Sequence; identical to SEQ ID NO: 179578
  derived and/or modified CDS sequence (opt4) from neuraminidase__InfluenzaA__AHC59200

SEQ ID NO: 184111 - RNA, 1410 nt, Artificial Sequence
  derived and/or modified CDS sequence (opt4) from neuraminidase__InfluenzaA__AHC59212
augaaccccaaccagaagaucaucaccaucggcagcgugagccugaccaucagcaccaucugcuucuucaugcagaucgccacccugaucaccaccgugacccugcacuucaagcaguacgaguucaacagcccccccaacaaccaggugaugcugugcgagcccaccaucaucgagagaaacaucaccgagaucguguaccugaccaacaccaccaucgagaaggagaucugccccaagcuggccgaguacagaaacuggagcaagccccagugcgacaucaccggcuucgcccccuucagcaaggacaacagcaucagacugagcgccggcggcgacaucugggugaccagagagcccuacgugagcugcgaccccgacaagugcuaccaguucgcccugggccagggcaccacccugaacaacgugcacagcaacaacaccgugagagacagaacccccuacagaacccugcugaugaacgagcugggcgugcccuuccaccugggcaccaagcaggugugcaucgccuggagcagcagcagcugccacgacggcaaggccuggcugcacgugugcaucaccggcgacgacaagaacgccaccgccagcuucaucuacaacggcagacugguggacagcguggugagcuggagcaaggagauccugagaacccaggagagcgagugcgugugcaucaacggcaccugcaccguggugaugaccgacggcagcgccagcggcaaggccgacaccaagauccuguucaucgaggagggcaagaucgugcacaccagcacccugagcggcagcgcccagcacguggaggagugcagcugcuaccccagauaccccggcgugagaugcgugugcagagacaacuggaagggcagcaacagacccaucguggacaucaacaucaaggaccacagcaucgugagcagcuacgugugcagcggccuggugggcgacacccccagaaagaacgacagcagcagcagcagccacugccuggaccccaacaacgaggagggcggccacggcgugaagggcugggccuucgacgacggcaacgacguguggaugggcagaaccaucaacgagaccagcagacugggcuacgagaccuucaaggugaucgagggcuggagcaaccccaagagcaagcugcagaucaacagacaggugaucguggacagaggcgacagaagcggcuacagcggcaucuucagcguggagggcaagagcugcaucaacagaugcuucuacguggagcugaucagaggcagaaaggaggagaccgaggugcuguggaccagcaacagcaucgugguguucugcggcaccagcggcaccuacggcaccggcagcuggcccgacggcgccgaccugaaccugaugcccaucuga

SEQ ID NO: 184112 - RNA, 1410 nt, Artificial Sequence; identical to SEQ ID NO: 184035
  derived and/or modified CDS sequence (opt4) from neuraminidase__InfluenzaA__AHC59224

SEQ ID NO: 184113 - RNA, 1410 nt, Artificial Sequence
  derived and/or modified CDS sequence (opt4) from neuraminidase__InfluenzaA__AHC59236
augaaccccaaccagaagaucaucaccaucggcagcgugagccugaccaucagcaccaucugcuucuucaugcagaucgccauccugaucaccaccgugacccugcacuucaagcaguacgaguucuacagcccccccaacaaccaggugaugcugugcgagcccaccaucaucgagagaaacaucaccgagaucguguaccugaccaacaccaccaucgagaaggagaucugccccaagcuggccgaguacagaaacuggagcaagccccagugcgacaucaccggcuucgcccccuucagcaaggacaacagcaucagacugagcgccggcggcgacaucugggugaccagagagcccuacgugagcugcgaccccgacaagugcuaccaguucgcccugggccagggcaccacccugaacaacgugcacagcaacaacaccgugcacgacagaacccccuacagaacccugcugaugaacgagcugggcgugcccuuccaccugggcaccaagcaggugugcaucgccuggagcagcagcagcugccacgacggcaaggccuggcugcacgugugcaucaccggcgacgacaagaacgccaccgccagcuucaucuacaacggcagacugguggacagcguggugagcuggagcaaggagauccugagaacccaggagagcgagugcgugugcaucaacggcaccugcaccguggugaugaccgacggcagcgccagcggcaaggccgacaccaagauccuguucaucgaggagggcaagaucgugcacaccagcacccugagcggcagcgcccagcacguggaggagugcagcugcuaccccagauaccccggcgugagaugcgugugcagagacaacuggaagggcagcaacagacccaucguggacaucaacaucaaggaccacagcaucgugagcagcuacgugugcagcggccuggugggcgacacccccagaaagaacgacagcagcagcagcagccacugccuggaccccaacaacgaggagggcggccacggcgugaagggcugggccuucgacgacggcaacgacguguggaugggcagaaccaucaacgagaccagcagacugggcuacgagaccuucaaggugaucgagggcuggagcaaccccaagagcaagcugcagaucaacagacaggugaucguggacagaggcaacagaagcggcuacagcggcaucuucagcguggagggcaagagcugcaucaacagaugcuucuacguggagcugaucagaggcagaaaggaggagaccgaggugcuguggaccagcaacagcaucgugguguucugcggcaccagcggcaccuacggcaccggcagcuggcccgacggcgccgaccugaaccugaugcccaucuga

SEQ ID NO: 184114 - RNA, 1410 nt, Artificial Sequence; identical to SEQ ID NO: 184035
  derived and/or modified CDS sequence (opt4) from neuraminidase__InfluenzaA__AHC59260

SEQ ID NO: 184115 - RNA, 1410 nt, Artificial Sequence; identical to SEQ ID NO: 184031
  derived and/or modified CDS sequence (opt4) from neuraminidase__InfluenzaA__AHC59272

SEQ ID NO: 184116 - RNA, 1410 nt, Artificial Sequence; identical to SEQ ID NO: 184035
  derived and/or modified CDS sequence (opt4) from neuraminidase__InfluenzaA__AHC59284

SEQ ID NO: 184117 - RNA, 1410 nt, Artificial Sequence
  derived and/or modified CDS sequence (opt4) from neuraminidase__InfluenzaA__AHC59296
augaaccccaaccagaagaucaucaccaucggcagcgugagccugaccaucagcaccaucugcuucuucaugcagaucgccauccugaucaccaccgugacccugcacuucaagcaguacgaguucaacagcccccccaacaaccaggugaugcugugcgagcccaccaucaucgagagaaacaucaccgagaucguguaccugaccaacaccaccaucgagaaggagaucugccccaagcuggccgaguacagaaacuggagcaagccccagugcgacaucaccggcuucgcccccuucagcaaggacaacagcaucagacugagcgccggcggcgacaucugggugaccagagagcccuacgugagcugcgaccccaacaagugcuaccaguucgcccugggccagggcaccacccugaacaacgugcacagcaacaacaccgugagagacagaacccccuacagaacccugcugaugaacgagcugggcgugcccuuccaccugggcaccaagcaggugugcaucgccuggagcagcagcagcugccacgacggcaaggccuggcugcacgugugcaucaccggcgacgacaagaacgccaccgccagcuucaucuacaacggcaagcugguggacagcguggugagcuggagcaaggagauccugagaacccaggagagcgagugcgugugcaucaacggcaccugcaccguggugaugaccgacggcagcgccagcggcaaggccgacaccaagauccuguucaucgaggagggcaagaucgugcacaccagcacccugagcggcagcgcccagcacguggaggagugcagcugcuaccccagauaccccggcgugagaugcgugugcagagacaacuggaagggcagcaacagacccaucguggacaucaagaucaaggaccacagcaucgugagcagcuacgugugcagcggccuggugggcgacacccccagaaagaacgacagcagcagcagcagccacugccuggaccccaacaacgaggagggcggccacggcgugaagggcugggccuucgacgacggcaacgacguguggaugggcagaaccaucaacgagaccagcagacugggcuacgagaccuucaaggugaucgagggcuggagcaaccccaagagcaagcugcagaucaacagacaggugaucguggacagaggcaacagaagcggcuacagcggcaucuucagcguggagggcaagagcugcaucaacagaugcuucuacguggagcugaucagaggcagaaaggaggagaccgaggugcuguggaccagcaacagcaucgugguguucugcggcaccagcggcaccuacggcaccggcagcuggcccgacggcgccgaccugaaccugaugcccaucuga

SEQ ID NO: 184118 - RNA, 1410 nt, Artificial Sequence
  derived and/or modified CDS sequence (opt4) from neuraminidase__InfluenzaA__AHC59308
augaaccccaaccagaagaucaucaccaucggcagcgugagccugaccaucagcaccaucugcuucuucaugcagaucgccauccugaucaccaccgugacccugcacuucaagcaguacgaguucaaccccccccccaacaaccaggugaugcugugcgagcccaccaucaucgagagaaacaucaccgagaucguguaccugaccaacaccaccaucgagaaggagaucugccccaagcuggccgaguacagaaacuggagcaagccccagugcgacaucaccggcuucgcccccuucagcaaggacaacagcaucagacugagcgccggcggcgacaucugggugaccagagagcccuacgugagcugcgaccccaacaagugcuaccaguucgcccugggccagggcaccacccugaacaacgugcacagcaacaacaccgugagagacagaacccccuacagaacccugcugaugaacgagcugggcgugcccuuccaccugggcaccaagcaggugugcaucgccuggagcagcagcagcugccacgacggcaaggccuggcugcacgugugcaucaccggcgacgacaagaacgccaccgccagcuucaucuacaacggcaagcugguggacagcguggugagcuggagcaaggagauccugagaacccaggagagcgagugcgugugcaucaacggcaccugcaccguggugaugaccgacggcagcgccagcggcaaggccgacaccaagauccuguucaucgaggagggcaagaucgugcacaccagcacccugagcggcagcgcccagcacguggaggagugcagcugcuaccccagauaccccggcgugagaugcgugugcagagacaacuggaagggcagcaacagacccaucguggacaucaacaucaaggaccacagcaucgugagcagcuacgugugcagcggccuggugggcgacacccccagaaagaacgacagcagcagcagcagccacugccuggaccccaacaacgaggagggcggccacggcgugaagggcugggccuucgacgacggcaacgacguguggaugggcagaaccaucaacgagaccagcagacugggcuacgagaccuucaaggugaucgagggcuggagcaaccccaagagcaagcugcagaucaacagacaggugaugguggacagaggcaacagaagcggcuacagcggcaucuucagcguggagggcaagagcugcaucaacagaugcuucuacguggagcugaucagaggcagaaaggaggagaccgaggugcuguggaccagcaacagcaucgugguguucugcggcaccagcggcaccuacggcaccggcagcuggcccgacggcgccgaccugaaccugaugcccaucuga

SEQ ID NO: 184119 - RNA, 1410 nt, Artificial Sequence; identical to SEQ ID NO: 183943
  derived and/or modified CDS sequence (opt4) from neuraminidase__InfluenzaA__AHC59320

SEQ ID NO: 184120 - RNA, 1410 nt, Artificial Sequence; identical to SEQ ID NO: 182206
  derived and/or modified CDS sequence (opt4) from neuraminidase__InfluenzaA__AHC59332

SEQ ID NO: 184121 - RNA, 1410 nt, Artificial Sequence; identical to SEQ ID NO: 184079
  derived and/or modified CDS sequence (opt4) from neuraminidase__InfluenzaA__AHC59344

SEQ ID NO: 184122 - RNA, 1410 nt, Artificial Sequence
  derived and/or modified CDS sequence (opt4) from neuraminidase__InfluenzaA__AHC59368
augaaccccaaccagaagaucaucaccaucggcagcgugagccugaccaucagcaccaucugcuucuucaugcagaucgccauccugaucaccaccgugacccugcacuucaagcaguacgaguucaacagcccccccaacaaccaggugaugcugugcgagcccaccaucaucgagagaaacaucaccgagaucguguaccugaccaacaccaccaucgagaaggagaucugccccaagcuggccgaguacagaaacuggagcaagccccagugcgacaucaccggcuucgcccccuucagcaaggacaacagcaucagacugagcgccggcggcgacaucugggugaccagagagcccuacgugagcugcgaccccaacaagugcuaccaguucgcccugggccagggcaccacccugaacaacgugcacagcaacaacaccgugagagacagaacccccuacagaacccugcugaugaacgagcugggcgugcccuuccaccugggcaccaagcaggugugcaucgccuggagcagcagcagcugccacgacggcaaggccuggcugcacgugugcaucaccggcgacgacaagaacgccaccgccagcuucaucuacaacggcaagcugguggacagcguggugagcuggagcaaggagauccugagaacccaggagagcgagugcgugugcaucaacggcaccugcaccguggugaugaccgacggcagcgccagcggcaaggccgacaccaagauccuguucaucgaggagggcaagaucgugcacaccagcacccugagcggcagcgcccagcacguggaggagugcagcugcuaccccagauaccccggcgugagaugcgugugcagagacaacuggaagggcagcaacagacccaucguggacaucaacaucaaggaccacagcaucgugagcagcuacgugugcagcggccuggugggcgacacccccagaaagaacgacagcagcagcagcagccacugccuggaccccaacaacgaggagggcggccacggcgugaagggcugggccuucgacgacggcaacgacguguggaugggcagaaccaucgacgagaccagcagacugggcuacgagaccuucaaggugaucgagggcuggagcaaccccaagagcaagcugcagaucaacagacaggugaucguggacagaggcaacagaagcggcuacagcggcaucuucagcguggagggcaagagcugcaucaacagaugcuucuacguggagcugaucagaggcagaaaggaggagaccgaggugcuguggaccagcaacagcaucgugguguucugcggcaccagcggcaccuacggcaccggcagcuggcccgacggcgccgaccugaaccugaugcccaucuga

SEQ ID NO: 184123 - RNA, 1410 nt, Artificial Sequence; identical to SEQ ID NO: 184031
  derived and/or modified CDS sequence (opt4) from neuraminidase__InfluenzaA__AHC59380

SEQ ID NO: 184124 - RNA, 1410 nt, Artificial Sequence; identical to SEQ ID NO: 182982
  derived and/or modified CDS sequence (opt4) from neuraminidase__InfluenzaA__AHC59392

SEQ ID NO: 184125 - RNA, 1410 nt, Artificial Sequence; identical to SEQ ID NO: 184067
  derived and/or modified CDS sequence (opt4) from neuraminidase__InfluenzaA__AHC59404

SEQ ID NO: 184126 - RNA, 1410 nt, Artificial Sequence; identical to SEQ ID NO: 184035
  derived and/or modified CDS sequence (opt4) from neuraminidase__InfluenzaA__AHC59416

SEQ ID NO: 184127 - RNA, 1410 nt, Artificial Sequence
  derived and/or modified CDS sequence (opt4) from neuraminidase__InfluenzaA__AHC59428
augaaccccaaccagaagaucaucaccaucggcagcgugagccugaccaucagcaccaucugcuucuucaugcagaucgccauccugaucaccaccgugacccugcacuucaagcaguacgaguucuacagcccccccaacaaccaggugaugcugugcgagcccaccaucaucgagagaaacaucaccgagaucguguaccugaccaacaccaccaucgagaaggagaucugccccaagcuggccgaguacagaaacuggagcaagccccagugcgacaucaccggcuucgcccccuucagcaaggacaacagcaucagacugagcgccggcggcgacaucugggugaccagagagcccuacgugagcugcgaccccgacagaugcuaccaguucgcccugggccagggcaccacccugaacaacgugcacagcaacaacaccgugagagacagaacccccuacagaacccugcugaugaacgagcugggcgugcccuuccaccugggcaccaagcaggugugcaucgccuggagcagcagcagcugccacgacggcaaggccuggcugcacgugugcaucaccggcgacgacaagaacgccaccgccagcuucaucuacaacggcagacugguggacagcguggugagcuggagcaaggagauccugagaacccaggagagcgagugcgugugcaucaacggcaccugcaccguggugaugaccgacggcagcgccagcggcaaggccgacaccaagauccuguucaucgaggagggcaagaucgugcacaccagcacccugagcggcagcgcccagcacguggaggagugcagcugcuaccccagauaccccggcgugagaugcgugugcagagacaacuggaagggcagcaacagacccaucguggacaucaacaucaaggaccacagcaucgugagcagcuacgugugcagcggccuggugggcgacacccccagaaagaacgacagcagcagcagcagccacugccuggaccccaacaacgaggagggcggccacggcgugaagggcugggccuucgacgacggcaacgacguguggaugggcagaaccaucaacgagaccagcagacugggcuacgagaccuucaaggugaucgagggcuggagcaaccccaagagcaagcugcagaucaacagacaggugaucguggacagaggcaacagaagcggcuacagcggcaucuucagcguggagggcaagagcugcaucaacagaugcuucuacguggagcugaucagaggcagaaaggaggagaccgaggugcuguggaccagcaacagcaucgugguguucugcggcaccagcggcaccuacggcaccggcagcuggcccgacggcgccgaccugaaccugaugcccaucuga

SEQ ID NO: 184128 - RNA, 1410 nt, Artificial Sequence
  derived and/or modified CDS sequence (opt4) from neuraminidase__InfluenzaA__AHC59440
augaaccccaaccagaagaucaucaccaucggcagcgugagccugaccaucagcaccaucugcuucuucaugcagaucgccauccugaucaccaccgugacccugcacuucaagcaguacgaguucaacagcccccccaacaaccaggugaugcugugcgagcccaccaucaucgagagaaacaucaccgagaucguguaccugaccaacaccaccaucgagaaggagaucugccccaagcccgccgaguacagaaacuggagcaagccccagugcgacaucaccggcuucgcccccuucagcaaggacaacagcaucagacugagcgccggcggcgacaucugggugaccagagagcccuacgugagcugcgaccccgacaagugcuaccaguucgcccugggccagggcaccacccugaacaacgugcacagcaacaacaccgugagagacagaacccccuacagaacccugcugaugaacgagcugggcgugcccuuccaccugggcaccaagcaggugugcaucgccuggagcagcagcagcugccacgacggcaaggccuggcugcacgugugcaucaccggcgacgacaagaacgccaccgccagcuucaucuacaacggcagacugguggacagcguggugagcuggagcaaggagauccugagaacccaggagagcgagugcgugugcaucaacggcaccugcaccguggugaugaccgacggcagcgccagcggcaaggccgacaccaagauccuguucaucgaggagggcaagaucgugcagaccagcacccugagcggcagcgcccagcacguggaggagugcagcugcuaccccagauaccccggcgugagaugcgugugcagagacaacuggaagggcagcaacagacccaucguggacaucaacaucaaggaccacagcaucgugagcagcuacgugugcagcggccuggugggcgacacccccagaaagaacgacagcagcagcagcagccacugccuggaccccaacaacgaggagggcggccacggcgugaagggcugggccuucgacgacggcaacgacguguggaugggcagaaccaucaacgagaccagcagacugggcuacgagaccuucaaggugaucgagggcuggagcaaccccaagagcaagcugcagaucaacagacaggugaucguggacagaggcgacagaagcggcuacagcggcaucuucagcguggagggcaagagcugcaucaacagaugcuucuacguggagcugaucagaggcagaaaggaggagaccgaggugcuguggaccagcaacagcaucgugguguucugcggcaccagcggcaccuacggcaccggcagcuggcccgacggcgccgaccugaaccugaugcccaucuga

SEQ ID NO: 184129 - RNA, 1410 nt, Artificial Sequence; identical to SEQ ID NO: 184035
  derived and/or modified CDS sequence (opt4) from neuraminidase__InfluenzaA__AHC59452

SEQ ID NO: 184130 - RNA, 1410 nt, Artificial Sequence; identical to SEQ ID NO: 179578
  derived and/or modified CDS sequence (opt4) from neuraminidase__InfluenzaA__AHC59464

SEQ ID NO: 184131 - RNA, 1410 nt, Artificial Sequence; identical to SEQ ID NO: 183943
  derived and/or modified CDS sequence (opt4) from neuraminidase__InfluenzaA__AHC59476

SEQ ID NO: 184132 - RNA, 1410 nt, Artificial Sequence; identical to SEQ ID NO: 184035
  derived and/or modified CDS sequence (opt4) from neuraminidase__InfluenzaA__AHC59488

SEQ ID NO: 184133 - RNA, 1410 nt, Artificial Sequence; identical to SEQ ID NO: 184035
  derived and/or modified CDS sequence (opt4) from neuraminidase__InfluenzaA__AHC59500

SEQ ID NO: 184134 - RNA, 1410 nt, Artificial Sequence; identical to SEQ ID NO: 184080
  derived and/or modified CDS sequence (opt4) from neuraminidase__InfluenzaA__AHC59512

SEQ ID NO: 184135 - RNA, 1410 nt, Artificial Sequence; identical to SEQ ID NO: 184080
  derived and/or modified CDS sequence (opt4) from neuraminidase__InfluenzaA__AHC59524

SEQ ID NO: 184136 - RNA, 1410 nt, Artificial Sequence; identical to SEQ ID NO: 184067
  derived and/or modified CDS sequence (opt4) from neuraminidase__InfluenzaA__AHC59536

SEQ ID NO: 184137 - RNA, 1410 nt, Artificial Sequence; identical to SEQ ID NO: 184035
  derived and/or modified CDS sequence (opt4) from neuraminidase__InfluenzaA__AHC59548

SEQ ID NO: 184138 - RNA, 1410 nt, Artificial Sequence; identical to SEQ ID NO: 184035
  derived and/or modified CDS sequence (opt4) from neuraminidase__InfluenzaA__AHC59560

SEQ ID NO: 184139 - RNA, 1410 nt, Artificial Sequence; identical to SEQ ID NO: 184113
  derived and/or modified CDS sequence (opt4) from neuraminidase__InfluenzaA__AHC59572

SEQ ID NO: 184140 - RNA, 1410 nt, Artificial Sequence; identical to SEQ ID NO: 184108
  derived and/or modified CDS sequence (opt4) from neuraminidase__InfluenzaA__AHC59584

SEQ ID NO: 184141 - RNA, 1410 nt, Artificial Sequence; identical to SEQ ID NO: 184080
  derived and/or modified CDS sequence (opt4) from neuraminidase__InfluenzaA__AHC59596

SEQ ID NO: 184142 - RNA, 1410 nt, Artificial Sequence; identical to SEQ ID NO: 182982
  derived and/or modified CDS sequence (opt4) from neuraminidase__InfluenzaA__AHC59608

SEQ ID NO: 184143 - RNA, 1410 nt, Artificial Sequence; identical to SEQ ID NO: 184067
  derived and/or modified CDS sequence (opt4) from neuraminidase__InfluenzaA__AHC59620

SEQ ID NO: 184144 - RNA, 1410 nt, Artificial Sequence; identical to SEQ ID NO: 184035
  derived and/or modified CDS sequence (opt4) from neuraminidase__InfluenzaA__AHC59632

SEQ ID NO: 184145 - RNA, 1410 nt, Artificial Sequence; identical to SEQ ID NO: 184035
  derived and/or modified CDS sequence (opt4) from neuraminidase__InfluenzaA__AHC59644

SEQ ID NO: 184146 - RNA, 1410 nt, Artificial Sequence
  derived and/or modified CDS sequence (opt4) from neuraminidase__InfluenzaA__AHC59656
augaaccccaaccagaagaucaucaccaucggcagcgugagccugaccaucagcaccaucugcuucuucaugcagaucgccauccugaucaccaccgugaccaugcacuucaagcaguacgaguucaacagcccccccaacaaccaggugaugcugugcgagcccaccaucaucgagagaaacaucaccgagaucguguaccugaccaacaccaccaucgagaaggagaucugccccaagcuggccgaguacagaaacuggagcaagccccagugcgacaucaccggcuucgcccccuucagcaaggacaacagcaucagacugagcgccggcggcgacaucugggugaccagagagcccuacgugagcugcgaccccgugaagugcuaccaguucgcccugggccagggcaccacccugaacaacgugcacagcaacaacaccgugagagacagaacccccuacagaacccugcugaugaacgagcugggcgugcccuuccaccugggcaccaagcaggugugcaucgccuggagcagcagcagcugccacgacggcaaggccuggcugcacgugugcaucaccggcgacgacaagaacgccaccgccagcuucaucuacaacggcaagcugguggacagcguggugagcuggagcaaggagauccugagaacccaggagagcgagugcgugugcaucaacggcaccugcaccguggugaugaccgacggcagcgccagcggcaaggccgacaccaagauccuguucaucgaggagggcaagaucgugcacaccagcacccugagcggcagcgcccagcacguggaggagugcagcugcuaccccagauaccccggcgugagaugcgugugcagagacaacuggaagggcagcaacagacccaucguggacaucaacaucaaggaccacagcaucgugagcagcuacgugugcagcggccuggugggcgacacccccagaaagaacgacagcagcagcagcagccacugccuggaccccaacaacgaggagggcggccacggcgugaagggcugggccuucgacgacggcaacgacguguggaugggcagaaccaucaacgagaccagcagacugggcuacgagaccuucaaggugaucgagggcuggagcaaccccaagagcaagcugcagaucaacagacaggugaucguggacagaggcaacagaagcggcuacagcggcaucuucagcguggagggcaagagcugcaucaacagaugcuucuacguggagcugaucagaggcagaaaggaggagaccgaggugcuguggaccagcaacagcaucgugguguucugcggcaccagcggcaccuacggcaccggcagcuggcccgacggcgccgaccugaaccugaugcccaucuga

SEQ ID NO: 184147 - RNA, 1410 nt, Artificial Sequence; identical to SEQ ID NO: 184080
  derived and/or modified CDS sequence (opt4) from neuraminidase__InfluenzaA__AHC59668

SEQ ID NO: 184148 - RNA, 1410 nt, Artificial Sequence; identical to SEQ ID NO: 184108
  derived and/or modified CDS sequence (opt4) from neuraminidase__InfluenzaA__AHC59680

SEQ ID NO: 184149 - RNA, 1410 nt, Artificial Sequence; identical to SEQ ID NO: 184035
  derived and/or modified CDS sequence (opt4) from neuraminidase__InfluenzaA__AHC59704

SEQ ID NO: 184150 - RNA, 1410 nt, Artificial Sequence; identical to SEQ ID NO: 179578
  derived and/or modified CDS sequence (opt4) from neuraminidase__InfluenzaA__AHC59716

SEQ ID NO: 184151 - RNA, 1410 nt, Artificial Sequence; identical to SEQ ID NO: 179578
  derived and/or modified CDS sequence (opt4) from neuraminidase__InfluenzaA__AHC59728

SEQ ID NO: 184152 - RNA, 1410 nt, Artificial Sequence; identical to SEQ ID NO: 184080
  derived and/or modified CDS sequence (opt4) from neuraminidase__InfluenzaA__AHC59752

SEQ ID NO: 184153 - RNA, 1410 nt, Artificial Sequence; identical to SEQ ID NO: 184067
  derived and/or modified CDS sequence (opt4) from neuraminidase__InfluenzaA__AHC59764

SEQ ID NO: 184154 - RNA, 1410 nt, Artificial Sequence
  derived and/or modified CDS sequence (opt4) from neuraminidase__InfluenzaA__AHC59776
augaaccccaaccagaagaucaucaccaucggcagcgugagccugaccaucagcaccaucugcuucuucaugcagaucgccauccugaucaccaccgugacccugcacuucaagcaguacgaguucuacagcccccccaacaaccaggugaugcugugcgagcccaccaucaucgagagaaacaucaccgagaucguguaccugaccaacaccaccaucgagaaggagaucugccccaagcuggccgaguacagaaacuggagcaagccccagugcgacaucaccggcuucgcccccuucagcaaggacaacagcaucagacugagcgccggcggcgacaucugggugaccagagagcccuacgugagcugcgaccccgacaagugcuaccaguucgcccugggccagggcaccacccugaacaacgugcacagcaacaacaccgugagagacagaacccccuacagaacccugcugaugaacgagcugggcgugcccuuccaccugggcaccaagcaggugugcaucgccuggagcagcagcagcugccacgacggcaaggccuggcugcacgugugcaucaccggcgacgacaagaacgccaccgccagcuucaucuacaacggcaagcugguggacagcguggugagcuggagcaaggagauccugagaacccaggagagcgagugcgugugcaucaacggcaccugcaccguggugaugaccgacggcagcgccagcggcaaggccgacaccaagauccuguucaucgaggagggcaagaucgugcacaccagcacccugagcggcagcgcccagcacguggaggagugcagcugcuaccccagauaccccggcgugagaugcgugugcagagacaacuggaagggcagcaacagacccaucguggacaucaacaucaaggaccacagcaucgugagcagcuacgugugcagcggccuggugggcgacacccccagaaagaacgacagcagcagcagcagccacugccuggaccccaacaacgaggagggcggccacggcgugaagggcugggccuucgacgacggcaacgacguguggaugggcagaaccaucaacgagaccagcagacugggcuacgagaccuucaaggugaucgagggcuggagcaaccccaagagcaagcugcagaucaacagacaggugaucguggacagaggcaacagaagcggcuacagcggcaucuucagcguggagggcaagagcugcaucaacagaugcuucuacguggagcugaucagaggcagaaaggaggagaccgaggugcuguggaccagcaacagcaucgugguguucugcggcaccagcggcaccuacggcaccggcagcuggcccgacggcgccgaccugaaccugaugcccaucuga

SEQ ID NO: 184155 - RNA, 1410 nt, Artificial Sequence; identical to SEQ ID NO: 184031
  derived and/or modified CDS sequence (opt4) from neuraminidase__InfluenzaA__AHC59788

SEQ ID NO: 184156 - RNA, 1410 nt, Artificial Sequence; identical to SEQ ID NO: 184108
  derived and/or modified CDS sequence (opt4) from neuraminidase__InfluenzaA__AHC59800

SEQ ID NO: 184157 - RNA, 1410 nt, Artificial Sequence
  derived and/or modified CDS sequence (opt4) from neuraminidase__InfluenzaA__AHC59812
augaaccccaaccagaagaucaucaccaucggcagcgugagccugaccaucagcaccaucugcuucuucaugcagaucgccauccugaucaccaccgugacccugcacuucaagcaguacgaguucaacagcccccccaacaaccagguggugcugugcgagcccaccaucaucgagagaaacaucaccgagaucguguaccugaccaacaccaccaucgagaaggagaucugccccaagcccgccgaguacagaaacuggagcaagccccagugcgacaucaccggcuucgcccccuucagcaaggacaacagcaucagacugagcgccggcggcgacaucugggugaccagagagcccuacgugagcugcgaccccgacaagugcuaccaguucgcccugggccagggcaccacccugaacaacgugcacagcaacaacaccgugagagacagaacccccuacagaacccugcugaugaacgagcugggcgugcccuuccaccugggcaccaagcaggugugcaucgccuggagcagcagcagcugccacgacggcaaggccuggcugcacgugugcaucaccggcgacgacaagaacgccaccgccagcuucaucuacaacggcagacugguggacagcguggugagcuggagcaaggagauccugagaacccaggagagcgagugcgugugcaucaacggcaccugcaccguggugaugaccgacggcagcgccagcggcaaggccgacaccaagauccuguucaucgaggagggcaagaucguguacaccagcacccugagcggcagcgcccagcacguggaggagugcagcugcuaccccagauaccccggcgugagaugcgugugcagagacaacuggaagggcagcaacagacccaucguggacaucaacaucaaggaccacagcaucgugagcagcuacgugugcagcggccuggugggcgacacccccagaaagaacgacagcagcagcagcagccacugccuggaccccaacaacgaggagggcggccacggcgugaagggcugggccuucgacgacggcaacgacguguggaugggcagaaccaucaacgagaccagcagacugggcuacgagaccuucaaggugaucgagggcuggagcaaccccaagagcaagcugcagaucaacagacaggugaucguggacagaggcgacagaagcggcuacagcggcaucuucagcguggagggcaagagcugcaucaacagaugcuucuacguggagcugaucagaggcagaaaggaggagaccgaggugcuguggaccagcaacagcaucgugguguucugcggcaccagcggcaccuacggcaccggcagcuggcccgacggcgccgaccugaaccugaugcccaucuga

SEQ ID NO: 184158 - RNA, 1410 nt, Artificial Sequence
  derived and/or modified CDS sequence (opt4) from neuraminidase__InfluenzaA__AHC59824
augaaccccaaccagaagaucaucaccaucggcagcgugagccugaccaucagcaccaucugcuucuucaugcagaucgccauccugaucaccaccgugacccugcacuucaagcaguacgaguucuacagcccccccaacaaccaggugaugcugugcgagcccaccaucaucgagagaaacaucaccgagaucguguaccugaccaacaccaccaucgagaaggagaucugccccaagcuggccgaguacagaaaguggagcaagccccagugcgacaucaccggcuucgcccccuucagcaaggacaacagcaucagacugagcgccggcggcgacaucugggugaccagagagcccuacgugagcugcgaccccgacaagugcuaccaguucgcccugggccagggcaccacccugaacaacgugcacagcaacaacaccgugagagacagaacccccuacagaacccugcugaugaacgagcugggcgugcccuuccaccugggcaccaagcaggugugcaucgccuggagcagcagcagcugccacgacggcaaggccuggcugcacgugugcaucaccggcgacgacaagaacgccaccgccagcuucaucuacaacggcagacugguggacagcguggugagcuggagcaaggagauccugagaacccaggagagcgagugcgugugcaucaacggcaccugcaccguggugaugaccgacggcagcgccagcggcaaggccgacaccaagauccuguucaucgaggagggcaagaucgugcacaccagcacccugagcggcagcgcccagcacguggaggagugcagcugcuaccccagauaccccggcgugagaugcgugugcagagacaacuggaagggcagcaacagacccaucguggacaucaacaucaaggaccacagcaucgugagcagcuacgugugcagcggccuggugggcgacacccccagaaagaacgacagcagcagcagcagccacugccuggaccccaacaacgaggagggcggccacggcgugaagggcugggccuucgacgacggcaacgacguguggaugggcagaaccaucaacgagaccagcagacugggcuacgagaccuucaaggugaucgagggcuggagcaaccccaagagcaagcugcagaucaacagacaggugaucguggacagaggcaacagaagcggcuacagcggcaucuucagcguggagggcaagagcugcaucaacagaugcuucuacguggagcugaucagaggcagaaaggaggagaccgaggugcuguggaccagcaacagcaucgugguguucugcggcaccagcggcaccuacggcaccggcagcuggcccgacggcgccgaccugaaccugaugcccaucuga

SEQ ID NO: 184159 - RNA, 1410 nt, Artificial Sequence; identical to SEQ ID NO: 184035
  derived and/or modified CDS sequence (opt4) from neuraminidase__InfluenzaA__AHC59836

SEQ ID NO: 184160 - RNA, 1410 nt, Artificial Sequence; identical to SEQ ID NO: 182982
  derived and/or modified CDS sequence (opt4) from neuraminidase__InfluenzaA__AHC59848

SEQ ID NO: 184161 - RNA, 1410 nt, Artificial Sequence; identical to SEQ ID NO: 184031
  derived and/or modified CDS sequence (opt4) from neuraminidase__InfluenzaA__AHC59860

SEQ ID NO: 184162 - RNA, 1410 nt, Artificial Sequence; identical to SEQ ID NO: 184078
  derived and/or modified CDS sequence (opt4) from neuraminidase__InfluenzaA__AHC59872

SEQ ID NO: 184163 - RNA, 1410 nt, Artificial Sequence; identical to SEQ ID NO: 184067
  derived and/or modified CDS sequence (opt4) from neuraminidase__InfluenzaA__AHC59884

SEQ ID NO: 184164 - RNA, 1410 nt, Artificial Sequence
  derived and/or modified CDS sequence (opt4) from neuraminidase__InfluenzaA__AHC59895
augaaccccaaccagaagaucaucaccaucggcagcgugagccugaccaucagcaccaucugcuucuucaugcagaucgccauccugaucaccaccgugacccugcacuucaagcaguacgaguucaacagcccccccaacaaccaggugaugcugugcgagcccaccaucaucgagagaaacaucaccgagaucguguaccugaccaacaccaccaucgagaaggagaucugccccaagcuggccgaguacagaaacuggagcaagccccagugcgacaucaccggcuucgcccccuucagcaaggacaacagcaucagacugagcgccggcggcgacaucugggugaccagagagcccuacgugagcugcgaccccgacaagugcuaccaguucgcccugggccagggcaccacccugaacaacgugcacagcaacaacaccgugagagacagaacccccuacagaacccugcugaugaacgagcugggcgugcccuuccaccugggcaccaagcaggugugcaucgccuggagcagcagcagcugccacgacggcaaggccuggcugcacgugugcaucaccggcgacgacaagaacgccaccgccagcuucaucuacaacggcagacugguggacagcguggugagcuggagcaaggagauccugagaacccaggagagcgagugcgugugcaucaacggcaccugcaccguggugaugaccgacggcagcgccagcggcaaggccgacaccaagauccuguucaucaaggagggcaagaucgugcacaccagcacccugagcggcagcgcccagcacguggaggagugcagcugcuaccccagauaccccggcgugagaugcgugugcagagacaacuggaagggcagcaacagacccaucguggacaucaacaucaaggaccacagcaucgugagcagcuacgugugcagcggccuggugggcgacacccccagaaagaacgacagcagcagcagcagccacugccuggaccccaacaacgaggagggcggccacggcgugaagggcugggccuucgacgacggcaacgacguguggaugggcagaaccaucaacgagaccagcagacugggcuacgagaccuucaaggugaucgagggcuggagcaaccccaagagcaagcugcagaucaacagacaggugaucguggacagaggcaacagaagcggcuacagcggcaucuucagcguggagggcaagagcugcaucaacagaugcuucuacguggagcugaucagaggcagaaaggaggagaccgaggugcuguggaccagcaacagcaucgugguguucugcggcaccagcggcaccuacggcaccggcagcuggcccgacggcgccgaccugaaccugaugcccaucuga

SEQ ID NO: 184165 - RNA, 1410 nt, Artificial Sequence; identical to SEQ ID NO: 184035
  derived and/or modified CDS sequence (opt4) from neuraminidase__InfluenzaA__AHC59907

SEQ ID NO: 184166 - RNA, 1410 nt, Artificial Sequence
  derived and/or modified CDS sequence (opt4) from neuraminidase__InfluenzaA__AHC59918
augaaccccaaccagaagaucaucaccaucggcagcgugagccugaccaucagcaccaucugcuucuucauccagaucgccauccugaucaccaccgugacccugcacuucaagcaguacgaguucaacagcccccccaacaaccaggugaugcugugcgagcccaccaucaucgagagaaacaucaccgagaucguguaccugaccaacaccaccaucgagaaggagaucugccccaagcuggccgaguacagaaacuggagcaagccccagugcgacaucaccggcuucgcccccuucagcaaggacaacagcaucagacugagcgccggcggcgacaucugggugaccagagagcccuacgugagcugcgaccccgacaagugcuaccaguucgcccugggccagggcaccacccugaacaacgugcacagcaacaacaccgugagagacagaacccccuacagaacccugcugaugaacgagcugggcgugcccuuccaccugggcaccaagcaggugugcaucgccuggagcagcagcagcugccacgacggcaaggccuggcugcacgugugcaucaccggcgacgacaagaacgccaccgccagcuucaucuacaacggcagacugguggacagcguggugagcuggagcaaggagauccugagaacccaggagagcgagugcgugugcaucaacggcaccugcaccguggugaugaccgacggcagcgccagcggcaaggccgacaccaagauccuguucaucgaggagggcaagaucgugcacaccagcacccugagcggcagcgcccagcacguggaggagugcagcugcuaccccagauaccccggcgugagaugcgugugcagagacaacuggaagggcagcaacagacccaucguggacaucaacaucaaggaccacagcaucgugagcagcuacgugugcagcggccuggugggcgacacccccagaaagaacgacagcagcagcagcagccacugccuggaccccaacaacgaggagggcggccacggcgugaagggcugggccuucgacgacggcaacgacguguggaugggcagaaccaucaacgagaccagcagacugggcuacgagaccuucaaggugaucgagggcuggagcaaccccaagagcaagcugcagaugaacagacaggugaucguggacagaggcaacagaagcggcuacagcggcaucuucagcguggagggcaagagcugcaucaacagaugcuucuacguggagcugaucagaggcagaaaggaggagaccgaggugcuguggaccagcaacagcaucgugguguucugcggcaccagcggcaccuacggcaccggcagcuggcccgacggcgccgaccugaaccugaugcccaucuga

SEQ ID NO: 184167 - RNA, 1410 nt, Artificial Sequence; identical to SEQ ID NO: 184166
  derived and/or modified CDS sequence (opt4) from neuraminidase__InfluenzaA__AHC59930

SEQ ID NO: 184168 - RNA, 1410 nt, Artificial Sequence; identical to SEQ ID NO: 184035
  derived and/or modified CDS sequence (opt4) from neuraminidase__InfluenzaA__AHC59942

SEQ ID NO: 184169 - RNA, 1410 nt, Artificial Sequence; identical to SEQ ID NO: 184080
  derived and/or modified CDS sequence (opt4) from neuraminidase__InfluenzaA__AHC59954

SEQ ID NO: 184170 - RNA, 1410 nt, Artificial Sequence
  derived and/or modified CDS sequence (opt4) from neuraminidase__InfluenzaA__AHC59966
augaaccccaaccagaagaucaucaccaucggcagcgugagccugaccaucagcaccaucugcuucuucaugcagaucgccauccugaucaccaccgugacccugcacuucaagcaguacgaguucaacagcagccccaacaaccaggugaugcugugcgagcccaccaucaucgagagaaacaucaccgagaucguguaccugaccaacaccaccaucgagaaggagaucugccccaagcccgccgaguacagaaacuggagcaagccccagugcgacaucaccggcuucgcccccuucagcaaggacaacagcaucagacugagcgccggcggcgacaucugggugaccagagagcccuacgugagcugcgaccccgacaagugcuaccaguucgcccugggccagggcaccacccugaacaacgugcacagcaacaacaccgugagagacagaacccccuacagaacccugcugaugaacgagcugggcgugcccuuccaccugggcaccaagcaggugugcaucgccuggagcagcagcagcugccacgacggcaaggccuggcugcacgugugcaucaccggcgacgacaagaacgccaccgccagcuucaucuacaacggcagacugguggacagcguggugagcuggagcaaggagauccugagaacccaggagagcgagugcgugugcaucaacggcaccugcaccguggugaugaccgacggcagcgccagcggcaaggccgacaccaagauccuguucaucgaggagggcaagaucgugcacaccagcacccugagcggcagcgcccagcacguggaggagugcagcugcuaccccagauaccccggcgugagaugcgugugcagagacaacuggaagggcagcaacagacccaucguggacaucaacaucaaggaccacagcaucgugagcagcuacgugugcagcggccuggugggcgacacccccagaaagaacgacagcagcagcagcagccacugccuggaccccaacaacgaggagggcggccacggcgugaagggcugggccuucgacgacggcaacgacguguggaugggcagaaccaucaacgagaccagcagacugggcuacgagaccuucaaggugaucgagggcuggagcaaccccaagagcaagcugcagaucaacagacaggugaucguggacagaggcgacggcagcggcuacagcggcaucuucagcguggagggcaagagcugcaucaacagaugcuucuacguggagcugaucagaggcagaaaggaggagaccgaggugcuguggaccagcaacagcaucgugguguucugcggcaccagcggcaccuacggcaccggcagcuggcccgacggcgccgaccugaaccugaugcccaucuga

SEQ ID NO: 184171 - RNA, 1410 nt, Artificial Sequence; identical to SEQ ID NO: 182982
  derived and/or modified CDS sequence (opt4) from neuraminidase__InfluenzaA__AHC59978

SEQ ID NO: 184172 - RNA, 1410 nt, Artificial Sequence; identical to SEQ ID NO: 180944
  derived and/or modified CDS sequence (opt4) from neuraminidase__InfluenzaA__AHC59990

SEQ ID NO: 184173 - RNA, 1410 nt, Artificial Sequence; identical to SEQ ID NO: 184080
  derived and/or modified CDS sequence (opt4) from neuraminidase__InfluenzaA__AHC60002

SEQ ID NO: 184174 - RNA, 1410 nt, Artificial Sequence; identical to SEQ ID NO: 184035
  derived and/or modified CDS sequence (opt4) from neuraminidase__InfluenzaA__AHC60014

SEQ ID NO: 184175 - RNA, 1410 nt, Artificial Sequence; identical to SEQ ID NO: 179578
  derived and/or modified CDS sequence (opt4) from neuraminidase__InfluenzaA__AHC60026

SEQ ID NO: 184176 - RNA, 1410 nt, Artificial Sequence; identical to SEQ ID NO: 184031
  derived and/or modified CDS sequence (opt4) from neuraminidase__InfluenzaA__AHC60038

SEQ ID NO: 184177 - RNA, 1410 nt, Artificial Sequence; identical to SEQ ID NO: 184031
  derived and/or modified CDS sequence (opt4) from neuraminidase__InfluenzaA__AHC60050

SEQ ID NO: 184178 - RNA, 1410 nt, Artificial Sequence
  derived and/or modified CDS sequence (opt4) from neuraminidase__InfluenzaA__AHC60062
augaaccccaaccagaagaucaucaccaucggcagcgugagccugaccaucagcaccaucugcuucuucaugcagaucgccauccugaucaccaccgugaccaugcacuucaagcaguacgaguucaacagcccccccaacaaccaggugaugcugugcgagcccaccaucaucgagagaaacaucaccgagaucguguaccugaccaacaccaccaucgagaaggagaucugccccaagcuggccgaguacagaaacuggagcaagccccagugcgacaucaccggcuucgcccccuucagcaaggacaacagcaucagacugagcgccggcggcgacaucugggugaccagagagcccuacgugagcugcgaccccgacaagugcuaccaguucgcccugggccagggcaccacccugaacaacgugcacagcaacaacaccgugagagacagaacccccuacagaacccugcugaugaacgagcugggcgugcccuuccaccugggcaccaagcaggugugcaucgccuggagcagcagcagcugccacgacggcaaggccuggcugcacgugugcaucaccggcgacgacaagaacgccaccgccagcuucaucuacaacggcaagcugguggacagcguggugagcuggagcaaggagauccugagaacccaggagagcgagugcgugugcaucaacggcaccugcaccguggugaugaccgacggcagcgccagcggcaaggccgacaccaagauccuguucaucgaggagggcaagaucgugcacaccagcacccugagcggcagcgcccagcacguggaggagugcagcugcuaccccagauaccccggcgugagaugcgugugcagagacaacuggaagggcagcaacagacccaucguggacaucaacaucaaggaccacagcaucgugagcagcuacgugugcagcggccuggugggcgacacccccagaaagaacgacagcagcagcagcagccacugccuggaccccaacaacgaggagggcggccacggcgugaagggcugggccuucgacgacggcaacgacguguggaugggcagaaccaucaacgagaccagcagacugggcuacgagaccuucaaggugaucgagggcuggagcaaccccaagagcaagcugcagaucaacagacaggugaucguggacagaggcaacagaagcggcuacagcggcaucuucagcguggagggcaagagcugcaucaacagaugcuucuacguggagcugaucagaggcagaaaggaggagaccgaggugcuguggaccagcaacagcaucgugguguucugcggcaccagcggcaccuacggcaccggcagcuggcccgacggcgccgaccugaaccugaugcccaucuga

SEQ ID NO: 184179 - RNA, 1410 nt, Artificial Sequence; identical to SEQ ID NO: 182982
  derived and/or modified CDS sequence (opt4) from neuraminidase__InfluenzaA__AHC60074

SEQ ID NO: 184180 - RNA, 1410 nt, Artificial Sequence; identical to SEQ ID NO: 184035
  derived and/or modified CDS sequence (opt4) from neuraminidase__InfluenzaA__AHC60086

SEQ ID NO: 184181 - RNA, 1410 nt, Artificial Sequence
  derived and/or modified CDS sequence (opt4) from neuraminidase__InfluenzaA__AHC60098
augaaccccaaccagaagaucaucaccaucggcagcgugagccugaccaucagcaccaucugcuucuucaugcagaucgccauccugaucaccaccgugacccugcacuucaagcaguacgaguucuacagcccccccaacaaccaggugaugcugugcgagcccaccaucaucgagagaaacaucaccgagaucguguaccugaccaacaccaccaucgagaaggagaucugccccaagcuggccgaguacagaaacuggagcaagccccagugcgacaucaccggcuucgcccccuucagcaaggacaacagcaucagacugagcgccggcggcgacaucugggugaccagagagcccuacgugagcugcgaccccgacaagugcuaccaguucgcccugggccagggcaccacccugaacaacgugcacagcaacaacaccgugagagacagaacccccuacagaacccugcugaugaacgagcugggcgugcccuuccaccugggcaccaagcaggugugcaucgccuggagcagcagcagcugccacgacggcaaggccuggcugcacgugugcaucaccggcgacgacaagaacgccaccgccagcuucaucuacaacggcagacugguggacagcguggugagcuggagcaaggagauccugagaacccaggagagcgagugcgugugcaucaacggcaccugcaccguggugaugaccgacggcagcgccagcggcaaggccgacaccaagauccuguucaucgaggagggcaagaucgugcacaccagcacccugagcggcagcgcccagcacguggaggagugcagcugcuaccccagauaccccggcgugagaugcgugugcagagacaacuggaagggcagcaacagacccaucguggacaucaacaucaaggaccacagcaucgugagcagcuacgugugcagcggccuggugggcgacacccccagaaagaacgacagcagcagcagcagccacugccuggaccccaacaacgaggagggcggccacggcgugaagggcugggccuucgacgacggcaacgacguguggaugggcagaaccaucgacgagaccagcagacugggcuacgagaccuucaaggugaucgagggcuggagcaaccccaagagcaagcugcagaucaacagacaggugaucguggacagaggcaacagaagcggcuacagcggcaucuucagcguggagggcaagagcugcaucaacagaugcuucuacguggagcugaucagaggcagaaaggaggagaccgaggugcuguggaccagcaacagcaucgugguguucugcggcaccagcggcaccuacggcaccggcagcuggcccgacggcgccgaccugaaccugaugcccaucuga

SEQ ID NO: 184182 - RNA, 1410 nt, Artificial Sequence; identical to SEQ ID NO: 184031
  derived and/or modified CDS sequence (opt4) from neuraminidase__InfluenzaA__AHC60110

SEQ ID NO: 184183 - RNA, 1410 nt, Artificial Sequence; identical to SEQ ID NO: 184108
  derived and/or modified CDS sequence (opt4) from neuraminidase__InfluenzaA__AHC60122

SEQ ID NO: 184184 - RNA, 1410 nt, Artificial Sequence; identical to SEQ ID NO: 184035
  derived and/or modified CDS sequence (opt4) from neuraminidase__InfluenzaA__AHC60134

SEQ ID NO: 184185 - RNA, 1410 nt, Artificial Sequence; identical to SEQ ID NO: 184089
  derived and/or modified CDS sequence (opt4) from neuraminidase__InfluenzaA__AHC60146

SEQ ID NO: 184186 - RNA, 1410 nt, Artificial Sequence; identical to SEQ ID NO: 184166
  derived and/or modified CDS sequence (opt4) from neuraminidase__InfluenzaA__AHC60158

SEQ ID NO: 184187 - RNA, 1410 nt, Artificial Sequence; identical to SEQ ID NO: 184031
  derived and/or modified CDS sequence (opt4) from neuraminidase__InfluenzaA__AHC60182

SEQ ID NO: 184188 - RNA, 1410 nt, Artificial Sequence
  derived and/or modified CDS sequence (opt4) from neuraminidase__InfluenzaA__AHC60206
augaaccccaaccagaagaucaucaccaucggcagcgugagccugaccaucagcaucaucugcuucuucaugcagguggccauccugaucaccaccgugacccugcacuucaagcaguacgaguucaacagcccccccaacaaccaggugaugcugugcgagcccaccaucaucgagagaaacaucaccgagaucguguaccugaccaacaccaccaucgagaaggagaucugccccaagcuggccgaguacagaaacuggagcaagccccagugcgacaucaccggcuucgcccccuucagcaaggacaacagcaucagacugagcgccggcggcgacaucugggugaccagagagcccuacgugagcugcgaccccgacaagugcuaccaguucgcccugggccagggcaccacccugaacaacgugcacagcaacaacaccgugagagacagaacccccuacagaacccugcugaugaacgagcugggcgugcccuuccaccugggcaccaagcaggugugcaucgccuggagcagcagcagcugccacgacggcaaggccuggcugcacgugugcaucaccggcgacgacaagaacgccaccgccagcuucaucuacaacggcaagcugguggacagcguggugagcuggagcaaggagauccugagaacccaggagagcgagugcgugugcaucaacggcaccugcaccguggugaugaccgacggcagcgccagcggcaaggccgacaccaagauccuguucaucgaggagggcaagaucgugcacaccagcacccugagcggcagcgcccagcacguggaggagugcagcugcuaccccagauaccccggcgugagaugcgugugcagagacaacuggaagggcagcaacagacccaucguggacaucaacaucaaggaccacagcaucgugagcagcuacgugugcagcggccuggugggcgacacccccagaaagaacgacagcagcagcagcagccacugccuggaccccaacaacgaggagggcggccacggcgugaagggcugggccuucgacgacggcaacgacguguggaugggcagaaccaucaacgagaccagcagacugggcuacgagaccuucaaggugaucgagggcuggagcaaccccaagagcaagcugcagaucaacagacaggugaucguggacagaggcaacagaagcggcuacagcggcaucuucagcguggagggcaagagcugcaucaacagaugcuucuacguggagcugaucagaggcagaaaggaggagaccgaggugcuguggaccagcaacagcaucgugguguucugcggcaccagcggcaccuacggcaccggcagcuggcccgacggcgccgaccugaaccugaugcccaucuga

SEQ ID NO: 184189 - RNA, 1410 nt, Artificial Sequence; identical to SEQ ID NO: 182982
  derived and/or modified CDS sequence (opt4) from neuraminidase__InfluenzaA__AHC60218

SEQ ID NO: 184190 - RNA, 1410 nt, Artificial Sequence; identical to SEQ ID NO: 179578
  derived and/or modified CDS sequence (opt4) from neuraminidase__InfluenzaA__AHC60230

SEQ ID NO: 184191 - RNA, 1410 nt, Artificial Sequence; identical to SEQ ID NO: 184031
  derived and/or modified CDS sequence (opt4) from neuraminidase__InfluenzaA__AHC60242

SEQ ID NO: 184192 - RNA, 1410 nt, Artificial Sequence; identical to SEQ ID NO: 184031
  derived and/or modified CDS sequence (opt4) from neuraminidase__InfluenzaA__AHC60254

SEQ ID NO: 184193 - RNA, 1410 nt, Artificial Sequence; identical to SEQ ID NO: 184031
  derived and/or modified CDS sequence (opt4) from neuraminidase__InfluenzaA__AHC60266

SEQ ID NO: 184194 - RNA, 1410 nt, Artificial Sequence; identical to SEQ ID NO: 184080
  derived and/or modified CDS sequence (opt4) from neuraminidase__InfluenzaA__AHC60278

SEQ ID NO: 184195 - RNA, 1410 nt, Artificial Sequence; identical to SEQ ID NO: 184031
  derived and/or modified CDS sequence (opt4) from neuraminidase__InfluenzaA__AHC60290

SEQ ID NO: 184196 - RNA, 1410 nt, Artificial Sequence
  derived and/or modified CDS sequence (opt4) from neuraminidase__InfluenzaA__AHC60302
augaaccccaaccagaagaucaucaccaucggcagcgugagccugaccaucagcaccaucugcuucuucaugcagaucgccauccugaucaccaccgugacccugcacuucaagcaguacgaguucaacagcccccccaacaaccaggugaugcugugcgagcccaccaucaucgagagaaacaucaccgagaucguguaccugaccaacaccaccaucgagaaggagaucugccccaagcuggccgaguacagaaacuggagcaagccccagugcgacaucaccggcuucgcccccuucagcaaggacaacagcaucagacugagcgccggcggcgacaucugggugaccagagagcccuacgugagcugcgaccccaacaagugcuaccaguucgcccugggccagggcaccacccugaacaacgugcacagcaacaacaccgugagagacagaacccccuacagaacccugcugaugaacgagcugggcgugcccuuccaccugggcaccaagcaggugugcaucgccuggagcagcagcagcugccacgacggcaaggccuggcugcacgugugcaucaccggcgacgacaagaacgccaccgccagcuucaucuacaacggcaagcugguggacagcguggugagcuggagcaaggagauccugagaacccaggagagcgagugcgugugcaucaacggcaccugcaccguggugaugaccgacggcagcgccagcggcaaggccgacaccaagauccuguucaucgaggagggcaagaucauccacaccagcacccugagcggcagcgcccagcacguggaggagugcagcugcuaccccagauaccccggcgugagaugcgugugcagagacaacuggaagggcagcaacagacccaucguggacaucaacaucaaggaccacagcaucgugagcagcuacgugugcagcggccuggugggcgacacccccagaaagaacgacagcagcagcagcagccacugccuggaccccaacaacgaggagggcggccacggcgugaagggcugggccuucgacgacggcaacgacguguggaugggcagaaccaucaacgagaccagcagacugggcuacgagaccuucaaggugaucgagggcuggagcaaccccaagagcaagcugcagaucaacagacaggugaucguggacagaggcaacagaagcggcuacagcggcaucuucagcguggagggcaagagcugcaucaacagaugcuucuacguggagcugaucagaggcagaaaggaggagaccgaggugcuguggaccagcaacagcaucgugguguucugcggcaccagcggcaccuacggcaccggcagcuggcccgacggcgccgaccugaaccugaugcccaucuga

SEQ ID NO: 184197 - RNA, 1410 nt, Artificial Sequence; identical to SEQ ID NO: 184031
  derived and/or modified CDS sequence (opt4) from neuraminidase__InfluenzaA__AHC60314

SEQ ID NO: 184198 - RNA, 1410 nt, Artificial Sequence; identical to SEQ ID NO: 184031
  derived and/or modified CDS sequence (opt4) from neuraminidase__InfluenzaA__AHC60326

SEQ ID NO: 184199 - RNA, 1410 nt, Artificial Sequence
  derived and/or modified CDS sequence (opt4) from neuraminidase__InfluenzaA__AHC60338
augaaccccaaccagaagaucaucaccaucggcagcgugagccugaccaucagcaccaucugcuucuucaugcagaucgccauccugaucaccaccgugacccugcacuucaagcaguacgaguucaacagcccccccaacaaccaggugaugcugugcgagcccaccaucaucgagagaaacaucaccgagaucguguaccugaccaacaccaccaucgagaaggagaucugccccaagcccgccgaguacagaaacuggagcaagccccagugcgacaucaccggcuucgcccccuucagcaaggacaacagcaucagacugagcgccggcggcgacaucugggugaccagagagcccuacgugagcugcgaccccgacaagugcuaccaguucgcccugggccagggcaccacccugaacaacgugcacagcaacaacaccgugagagacagaacccccuacagaacccugcugaugaacgagcugggcgugcccuuccaccugggcaccaagcaggugugcaucgccuggagcagcagcagcugccacgacggcaaggccuggcugcacgugugcaucaccggcgacgacaagaacgccaccgccagcuucaucuacaacggcagacugguggacagcguggugagcuggagcaaggagauccugagaacccaggagagcgagugcgugugcaucaacggcaccugcaccguggugaugaccgacggcagcgccagcggcaaggccgacaccaagauccuguucaucgaggagggcaagaucgugcacaccagcacccugagcggcagcgcccagcacguggaggagugcagcugcuaccccagauaccccggcgugagaugcgugugcagagacaacuggaagggcagcaacagacccaucguggacaucaacaucaaggaccacagcaucgugagcagcuacgugugcagcggccuggugggcgacacccccagaaagaacgacagcagcagcagcagccacugccuggaccccaacaacgaggagggcggccacggcgugaagggcugggccuucgacgacggcgacgacguguggaugggcagaaccaucaacgagaccagcagacugggcuacgagaccuucaaggugaucgagggcuggagcaaccccaagagcaagcugcagaucaacagacaggugaucguggacagaggcgacagaagcggcuacagcggcaucuucagcguggagggcaagagcugcaucaacagaugcuucuacguggagcugaucagaggcagaaaggaggagaccgaggugcuguggaccagcaacagcaucgugguguucugcggcaccagcggcaccuacggcaccggcagcuggcccgacggcgccgaccugaaccugaugcccaucuga

SEQ ID NO: 184200 - RNA, 1410 nt, Artificial Sequence; identical to SEQ ID NO: 180944
  derived and/or modified CDS sequence (opt4) from neuraminidase__InfluenzaA__AHC60350

SEQ ID NO: 184201 - RNA, 1410 nt, Artificial Sequence
  derived and/or modified CDS sequence (opt4) from neuraminidase__InfluenzaA__AHC60362
augaaccccaaccagaagaucaucaccaucggcagcgugagccugaccaucagcaccaucugcuucuucaugcagguggccauccugaucaccaccgugacccugcacuucaagcaguacgaguucaacagcccccccaacaaccaggugaugcugugcaagcccaccaucaucgagagaaacaucaccgagaucguguaccugaccaacaccaccaucgagaaggagaucugccccaagcuggccgaguacagaaacuggagcaagccccagugcgacaucaccggcuucgcccccuucagcaaggacaacagcaucagacugagcgccggcggcgacaucugggugaccagagagcccuacgugagcugcgaccccgacaagugcuaccaguucgcccugggccagggcaccacccugaacaacgugcacagcaacaacaccgugagagacagaacccccuacagaacccugcugaugaacgagcugggcgugcccuuccaccugggcaccaagcaggugugcaucgccuggagcagcagcagcugccacgacggcaaggccuggcugcacgugugcaucaccggcgacgacaagaacgccaccgccagcuucaucuacaacggcaagcugguggacagcguggugagcuggagcaaggagauccugagaacccaggagagcgagugcgugugcaucaacggcaccugcaccguggugaugaccgacggcagcgccagcggcaaggccgacaccaagauccuguucaucgaggagggcaagaucgugcacaccagcacccugagcggcagcgcccagcacguggaggagugcagcugcuaccccagauaccccggcgugagaugcgugugcagagacaacuggaagggcagcaacagacccaucguggacaucaacaucaaggaccacagcaucgugagcagcuacgugugcagcggccuggugggcgacacccccagaaagaacgacagcagcagcagcagccacugccuggaccccaacaacgaggagggcggccacggcgugaagggcugggccuucgacgacggcaacgacguguggaugggcagaaccaucaacgagaccagcagacugggcuacgagaccuucaaggugaucgagggcuggagcaaccccaagagcaagcugcagaucaacagacaggugaucguggacagaggcaacagaagcggcuacagcggcaucuucagcguggagggcaagagcugcaucaacagaugcuucuacguggagcugaucagaggcagaaaggaggagaccgaggugcuguggaccagcaacagcaucgugguguucugcggcaccagcggcaccuacggcaccggcagcuggcccgacggcgccgaccugaaccugaugcccaucuga

SEQ ID NO: 184202 - RNA, 1410 nt, Artificial Sequence; identical to SEQ ID NO: 183943
  derived and/or modified CDS sequence (opt4) from neuraminidase__InfluenzaA__AHC60374

SEQ ID NO: 184203 - RNA, 1410 nt, Artificial Sequence; identical to SEQ ID NO: 179578
  derived and/or modified CDS sequence (opt4) from neuraminidase__InfluenzaA__AHC60386

SEQ ID NO: 184204 - RNA, 1410 nt, Artificial Sequence; identical to SEQ ID NO: 184035
  derived and/or modified CDS sequence (opt4) from neuraminidase__InfluenzaA__AHC60398

SEQ ID NO: 184205 - RNA, 1410 nt, Artificial Sequence; identical to SEQ ID NO: 184067
  derived and/or modified CDS sequence (opt4) from neuraminidase__InfluenzaA__AHC60410

SEQ ID NO: 184206 - RNA, 1410 nt, Artificial Sequence; identical to SEQ ID NO: 179578
  derived and/or modified CDS sequence (opt4) from neuraminidase__InfluenzaA__AHC60422

SEQ ID NO: 184207 - RNA, 1410 nt, Artificial Sequence; identical to SEQ ID NO: 184067
  derived and/or modified CDS sequence (opt4) from neuraminidase__InfluenzaA__AHC60434

SEQ ID NO: 184208 - RNA, 1410 nt, Artificial Sequence; identical to SEQ ID NO: 184035
  derived and/or modified CDS sequence (opt4) from neuraminidase__InfluenzaA__AHC60446

SEQ ID NO: 184209 - RNA, 1410 nt, Artificial Sequence
  derived and/or modified CDS sequence (opt4) from neuraminidase__InfluenzaA__AHC60458
augaaccccaaccagaagaucaucaccaucggcagcgugagccugaccaucagcaccaucugcuucuucaugcagaucgccauccugaucaccaccgugacccugcacuucaagcaguacgaguucaacagcccccccaacaaccaggugaugcugugcgagcccaccaucaucgagagaaacaucaccgagaucguguaccugaccaacaccaccaucgagaaggagaucugccccaagcuggccgaguacagaaacuggagcaagccccagugcgacaucaccggcuucgcccccuucagcaaggacaacagcaucagacugagcgccggcggcgacaucugggugaccagagagcccuacgugagcugcgaccccgacaagugcuaccaguucgcccugggccagggcaccacccugaacaacgugcacagcaacaacaccgugagagacagaacccccuacagaacccugcugaugaacgagcugggcgugcccuuccaccugggcaccaagcaggugugcaucgccuggagcagcagcagcugccacgacggcaaggccuggcugcacgugugcaucaccggcgacgacaagaacgccaccgccagcuucaucuacaacggcagacugguggacagcguggugagcuggagcaaggagauccugagaacccaggagagcgagugcgugugcaucaacggcaccugcgccguggugaugaccgacggcagcgccagcggcaaggccgacaccaagauccuguucaucgaggagggcaagaucgugcacaccagcacccugagcggcagcgcccagcacguggaggagugcagcugcuaccccagauaccccggcgugagaugcgugugcagagacaacuggaagggcagcaacagacccaucguggacaucaacaucaaggaccacagcaucgugagcagcuacgugugcagcggccuggugggcgacacccccagaaagaacgacggcagcagcagcagccacugccuggaccccaacaacgaggagggcggccacggcgugaagggcugggccuucgacgacggcaacgacguguggaugggcagaaccaucaacgagaccagcagacugggcuacgagaccuucaaggugaucgagggcuggagcaaccccaagagcaagcugcagaucaacagacaggugaucguggacagaggcaacagaagcggcuacagcggcaucuucagcguggagggcaagagcugcaucaacagaugcuucuacguggagcugaucagaggcagaaaggaggagaccgaggugcuguggaccagcaacagcaucgugguguucugcggcaccagcggcaccuacggcaccggcagcuggcccgacggcgccgaccugaaccugaugcccaucuga

SEQ ID NO: 184210 - RNA, 1410 nt, Artificial Sequence; identical to SEQ ID NO: 184080
  derived and/or modified CDS sequence (opt4) from neuraminidase__InfluenzaA__AHC60470

SEQ ID NO: 184211 - RNA, 1410 nt, Artificial Sequence
  derived and/or modified CDS sequence (opt4) from neuraminidase__InfluenzaA__AHC60482
augaaccccaaccagaagaucaucaccaucggcagcgugagccugaccaucagcaccaucugcuucuucaugcagaucgccauccugaccaccaccgugacccugcacuucaagcaguacgaguucaacagcccccccaacaaccaggugaugcugugcgagcccaccaucaucgagagaaacaucaccgagaucguguaccugaccaacaccaccaucgagaaggagaucugccccaagcccgccgaguacagaaacuggagcaagccccagugcgacaucaccggcuucgcccccuucagcaaggacaacagcaucagacugagcgccggcggcgacaucugggugaccagagagcccuacgugagcugcgaccccgacaagugcuaccaguucgcccugggccagggcaccacccugaacaacgugcacagcaacaacaccgugagagacagaacccccuacagaacccugcugaugaacgagcugggcgugcccuuccaccugggcaccaagcaggugugcaucgccuggagcagcagcagcugccacgacggcaaggccuggcugcacgugugcaucaccggcgacgacaagaacgccaccgccagcuucaucuacaacggcagacugguggacagcguggugagcuggagcaaggagauccugagaacccaggagagcgagugcgugugcaucaacggcaccugcaccguggugaugaccgacggcagcgccagcggcaaggccgacaccaagauccuguucaucgaggagggcaagaucgugcacaccagcacccugagcggcagcgcccagcacguggaggagugcagcugcuaccccagauaccccggcgugagaugcgugugcagagacaacuggaagggcagcaacagacccaucguggacaucaacaucaaggaccacagcaucgugagcagcuacgugugcagcggccuggugggcgacacccccagaaagaacgacagcagcagcagcagccacugccuggaccccaacaacgaggagggcggccacggcgugaagggcugggccuucgacgacggcaacgacguguggaugggcagaaccaucaacgagaccagcagacugggcuacgagaccuucaaggugaucgagggcuggagcaaccccaagagcaagcugcagaucaacagacaggugaucguggacagaggcgacagaagcggcuacagcggcaucuucagcguggagggcaagagcugcaucaacagaugcuucuacguggagcugaucagaggcagaaaggaggagaccgaggugcuguggaccagcaacagcaucgugguguucugcggcaccagcggcaccuacggcaccggcagcuggcccgacggcgccgaccugaaccugaugcccaucuga

SEQ ID NO: 184212 - RNA, 1410 nt, Artificial Sequence; identical to SEQ ID NO: 184031
  derived and/or modified CDS sequence (opt4) from neuraminidase__InfluenzaA__AHC60494

SEQ ID NO: 184213 - RNA, 1410 nt, Artificial Sequence; identical to SEQ ID NO: 184031
  derived and/or modified CDS sequence (opt4) from neuraminidase__InfluenzaA__AHC60506

SEQ ID NO: 184214 - RNA, 1410 nt, Artificial Sequence; identical to SEQ ID NO: 184035
  derived and/or modified CDS sequence (opt4) from neuraminidase__InfluenzaA__AHC60518

SEQ ID NO: 184215 - RNA, 1410 nt, Artificial Sequence; identical to SEQ ID NO: 184035
  derived and/or modified CDS sequence (opt4) from neuraminidase__InfluenzaA__AHC60542

SEQ ID NO: 184216 - RNA, 1410 nt, Artificial Sequence
  derived and/or modified CDS sequence (opt4) from neuraminidase__InfluenzaA__AHC60554
augaaccccaaccagaagaucaucaccaucggcagcgugagccugaccaucagcaccaucugcuucuucaugcagaucgccauccugaucaccaccgugacccugcacuucaagcaguacgaguucuacagcccccccaacaaccaggugaugcugugcgagcccaccaugaucgagagaaacaucaccgagaucguguaccugaccaacaccaccaucgagaaggagaucugccccaagcuggccgaguacagaaacuggagcaagccccagugcgacaucaccggcuucgcccccuucagcaaggacaacagcaucagacugagcgccggcggcgacaucugggugaccagagagcccuacgugagcugcgaccccgacaagugcuaccaguucgcccugggccagggcaccacccugaacaacgugcacagcaacaacaccgugagagacagaacccccuacagaacccugcugaugaacgagcugggcgugcccuuccaccugggcaccaagcaggugugcaucgccuggagcagcagcagcugccacgacggcaaggccuggcugcacgugugcaucaccggcgacgacaagaacgccaccgccagcuucaucuacaacggcagacugguggacagcguggugagcuggagcaaggagauccugagaacccaggagagcgagugcgugugcaucaacggcaccugcaccguggugaugaccgacggcagcgccagcggcaaggccgacaccaagauccuguucaucgaggagggcaagaucgugcacaccagcacccugagcggcagcgcccagcacguggaggagugcagcugcuaccccagauaccccggcgugagaugcgugugcagagacaacuggaagggcagcaacagacccaucguggacaucaacaucaaggaccacagcaucgugagcagcuacgugugcagcggccuggugggcgacacccccagaaagaacgacagcagcagcagcagccacugccuggaccccaacaacgaggagggcggccacggcgugaagggcugggccuucgacgacggcaacgacguguggaugggcagaaccaucaacgagaccagcagacugggcuacgagaccuucaaggugaucgagggcuggagcaaccccaagagcaagcugcagaucaacagacaggugaucguggacagaggcaacagaagcggcuacagcggcaucuucagcguggagggcaagagcugcaucaacagaugcuucuacguggagcugaucagaggcagaaaggaggagaccgaggugcuguggaccagcaacagcaucgugguguucugcggcaccagcggcaccuacggcaccggcaccuggcccgacggcgccgaccugaaccugaugcccaucuga

SEQ ID NO: 184217 - RNA, 1410 nt, Artificial Sequence
  derived and/or modified CDS sequence (opt4) from neuraminidase__InfluenzaA__AHC60566
augaaccccaaccagaagaucaucaccaucggcagcgugagccugaccaucagcaccaucugcuucuucaugcagaucgccauccugaucaccaccgugacccugcacuucaagcaguacgaguucaacagcccccccaacaaccaggugaugcugugcgagcccaccaucaucgagagaaacaucaccgagaucguguaccugaccaacaccaccaucgagaaggagaucugccccaagcccgccgaguacagaaacuggagcaagccccagugcgacaucaccggcuucgcccccuucagcaaggacaacagcaucagacugagcgccggcggcgacaucugggugaccagagagcccuacgugagcugcgaccccgacaagugcuaccaguucgcccugggccagggcaccacccugaacaacgugcacagcaacaacaccgugagagacagaacccccuacagaacccugcugaugaacgagcugggcgugcccuuccaccugggcaccaagcaggugugcaucgccuggagcagcagcagcugccacgacggcaaggccuggcugcacgugugcaucaccggcgacgacaagaacgccaccgccagcuucaucuacaacggcagacugguggacagcguggugagcuggagcaaggagauccugagaacccaggagagcgagugcgugugcaucaacggcaccugcaccguggugaugaccgacggcagcgccagcggcaaggccgacaccaagauccuguucaucgaggagggcaagaucgugcacaccagcacccugagcggcagcgcccagcacguggaggagugcagcugcuaccccagauaccccggcgugagaugcgugugcagagacaacuggaagggcagcaacagacccaucguggacaucaacaucaaggaccacagcaucgugagcagcuacgugugcagcggccuggugggcgacacccccagaaagaacgacagcagcagcagcagccacugccuggaccccaacaacgaggagggcggccacggcgugaagggcugggccuucgacgacggcaacgacguguggaugggcagaaccaucaacgagaccagcagacugggcuacgagaccuucaaggugaucgagggcuggagcaaccccaagagcaagcugcaggugaacagacaggugaucguggacagaggcgacagaagcggcuacagcggcaucuucagcguggagggcaagagcugcaucaacagaugcuucuacguggagcugaucagaggcagaaaggaggagaccgaggugcuguggaccagcaacagcaucgugguguucugcggcaccagcggcaccuacggcaccggcagcuggcccgacggcgccgaccugaaccugaugcccaucuga

SEQ ID NO: 184218 - RNA, 1410 nt, Artificial Sequence; identical to SEQ ID NO: 182982
  derived and/or modified CDS sequence (opt4) from neuraminidase__InfluenzaA__AHC60578

SEQ ID NO: 184219 - RNA, 1410 nt, Artificial Sequence; identical to SEQ ID NO: 184031
  derived and/or modified CDS sequence (opt4) from neuraminidase__InfluenzaA__AHC60590

SEQ ID NO: 184220 - RNA, 1410 nt, Artificial Sequence
  derived and/or modified CDS sequence (opt4) from neuraminidase__InfluenzaA__AHC60602
augaaccccaaccagaagaucaucaccaucggcagcgugagccugaccaucagcaccaucugcuucuucaugcagaucgccauccugaucaccaccgugacccugcacuucaagcaguacgaguucaaccccccccccaacaaccagguggugcugugcgagcccaccaucaucgagagaaacaucaccgagaucguguaccugaccaacaccaccaucgagaaggagaucugccccaagcccgccgaguacagaaacuggagcaagccccagugcgacaucaccggcuucgcccccuucagcaaggacaacagcaucagacugagcgccggcggcgacaucugggugaccagagagcccuacgugagcugcgaccccgacaagugcuaccaguucgcccugggccagggcaccacccugaacaacgugcacagcaacaacaccgugagagacagaacccccuacagaacccugcugaugaacgagcugggcgugcccuuccaccugggcaccaagcaggugugcaucgccuggagcagcagcagcugccacgacggcaaggccuggcugcacgugugcaucaccggcgacgacaagaacgccaccgccagcuucaucuacaacggcagacugguggacagcguggugagcuggagcaaggagauccugagaacccaggagagcgagugcgugugcaucaacggcaccugcaccguggugaugaccgacggcagcgccagcggcaaggccgacaccaagauccuguucaucgaggagggcaagaucgugcacaccagcacccugagcggcagcgcccagcacguggaggagugcagcugcuaccccagauaccccggcgugagaugcgugugcagagacaacuggaagggcagcaacagacccaucguggacaucaacaucaaggaccacagcaucgugagcagcuacgugugcagcggccuggugggcgacacccccagaaagaacgacagcagcagcagcagccacugccuggaccccaacaacgaggagggcggccacggcgugaagggcugggccuucgacgacggcaacgacguguggaugggcagaaccaucaacgagaccagcagacugggcuacgagaccuucaaggugaucgagggcuggagcaaccccaagagcaagcugcagaucaacagacaggugaucguggacagaggcgacagaagcggcuacagcggcaucuucagcguggagggcaagagcugcaucaacagaugcuucuacguggagcugaucagaggcagaaaggaggagaccgaggugcuguggaccagcaacagcaucgugguguucugcggcaccagcggcaccuacggcaccggcagcuggcccgacggcgccgaccugaaccugaugcccaucuga

SEQ ID NO: 184221 - RNA, 1410 nt, Artificial Sequence; identical to SEQ ID NO: 179578
  derived and/or modified CDS sequence (opt4) from neuraminidase__InfluenzaA__AHC60614

SEQ ID NO: 184222 - RNA, 1410 nt, Artificial Sequence; identical to SEQ ID NO: 182982
  derived and/or modified CDS sequence (opt4) from neuraminidase__InfluenzaA__AHC60626

SEQ ID NO: 184223 - RNA, 1410 nt, Artificial Sequence
  derived and/or modified CDS sequence (opt4) from neuraminidase__InfluenzaA__AHC60650
augaaccccaaccagaagaucaucaccaucggcagcgugagccugaccaucagcaccaucugcuucuucaugcagaucgccauccugaucaccaccgugacccugcacuucaagcaguacgaguucuacagcccccccaacaaccaggugaugcugugcgagcccaccaucaucgagagaaacaucaccgagaucguguaccugaccaacaccaccaucgagaaggagaucugccccaagcuggccgaguacagaaacuggagcaagccccagugcgacaucaccggcuucgcccccuucagcaaggacaacagcaucagacugagcgccggcggcgacaucugggugaccagagagcccuacgugagcugcgaccccgacaagugcuaccaguucgcccugggccagggcaccacccugaacaacgugcacagcaacaacaccgugagagacagaacccccuacagaacccugcugaugaacgagcugggcgugcccuuccaccugggcaccaagcaggugugcaucgccuggagcagcagcagcugccacgacggcaaggccuggcugcacgugugcaucaccggcgacgacgagaacgccaccgccagcuucaucuacaacggcagacugguggacagcguggugagcuggagcaaggagauccugagaacccaggagagcgagugcgugugcaucaacggcaccugcaccguggugaugaccgacggcagcgccagcggcaaggccgacaccaagauccuguucaucgaggagggcaagaucgugcacaccagcacccugagcggcagcgcccagcacguggaggagugcagcugcuaccccagauaccccggcgugagaugcgugugcagagacaacuggaagggcagcaacagacccaucguggacaucaacaucaaggaccacagcaucgugagcagcuacgugugcagcggccuggugggcgacacccccagaaagaacgacagcagcagcagcagccacugccuggaccccaacaacgaggagggcggccacggcgugaagggcugggccuucgacgacggcaacgacguguggaugggcagaaccaucaacgagaccagcagacugggcuacgagaccuucaaggugaucgagggcuggagcaaccccaagagcaagcugcagaucaacagacaggugaucguggacagaggcaacagaagcggcuacagcggcaucuucagcguggagggcaagagcugcaucaacagaugcuucuacguggagcugaucagaggcagaaaggaggagaccgaggugcuguggaccagcaacagcaucgugguguucugcggcaccagcggcaccuacggcaccggcagcuggcccgacggcgccgaccugaaccugaugcccaucuga

SEQ ID NO: 184224 - RNA, 1410 nt, Artificial Sequence; identical to SEQ ID NO: 184080
  derived and/or modified CDS sequence (opt4) from neuraminidase__InfluenzaA__AHC60662

SEQ ID NO: 184225 - RNA, 1410 nt, Artificial Sequence; identical to SEQ ID NO: 184035
  derived and/or modified CDS sequence (opt4) from neuraminidase__InfluenzaA__AHC60674

SEQ ID NO: 184226 - RNA, 1410 nt, Artificial Sequence; identical to SEQ ID NO: 179578
  derived and/or modified CDS sequence (opt4) from neuraminidase__InfluenzaA__AHC60686

SEQ ID NO: 184227 - RNA, 1410 nt, Artificial Sequence; identical to SEQ ID NO: 184035
  derived and/or modified CDS sequence (opt4) from neuraminidase__InfluenzaA__AHC60698

SEQ ID NO: 184228 - RNA, 1410 nt, Artificial Sequence; identical to SEQ ID NO: 184031
  derived and/or modified CDS sequence (opt4) from neuraminidase__InfluenzaA__AHC60710

SEQ ID NO: 184229 - RNA, 1410 nt, Artificial Sequence; identical to SEQ ID NO: 184080
  derived and/or modified CDS sequence (opt4) from neuraminidase__InfluenzaA__AHC60722

SEQ ID NO: 184230 - RNA, 1410 nt, Artificial Sequence
  derived and/or modified CDS sequence (opt4) from neuraminidase__InfluenzaA__AHC60734
augaaccccaaccagaagaucaucaccaucggcagcgugagccugaccaucagcaccaucugcuucuucaugcagaucgccauccugaucaccaccgugacccugcacuucaagcaguacgaguucaacagcccccccaacaaccaggugaugcugugcgagcccaccaucaucgagagaaacaucaccgagaucguguaccugaucaacaccaccaucgagaaggagaucugccccaagcuggccgaguacagaaacuggagcaagccccagugcgacaucaccggcuucgcccccuucagcaaggacaacagcaucagacugagcgccggcggcgacaucugggugaccagagagcccuacgugagcugcgaccccaacaagugcuaccaguucgcccugggccagggcaccacccugaacaacgugcacagcaacaacaccgugagagacagaacccccuacagaacccugcugaugaacgagcugggcgugcccuuccaccugggcaccaagcaggugugcaucgccuggagcagcagcagcugccacgacggcaaggccuggcugcacgugugcaucaccggcgacgacaagaacgccaccgccagcuucaucuacaacggcaagcugguggacagcguggugagcuggagcaaggagauccugagaacccaggagagcgagugcgugugcaucaacggcaccugcaccguggugaugaccgacggcagcgccagcggcaaggccgacaccaagauccuguucaucgaggagggcaagaucgugcacaccagcacccugagcggcagcgcccagcacguggaggagugcagcugcuaccccagauaccccggcgugagaugcgugugcagagacaacuggaagggcagcaacagacccaucguggacaucaacaucaaggaccacagcaucgugagcagcuacgugugcagcggccuggugggcgacacccccagaaagaacgacagcagcagcagcagccacugccuggaccccaacaacgaggagggcggccacggcgugaagggcugggccuucgacgacggcaacgacguguggaugggcagaaccaucaacgagaccagcagacugggcuacgagaccuucaaggugaucgagggcuggagcaaccccaagagcaagcugcagaucaacagacaggugaucguggacagaggcaacagaagcggcuacagcggcaucuucagcguggagggcaagagcugcaucaacagaugcuucuacguggagcugaucagaggcagaaaggaggagaccgaggugcuguggaccagcaacagcaucgugguguucugcggcaccagcggcaccuacggcaccggcagcuggcccgacggcgccgaccugaaccugaugcccaucuga

SEQ ID NO: 184231 - RNA, 1410 nt, Artificial Sequence; identical to SEQ ID NO: 184067
  derived and/or modified CDS sequence (opt4) from neuraminidase__InfluenzaA__AHC60746

SEQ ID NO: 184232 - RNA, 1410 nt, Artificial Sequence; identical to SEQ ID NO: 184166
  derived and/or modified CDS sequence (opt4) from neuraminidase__InfluenzaA__AHC60770

SEQ ID NO: 184233 - RNA, 1410 nt, Artificial Sequence
  derived and/or modified CDS sequence (opt4) from neuraminidase__InfluenzaA__AHC60782
augaaccccaaccagaagaucaucaccaucggcagcgugagccugaccaucagcaccaucugcuucuucaugcagaucgccauccugaucaccaccgugacccugcacuucaagcaguacgaguucaacagcccccccaacaaccaggugaugcugugcgagcccaccaucaucgagagaaacaucaccgagaucguguaccugaccaacaccaccaucgagaaggagaucugccccaagcuggccgaguacagaaacuggagcaagccccagugcgacaucaccggcuucgcccccuucagcaaggacaacagcaucagacugagcgccggcggcgacaucugggugaccagagagcccuacgugagcugcgaccccgacaagugcuaccaguucgcccugggccagggcaccacccugaacaacgugcacagcaacaacaccgugagagacagaacccccuacagaacccugcugaugaacgagcugggcgugcccuuccaccugggcaccaagcaggugugcaucgccuggagcagcagcagcugccacgacggcaaggccuggcugcacgugugcaucaccggcgacgacaagaacgccaccgccagcuucaucuacaacggcagacugguggacagcguggugagcuggagcaaggagauccugagaacccaggagagcgagugcgugugcaucaacggcaccugcaccguggugaugaccgacggcagcgccagcggcaaggccgacaccaagauccuguucaucgaggagggcaagaucgugcacaccagcacccugagcggcagcgcccagcacguggaggagugcagcugcuaccccagauaccccggcgugagaugcgugugcagagacaacuggaagggcagcaacagacccaucguggacaucaacaucaaggaccacagcaucgugagcggcuacgugugcagcggccuggugggcgacacccccagaaagaacgacagcagcagcagcagccacugccuggaccccaacaacgaggagggcggccacggcgugaagggcugggccuucgacgacggcaacgacguguggaugggcagaaccaucaacgagaccagcagacugggcuacgagaccuucaaggugaucgagggcuggagcaaccccaagagcaagcugcagaucaacagacaggugaucguggacagaggcaacagaagcggcuacagcggcaucuucagcguggagggcaagagcugcaucaacagaugcuucuacguggagcugaucagaggcagaaaggaggagaccgaggugcuguggaccagcaacagcaucgugguguucugcggcaccagcggcaccuacggcaccggcagcuggcccgacggcgccgaccugaaccugaugcccaucuga

SEQ ID NO: 184234 - RNA, 1410 nt, Artificial Sequence; identical to SEQ ID NO: 184078
  derived and/or modified CDS sequence (opt4) from neuraminidase__InfluenzaA__AHC60794

SEQ ID NO: 184235 - RNA, 1410 nt, Artificial Sequence
  derived and/or modified CDS sequence (opt4) from neuraminidase__InfluenzaA__AHC60806
augaaccccaaccagaagaucaucaccaucggcagcgugagccugaccaucagcaccaucugcuucuucaugcagaucgccauccugaucaccaccgugacccugcacuucaagcagugcgaguucaacagcccccccaacaaccaggugaugcugugcgagcccaccaucaucgagagaaacaucaccgagaucguguaccugaccaacaccaccaucgagaaggagaucugccccaagcuggccgaguacagaaacuggagcaagccccagugcgacaucaccggcuucgcccccuucagcaaggacaacagcaucagacugagcgccggcggcgacaucugggugaccagagagcccuacgugagcugcgaccccaacaagugcuaccaguucgcccugggccagggcaccacccugaacaacgugcacagcaacaacaccgugagagacagaacccccuacagaacccugcugaugaacgagcugggcgugcccuuccaccugggcaccaagcaggugugcaucgccuggagcagcagcagcugccacgacggcaaggccuggcugcacgugugcaucaccggcgacgacaagaacgccaccgccagcuucaucuacaacggcaagcugguggacagcguggugagcuggagcaaggagauccugagaacccaggagagcgagugcgugugcaucaacggcaccugcaccguggugaugaccgacggcagcgccagcggcaaggccgacaccaagauccuguucaucgaggagggcaagaucgugcacaccagcacccugagcggcagcgcccagcacguggaggagugcagcugcuaccccagauaccccggcgugagaugcgugugcagagacaacuggaagggcagcaacagacccaucguggacaucaacaucaaggaccacagcaucgugagcagcuacgugugcagcggccuggugggcgacacccccagaaagaacgacagcagcagcagcagccacugccuggaccccaacaacgaggagggcggccacggcgugaagggcugggccuucgacgacggcaacgacguguggaugggcagaaccaucaacgagaccagcagacugggcuacgagaccuucaaggugaucgagggcuggagcaaccccaagagcaagcugcagaucaacagacaggugaucguggacagaggcaacagaagcggcuacagcggcaucuucagcguggagggcaagagcugcaucaacagaugcuucuacguggagcugaucagaggcagaaaggaggagaccggcgugcuguggaccagcaacagcaucgugguguucugcggcaccagcggcaccuacggcaccggcagcuggcccgacggcgccgaccugaaccugaugcccaucuga

SEQ ID NO: 184236 - RNA, 1410 nt, Artificial Sequence; identical to SEQ ID NO: 180944
  derived and/or modified CDS sequence (opt4) from neuraminidase__InfluenzaA__AHC60818

SEQ ID NO: 184237 - RNA, 1410 nt, Artificial Sequence; identical to SEQ ID NO: 184035
  derived and/or modified CDS sequence (opt4) from neuraminidase__InfluenzaA__AHC60830

SEQ ID NO: 184238 - RNA, 1410 nt, Artificial Sequence; identical to SEQ ID NO: 184216
  derived and/or modified CDS sequence (opt4) from neuraminidase__InfluenzaA__AHC60842

SEQ ID NO: 184239 - RNA, 1410 nt, Artificial Sequence; identical to SEQ ID NO: 184035
  derived and/or modified CDS sequence (opt4) from neuraminidase__InfluenzaA__AHC60854

SEQ ID NO: 184240 - RNA, 1410 nt, Artificial Sequence; identical to SEQ ID NO: 184080
  derived and/or modified CDS sequence (opt4) from neuraminidase__InfluenzaA__AHC60866

SEQ ID NO: 184241 - RNA, 1410 nt, Artificial Sequence; identical to SEQ ID NO: 184067
  derived and/or modified CDS sequence (opt4) from neuraminidase__InfluenzaA__AHC60878

SEQ ID NO: 184242 - RNA, 1410 nt, Artificial Sequence; identical to SEQ ID NO: 184067
  derived and/or modified CDS sequence (opt4) from neuraminidase__InfluenzaA__AHC60890

SEQ ID NO: 184243 - RNA, 1410 nt, Artificial Sequence; identical to SEQ ID NO: 184166
  derived and/or modified CDS sequence (opt4) from neuraminidase__InfluenzaA__AHC60902

SEQ ID NO: 184244 - RNA, 1410 nt, Artificial Sequence; identical to SEQ ID NO: 184031
  derived and/or modified CDS sequence (opt4) from neuraminidase__InfluenzaA__AHC60914

SEQ ID NO: 184245 - RNA, 1410 nt, Artificial Sequence; identical to SEQ ID NO: 184035
  derived and/or modified CDS sequence (opt4) from neuraminidase__InfluenzaA__AHC60926

SEQ ID NO: 184246 - RNA, 1410 nt, Artificial Sequence; identical to SEQ ID NO: 184031
  derived and/or modified CDS sequence (opt4) from neuraminidase__InfluenzaA__AHC60938

SEQ ID NO: 184247 - RNA, 1410 nt, Artificial Sequence; identical to SEQ ID NO: 184035
  derived and/or modified CDS sequence (opt4) from neuraminidase__InfluenzaA__AHC60950

SEQ ID NO: 184248 - RNA, 1410 nt, Artificial Sequence
  derived and/or modified CDS sequence (opt4) from neuraminidase__InfluenzaA__AHC60962
augaaccccaaccagaagaucaucaccaucggcagcgugagccugaccaucagcaccaucugcuucuucaugcagaucgccauccugaucaccaccgugacccugcacuucaagcaguacgaguucuacagcccccccaacaaccaggugaugcugugcgagcccaccaucaucgagagaaacaucaccgagaucguguaccugaccaacaccaccaucgagaaggagaucugccccaagcuggccgaguacagaaacuggagcaagccccagugcgacaucaccggcuucgcccccuucagcaaggacaacagcaucagacugagcgccggcggcgacaucugggugaccagagagcccuacgugagcugcgaccccgacaagugcuaccaguucgcccugggccagggcaccacccugaacaacgugcacagcaacaacaccgugagagacagaacccccuacagaacccugcugaugaacgagcugggcgugcccuuccaccugggcaccaagcaggugugcaucgccuggagcagcagcagcugccacgacggcaaggccuggcugcacgugugcgugaccggcgacgacaagaacgccaccgccagcuucaucuacaacggcagacugguggacagcguggugagcuggagcaaggagauccugagaacccaggagagcgagugcgugugcaucaacggcaccugcaccguggugaugaccgacggcagcgccagcggcaaggccgacaccaagauccuguucaucgaggagggcaagaucgugcacaccagcacccugagcggcagcgcccagcacguggaggagugcagcugcuaccccagauaccccggcgugagaugcgugugcagagacaacuggaagggcagcaacagacccaucguggacaucaacaucaaggaccacagcaucgugagcagcuacgugugcagcggccuggugggcgacacccccagaaagaacgacagcagcagcagcagccacugccuggaccccaacaacgaggagggcggccacggcgugaagggcugggccuucgacgacggcaacgacguguggaugggcagaaccaucaacgagaccagcagacugggcuacgagaccuucaaggugaucgagggcuggagcaaccccaagagcaagcugcagaucaacagacaggugaucguggacagaggcaacagaagcggcuacagcggcaucuucagcguggagggcaagagcugcaucaacagaugcuucuacguggagcugaucagaggcagaaaggaggagaccgaggugcuguggaccagcaacagcaucgugguguucugcggcaccagcggcaccuacggcaccggcagcuggcccgacggcgccgaccugaaccugaugcccaucuga

SEQ ID NO: 184249 - RNA, 1410 nt, Artificial Sequence; identical to SEQ ID NO: 184080
  derived and/or modified CDS sequence (opt4) from neuraminidase__InfluenzaA__AHC60974

SEQ ID NO: 184250 - RNA, 1410 nt, Artificial Sequence; identical to SEQ ID NO: 184031
  derived and/or modified CDS sequence (opt4) from neuraminidase__InfluenzaA__AHC60986

SEQ ID NO: 184251 - RNA, 1410 nt, Artificial Sequence; identical to SEQ ID NO: 184178
  derived and/or modified CDS sequence (opt4) from neuraminidase__InfluenzaA__AHC60998

SEQ ID NO: 184252 - RNA, 1410 nt, Artificial Sequence; identical to SEQ ID NO: 184078
  derived and/or modified CDS sequence (opt4) from neuraminidase__InfluenzaA__AHC61010

SEQ ID NO: 184253 - RNA, 1410 nt, Artificial Sequence
  derived and/or modified CDS sequence (opt4) from neuraminidase__InfluenzaA__AHC61022
augaaccccaaccagaagaucaucaccaucggcagcgugagccugaccaucagcaccaucugcuucuucaugcagaucgccauccugaucaccaccgugacccugcacuucaagcaguacgaguucaacagcccccccaacaaccaggugaugcugugcgagcccaccaucaucgagagaaacaucaccgagaucguguaccugaccaacaccaccaucgagaaggagaucugccccaagcuggccgaguacagaaacuggagcaagccccagugcgacaucaccggcuucgcccccuucagcaaggacaacagcaucagacugagcgccggcggcgacaucugggugaccagagagcccuacgugagcugcgaccccgacaagugcuaccaguucgcccugggccagggcaccacccugaacaacgugcacagcaacaacaccgugagagacagaacccccuacagaacccugcugaugaacgagcugggcgugcccuuccaccugggcaccaagcaggugugcaucgccuggagcagcagcagcugccacgacggcaaggccuggcugcacgugugcaucaccggcgacgacaagaacgccaccgccagcuucaucuacaacggcagacugguggacagcguggugagcuggagcaaggagauccugagaacccaggagagcgagugcgugugcaucaacggcaccugcaccguggugaugaccgacggcagcgccagcggcaaggccgacaccaagauccuguucaucgaggagggcaagaucgugcacaccagcacccugagcggcagcgcccagcacguggaggagugcagcugcuaccccagauaccccggcgugagaugcgugugcagagacaacuggaagggcagcaacagacccaucguggacaucaacaucaaggaccacagcaucgugagcagcuacgugugcagcggccuggugggcgacacccccagaaagaacgacagcagcagcaucagccacugccuggaccccaacaacgaggagggcggccacggcgugaagggcugggccuucgacgacggcaacgacguguggaugggcagaaccaucaacgagaccagcagacugggcuacgagaccuucaaggugaucgagggcuggagcaaccccaagagcaagcugcagaucaacagacaggugaucguggacagaggcaacagaagcggcuacagcggcaucuucagcguggagggcaagagcugcaucaacagaugcuucuacguggagcugaucagaggcagaaaggaggagaccgaggugcuguggaccagcaacagcaucgugguguucugcggcaccagcggcaccuacggcaccggcagcuggcccgacggcgccgaccugaaccugaugcccaucuga

SEQ ID NO: 184254 - RNA, 1410 nt, Artificial Sequence; identical to SEQ ID NO: 179578
  derived and/or modified CDS sequence (opt4) from neuraminidase__InfluenzaA__AHC61034

SEQ ID NO: 184255 - RNA, 1410 nt, Artificial Sequence; identical to SEQ ID NO: 184031
  derived and/or modified CDS sequence (opt4) from neuraminidase__InfluenzaA__AHC61046

SEQ ID NO: 184256 - RNA, 1410 nt, Artificial Sequence; identical to SEQ ID NO: 184080
  derived and/or modified CDS sequence (opt4) from neuraminidase__InfluenzaA__AHC61058

SEQ ID NO: 184257 - RNA, 1410 nt, Artificial Sequence; identical to SEQ ID NO: 183943
  derived and/or modified CDS sequence (opt4) from neuraminidase__InfluenzaA__AHC61070

SEQ ID NO: 184258 - RNA, 1410 nt, Artificial Sequence
  derived and/or modified CDS sequence (opt4) from neuraminidase__InfluenzaA__AHC61082
augaaccccaaccagaagaucaucaccaucggcagcgugagccugaccaucagcaccaucugcuucuucaugcagaucgccauccugaucaccaccgugacccugcacuucaagcaguacgaguucaacagcccccccaacaaccagguggugcugugcgagcccaccaucaucgagagaaacaucaccgagaucguguaccugaccaacaccaccaucgagaaggagaucugccccaagcccgccgaguacagaaacuggagcaagccccagugcgacaucaccggcuucgcccccuucagcaaggacaacagcaucagacugagcgccggcggcgacaucugggugaccagagagcccuacgugagcugcgaccccgacaagugcuaccaguucgcccugggccagggcaccacccugaacaacgugcacagcaacaacaccgugagagacagaacccccuacagaacccugcugaugaacgagcugggcgugcccuuccaccugggcaccaagcaggugugcaucgccuggagcagcagcagcugccacgacggcaaggccuggcugcacgugugcaucaccggcgacgacaagaacgccaccgccagcuucaucuacaacggcagacugguggacagcguggugagcuggagcaaggagauccugagaacccaggagagcgagugcgugugcaucaacggcaccugcaccguggugaugaccgacggcagcgccagcggcaaggccgacaccaagauccuguucaucgaggagggcaagaucgugcacaccagcacccugagcggcagcgcccagcacguggaggagugcagcugcuaccccagauaccccggcgugagaugcgugugcagagacaacuggaagggcagcaacagacccaucguggacaucaacaucaaggaccacagcaucgugagcagcuacgugugcagcggccuggugggcgacacccccagaaagaacgacagcagcagcagcagccacugccuggaccccaacaacgaggagggcggccacggcgugaagggcugggccuucgacgacggcaacgacguguggaugggcagaaccaucaacgagaccagcagacugggcuacgagaccuucaaggugaucgagggcuggagcaaccccaagagcaagcugcagaucaacagacaggugaucguggacagaggcgacagaagcggcuacagcggcaucuucagcguggagggcaagagcugcaucaacagaugcuucuacguggagcugaucagaggcagaaaggaggagaccggcgugcuguggaccagcaacagcaucgugguguucugcggcaccagcggcaccuacggcaccggcagcuggcccgacggcgccgaccugaaccugaugcccaucuga

SEQ ID NO: 184259 - RNA, 1410 nt, Artificial Sequence; identical to SEQ ID NO: 179578
  derived and/or modified CDS sequence (opt4) from neuraminidase__InfluenzaA__AHC61094

SEQ ID NO: 184260 - RNA, 1410 nt, Artificial Sequence; identical to SEQ ID NO: 184067
  derived and/or modified CDS sequence (opt4) from neuraminidase__InfluenzaA__AHC61106

SEQ ID NO: 184261 - RNA, 1410 nt, Artificial Sequence; identical to SEQ ID NO: 184067
  derived and/or modified CDS sequence (opt4) from neuraminidase__InfluenzaA__AHC61118

SEQ ID NO: 184262 - RNA, 1410 nt, Artificial Sequence; identical to SEQ ID NO: 184031
  derived and/or modified CDS sequence (opt4) from neuraminidase__InfluenzaA__AHC61130

SEQ ID NO: 184263 - RNA, 1410 nt, Artificial Sequence; identical to SEQ ID NO: 184178
  derived and/or modified CDS sequence (opt4) from neuraminidase__InfluenzaA__AHC61142

SEQ ID NO: 184264 - RNA, 1410 nt, Artificial Sequence; identical to SEQ ID NO: 184067
  derived and/or modified CDS sequence (opt4) from neuraminidase__InfluenzaA__AHC61154

SEQ ID NO: 184265 - RNA, 1410 nt, Artificial Sequence
  derived and/or modified CDS sequence (opt4) from neuraminidase__InfluenzaA__AHC61166
augaaccccaaccagaagaucaucaccaucggcagcgugagccugaccaucagcaccaucugcuucuucaugcagguggccauccugaucaccaccgugacccugcacuucaagcaguacgaguucaacagcccccccaacaaccaggugaugcugugcgagcccaccaucaucgagagaaacaucaccgagaucguguaccugaccaacaccaccaucgagaaggagaucugccccaagcuggccgaguacagaaacuggagcaagccccagugcgacaucaccggcuucgcccccuucagcaaggacaacagcaucagacugagcgccggcggcgacaucugggugaccagagagcccuacgugagcugcgaccccgacaagugcuaccaguucgcccugggccagggcaccacccugaacaacgugcacagcaacaacaccgugagagacagaacccccuacagaacccugcugaugaacgagcugggcgugcccuuccaccugggcaccaagcaggugugcaucgccuggagcagcagcagcugccacgacggcaaggccuggcugcacgugugcaucaccggcgacgacaagaacgccaccgccagcuucaucuacaacggcaagcugguggacagcguggugagcuggagcaaggagauccugagaacccaggagagcgagugcgugugcaucaacggcaccugcaccguggugaugaccgacggcagcgccagcggcaaggccgacaccaagauccuguucaucgaggagggcaagaucgugcacaccagcacccugagcggcagcgcccagcacguggaggagugcagcugcuaccccagauaccccggcgugagaugcgugugcagagacaacuggaagggcagcaacagacccaucguggacaucaacaucaaggaccacagcaucgugagcagcuacgugugcagcggccuggugggcgacacccccagaaagaacgacagcagcagcagcagccacugccuggaccccaacaacgaggagggcggccacggcgugaagggcugggccuucgacgacggcaacgacguguggaugggcagaaccaucaacgagaccagcagacugggcuacgagaccuucaaggugaucgagggcuggagcaaccccaagagcaagcugcagaccaacagacaggugaucguggacagaggcaacagaagcggcuacagcggcaucuucagcguggagggcaagagcugcaucaacagaugcuucuacguggagcugaucagaggcagaaaggaggagaccgaggugcuguggaccagcaacagcaucgugguguucugcggcaccagcggcaccuacggcaccggcagcuggcccgacggcgccgaccugaaccugaugcccaucuga

SEQ ID NO: 184266 - RNA, 1410 nt, Artificial Sequence; identical to SEQ ID NO: 184031
  derived and/or modified CDS sequence (opt4) from neuraminidase__InfluenzaA__AHC61178

SEQ ID NO: 184267 - RNA, 1410 nt, Artificial Sequence; identical to SEQ ID NO: 184067
  derived and/or modified CDS sequence (opt4) from neuraminidase__InfluenzaA__AHC61190

SEQ ID NO: 184268 - RNA, 1410 nt, Artificial Sequence; identical to SEQ ID NO: 184080
  derived and/or modified CDS sequence (opt4) from neuraminidase__InfluenzaA__AHC61202

SEQ ID NO: 184269 - RNA, 1410 nt, Artificial Sequence; identical to SEQ ID NO: 184035
  derived and/or modified CDS sequence (opt4) from neuraminidase__InfluenzaA__AHC61214

SEQ ID NO: 184270 - RNA, 1410 nt, Artificial Sequence; identical to SEQ ID NO: 184080
  derived and/or modified CDS sequence (opt4) from neuraminidase__InfluenzaA__AHC61226

SEQ ID NO: 184271 - RNA, 1410 nt, Artificial Sequence; identical to SEQ ID NO: 184067
  derived and/or modified CDS sequence (opt4) from neuraminidase__InfluenzaA__AHC61238

SEQ ID NO: 184272 - RNA, 1410 nt, Artificial Sequence; identical to SEQ ID NO: 184248
  derived and/or modified CDS sequence (opt4) from neuraminidase__InfluenzaA__AHC61250

SEQ ID NO: 184273 - RNA, 1410 nt, Artificial Sequence; identical to SEQ ID NO: 184031
  derived and/or modified CDS sequence (opt4) from neuraminidase__InfluenzaA__AHC61262

SEQ ID NO: 184274 - RNA, 1410 nt, Artificial Sequence; identical to SEQ ID NO: 184035
  derived and/or modified CDS sequence (opt4) from neuraminidase__InfluenzaA__AHC61274

SEQ ID NO: 184275 - RNA, 1410 nt, Artificial Sequence; identical to SEQ ID NO: 179578
  derived and/or modified CDS sequence (opt4) from neuraminidase__InfluenzaA__AHC61286

SEQ ID NO: 184276 - RNA, 1410 nt, Artificial Sequence; identical to SEQ ID NO: 184079
  derived and/or modified CDS sequence (opt4) from neuraminidase__InfluenzaA__AHC61298

SEQ ID NO: 184277 - RNA, 1410 nt, Artificial Sequence
  derived and/or modified CDS sequence (opt4) from neuraminidase__InfluenzaA__AHC61310
augaaccccaaccagaagaucaucaccaucggcagcgugagccugaccaucagcaccaucugcuucuucaugcagaucgccauccugaucaccaccgugacccugcacuucaagcaguacgaguucaacagcccccccaacaaccaggugaugcugugcgagcccaccaucaucgagagaaacaucaccgagaucguguaccugaccaacaccaccaucgagaaggagaucugccccaagcuggccgaguacagaaacuggagcaagccccagugcgacaucaccggcuucgcccccuucagcaaggacaacagcaucagacugagcgccggcggcgacaucugggugaccagagagcccuacgugagcugcgaccccaacaagugcuaccaguucgcccugggccagggcaccacccugaacaacgugcacagcaacaacaccgugagagacagaacccccuacagaacccugcugaugaacgagcugggcgugcccuuccaccugggcaccaagcaggugugcaucgccuggagcagcagcagcugccacgacggcaaggccuggcugcacgugugcaucaccggcgacgacaagaacgccaccgccagcuucaucuacaacggcaagcugguggacagcguggugagcuggagcaaggagauccugagaacccaggagagcgagugcgugugcaucaacggcaccugcaccguggugaugaccgacggcagcgccagcggcaaggccgacaccaagauccuguucaucgaggagggcaagaucgugcacaccagcacccugagcggcagcgcccagcacguggaggagugcagcugcuaccccagauaccccggcgugagaugcgugugcagagacaacuggaagggcagcaacagacccaucguggacaucaacaucaaggaccacagcaucgugagcagcuacgugugcagcggccuggugggcgacacccccagaaagaacgacagcagcagcagcagccacugccuggaccccaacaacgaggagggcggccacggcgugaagggcugggccuucgacgacggcaacgacguguggaugggcagaaccaucaacgagaccagcagacugggcuacgagaccuucaaggugaucgagggcuggagcaaccccaagagcaagcugcagaucaacagacaggugaucaucgacagaggcaacagaagcggcuacagcggcaucuucagcguggagggcaagagcugcaucaacagaugcuucuacguggagcugaucagaggcagaaaggaggagaccgaggugcuguggaccagcagcagcaucgugguguucugcggcaccagcggcaccuacggcaccggcagcuggcccgacggcgccgaccugaaccugaugcccaucuga

SEQ ID NO: 184278 - RNA, 1410 nt, Artificial Sequence; identical to SEQ ID NO: 184108
  derived and/or modified CDS sequence (opt4) from neuraminidase__InfluenzaA__AHC61322

SEQ ID NO: 184279 - RNA, 1410 nt, Artificial Sequence; identical to SEQ ID NO: 184067
  derived and/or modified CDS sequence (opt4) from neuraminidase__InfluenzaA__AHC61334

SEQ ID NO: 184280 - RNA, 1410 nt, Artificial Sequence; identical to SEQ ID NO: 184035
  derived and/or modified CDS sequence (opt4) from neuraminidase__InfluenzaA__AHC61346

SEQ ID NO: 184281 - RNA, 1410 nt, Artificial Sequence
  derived and/or modified CDS sequence (opt4) from neuraminidase__InfluenzaA__AHC61358
augaaccccaaccagaagaucaucaccaucggcagcgugagccugaccaucagcaccaucugcuucuucaugcagaucgccauccugaucaccaccgugacccugcacuucaagcaguacgaguucaacagcccccccaacaaccaggugaugcugugcgagcccaccaucaucgagagaaacaucaccgagaucguguaccugaccaacaccaccaucgagaaggagaucugccccaagcuggccgaguacagaaacuggagcaagccccagugcgacaucaccggcuucgcccccuucagcaaggacaacagcaucagacugagcgccggcggcgacaucugggugaccagagagcccuacgugagcugcgaccccgacaagugcuaccaguucgcccugggccagggcaccacccugaacaacgugcacagcaacaacaccgugagagacagaacccccuacagaacccugcugaugaacgagcugggcgugcccuuccaccugggcaccaagcaggugugcaucgccuggagcagcagcagcugccacgacggcaaggccuggcugcacgugugcaucaccggcgacgacaagaacgccaccgccagcuucaucuacaacggcagacugguggacagcguggugagcuggagcaaggagauccugagaacccaggagagcgagugcgugugcaucaacggcaccugcaccguggugaugaccgacggcagcgccagcggcaaggccgacaccaagauccuguucaucgaggagggcaagaucgugcacaccagcacccugagcggcagcgcccagcacguggaggagugcagcugcuaccccagauaccccggcgugagaugcgugugcagagacaacuggaagggcagcaacagacccaucguggacaucaacaucaaggaccacagcaucgugagcagcuacgugugcagcggccuggugggcgacacccccagaaagaacgacaucagcagcagcagccacugccuggaccccaacaacgaggagggcggccacggcgugaagggcugggccuucgacgacggcaacgacguguggaugggcagaaccaucaacgagaccagcagacugggcuacgagaccuucaaggugaucaagggcuggagcaaccccaagagcaagcugcagaucaacagacaggugaucguggacagaggcaacagaagcggcuacagcggcaucuucagcguggagggcaagagcugcaucaacagaugcuucuacguggagcugaucagaggcagaaaggaggagaccgaggugcuguggaccagcaacagcaucgugguguucugcggcaccagcggcaccuacggcaccggcagcuggcccgacggcgccgaccugaaccugaugcccaucuga

SEQ ID NO: 184282 - RNA, 1410 nt, Artificial Sequence; identical to SEQ ID NO: 184080
  derived and/or modified CDS sequence (opt4) from neuraminidase__InfluenzaA__AHC61370

SEQ ID NO: 184283 - RNA, 1410 nt, Artificial Sequence; identical to SEQ ID NO: 184108
  derived and/or modified CDS sequence (opt4) from neuraminidase__InfluenzaA__AHC61382

SEQ ID NO: 184284 - RNA, 1410 nt, Artificial Sequence; identical to SEQ ID NO: 184080
  derived and/or modified CDS sequence (opt4) from neuraminidase__InfluenzaA__AHC61394

SEQ ID NO: 184285 - RNA, 1410 nt, Artificial Sequence; identical to SEQ ID NO: 184108
  derived and/or modified CDS sequence (opt4) from neuraminidase__InfluenzaA__AHC61406

SEQ ID NO: 184286 - RNA, 1410 nt, Artificial Sequence; identical to SEQ ID NO: 184067
  derived and/or modified CDS sequence (opt4) from neuraminidase__InfluenzaA__AHC61418

SEQ ID NO: 184287 - RNA, 1410 nt, Artificial Sequence; identical to SEQ ID NO: 179578
  derived and/or modified CDS sequence (opt4) from neuraminidase__InfluenzaA__AHC61430

SEQ ID NO: 184288 - RNA, 1410 nt, Artificial Sequence; identical to SEQ ID NO: 184080
  derived and/or modified CDS sequence (opt4) from neuraminidase__InfluenzaA__AHC61442

SEQ ID NO: 184289 - RNA, 1410 nt, Artificial Sequence; identical to SEQ ID NO: 184080
  derived and/or modified CDS sequence (opt4) from neuraminidase__InfluenzaA__AHC61454

SEQ ID NO: 184290 - RNA, 1410 nt, Artificial Sequence
  derived and/or modified CDS sequence (opt4) from neuraminidase__InfluenzaA__AHC61466
augaaccccaaccagaagaucaucaccaucggcagcgugagccugaccaucagcaccaucugcuucuucaugcagaucgccauccugaucaccaccgugacccugcacuucaagcaguacgaguucaacagcccccccaacaaccaggugaugcugugcgagcccaccaucaucgagagaaacaccaccgagaucguguaccugaccaacaccaccaucgagaaggagaucugccccaagcuggccgaguacagaaacuggagcaagccccagugcgacaucaccggcuucgcccccuucagcaaggacaacagcaucagacugagcgccggcggcgacaucugggugaccagagagcccuacgugagcugcgaccccgacaagugcuaccaguucgcccugggccagggcaccacccugaacaacgugcacagcaacaacaccgugagagacagaacccccuacagaacccugcugaugaacgagcugggcgugcccuuccaccugggcaccaagcaggugugcaucgccuggagcagcagcagcugccacgacggcaaggccuggcugcacgugugcaucaccggcgacgacaagaacgccaccgccagcuucaucuacaacggcagacugguggacagcguggugagcuggagcaaggagauccugagaacccaggagagcgagugcgugugcaucaacggcaccugcaccguggugaugaccgacggcagcgccagcggcaaggccgacaccaagauccuguucaucgaggagggcaagaucgugcacaccagcacccugagcggcagcgcccagcacguggaggagugcagcugcuaccccagauaccccggcgugagaugcgugugcagagacaacuggaagggcagcaacagacccaucguggacaucaacaucaaggaccacagcaucgugagcagcuacgugugcagcggccuggugggcgacacccccagaaagaacgacagcagcagcagcagccacugccuggaccccaacaacgaggagggcggccacggcgugaagggcugggccuucgacgacggcaacgacguguggaugggcagaaccaucaacgagaccagcagacugggcuacgagaccuucaaggugaucgagggcuggagcaaccccaagagcaagcugcagaucaacagacaggugaucguggacaagggcaacagaagcggcuacagcggcaucuucagcguggagggcaagagcugcaucaacagaugcuucuacguggagcugaucagaggcagaaaggaggagaccgaggugcuguggaccagcaacagcaucgugguguucugcggcaccagcggcaccuacggcaccggcagcuggcccgacggcgccgaccugaaccugaugcccaucuga

SEQ ID NO: 184291 - RNA, 1410 nt, Artificial Sequence; identical to SEQ ID NO: 184031
  derived and/or modified CDS sequence (opt4) from neuraminidase__InfluenzaA__AHC61478

SEQ ID NO: 184292 - RNA, 1410 nt, Artificial Sequence; identical to SEQ ID NO: 184067
  derived and/or modified CDS sequence (opt4) from neuraminidase__InfluenzaA__AHC61490

SEQ ID NO: 184293 - RNA, 1410 nt, Artificial Sequence; identical to SEQ ID NO: 184031
  derived and/or modified CDS sequence (opt4) from neuraminidase__InfluenzaA__AHC61502

SEQ ID NO: 184294 - RNA, 1410 nt, Artificial Sequence; identical to SEQ ID NO: 184080
  derived and/or modified CDS sequence (opt4) from neuraminidase__InfluenzaA__AHC61514

SEQ ID NO: 184295 - RNA, 1410 nt, Artificial Sequence; identical to SEQ ID NO: 182982
  derived and/or modified CDS sequence (opt4) from neuraminidase__InfluenzaA__AHC61526

SEQ ID NO: 184296 - RNA, 1410 nt, Artificial Sequence
  derived and/or modified CDS sequence (opt4) from neuraminidase__InfluenzaA__AHC61538
augaaccccaaccagaagaucaucaccaucggcagcgugagccugaccaucagcaccaucugcuucuucaugcagaucgccauccugaucaccaccgugacccugcacuucaagcaguacgaguucaacagcccccccaacaaccaggugaugcugugcgagcccaccaucaucgagagaaacaucaccgagaucguguaccugaccaacaccaccaucgagaaggagaucugccccaagcuggccgaguacagaaacuggagcaagccccagugcgacaucaccggcuucgcccccuucagcaaggacaacagcaucagacugagcgccggcggcgacaucugggugaccagagagcccuacgugagcugcgaccccaacaagugcuaccaguucgcccugggccagggcaccacccugaacaacgugcacagcaacaacaccgugagagacagaacccccuacagaacccugcugaugaacgagcugggcgugcccuuccaccugggcaccaagcaggugugcaucgccuggagcagcagcagcugccacgacggcaaggccuggcugcacgugugcaucaccggcgacgacaagaacgccaccgccagcuucaucuacaacggcaagcugguggacagcguggugagcuggagcaaggagauccugagaacccaggagagcgagugcgugugcaucaacggcaccugcaccguggugaugaccgacggcagcgccagcggcaaggccgacaccaagauccuguucaucgaggagggcaagaucgugcacaccagcacccugagcggcagcgcccagcacguggaggagugcagcugcuaccccagauaccccggcgugagaugcgugugcagagacaacuggaagggcagcaacagacccaucguggacaucaacaucaaggaccacagcaucgugagcagcuacgugugcagcggccuggugggcgacacccccagaaagaacgacagcagcagcagcagccacugccuggaccccaacaacgaggagggcagccacggcgugaagggcugggccuucgacgacggcaacgacguguggaugggcagaaccaucaacgagaccagcagacugggcuacgagaccuucaaggugaucgagggcuggagcaaccccaagagcaagcugcagaucaacagacaggugaucguggacagaggcaacagaagcggcuacagcggcaucuucagcguggagggcaagagcugcaucaacagaugcuucuacguggagcugaucagaggcagaaaggaggagaccgaggugcuguggaccagcaacagcaucgugguguucugcggcaccagcggcaccuacggcaccggcagcuggcccgacggcgccgaccugaaccugaugcccaucuga

SEQ ID NO: 184297 - RNA, 1410 nt, Artificial Sequence; identical to SEQ ID NO: 184080
  derived and/or modified CDS sequence (opt4) from neuraminidase__InfluenzaA__AHC61550

SEQ ID NO: 184298 - RNA, 1410 nt, Artificial Sequence
  derived and/or modified CDS sequence (opt4) from neuraminidase__InfluenzaA__AHC61562
augaaccccaaccagaagaucaucaccaucggcagcgugagccugaccaucagcaccaucugcuucuucaugcagaucgccauccugaucaccaccgugacccugcacuucaagcaguacgaguucuacagcccccccaacaaccaggugaugcugugcgagcccaccaugaucgagagaaacaucaccgagaucguguaccugaccaacaccaccaucgagaaggagaucugccccaagcuggccgaguacagaaacuggagcaagccccagugcgacaucaccggcuucgcccccuucagcaaggacaacagcaucagacugagcgccggcggcgacaucugggugaccagagagcccuacgugagcugcgaccccgacaagugcuaccaguucgcccugggccagggcaccacccugaacaacgugcacagcaacaacaccgugagagacagaacccccuacagaacccugcugaugaacgagcugggcgugcccuuccaccugggcaccaagcaggugugcaucgccuggagcagcagcagcugccacgacggcaaggccuggcugcacgugugcaucaccggcgacgacaagaacgccaccgccagcuucaucuacaacggcagacugguggacagcguggugagcuggagcaaggagauccugagaacccaggagagcgagugcgugugcaucaacggcaccugcaccguggugaugaccgacggcagcgccagcggcaaggccgacaccaagauccuguucaucgaggagggcaagaucgugcacaccagcacccugagcggcagcgcccagcacguggaggagugcagcugcuaccccagauaccccggcgugagaugcgugugcagagacaacuggaagggcagcaacagacccaucguggacaucaacaucaaggaccacagcaucgugagcagcuacgugugcagcggccuggugggcgacacccccagaaagaacgacagcagcagcagcagccacugccuggaccccaacaacgaggagggcggccacggcgugaagggcugggccuucgacgacggcaacgacguguggaugggcagaaccaucaacgagaccagcagacugggcuacgagaccuucaaggugaucgagggcuggagcaaccccaagagcaagcugcagaucaacagacaggugaucguggacagaggcaacagaagcggcuacagcggcaucuucagcguggagagcaagagcugcaucaacagaugcuucuacguggagcugaucagaggcagaaaggaggagaccgaggugcuguggaccagcaacagcaucgugguguucugcggcaccagcggcaccuacggcaccggcaccuggcccgacggcgccgaccugaaccugaugcccaucuga

SEQ ID NO: 184299 - RNA, 1410 nt, Artificial Sequence; identical to SEQ ID NO: 184079
  derived and/or modified CDS sequence (opt4) from neuraminidase__InfluenzaA__AHC61574

SEQ ID NO: 184300 - RNA, 1410 nt, Artificial Sequence; identical to SEQ ID NO: 184080
  derived and/or modified CDS sequence (opt4) from neuraminidase__InfluenzaA__AHC61586

SEQ ID NO: 184301 - RNA, 1410 nt, Artificial Sequence; identical to SEQ ID NO: 182982
  derived and/or modified CDS sequence (opt4) from neuraminidase__InfluenzaA__AHC61598

SEQ ID NO: 184302 - RNA, 1410 nt, Artificial Sequence; identical to SEQ ID NO: 184031
  derived and/or modified CDS sequence (opt4) from neuraminidase__InfluenzaA__AHC61610

SEQ ID NO: 184303 - RNA, 1410 nt, Artificial Sequence; identical to SEQ ID NO: 184079
  derived and/or modified CDS sequence (opt4) from neuraminidase__InfluenzaA__AHC61622

SEQ ID NO: 184304 - RNA, 1410 nt, Artificial Sequence; identical to SEQ ID NO: 179578
  derived and/or modified CDS sequence (opt4) from neuraminidase__InfluenzaA__AHC61634

SEQ ID NO: 184305 - RNA, 1410 nt, Artificial Sequence; identical to SEQ ID NO: 179578
  derived and/or modified CDS sequence (opt4) from neuraminidase__InfluenzaA__AHC61646

SEQ ID NO: 184306 - RNA, 1410 nt, Artificial Sequence; identical to SEQ ID NO: 179578
  derived and/or modified CDS sequence (opt4) from neuraminidase__InfluenzaA__AHC61658

SEQ ID NO: 184307 - RNA, 1410 nt, Artificial Sequence; identical to SEQ ID NO: 182982
  derived and/or modified CDS sequence (opt4) from neuraminidase__InfluenzaA__AHC61670

SEQ ID NO: 184308 - RNA, 1410 nt, Artificial Sequence; identical to SEQ ID NO: 184035
  derived and/or modified CDS sequence (opt4) from neuraminidase__InfluenzaA__AHC61682

SEQ ID NO: 184309 - RNA, 1410 nt, Artificial Sequence; identical to SEQ ID NO: 182982
  derived and/or modified CDS sequence (opt4) from neuraminidase__InfluenzaA__AHC61694

SEQ ID NO: 184310 - RNA, 1410 nt, Artificial Sequence
  derived and/or modified CDS sequence (opt4) from neuraminidase__InfluenzaA__AHC61706
augaaccccaaccagaagaucaucaccaucggcagcgugagccugaccaucagcaccaucugcuucuucaugcagaucgccauccugaucaccaccgugacccugcacuucaagcaguacgaguucaacagcccccccaacaaccaggugaugcugugcgagcccaccaucaucgagagaaacaucaccgagaucguguaccugaccaacaccaccaucgagaaggagaucugccccaagcuggccgaguacagaaacuggagcaagccccagugcgacaucaccggcuucgcccccuucagcaaggacaacagcaucagacugagcgccggcggcgacaucugggugaccagagagcccuacgugagcugcgaccccgacaagugcuaccaguucgcccugggccagggcaccacccugaacaacgugcacagcaacaacaccgugagagacagaacccccuacagaacccugcugaugaacgagcugggcgugcccuuccaccugggcaccaagcaggugugcaucgccuggagcagcagcagcugccacgacggcaaggccuggcugcacgugugcaucaccggcgacgacaagaacgccaccgccagcuucaucuacaacggcagacugguggacagcguggugagcuggagcaaggagauccugagaacccaggagagcgagugcgugugcaucaacggcaccugcaccguggugaugaccgacggcagcgccagcggcaaggccgacaccaagauccuguucaucgaggagggcaagaucgugcacaccagcacccugagcggcagcgcccagcacguggaggagugcagcugcuaccccagauaccccggcgugagaugcgugugcagagacaacuggaagggcagcaacagacccaucguggacaucaacaucaaggagcacagcaucgugagcagcuacgugugcagcggccuggugggcgacacccccagaaagaacgacagcagcagcagcagccacugccuggaccccaacaacgaggagggcggccacggcgugaagggcugggccuucgacgacggcaacgacguguggaugggcagaaccaucaacgagaccagcagacugggcuacgagaccuucaaggugaucgagggcuggagcaaccccaagagcaagcugcagaucaacagacaggugaucguggacagaggcaacagaagcggcuacagcggcaucuucagcguggagggcaagagcugcaucaacagaugcuucuacguggagcugaucagaggcagaaaggaggagaccgaggugcuguggaccagcaacagcaucgugguguucugcggcaccagcggcaccuacggcaccggcagcuggcccgacggcgccgaccugaaccugaugcccaucuga

SEQ ID NO: 184311 - RNA, 1410 nt, Artificial Sequence
  derived and/or modified CDS sequence (opt4) from neuraminidase__InfluenzaA__AHC61718
augaaccccaaccagaagaucaucaccaucggcagcgugagccugaccaucagcaccaucugcuucuucaugcagaucgccauccugaucaccaccgugacccugcacuucaagcagugcgaguucaacagcccccccaacaaccaggugaugcugugcgagcccaccaucaucgagagaaacaucaccgagaucguguaccugaccaacaccaccaucgagaaggagaucugccccaagcugaccgaguacagaaacuggagcaagccccagugcgacaucaccggcuucgcccccuucagcaaggacaacagcaucagacugagcgccggcggcgacaucugggugaccagagagcccuacgugagcugcgaccccaacaagugcuaccaguucgcccugggccagggcaccacccugaacaacgugcacagcaacaacaccgugagagacagaacccccuacagaacccugcugaugaacgagcugggcgugcccuuccaccugggcaccaagcaggugugcaucgccuggagcagcagcagcugccacgacggcaaggccuggcugcacgugugcaucaccggcgacgacaagaacgccaccgccagcuucaucuacaacggcaagcugguggacagcguggugagcuggagcaaggagauccugagaacccaggagagcgagugcgugugcaucaacggcaccugcaccguggugaugaccgacggcagcgccagcggcaaggccgacaccaagauccuguucaucgaggagggcaagaucgugcacaccagcacccugagcggcagcgcccagcacguggaggagugcagcugcuaccccagauaccccggcgugagaugcgugugcagagacaacuggaagggcagcaacagacccaucguggacaucaacaucaaggaccacagcaucgugagcagcuacgugugcagcggccuggugggcgacacccccagaaagaacgacagcagcagcagcagccacugccuggaccccaacaacgaggagggcggccacggcgugaagggcugggccuucgacgacggcaacgacguguggaugggcagaaccaucaacgagaccagcagacugggcuacgagaccuucaaggugaucgagggcuggagcaaccccaagagcaagcugcagaucaacagacaggugaucguggacagaggcaacagaagcggcuacagcggcaucuucagcguggagggcaagagcugcaucaacagaugcuucuacguggagcugaucagaggcagaaaggaggagaccggcgugcuguggaccagcaacagcaucgugguguucugcggcaccagcggcaccuacggcaccggcagcuggcccgacggcgccgaccugaaccugaugcccaucuga

SEQ ID NO: 184312 - RNA, 1410 nt, Artificial Sequence; identical to SEQ ID NO: 184031
  derived and/or modified CDS sequence (opt4) from neuraminidase__InfluenzaA__AHC61730

SEQ ID NO: 184313 - RNA, 1410 nt, Artificial Sequence; identical to SEQ ID NO: 184080
  derived and/or modified CDS sequence (opt4) from neuraminidase__InfluenzaA__AHC61742

SEQ ID NO: 184314 - RNA, 1410 nt, Artificial Sequence; identical to SEQ ID NO: 184031
  derived and/or modified CDS sequence (opt4) from neuraminidase__InfluenzaA__AHC61754

SEQ ID NO: 184315 - RNA, 1410 nt, Artificial Sequence; identical to SEQ ID NO: 179578
  derived and/or modified CDS sequence (opt4) from neuraminidase__InfluenzaA__AHC61766

SEQ ID NO: 184316 - RNA, 1410 nt, Artificial Sequence; identical to SEQ ID NO: 184067
  derived and/or modified CDS sequence (opt4) from neuraminidase__InfluenzaA__AHC61778

SEQ ID NO: 184317 - RNA, 1410 nt, Artificial Sequence; identical to SEQ ID NO: 184105
  derived and/or modified CDS sequence (opt4) from neuraminidase__InfluenzaA__AHC61790

SEQ ID NO: 184318 - RNA, 1410 nt, Artificial Sequence; identical to SEQ ID NO: 184035
  derived and/or modified CDS sequence (opt4) from neuraminidase__InfluenzaA__AHC61802

SEQ ID NO: 184319 - RNA, 1410 nt, Artificial Sequence; identical to SEQ ID NO: 184031
  derived and/or modified CDS sequence (opt4) from neuraminidase__InfluenzaA__AHC61814

SEQ ID NO: 184320 - RNA, 1410 nt, Artificial Sequence
  derived and/or modified CDS sequence (opt4) from neuraminidase__InfluenzaA__AHC61826
augaaccccaaccagaagaucaucaccaucggcagcgugagccugaccaucagcaccaucugcuucuucaugcagaucgccauccugaucaccaccgugacccugcacuucaagcaguacgaguucaacagcccccccaacaaccagguggugcugugcgagcccaccaucaucgagagaaacaucaccgagaucguguaccugaccaacaccaccaucgagaaggagaucugccccaagcccgccgaguacagaaacuggagcaagccccagugcgacaucaccggcuucgcccccuucagcaaggacaacagcaucagacugagcgccggcggcgacaucugggugaccagagagcccuacgugagcugcgaccccgacaagugcuaccaguucgcccugggccagggcaccacccugaacaacgugcacagcaacaacaccgugagagacagaacccccuacagaacccugcugaugaacgagcugggcgugcccuuccaccugggcaccaagcaggugugcaucgccuggagcagcagcagcugccacgacggcaaggccuggcugcacgugugcaucaccggcgacgacaagaacgccaccgccagcuucaucuacaacggcagacugguggacagcguggugagcuggagcaaggagauccugagaacccaggagagcgagugcgugugcaucaacggcaccugcaccguggugaugaccgacggcagcgccagcggcaaggccgacaccaagauccuguucaucgaggagggcaagaucgugcacaccagcacccugagcggcagcgcccagcacguggaggagugcagcugcuaccccagauaccccggcgugagaugcgugugcagagacaacuggaagggcagcaacagacccaucguggacaucaacaucaaggaccacagcaucgugagcagcuacgugugcagcggccuggugggcgacacccccagaaagaacgacagcagcagcagcagccacugccuggaccccaacaacgaggagggcggccacggcgugaagggcugggccuucgacgacggcaacgacguguggaugggcagaaccaucaacgagaccagcagacugggcuacgagaccuucaaggugaucgagggcuggagcaaccccaagagcaagcugcagaucaacagacaggugaucguggacagaagcgacagaagcggcuacagcggcaucuucagcguggagggcaagagcugcaucaacagaugcuucuacguggagcugaucagaggcagaaaggaggagaccgaggugcuguggaccagcaacagcaucgugguguucugcggcaccagcggcaccuacggcaccggcagcuggcccgacggcgccgaccugaaccugaugcccaucuga

SEQ ID NO: 184321 - RNA, 1410 nt, Artificial Sequence; identical to SEQ ID NO: 184031
  derived and/or modified CDS sequence (opt4) from neuraminidase__InfluenzaA__AHC61838

SEQ ID NO: 184322 - RNA, 1410 nt, Artificial Sequence; identical to SEQ ID NO: 184067
  derived and/or modified CDS sequence (opt4) from neuraminidase__InfluenzaA__AHC61850

SEQ ID NO: 184323 - RNA, 1410 nt, Artificial Sequence; identical to SEQ ID NO: 184080
  derived and/or modified CDS sequence (opt4) from neuraminidase__InfluenzaA__AHC61862

SEQ ID NO: 184324 - RNA, 1410 nt, Artificial Sequence; identical to SEQ ID NO: 184031
  derived and/or modified CDS sequence (opt4) from neuraminidase__InfluenzaA__AHC61874

SEQ ID NO: 184325 - RNA, 1410 nt, Artificial Sequence
  derived and/or modified CDS sequence (opt4) from neuraminidase__InfluenzaA__AHC61886
augaaccccaaccagaagaucaucaccaucggcagcgugagccugaccaucagcaccaucugcuucuucaugcagaucgccauccugaucaccaccgugacccugcacuucaagcaguacgaguucaaccccccccccaacaaccagguggugcugugcgagcccaccaucaucgagagaaacaucaccgagaucguguaccugaccaacaccaccaucgagaaggagaucugccccaagcccgccgaguacagacacuggagcaagccccagugcgacaucaccggcuucgcccccuucagcaaggacaacagcaucagacugagcgccggcggcgacaucugggugaccagagagcccuacgugagcugcgaccccgacaagugcuaccaguucgcccugggccagggcaccacccugaacaacgugcacagcaacaacaccgugagagacagaacccccuacagaacccugcugaugaacgagcugggcgugcccuuccaccugggcaccaagcaggugugcaucgccuggagcagcagcagcugccacgacggcaaggccuggcugcacgugugcaucaccggcgacgacaagaacgccaccgccagcuucaucuacaacggcagacugguggacagcguggugagcuggagcaaggagauccugagaacccaggagagcgagugcgugugcaucaacggcaccugcaccguggugaugaccgacggcagcgccagcggcaaggccgacaccaagauccuguucaucgaggagggcaagaucgugcacaccagcacccugagcggcagcgcccagcacguggaggagugcagcugcuaccccagauaccccggcgugagaugcgugugcagagacaacuggaagggcagcaacagacccaucguggacaucaacaucaaggaccacagcaucgugagcagcuacgugugcagcggccuggugggcgacacccccagaaagaacgacagcagcagcagcagccacugccuggaccccaacaacgaggagggcggccacggcgugaagggcugggccuucgacgacggcaacgacguguggaugggcagaaccaucaacgagaccagcagacugggcuacgagaccuucaaggugaucgagggcuggagcaaccccaagagcaagcugcagaucaacagacaggugaucguggacagaggcgacagaagcggcuacagcggcaucuucagcguggagggcaagagcugcaucaacagaugcuucuacguggagcugaucagaggcagaaaggaggagaccgaggugcuguggaccagcaacagcaucgugguguucugcggcaccagcggcaccuacggcaccggcagcuggcccgacggcgccgaccugaaccugaugcccaucuga

SEQ ID NO: 184326 - RNA, 1410 nt, Artificial Sequence; identical to SEQ ID NO: 184035
  derived and/or modified CDS sequence (opt4) from neuraminidase__InfluenzaA__AHC61898

SEQ ID NO: 184327 - RNA, 1410 nt, Artificial Sequence; identical to SEQ ID NO: 184067
  derived and/or modified CDS sequence (opt4) from neuraminidase__InfluenzaA__AHC61910

SEQ ID NO: 184328 - RNA, 1410 nt, Artificial Sequence; identical to SEQ ID NO: 179578
  derived and/or modified CDS sequence (opt4) from neuraminidase__InfluenzaA__AHC61934

SEQ ID NO: 184329 - RNA, 1410 nt, Artificial Sequence
  derived and/or modified CDS sequence (opt4) from neuraminidase__InfluenzaA__AHC61946
augaaccccaaccagaagaucaucaccaucggcagcgugagccugaccaucagcaccaucugcuucuucaugcagaucgccauccugaucaccaccgugacccugcacuucaagcaguacgagagcuacagcccccccaacaaccaggugaugcugugcgagcccaccaucaucgagagaaacaucaccgagaucguguaccugaccaacaccaccaucgagaaggagaucugccccaagcuggccgaguacagaaacuggagcaagccccagugcgacaucaccggcuucgcccccuucagcaaggacaacagcaucagacugagcgccggcggcgacaucugggugaccagagagcccuacgugagcugcgaccccgacaagugcuaccaguucgcccugggccagggcaccacccugaacaacgugcacagcaacaacaccgugagagacagaacccccuacagaacccugcugaugaacgagcugggcgugcccuuccaccugggcaccaagcaggugugcaucgccuggagcagcagcagcugccacgacggcaaggccuggcugcacgugugcaucaccggcgacgacaagaacgccaccgccagcuucaucuacaacggcagacugguggacagcguggugagcuggagcaaggagauccugagaacccaggagagcgagugcgugugcaucaacggcaccugcaccguggugaugaccgacggcagcgccagcggcaaggccgacaccaagauccuguucaucgaggagggcaagaucgugcacaccagcacccugagcggcagcgcccagcacguggaggagugcagcugcuaccccagaaaccccggcgugagaugcgugugcagagacaacuggaagggcagcaacagacccaucguggacaucaacaucaaggaccacagcaucgugagcagcuacgugugcagcggccuggugggcgacacccccagaaagaacgacagcagcagcagcagccacugccuggaccccaacaacgaggagggcggccacggcgugaagggcugggccuucgacgacggcaacgacguguggaugggcagaaccaucaacgagaccagcagacugggcuacgagaccuucaaggugaucgagggcuggagcaaccccaagagcaagcugcagaucaacagacaggugaucguggacagaggcaacagaagcggcuacagcggcaucuucagcguggagggcaagagcugcaucaacagaugcuucuacguggagcugaucagaggcagaaaggaggagaccgaggugcuguggaccagcaacagcaucgugguguucugcggcaccagcggcaccuacggcaccggcagcuggcccgacggcgccgaccugaaccugaugcccaucuga

SEQ ID NO: 184330 - RNA, 1410 nt, Artificial Sequence; identical to SEQ ID NO: 182982
  derived and/or modified CDS sequence (opt4) from neuraminidase__InfluenzaA__AHC61958

SEQ ID NO: 184331 - RNA, 1410 nt, Artificial Sequence; identical to SEQ ID NO: 184031
  derived and/or modified CDS sequence (opt4) from neuraminidase__InfluenzaA__AHC61970

SEQ ID NO: 184332 - RNA, 1410 nt, Artificial Sequence
  derived and/or modified CDS sequence (opt4) from neuraminidase__InfluenzaA__AHC61982
augaaccccaaccagaagaucaucaccaucggcagcgugagccugaccaucagcaccaucugcuucuucaugcagaucgccauccugaucaccaccgugacccugcacuucaagcaguacgaguucaacagcccccccaacaaccaggugaugcugugcgagcccaccaucaucgagagaaacaucaccgagaucguguaccugaccaacaccaccaucgagaaggagaucugccccaagcuggccgaguacagaaacuggagcaagccccagugcgacaucaccggcuucgcccccuucagcaaggacaacagcaucagacugagcgccggcggcgacaucugggugaccagagagcccuacgugagcugcgaccccgacaagugcuaccaguucgcccugggccagggcaccacccugaacaacgugcacagcaacaacaccgugagagacagaacccccuacagaacccugcugaugaacgagcugggcgugcccuuccaccugggcaccaagcaggugugcaucgccuggagcagcagcagcugccacgacggcaaggccuggcugcacgugugcaucaccggcgacgacaagaacgccaccgccagcuucaucuacaacggcagacugguggacagcguggugagcuggagcaaggagauccugagaacccaggagagcgagugcgugugcaucaacggcaccugcgccguggugaugaccgacggcagcgccagcggcaaggccgacaccaagauccuguucaucgaggagggcaagaucgugcacaccagcacccugagcggcagcgcccagcacguggaggagugcagcugcuaccccagauaccccggcgugagaugcgugugcagagacaacuggaagggcagcaacagacccaucguggacaucaacaucaaggaccacggcaucgugagcagcuacgugugcagcggccuggugggcgacacccccagaaagaacgacagcagcagcagcagccacugccuggaccccaacaacgaggagggcggccacggcgugaagggcugggccuucgacgacggcaacgacguguggaugggcagaaccaucaacgagaccagcagacugggcuacgagaccuucaaggugaucgagggcuggagcaaccccaagagcaagcugcagaucaacagacaggugaucguggacagaggcaacagaagcggcuacagcggcaucuucagcguggagggcaagagcugcaucaacagaugcuucuacguggagcugaucagaggcagaaaggaggagaccgaggugcuguggaccagcaacagcaucgugguguucugcggcaccagcggcaccuacggcaccggcagcuggcccgacggcgccgaccugaaccugaugcccaucuga

SEQ ID NO: 184333 - RNA, 1410 nt, Artificial Sequence; identical to SEQ ID NO: 184035
  derived and/or modified CDS sequence (opt4) from neuraminidase__InfluenzaA__AHC61994

SEQ ID NO: 184334 - RNA, 1410 nt, Artificial Sequence; identical to SEQ ID NO: 184067
  derived and/or modified CDS sequence (opt4) from neuraminidase__InfluenzaA__AHC62006

SEQ ID NO: 184335 - RNA, 1410 nt, Artificial Sequence; identical to SEQ ID NO: 184031
  derived and/or modified CDS sequence (opt4) from neuraminidase__InfluenzaA__AHC62018

SEQ ID NO: 184336 - RNA, 1410 nt, Artificial Sequence; identical to SEQ ID NO: 182982
  derived and/or modified CDS sequence (opt4) from neuraminidase__InfluenzaA__AHC62030

SEQ ID NO: 184337 - RNA, 1410 nt, Artificial Sequence; identical to SEQ ID NO: 184035
  derived and/or modified CDS sequence (opt4) from neuraminidase__InfluenzaA__AHC62042

SEQ ID NO: 184338 - RNA, 1410 nt, Artificial Sequence; identical to SEQ ID NO: 184108
  derived and/or modified CDS sequence (opt4) from neuraminidase__InfluenzaA__AHC62053

SEQ ID NO: 184339 - RNA, 1410 nt, Artificial Sequence
  derived and/or modified CDS sequence (opt4) from neuraminidase__InfluenzaA__AHC62065
augaaccccaaccagaagaucaucaccaucggcagcgugagccugaccaucagcaccaucugcuucuucaugcagaucgccauccuggugaccaccgugacccugcacuucaagcaguacgaguucaacagcccccccaacaaccaggugaugcugugcgagcccaccaucaucgagagaaacaucaccgagaucguguaccugaccaacaccaccaucgagaaggagaucugccccaagcccgccgaguacagaaacuggagcaagccccagugcgacaucaccggcuucgcccccuucagcaaggacaacagcaucagacugagcgccggcggcgacaucugggugaccagagagcccuacgugagcugcgaccccgacaagugcuaccaguucgcccugggccagggcaccacccugaacaacgugcacagcaacaacaccgugagagacagaacccccuacagaacccugcugaugaacgagcugggcgugcccuuccaccugggcaccaagcaggugugcaucgccuggagcagcagcagcugccacgacggcaaggccuggcugcacgugugcaucaccggcgacgacaagaacgccaccgccagcuucaucuacaacggcagacugguggacagcguggugagcuggagcaaggagauccugagaacccaggagagcgagugcgugugcaucaacggcaccugcaccguggugaugaccgacggcagcgccagcggcaaggccgacaccaagauccuguucaucgaggagggcaagaucgugcacaccagcacccugagcggcagcgcccagcacguggaggagugcagcugcuaccccagauaccccggcgugagaugcgugugcagagacaacuggaagggcagcaacagacccaucguggacaucaacaucaaggaccacagcaucgugagcagcuacgugugcagcggccuggugggcgacacccccagaaagaacgacagcagcagcagcagccacugccuggaccccaacaacgaggagggcggccacggcgugaagggcugggccuucgacgacggcaacgacguguggaugggcagaaccaucaacgagaccagcagacugggcuacgagaccuucaaggugaucgagggcuggagcaaccccaagagcaagcugcagaucaacagacaggugaucguggacagaggcgacagaagcggcuacagcggcaucuucagcguggagggcaagagcugcaucaacagaugcuucuacguggagcugaucagaggcagaaaggaggagaccgaggugcuguggaccagcaacagcaucgugguguucugcggcaccagcggcaccuacggcaccggcagcuggcccgacggcgccgaccugaaccugaugcccaucuga

SEQ ID NO: 184340 - RNA, 1410 nt, Artificial Sequence; identical to SEQ ID NO: 184166
  derived and/or modified CDS sequence (opt4) from neuraminidase__InfluenzaA__AHC62077

SEQ ID NO: 184341 - RNA, 1410 nt, Artificial Sequence; identical to SEQ ID NO: 184080
  derived and/or modified CDS sequence (opt4) from neuraminidase__InfluenzaA__AHC62089

SEQ ID NO: 184342 - RNA, 1410 nt, Artificial Sequence; identical to SEQ ID NO: 184031
  derived and/or modified CDS sequence (opt4) from neuraminidase__InfluenzaA__AHC62101

SEQ ID NO: 184343 - RNA, 1410 nt, Artificial Sequence; identical to SEQ ID NO: 184080
  derived and/or modified CDS sequence (opt4) from neuraminidase__InfluenzaA__AHC62113

SEQ ID NO: 184344 - RNA, 1410 nt, Artificial Sequence
  derived and/or modified CDS sequence (opt4) from neuraminidase__InfluenzaA__AHC62125
augaaccccaaccagaagaucaucaccaucggcagcgugagccugaccaucagcaccaucugcuucuucaugcagaucgccauccugaucaccaccgugacccugcacuucaagcaguacgaguucaacagcccccccaacaaccaggugaugcugugcgagcccaccaucaucgagagaaacaucaccgagaucguguaccugaccaacaccaccaucgagaaggagaucugccccaagcuggccgaguacagaaacuggagcaagccccagugcgacaucaccggcuucgcccccuucagcaaggacaacagcaucagacugagcgccggcggcgacaucugggugaccagagagcccuacgugagcugcgaccccaacaagugcuaccaguucgcccugggccagggcaccacccugaacaacgugcacagcaacaacaccgugagagacagaacccccuacagaacccugcugaugaacgagcugggcgugcccuuccaccugggcaccaagcaggugugcaucgccuggagcagcagcagcugccacgacggcaaggccuggcugcacgugugcaucaccggcgacgacaagaacgccaccgccagcuucaucuacaacggcaagcugguggacagcguggugagcuggagcaaggagauccugagaacccaggagagcgagugcgugugcaucaacggcaccugcaccguggugaugaccgacggcagcgccagcggcaaggccgacaccaagauccuguucaucgaggagggcaagaucgugcacaccagcacccugagcggcagcgcccagcacguggaggagugcagcugcuaccccagauaccccggcgugagaugcgugugcagagacaacuggaagggcagcaacagacccaucguggacaucaacaucaaggaccacagcaucgugagcagcuacgugugcagcggccuggugggcgacacccccagaaagaacgacagcagcagcagcagccacugccuggaccccaacaacgaggagggcggccacggcgugaagggcugggccuucgacgacggcaacgacguguggaugggcagaaccaucaacgagaccagcagacugggcuacgagaccuucaaggugaucgagggcuggagcaaccccaagagcaagcugcagaucaacagacaggugaucguggacagaggcaacaagagcggcuacagcggcaucuucagcguggagggcaagagcugcaucaacagaugcuucuacguggagcugaucagaggcagaaaggaggagaccgaggugcuguggaccagcaacagcaucgugguguucugcggcaccagcggcaccuacggcaccggcagcuggcccgacggcgccgaccugaaccugaugcccaucuga

SEQ ID NO: 184345 - RNA, 1410 nt, Artificial Sequence
  derived and/or modified CDS sequence (opt4) from neuraminidase__InfluenzaA__AHC62137
augaaccccaaccagaagaucaucaccaucggcagcgugagccugaccaucagcaccaucugcuucuucaugcagaucgccauccugaucaccaccgugacccugcacuucaagcaguacgaguucaacagcccccccaacaaccaggugaugcugugcgagcccaccaucaucgagagaaacaucaccgagaucguguaccugaccaacaccaccaucgagaaggagaucugccccaagcuggccgaguacagaaacuggagcaagccccagugcgacaucaccggcuucgcccccuucagcaaggacaacagcaucagacugagcgccggcggcgacaucugggugaccagagagcccuacgugagcugcgaccccgacaagugcuaccaguucgcccugggccagggcaccacccugaacaacgugcacagcaacaacaccgugagagacagaacccccuacagaacccugcugaugaacgagcugggcgugcccuuccaccugggcaccaagcaggugugcaucgccuggagcagcagcagcugccacgacggcaaggccuggcugcacgugugcaucaccggcgacgacaagaacgccaccgccagcuucaucuacaacggcagacugguggacagcguggugagcuggagcaaggagauccugagaacccaggagagcgagugcgugugcaucaacggcaccugcaccguggugaugaccgacggcagcgccagcggcaaggccgacaccaagauccuguucaucgaggagggcaagaucgugcacaccagcacccugagcggcagcgcccagcacguggaggagugcagcugcuaccccagauaccccggcgugagaugcgugugcagagacaacuggaagggcagcaacagacccaucguggacaucaacaucaaggaccacagcaucgugagcagcuacgugugcagcggccuggugggcgacacccccagaaagaacgacagcagcagcagcagccacugccuggaccccaacaacgaggagggcggccacggcgugaagggcugggccuucgacgacggcaacgacguguggaugggcagaaccaucaacgagaccagcagacugggcuacgagaccuucaaggugaucgagggcuggagcaaccccaagagcaagcugcagaucaacagacaggugaucguggacagaggcgacagaagcggcuacagcggcaucuucagcguggagggcaagagcugcaucaacagaugcuucuacguggagcugaucagaggcagaaaggaggagaccgaggugcuguggaccagcaacagcaucgugguguucugcggcaccagcggcaccuacggcaccggcagcuggcccgacggcgccgaccugaaccugaugcccaucuga

SEQ ID NO: 184346 - RNA, 1410 nt, Artificial Sequence
  derived and/or modified CDS sequence (opt4) from neuraminidase__InfluenzaA__AHC62149
augaaccccaaccagaagaucaucaccaucggcagcgugagccugaccaucagcaccaucugcuucuucaugcagaucgccauccugaucaccaccgugacccugcacuucaagcaguacgaguucaacagcccccccaacaaccaggugaugcugugcgagcccaccaucaucgagagaaacaucaccgagaucguguaccugaccaacaccaccaucgagaaggagaucugccccaagcccgccgaguacagaaacuggagcaagccccagugcgacaucaccggcuucgcccccuucagcaaggacaacagcaucagacugagcgccggcggcgacaucugggugaccagagagcccuacgugagcugcgaccccgacaagugcuaccaguucgcccugggccagggcaccacccugaacaacgugcacagcaacaacaccgugagagacagaacccccuacagaacccugcugaugaacgagcugggcgugcccuuccaccugggcaccaagcaggugugcaucgccuggagcagcagcagcugccacgacggcaaggccuggcugcacgugugcaucaccggcgacgacaagaacgccaccgccagcuucaucuacaacggcagacugguggacagcguggugagcuggagcaaggagauccugagaacccaggagagcgagugcgugugcaucaacggcaccugcaccguggugaugaccgacggcagcgccagcggcaaggccgacaccaagauccuguucaucgaggagggcaagaucgugcacaccagcacccugagcggcagcgcccagcacguggaggagugcagcugcuaccccagauaccccggcgugagaugcgugugcagagacaacuggaagggcagcaacagacccaucguggacaucaacaucagagaccacagcaucgugagcagcuacgugugcagcggccuggugggcgacacccccagaaagaacgacagcagcagcagcagccacugccuggaccccaacaacgaggagggcggccacggcgugaagggcugggccuucgacgacggcaacgacguguggaugggcagaaccaucaacgagaccagcagacugggcuacgagaccuucaaggugaucgagggcuggagcaaccccaagagcaagcugcagaucaacagacaggugaucguggacagaggcgacagaagcggcuacagcggcaucuucagcguggagggcaagagcugcaucaacagaugcuucuacguggagcugaucagaggcagaaaggaggagaccgaggugcuguggaccagcaacagcaucgugguguucugcggcaccagcggcaccuacggcaccggcagcuggcccgacggcgccgaccugaaccugaugcccaucuga

SEQ ID NO: 184347 - RNA, 1410 nt, Artificial Sequence; identical to SEQ ID NO: 184067
  derived and/or modified CDS sequence (opt4) from neuraminidase__InfluenzaA__AHC62161

SEQ ID NO: 184348 - RNA, 1410 nt, Artificial Sequence
  derived and/or modified CDS sequence (opt4) from neuraminidase__InfluenzaA__AHC62173
augaaccccaaccagaagaucaucaccaucggcagcgugagccugaccaucagcaccaucugcuucuucaugcagaucgccauccugaucaccaccgugacccugcacuucaagcagugcgaguucaacagcccccccaacaaccaggugaugcugugcgagcccaccaucaucgagagaaacaucaccgagaucguguaccugaccaacaccaccaucgagaaggagaucugccccaagcuggccgaguacagaaacuggagcaagccccagugcgacaucaccggcuucgcccccuucagcaaggacaacagcaucagacugagcgccggcggcgacaucugggugaccagagagcccuacgugagcugcgaccccaacaagugcuaccaguucgcccugggccagggcaccacccugaacaacgugcacagcaacaacaccgugagagacagaacccccuacagaacccugcugaugaacgagcugggcgugcccuuccaccugggcaccaagcaggugugcaucgccuggagcagcagcagcugccacgacggcaaggccuggcugcacgugugcaucaccggcgacgacaagaacgccaccgccagcuucaucuacaacggcaagcugguggacagcguggugagcuggagcaaggagauccugagaacccaggagagcgagugcgugugcaucaacggcaccugcaccguggugaugaccgacggcagcgccagcggcaaggccgacaccaagauccuguucaucgaggagggcaagaucgugcacaccagcacccugagcggcagcgcccagcacguggaggagugcagcugcuaccccagauaccccggcgugagaugcgugugcagagacaacuggaagggcagcaacagacccaucguggacaucaacaucaaggaccacagcaucgugagcagcuacgugugcagcggccuggugggcgacacccccagaaagaacgacagcagcagcagcagccacugccuggaccccaacaacgaggagggcggccacggcgugaagggcugggccuucgacgacggcaacgacguguggaugggcagaaccaucaacgagaccagcagacugggcuacgagaccuucaaggugaucgagggcuggagcaaccccaagagcaagcugcagaucaacagacaggugaucguggacagaggcaacagaagcggcuacagcggcaucuucagcguggagggcaagagcugcaucaacagaugcuucuacguggagcugaucagaggcagaaaggaggagaccgaggugcuguggaccagcaacagcaucgugguguucugcggcaccagcggcaccuacggcaccggcagcuggcccgacggcgccgaccugaaccugaugcccaucuga

SEQ ID NO: 184349 - RNA, 1410 nt, Artificial Sequence; identical to SEQ ID NO: 184080
  derived and/or modified CDS sequence (opt4) from neuraminidase__InfluenzaA__AHC62185

SEQ ID NO: 184350 - RNA, 1410 nt, Artificial Sequence; identical to SEQ ID NO: 182982
  derived and/or modified CDS sequence (opt4) from neuraminidase__InfluenzaA__AHC62197

SEQ ID NO: 184351 - RNA, 1410 nt, Artificial Sequence
  derived and/or modified CDS sequence (opt4) from neuraminidase__InfluenzaA__AHC62209
augaaccccaaccagaagaucaucaccaucggcagcgugagccugaccaucagcaccaucugcuucuucaugcagaucgccauccugaucaccaccgugacccugcacuucaagcaguacgaguucaacagcccccccaacaaccaggugaugcugugcgagcccaccaucaucgagagaaacaucaccgagaucguguaccugaccaacaccaccaucgagaaggagaucugccccaagcccgccgaguacagaaacuggagcaagccccagugcgacaucaccggcuucgcccccuucagcaaggacaacagcaucagacugagcgccggcggcgacaucugggugaccagagagcccuacgugagcugcgaccccgacaagugcuaccaguucgcccugggccagggcaccacccugaacaacgugcacagcaacaacaccgugagagacagaacccccuacagaacccugcugaugaacgagcugggcgugcccuuccaccugggcaccaagcaggugugcaucgccuggagcagcagcagcugccacgacggcaaggccuggcugcacgugugcaucaccggcgacgacaagaacgccaccgccagcuucaucuacaacggcagacugguggacagcguggugagcuggagcaaggagauccugagaacccaggagagcgagugcgugugcaucaacggcaccugcaccguggugaugaccgacggcagcgccagcggcaaggccgacaccaagauccuguucaucgaggagggcaagaucgugcacaccagcacccugagcggcagcgcccagcacguggaggagugcagcugcuaccccagauaccccggcgugagaugcgugugcagagacaacuggaagggcagcaacagacccaucguggacaucaacaucaagaaccacagcaucgugagcagcuacgugugcagcggccuggugggcgacacccccagaaagaacgacagcagcagcagcagccacugccuggaccccaacaacgaggagggcggccacggcgugaagggcugggccuucgacgacggcaacgacguguggaugggcagaaccaucaacgagaccagcagacugggcuacgagaccuucaaggugaucgagggcuggagcaaccccaagagcaagcugcagaucaacagacaggugaucguggacagaggcgacagaagcggcuacagcggcaucuucagcguggagggcaagagcugcaucaacagaugcuucuacguggagcugaucagaggcagaaaggaggagaccgaggugcuguggaccagcaacagcaucgugguguucugcggcaccagcggcaccuacggcaccggcagcuggcccgacggcgccgaccugaaccugaugcccaucuga

SEQ ID NO: 184352 - RNA, 1410 nt, Artificial Sequence; identical to SEQ ID NO: 184035
  derived and/or modified CDS sequence (opt4) from neuraminidase__InfluenzaA__AHC62221

SEQ ID NO: 184353 - RNA, 1410 nt, Artificial Sequence; identical to SEQ ID NO: 179578
  derived and/or modified CDS sequence (opt4) from neuraminidase__InfluenzaA__AHC62233

SEQ ID NO: 184354 - RNA, 1410 nt, Artificial Sequence; identical to SEQ ID NO: 184031
  derived and/or modified CDS sequence (opt4) from neuraminidase__InfluenzaA__AHC62245

SEQ ID NO: 184355 - RNA, 1410 nt, Artificial Sequence
  derived and/or modified CDS sequence (opt4) from neuraminidase__InfluenzaA__AHC62257
augaaccccaaccagaagaucaucaccaucggcagcgugagccugaccaucagcaccaucugcuucuucaugcagaucgccauccugaucaccaccgugacccugcacuucaagcaguacgaguucaacagcccccccaacaaccaggugaugcugugcgagcccaccaucaucgagagaaacaucaccgagaucguguaccugaccaacaccaccaucgagaaggagaucugccccaagcccgccgaguacagaaacuggagcaagccccagugcgacaucaccggcuucgcccccuucagcaaggacaacagcaucagacugagcgccggcggcgacaucugggugaccagagagcccuacgugagcugcgaccccgacaagugcuaccaguucgcccugggccagggcaccacccugaacaacgugcacagcaacaacaccgugagagacagaacccccuacagaacccugcugaugaacgagcugggcgugcccuuccaccugggcaccaagcaggugugcaucgccuggagcagcagcagcugccacgacggcaaggccuggcugcacgugugcaucaccggcgacgacaagaacgccaccgccagcuucaucuacaacggcagacugguggacagcguggugagcuggagcaaggagauccugagaacccaggagagcgagugcgugugcaucaacggcaccugcaccguggugaugaccgacggcagcgccagcggcaaggccgacaccaagauccuguucaucgaggagggcaagaucgugcacaccagcacccugagcggcagcgcccagcacguggaggagugcagcugcuaccccagauaccccggcgugagaugcgugugcagagacaacuggaagggcagcaacagacccaucguggacaucaacaucaaggaccacagcaucgugagcagcuacgugugcagcggccuggugggcgacacccccagaaagaacgacagcagcagcagcagccacugccuggaccccaacaacgaggagggcggccacggcgugaagggcugggccuucgacgacggcaacgacguguggaugggcagaaccaucaacgagaccagcagacugggcuacgagaccuucaaggugaucgagggcuggagcaaccccaagagcaagcugcagaucaacagacaggugaucgugggcagaggcgacagaagcggcuacagcggcaucuucagcguggagggcaagagcugcaucaacagaugcuucuacguggagcugaucagaggcagaaaggaggagaccgaggugcuguggaccagcaacagcaucgugguguucugcggcaccagcggcaccuacggcaccggcagcuggcccgacggcgccgaccugaaccugaugcccaucuga

SEQ ID NO: 184356 - RNA, 1410 nt, Artificial Sequence; identical to SEQ ID NO: 184108
  derived and/or modified CDS sequence (opt4) from neuraminidase__InfluenzaA__AHC62269

SEQ ID NO: 184357 - RNA, 1410 nt, Artificial Sequence; identical to SEQ ID NO: 184080
  derived and/or modified CDS sequence (opt4) from neuraminidase__InfluenzaA__AHC62281

SEQ ID NO: 184358 - RNA, 1410 nt, Artificial Sequence; identical to SEQ ID NO: 184035
  derived and/or modified CDS sequence (opt4) from neuraminidase__InfluenzaA__AHC62293

SEQ ID NO: 184359 - RNA, 1410 nt, Artificial Sequence; identical to SEQ ID NO: 179578
  derived and/or modified CDS sequence (opt4) from neuraminidase__InfluenzaA__AHC62305

SEQ ID NO: 184360 - RNA, 1410 nt, Artificial Sequence; identical to SEQ ID NO: 184031
  derived and/or modified CDS sequence (opt4) from neuraminidase__InfluenzaA__AHC62317

SEQ ID NO: 184361 - RNA, 1410 nt, Artificial Sequence
  derived and/or modified CDS sequence (opt4) from neuraminidase__InfluenzaA__AHC62329
augaaccccaaccagaagaucaucaccaucggcagcgugagccugaccaucagcaccaucugcuucuucaugcagaucgccauccugaucaccaccgugacccugcacuucaagcaguacgaguucaacagcccccccaacaaccaggugaugcugugcgagcccaccaucaucgagagaaacaucaccgagaucguguaccugaccaacaccaccaucgagaaggagaucugccccaagcccgccgaguacagaaacuggagcaagccccagugcgacaucaccggcuucgcccccuucagcaaggacaacagcaucagacugagcgccggcggcgacaucugggugaccagagagcccuacgugagcugcgaccccgacaagugcuaccaguucgcccugggccagggcaccacccugaacaacgugcacagcaacaacaccgugagagacagaacccccuacagaacccugcugaugaacgagcugggcgugcccuuccaccugggcaccaagcaggugugcaucgccuggagcagcagcagcugccacgacggcaaggccuggcugcacgugugcaucaccggcgacgacaagaacgccaccgccagcuucaucuacaacggcagacugguggacagcguggugagcuggagcaaggagauccugagaacccaggagagcgagugcgugugcaucaacggcaccugcaccguggugaugaccgacggcagcgccagcggcaaggccgacaccaagauccuguucaucgaggagggcaagaucgugcacaccagcacccugagcggcagcgcccagcacguggaggagugcagcugcuaccccagauaccccggcgugagaugcgugugcagagacaacuggaagggcagcaacagacccaucguggacaucaacaucaaggaccacagcaucgugagcagcuacgugugcagcggccuggugggcgacacccccagaaagaacgacagcagcagcagcagccacugccuggaccccaacaacgaggagggcggccacggcgugaagggcugggccuucgacgacggcaacgacguguggaugggcagaaccaucaacgagaccagcagacugggcuacgagaccuucaaggugaucgagggcuggagcaaccccaagagcaagcugcagaucaacagacaggugaucgccgacagaggcgacagaagcggcuacagcggcaucuucagcguggagggcaagagcugcaucaacagaugcuucuacguggagcugaucagaggcagaaaggaggagaccgaggugcuguggaccagcaacagcaucgugguguucugcggcaccagcggcaccuacggcaccggcagcuggcccgacggcgccgaccugaaccugaugcccaucuga

SEQ ID NO: 184362 - RNA, 1410 nt, Artificial Sequence; identical to SEQ ID NO: 184031
  derived and/or modified CDS sequence (opt4) from neuraminidase__InfluenzaA__AHC62341

SEQ ID NO: 184363 - RNA, 1410 nt, Artificial Sequence
  derived and/or modified CDS sequence (opt4) from neuraminidase__InfluenzaA__AHC62353
augaaccccaaccagaagaucaucaccaucggcagcgugagccugaccaucagcaccaucugcuucuucaugcagaucgccauccugaucaccaccgugacccugcacuucaagcaguacgaguucaacagcccccccaacaaccaggugaugcugugcgagcccaccaucaucgagagaaacaucaccgagaucguguaccugaccaacaccaccaucgagaaggagaucugccccaagcuggccgaguacagaaacuggagcaagccccagugcgacaucaccggcuucgcccccuucagcaaggacaacagcaucagacugagcgccggcggcgacaucugggugaccagagagcccuacgugagcugcgaccccgacaagugcuaccaguucgcccugggccagggcaccacccugaacaacgugcacagcaacaacaccgugagagacagaacccccuacagaacccugcugaugaacgagcugggcgugcccuuccaccugggcaccaagcaggugugcaucgccuggagcagcagcagcugccacgacggcaaggccuggcugcacgugugcaucaccggcgacgacaagaacgccaccgccagcuucaucuacaacggcagacugguggacagcguggugagcuggagcaaggagauccugagaacccaggagagcgagugcgugugcaucaacggcaccugcaccguggugaugaccgacggcagcgccagcggcaaggccgacaccaagauccuguucaucgaggagggcaagaucgugcacaccagcacccugagcggcagcgcccagcacguggaggagugcagcugcuaccccagauaccccggcgugagaugcgugugcagagacaacuggaagggcagcaacagacccaucguggacaucaacaucaaggaccacagcaucgugagcagcuacgugugcagcggccuggugggcgacacccccagaaagaccgacagcagcagcagcagccacugccuggaccccaacaacgaggagggcggccacggcgugaagggcugggccuucgacgacggcaacgacguguggaugggcagaaccaucaacgagaccagcagacugggcuacgagaccuucaaggugaucgagggcuggagcaaccccaagagcaagcugcagaucaacagacaggugaucguggacagaggcaacagaagcggcuacagcggcaucuucagcguggagggcaagagcugcaucaacagaugcuucuacguggagcugaucagaggcagaaaggaggagaccgaggugcuguggaccagcaacagcaucgugguguucugcggcaccagcggcaccuacggcaccggcagcuggcccgacggcgccgaccugaaccugaugcccaucuga

SEQ ID NO: 184364 - RNA, 1410 nt, Artificial Sequence; identical to SEQ ID NO: 184031
  derived and/or modified CDS sequence (opt4) from neuraminidase__InfluenzaA__AHC62365

SEQ ID NO: 184365 - RNA, 1410 nt, Artificial Sequence; identical to SEQ ID NO: 184248
  derived and/or modified CDS sequence (opt4) from neuraminidase__InfluenzaA__AHC62377

SEQ ID NO: 184366 - RNA, 1410 nt, Artificial Sequence; identical to SEQ ID NO: 184080
  derived and/or modified CDS sequence (opt4) from neuraminidase__InfluenzaA__AHC62389

SEQ ID NO: 184367 - RNA, 1410 nt, Artificial Sequence; identical to SEQ ID NO: 184080
  derived and/or modified CDS sequence (opt4) from neuraminidase__InfluenzaA__AHC62401

SEQ ID NO: 184368 - RNA, 1410 nt, Artificial Sequence; identical to SEQ ID NO: 184108
  derived and/or modified CDS sequence (opt4) from neuraminidase__InfluenzaA__AHC62413

SEQ ID NO: 184369 - RNA, 1410 nt, Artificial Sequence; identical to SEQ ID NO: 184166
  derived and/or modified CDS sequence (opt4) from neuraminidase__InfluenzaA__AHC62425

SEQ ID NO: 184370 - RNA, 1410 nt, Artificial Sequence; identical to SEQ ID NO: 179578
  derived and/or modified CDS sequence (opt4) from neuraminidase__InfluenzaA__AHC62437

SEQ ID NO: 184371 - RNA, 1410 nt, Artificial Sequence; identical to SEQ ID NO: 184080
  derived and/or modified CDS sequence (opt4) from neuraminidase__InfluenzaA__AHC62449

SEQ ID NO: 184372 - RNA, 1410 nt, Artificial Sequence; identical to SEQ ID NO: 184035
  derived and/or modified CDS sequence (opt4) from neuraminidase__InfluenzaA__AHC62461

SEQ ID NO: 184373 - RNA, 1410 nt, Artificial Sequence; identical to SEQ ID NO: 184031
  derived and/or modified CDS sequence (opt4) from neuraminidase__InfluenzaA__AHC62473

SEQ ID NO: 184374 - RNA, 1410 nt, Artificial Sequence; identical to SEQ ID NO: 182206
  derived and/or modified CDS sequence (opt4) from neuraminidase__InfluenzaA__AHC62485

SEQ ID NO: 184375 - RNA, 1410 nt, Artificial Sequence; identical to SEQ ID NO: 184080
  derived and/or modified CDS sequence (opt4) from neuraminidase__InfluenzaA__AHC62509

SEQ ID NO: 184376 - RNA, 1410 nt, Artificial Sequence
  derived and/or modified CDS sequence (opt4) from neuraminidase__InfluenzaA__AHC62521
augaaccccaaccagaagaucaucaccaucggcagcgugagccugaccaucagcaccaucugcuucuucaugcagaucgccauccugaucaccaccgugacccugcacuucaagcaguacgaguucaacagcccccccaacaaccaggugaugcugugcgagcccaccaucaucgagagaaacaucaccgagaucguguaccugaccaacaccaccaucgagaaggagaucugccccaagcuggccgaguacagaaacuggagcaagccccagugcgacaucaccggcuucgcccccuucagcaaggacaacagcaucagacugagcgccggcggcgacaucugggugaccagagagcccuacgugagcugcgaccccaacaagugcuaccaguucgcccugggccagggcaccacccugaacaacgugcacagcaacaacaccgugagagacagaacccccuacagaacccugcugaugaacgagcugggcgugcccuuccaccugggcaccaagcaggugugcaucgccuggagcagcagcagcugccacgacggcaaggccuggcugcacgugugcaucaccggcgacgacaagaacgccaccgccagcuucaucuacaacggcaagcugguggacagcguggugagcuggagcaaggagauccugagaacccaggagagcgagugcgugugcaucaacggcaccugcaccguggugaugaccgacggcagcgccagcggcaaggccgacaccaagauccuguucaucgaggagggcaagaucgugcacaccagcacccugagcggcagcgcccagcacguggaggagugcagcugcuaccccagauaccccggcgugagaugcgugugcagagacaacuggaagggcagcaacagacccaucguggacaucaacaucaaggaccacagcaucgugagcagcuacgugugcagcggccuggugggcgacacccccagaaagaacgacagcagcagcagcagccacugccuggaccccaacaacgaggagggcggccacggcgugaagggcugggccuucgacgacggcaacgacguguggaugggcagaaccaucaacgagaccagcagacugggcuacgagaccuucaaggugaucgagggcuggagcaaccccaagagcaagcugcagaucaacagacaggugaucguggacagaggcaacagaagcggcuacagcggcaucuucagcguggagggcaagagcugcaucaacagaugcuucuacguggagcugaucagaggcagaaaggaggagaccgaggugcuguggaccagcaacagcaucaucguguucugcggcaccagcggcaccuacggcaccggcagcuggcccgacggcgccgaccugaaccugaugcccaucuga

SEQ ID NO: 184377 - RNA, 1410 nt, Artificial Sequence
  derived and/or modified CDS sequence (opt4) from neuraminidase__InfluenzaA__AHC62533
augaaccccaaccagaagaucaucaccaucggcagcgugagccugaccaucagcaccaucugcuucuucaugcagguggccauccugaucaccaccgugacccugcacuucaagcaguacgaguucaacagcccccccaacaaccaggugaugcugugcgagcccaccaucaucgagagaaacaucaccgagauccuguaccugaccaacaccaccaucgagaaggagaucugccccaagcuggccgaguacagaaacuggagcaagccccagugcgacaucaccggcuucgcccccuucagcaaggacaacagcaucagacugagcgccggcggcgacaucugggugaccagagagcccuacgugagcugcgaccccgacaagugcuaccaguucgcccugggccagggcaccacccugaacaacgugcacagcaacaacaccgugagagacagaacccccuacagaacccugcugaugaacgagcugggcgugcccuuccaccugggcaccaagcaggugugcaucgccuggagcagcagcagcugccacgacggcaaggccuggcugcacgugugcaucaccggcgacgacaagaacgccaccgccagcuucaucuacaacggcaagcugguggacagcguggugagcuggagcaaggagauccugagaacccaggagagcgagugcgugugcaucaacggcaccugcaccguggugaugaccgacggcagcgccagcggcaaggccgacaccaagauccuguucaucgaggagggcaagaucgugcacaccagcacccugagcggcagcgcccagcacguggaggagugcagcugcuaccccagauaccccggcgugagaugcgugugcagagacaacuggaagggcagcaacagacccaucguggacaucaacaucaaggaccacagcaucgugagcagcuacgugugcagcggccuggugggcgacacccccagaaagaacgacagcagcagcagcagccacugccuggaccccaacaacgaggagggcggcaacggcgugaagggcugggccuucgacgacggcaacgacguguggaugggcagaaccaucaacgagaccagcagacugggcuacgagaccuucaaggugaucgagggcuggagcaaccccaagagcaagcugcagaucaacagacaggugaucguggacagaggcaacagaagcggcuacagcggcaucuucagcguggagggcaagagcugcaucaacagaugcuucuacguggagcugaucagaggcagaaaggaggagaccgaggugcuguggaccagcaacagcaucgugguguucugcggcaccagcggcaccuacggcaccggcagcuggcccgacggcgccgaccugaaccugaugcccaucuga

SEQ ID NO: 184378 - RNA, 1410 nt, Artificial Sequence; identical to SEQ ID NO: 184235
  derived and/or modified CDS sequence (opt4) from neuraminidase__InfluenzaA__AHC62545

SEQ ID NO: 184379 - RNA, 1410 nt, Artificial Sequence; identical to SEQ ID NO: 184080
  derived and/or modified CDS sequence (opt4) from neuraminidase__InfluenzaA__AHC62557

SEQ ID NO: 184380 - RNA, 1410 nt, Artificial Sequence; identical to SEQ ID NO: 184031
  derived and/or modified CDS sequence (opt4) from neuraminidase__InfluenzaA__AHC62569

SEQ ID NO: 184381 - RNA, 1410 nt, Artificial Sequence; identical to SEQ ID NO: 184080
  derived and/or modified CDS sequence (opt4) from neuraminidase__InfluenzaA__AHC62581

SEQ ID NO: 184382 - RNA, 1410 nt, Artificial Sequence
  derived and/or modified CDS sequence (opt4) from neuraminidase__InfluenzaA__AHC62593
augaaccccaaccagaagaucaucaccaucggcagcgugagccugaccaucagcaccaucugcuucuucaugcagaucgccauccugaucaccaccgugacccugcacuucaagcaguacgaguucaacagcccccccaacaaccaggugaugcugugcgagcccaccaucaucgagagaaacaucaccgagaucguguaccugaccaacaccaccaucgagaaggagaucugccccaagcuggccgaguacagaaacuggagcaagccccagugcgacaucaccggcuucgcccccuucagcaaggacaacagcaucagacugagcgccggcggcaacaucugggugaccagagagcccuacgugagcugcgaccccgacaagugcuaccaguucgcccugggccagggcaccacccugaacaacgugcacagcaacaacaccgugagagacagaacccccuacagaacccugcugaugaacgagcugggcgugcccuuccaccugggcaccaagcaggugugcaucgccuggagcagcagcagcugccacgacggcaaggccuggcugcacgugugcaucaccggcgacgacaagaacgccaccgccagcuucaucuacaacggcagacugguggacagcguggugagcuggagcaaggagauccugagaacccaggagagcgagugcgugugcaucaacggcaccugcaccguggugaugaccgacggcagcgccagcggcaaggccgacaccaagauccuguucaucgaggagggcaagaucgugcacaccagcacccugagcggcagcgcccagcacguggaggagugcagcugcuaccccagauaccccggcgugagaugcgugugcagagacaacuggaagggcagcaacagacccaucguggacaucaacaucaaggaccacagcaucgugagcagcuacgugugcagcggccuggugggcgacacccccagaaagaacgacagcagcagcagcagccacugccuggaccccaacaacgaggagggcggccacggcgugaagggcugggccuucgacgacggcaacgacguguggaugggcagaaccaucaacgagaccagcagacugggcuacgagaccuucaaggugaucgagggcuggagcaaccccaagagcaagcugcagaucaacagacaggugaucguggacagaggcaacagaagcggcuacagcggcaucuucagcguggagggcaagagcugcaucaacagaugcuucuacguggagcugaucagaggcagaaaggaggagaccgaggugcuguggaccagcaacagcaucgugguguucugcggcaccagcggcaccuacggcaccggcagcuggcccgacggcgccgaccugaaccugaugcccaucuga

SEQ ID NO: 184383 - RNA, 1410 nt, Artificial Sequence; identical to SEQ ID NO: 184067
  derived and/or modified CDS sequence (opt4) from neuraminidase__InfluenzaA__AHC62605

SEQ ID NO: 184384 - RNA, 1410 nt, Artificial Sequence
  derived and/or modified CDS sequence (opt4) from neuraminidase__InfluenzaA__AHC62617
augaaccccaaccagaagaucaucaccaucggcagcgugagccugaccaucagcaccaucugcuucuucaugcagaucgccauccugaucaccaccgugacccugcacuucaagcaguacgaguucaacagcccccccaacaaccaggugaugagaugcgagcccaccaucaucgagagaaacaucaccgagaucguguaccugaccaacaccaccaucgagaaggagaucugccccaagcuggccgaguacagaaacuggagcaagccccagugcgacaucaccggcuucgcccccuucagcaaggacaacagcaucagacugagcgccggcggcgacaucugggugaccagagagcccuacgugagcugcgaccccaacaagugcuaccaguucgcccugggccagggcaccacccugaacaacgugcacagcaacaacaccgugagagacagaacccccuacagaacccugcugaugaacgagcugggcgugcccuuccaccugggcaccaagcaggugugcaucgccuggagcagcagcagcugccacgacggcaaggccuggcugcacgugugcaucaccggcgacgacaagaacgccaccgccagcuucaucuacaacggcaagcugguggacagcguggugagcuggagcaaggagauccugagaacccaggagagcgagugcgugugcaucaacggcaccugcaccguggugaugaccgacggcagcgccagcggcaaggccgacaccaagauccuguucaucgaggagggcaagaucgugcacaccagcacccugagcggcagcgcccagcacguggaggagugcagcugcuaccccagauaccccggcgugagaugcgugugcagagacaacuggaagggcagcaacagacccaucguggacaucaacaucaaggaccacagcaucgugagcagcuacgugugcagcggccuggugggcgacacccccagaaagaacgacagcagcagcagcagccacugccuggaccccaacaacgaggagggcggccacggcgugaagggcugggccuucgacgacggcaacgacguguggaugggcagaaccaucaacgagaccagcagacugggcuacgagaccuucaaggugaucgagggcuggagcaaccccaagagcaagcugcagaucaacagacaggugaucguggacagaggcaacagaagcggcuacagcggcaucuucagcguggagggcaagagcugcaucaacagaugcuucuacguggagcugaucagaggcagaaaggaggagaccgaggugcuguggaccagcaacagcaucgugguguucugcggcaccagcggcaccuacggcaccggcagcuggcccgacggcgccgaccugaaccugaugcccaucuga

SEQ ID NO: 184385 - RNA, 1410 nt, Artificial Sequence; identical to SEQ ID NO: 184035
  derived and/or modified CDS sequence (opt4) from neuraminidase__InfluenzaA__AHC62629

SEQ ID NO: 184386 - RNA, 1410 nt, Artificial Sequence
  derived and/or modified CDS sequence (opt4) from neuraminidase__InfluenzaA__AHC62641
augaaccccaaccagaagaucaucaccaucggcagcgugagccugaccaucagcaccgugugcuucuucaugcagguggccauccugaucaccaccgugacccugcacuucaagcaguacgaguucaacagcccccccaacaaccaggugaugcugugcgagcccaccaucaucgagagaaacaucaccgagauccuguaccugaccaacaccaccaucgagaaggagaucugccccaagcuggccgaguacagaaacuggagcaagccccagugcgacaucaccggcuucgcccccuucagcaaggacaacagcaucagacugagcgccggcggcgacaucugggugaccagagagcccuacgugagcugcgaccccgacaagugcuaccaguucgcccugggccagggcaccacccugaacaacgugcacagcaacaacaccgugagagacagaacccccuacagaacccugcugaugaacgagcugggcgugcccuuccaccugggcaccaagcaggugugcaucgccuggagcagcagcagcugccacgacggcaaggccuggcugcacgugugcaucaccggcgacgacaagaacgccaccgccagcuucaucuacaacggcaagcugguggacagcguggugagcuggagcaaggagauccugagaacccaggagagcgagugcgugugcaucaacggcaccugcaccguggugaugaccgacggcagcgccagcggcaaggccgacaccaagauccuguucaucgaggagggcaagaucgugcacaccagcacccugagcggcagcgcccagcacguggaggagugcagcugcuaccccagauaccccggcgugagaugcgugugcagagacaacuggaagggcagcaacagacccaucguggacaucaacaucaaggaccacagcaucgugagcagcuacgugugcagcggccuggugggcgacacccccagaaagaacgacagcagcagcagcagccacugccuggaccccaacaacgaggagggcggccacggcgugaagggcugggccuucgacgacggcaacgacguguggaugggcagaaccaucaacgagaccagcagacugggcuacgagaccuucaaggugaucgagggcuggagcaaccccaagagcaagcugcagaucaacagacaggugaucguggacagaggcaacagaagcggcuacagcggcaucuucagcguggagggcaagagcugcaucaacagaugcuucuacguggagcugaucagaggcagaaaggaggagaccgaggugcuguggaccagcaacagcaucgugguguucugcggcaccagcggcaccuacggcaccggcagcuggcccgacggcgccgaccugaaccugaugcccaucuga

SEQ ID NO: 184387 - RNA, 1410 nt, Artificial Sequence; identical to SEQ ID NO: 184035
  derived and/or modified CDS sequence (opt4) from neuraminidase__InfluenzaA__AHC62653

SEQ ID NO: 184388 - RNA, 1410 nt, Artificial Sequence; identical to SEQ ID NO: 184035
  derived and/or modified CDS sequence (opt4) from neuraminidase__InfluenzaA__AHC62665

SEQ ID NO: 184389 - RNA, 1410 nt, Artificial Sequence
  derived and/or modified CDS sequence (opt4) from neuraminidase__InfluenzaA__AHC62677
augaaccccaaccagaagaucaucaccaucggcagcgugagccugaccaucagcaccaucugcuucuucaugcagaucgccauccugaucaccaccgugacccugcacuucaagcaguacgaguucaacagcccccccaacaaccaggugaugcugugcgagcccaccaucaucgagagaaacaucaccgagaucguguaccugaccaacaccaccaucgagaaggagaucugccccaagcuggccgaguacagaaacuggagcaagccccagugcgacaucaccggcuucgcccccuucagcaaggacaacagcaucagacugagcgccggcggcgacaucugggugaccagagagcccuacgugagcugcgaccccaacaagugcuaccaguucgcccugggccagggcaccacccugaacaacgugcacagcaacaacaccgugagagacagaacccccuacagaacccugcugaugaacgagcugggcgugcccuuccaccugggcaccaagcaggugugcaucgccuggagcagcagcagcugccacgacggcaaggccuggcugcacgugugcaucaccggcgacgacaagaacgccaccgccagcuucaucuacaacggcaagcugguggacagcguggugagcuggagcaaggagauccugagaacccaggagagcgagugcgugugcaucaacggcaccugcaccguggugaugaccgacggcagcgccagcggcaaggccgacaccaagauccuguucaucgaggagggcaagaucgugcacaccagcacccugagcggcagcgcccagcacguggaggagugcagcugcuaccccagauaccccggcgugagaugcgugugcagagacaacuggaagggcagcaacagacccaucguggacaucaacaucaaggaccacagcaucgugagcagcuacgugugcagcggccuggugggcgacacccccagaaagaacgacaucagcagcagcagccacugccuggaccccaacaacgaggagggcggccacggcgugaagggcugggccuucgacgacggcaacgacguguggaugggcagaaccaucaacgagaccagcagacugggcuacgagaccuucaaggugaucgagggcuggagcaaccccaagagcaagcugcagaucaacagacaggugaucguggacagaggcaacagaagcggcuacagcggcaucuucagcguggagggcaagagcugcaucaacagaugcuucuacguggagcugaucagaggcagaaaggaggagaccgaggugcuguggaccagcaacagcaucgugguguucugcggcaccagcggcaccuacggcaccggcagcuggcccgacggcgccgaccugaaccugaugcccaucuga

SEQ ID NO: 184390 - RNA, 1398 nt, Artificial Sequence
  derived and/or modified CDS sequence (opt4) from neuraminidase__InfluenzaA__AHF20560
augaaccccaaccagaagauccugugcaccagcgccaccgccaucaucaucggcgccaucaccgugcugaucggcaucgccaaccugggccugaacaucggccugcaccugaagcccggcugcaacugcagccacagccagcccgagaccaccaacaccagccagaccaucaucaacaacuacuacaacgagaccaacaccaccaacauccagauggaggagagaaccagcagaaacuucaacaaccugaccaagggccugugcaccaucaacagcuggcacaucuacggcaaggacaacgccgugagaaucggcgagagcagcgacgugcuggugaccagagagcccuacgugagcugcgaccccgacgagugcagauucuacgcccugagccagggcaccaccaucagaggcaagcacagcaacggcaccauccacgacagaagccaguacagagcccugaucagcuggccccugagcagcccccccaccguguacaacagcagaguggagugcaucggcuggagcagcaccagcugccacgacggcaagagcagaaugagcaucugcaucagcggccccaacaacaacgccagcgccguggugugguacaacagaagacccguggccgagaucaacaccugggccagaaacauccugagaacccaggagagcgagugcgugugccacaacggcgugugccccgugguguucaccgacggcagcgccaccggccccgccgacaccagaaucuacuacuucaaggagggcaagauccugaagugggagagccugaccggcaccgccaagcacaucgaggagugcagcugcuacggcgagagaaccggcaucaccugcaccugcagagacaacuggcagggcagcaacagacccgugauccagaucgaccccguggccaugacccacaccagccaguacaucugcagccccgugcugaccgacaaccccagacccaacgaccccaacaucggcaagugcaacgaccccuaccccggcaacaacaacaacggcgugaagggcuucagcuaccuggacggcgccaacaccuggcugggcagaaccaucagcaccgccagcagaagcggcuacgagaugcugaaggugcccaacgcccugaccgacgacagaagcaagcccauccagggccagaccaucgugcugaacgccgacuggagcggcuacagcggcagcuucauggacuacugggccgagggcgacugcuacagagccugcuucuacguggagcugaucagaggcagacccaaggaggacaaggugugguggaccagcaacagcaucgugagcaugugcagcagcaccgaguuccuggagcaguggaacuggcccgacggcgccaagaucgaguacuuccuguga

SEQ ID NO: 184391 - RNA, 1398 nt, Artificial Sequence; identical to SEQ ID NO: 183514
  derived and/or modified CDS sequence (opt4) from neuraminidase__InfluenzaA__AHF20570

SEQ ID NO: 184392 - RNA, 1413 nt, Artificial Sequence; identical to SEQ ID NO: 176692
  derived and/or modified CDS sequence (opt4) from neuraminidase__InfluenzaA__AHG96111

SEQ ID NO: 184393 - RNA, 1413 nt, Artificial Sequence; identical to SEQ ID NO: 176692
  derived and/or modified CDS sequence (opt4) from neuraminidase__InfluenzaA__AHG96123

SEQ ID NO: 184394 - RNA, 1413 nt, Artificial Sequence; identical to SEQ ID NO: 176692
  derived and/or modified CDS sequence (opt4) from neuraminidase__InfluenzaA__AHG96135

SEQ ID NO: 184395 - RNA, 1413 nt, Artificial Sequence; identical to SEQ ID NO: 176692
  derived and/or modified CDS sequence (opt4) from neuraminidase__InfluenzaA__AHG96147

SEQ ID NO: 184396 - RNA, 1413 nt, Artificial Sequence; identical to SEQ ID NO: 176692
  derived and/or modified CDS sequence (opt4) from neuraminidase__InfluenzaA__AHG96159

SEQ ID NO: 184397 - RNA, 1413 nt, Artificial Sequence; identical to SEQ ID NO: 176692
  derived and/or modified CDS sequence (opt4) from neuraminidase__InfluenzaA__AHG96171

SEQ ID NO: 184398 - RNA, 1413 nt, Artificial Sequence; identical to SEQ ID NO: 176692
  derived and/or modified CDS sequence (opt4) from neuraminidase__InfluenzaA__AHG96183

SEQ ID NO: 184399 - RNA, 1413 nt, Artificial Sequence; identical to SEQ ID NO: 176692
  derived and/or modified CDS sequence (opt4) from neuraminidase__InfluenzaA__AHG96195

SEQ ID NO: 184400 - RNA, 1413 nt, Artificial Sequence; identical to SEQ ID NO: 176692
  derived and/or modified CDS sequence (opt4) from neuraminidase__InfluenzaA__AHG96207

SEQ ID NO: 184401 - RNA, 1413 nt, Artificial Sequence; identical to SEQ ID NO: 176692
  derived and/or modified CDS sequence (opt4) from neuraminidase__InfluenzaA__AHG96219

SEQ ID NO: 184402 - RNA, 1413 nt, Artificial Sequence; identical to SEQ ID NO: 176692
  derived and/or modified CDS sequence (opt4) from neuraminidase__InfluenzaA__AHG96231

SEQ ID NO: 184403 - RNA, 1413 nt, Artificial Sequence; identical to SEQ ID NO: 176692
  derived and/or modified CDS sequence (opt4) from neuraminidase__InfluenzaA__AHG96243

SEQ ID NO: 184404 - RNA, 1413 nt, Artificial Sequence; identical to SEQ ID NO: 176692
  derived and/or modified CDS sequence (opt4) from neuraminidase__InfluenzaA__AHG96255

SEQ ID NO: 184405 - RNA, 1413 nt, Artificial Sequence; identical to SEQ ID NO: 176692
  derived and/or modified CDS sequence (opt4) from neuraminidase__InfluenzaA__AHG96267

SEQ ID NO: 184406 - RNA, 1413 nt, Artificial Sequence; identical to SEQ ID NO: 176692
  derived and/or modified CDS sequence (opt4) from neuraminidase__InfluenzaA__AHG96279

SEQ ID NO: 184407 - RNA, 1413 nt, Artificial Sequence; identical to SEQ ID NO: 176692
  derived and/or modified CDS sequence (opt4) from neuraminidase__InfluenzaA__AHG96291

SEQ ID NO: 184408 - RNA, 1413 nt, Artificial Sequence; identical to SEQ ID NO: 176692
  derived and/or modified CDS sequence (opt4) from neuraminidase__InfluenzaA__AHG96303

SEQ ID NO: 184409 - RNA, 1410 nt, Artificial Sequence; identical to SEQ ID NO: 176516
  derived and/or modified CDS sequence (opt4) from neuraminidase__InfluenzaA__AHG96362

SEQ ID NO: 184410 - RNA, 1410 nt, Artificial Sequence; identical to SEQ ID NO: 176516
  derived and/or modified CDS sequence (opt4) from neuraminidase__InfluenzaA__AHG96374

SEQ ID NO: 184411 - RNA, 1410 nt, Artificial Sequence; identical to SEQ ID NO: 176516
  derived and/or modified CDS sequence (opt4) from neuraminidase__InfluenzaA__AHG96386

SEQ ID NO: 184412 - RNA, 1413 nt, Artificial Sequence; identical to SEQ ID NO: 176692
  derived and/or modified CDS sequence (opt4) from neuraminidase__InfluenzaA__AHG96398

SEQ ID NO: 184413 - RNA, 1410 nt, Artificial Sequence; identical to SEQ ID NO: 176516
  derived and/or modified CDS sequence (opt4) from neuraminidase__InfluenzaA__AHG96410

SEQ ID NO: 184414 - RNA, 1410 nt, Artificial Sequence; identical to SEQ ID NO: 176516
  derived and/or modified CDS sequence (opt4) from neuraminidase__InfluenzaA__AHG96422

SEQ ID NO: 184415 - RNA, 1410 nt, Artificial Sequence; identical to SEQ ID NO: 176516
  derived and/or modified CDS sequence (opt4) from neuraminidase__InfluenzaA__AHG96434

SEQ ID NO: 184416 - RNA, 1410 nt, Artificial Sequence; identical to SEQ ID NO: 176516
  derived and/or modified CDS sequence (opt4) from neuraminidase__InfluenzaA__AHG96446

SEQ ID NO: 184417 - RNA, 1410 nt, Artificial Sequence; identical to SEQ ID NO: 176516
  derived and/or modified CDS sequence (opt4) from neuraminidase__InfluenzaA__AHG96458

SEQ ID NO: 184418 - RNA, 1410 nt, Artificial Sequence; identical to SEQ ID NO: 176516
  derived and/or modified CDS sequence (opt4) from neuraminidase__InfluenzaA__AHG96470

SEQ ID NO: 184419 - RNA, 1410 nt, Artificial Sequence; identical to SEQ ID NO: 176516
  derived and/or modified CDS sequence (opt4) from neuraminidase__InfluenzaA__AHG96482

SEQ ID NO: 184420 - RNA, 1410 nt, Artificial Sequence; identical to SEQ ID NO: 176516
  derived and/or modified CDS sequence (opt4) from neuraminidase__InfluenzaA__AHG96494

SEQ ID NO: 184421 - RNA, 1410 nt, Artificial Sequence; identical to SEQ ID NO: 176516
  derived and/or modified CDS sequence (opt4) from neuraminidase__InfluenzaA__AHG96506

SEQ ID NO: 184422 - RNA, 1413 nt, Artificial Sequence; identical to SEQ ID NO: 176692
  derived and/or modified CDS sequence (opt4) from neuraminidase__InfluenzaA__AHG96518

SEQ ID NO: 184423 - RNA, 1413 nt, Artificial Sequence; identical to SEQ ID NO: 176692
  derived and/or modified CDS sequence (opt4) from neuraminidase__InfluenzaA__AHG96530

SEQ ID NO: 184424 - RNA, 1413 nt, Artificial Sequence; identical to SEQ ID NO: 176692
  derived and/or modified CDS sequence (opt4) from neuraminidase__InfluenzaA__AHG96542

SEQ ID NO: 184425 - RNA, 1413 nt, Artificial Sequence; identical to SEQ ID NO: 176692
  derived and/or modified CDS sequence (opt4) from neuraminidase__InfluenzaA__AHG96554

SEQ ID NO: 184426 - RNA, 1413 nt, Artificial Sequence; identical to SEQ ID NO: 176692
  derived and/or modified CDS sequence (opt4) from neuraminidase__InfluenzaA__AHG96566

SEQ ID NO: 184427 - RNA, 1413 nt, Artificial Sequence; identical to SEQ ID NO: 176692
  derived and/or modified CDS sequence (opt4) from neuraminidase__InfluenzaA__AHG96578

SEQ ID NO: 184428 - RNA, 1413 nt, Artificial Sequence; identical to SEQ ID NO: 176692
  derived and/or modified CDS sequence (opt4) from neuraminidase__InfluenzaA__AHG96590

SEQ ID NO: 184429 - RNA, 1413 nt, Artificial Sequence; identical to SEQ ID NO: 176692
  derived and/or modified CDS sequence (opt4) from neuraminidase__InfluenzaA__AHG96602

SEQ ID NO: 184430 - RNA, 1413 nt, Artificial Sequence; identical to SEQ ID NO: 176692
  derived and/or modified CDS sequence (opt4) from neuraminidase__InfluenzaA__AHG96614

SEQ ID NO: 184431 - RNA, 1413 nt, Artificial Sequence; identical to SEQ ID NO: 176692
  derived and/or modified CDS sequence (opt4) from neuraminidase__InfluenzaA__AHG96626

SEQ ID NO: 184432 - RNA, 1413 nt, Artificial Sequence; identical to SEQ ID NO: 176692
  derived and/or modified CDS sequence (opt4) from neuraminidase__InfluenzaA__AHG96638

SEQ ID NO: 184433 - RNA, 1413 nt, Artificial Sequence; identical to SEQ ID NO: 176692
  derived and/or modified CDS sequence (opt4) from neuraminidase__InfluenzaA__AHG96650

SEQ ID NO: 184434 - RNA, 1413 nt, Artificial Sequence; identical to SEQ ID NO: 176692
  derived and/or modified CDS sequence (opt4) from neuraminidase__InfluenzaA__AHG96662

SEQ ID NO: 184435 - RNA, 1413 nt, Artificial Sequence; identical to SEQ ID NO: 176692
  derived and/or modified CDS sequence (opt4) from neuraminidase__InfluenzaA__AHG96674

SEQ ID NO: 184436 - RNA, 1413 nt, Artificial Sequence; identical to SEQ ID NO: 176692
  derived and/or modified CDS sequence (opt4) from neuraminidase__InfluenzaA__AHG96686

SEQ ID NO: 184437 - RNA, 1410 nt, Artificial Sequence; identical to SEQ ID NO: 176516
  derived and/or modified CDS sequence (opt4) from neuraminidase__InfluenzaA__AHG96698

SEQ ID NO: 184438 - RNA, 1410 nt, Artificial Sequence; identical to SEQ ID NO: 176516
  derived and/or modified CDS sequence (opt4) from neuraminidase__InfluenzaA__AHG96710

SEQ ID NO: 184439 - RNA, 1410 nt, Artificial Sequence; identical to SEQ ID NO: 176516
  derived and/or modified CDS sequence (opt4) from neuraminidase__InfluenzaA__AHG96722

SEQ ID NO: 184440 - RNA, 1410 nt, Artificial Sequence; identical to SEQ ID NO: 176516
  derived and/or modified CDS sequence (opt4) from neuraminidase__InfluenzaA__AHG96734

SEQ ID NO: 184441 - RNA, 1410 nt, Artificial Sequence; identical to SEQ ID NO: 176516
  derived and/or modified CDS sequence (opt4) from neuraminidase__InfluenzaA__AHG96746

SEQ ID NO: 184442 - RNA, 1410 nt, Artificial Sequence; identical to SEQ ID NO: 176516
  derived and/or modified CDS sequence (opt4) from neuraminidase__InfluenzaA__AHG96758

SEQ ID NO: 184443 - RNA, 1410 nt, Artificial Sequence; identical to SEQ ID NO: 176516
  derived and/or modified CDS sequence (opt4) from neuraminidase__InfluenzaA__AHG96770

SEQ ID NO: 184444 - RNA, 1410 nt, Artificial Sequence; identical to SEQ ID NO: 176516
  derived and/or modified CDS sequence (opt4) from neuraminidase__InfluenzaA__AHG96782

SEQ ID NO: 184445 - RNA, 1410 nt, Artificial Sequence; identical to SEQ ID NO: 176516
  derived and/or modified CDS sequence (opt4) from neuraminidase__InfluenzaA__AHG96794

SEQ ID NO: 184446 - RNA, 1410 nt, Artificial Sequence; identical to SEQ ID NO: 176516
  derived and/or modified CDS sequence (opt4) from neuraminidase__InfluenzaA__AHG96806

SEQ ID NO: 184447 - RNA, 1410 nt, Artificial Sequence; identical to SEQ ID NO: 176516
  derived and/or modified CDS sequence (opt4) from neuraminidase__InfluenzaA__AHG96818

SEQ ID NO: 184448 - RNA, 1410 nt, Artificial Sequence; identical to SEQ ID NO: 176516
  derived and/or modified CDS sequence (opt4) from neuraminidase__InfluenzaA__AHG96830

SEQ ID NO: 184449 - RNA, 1410 nt, Artificial Sequence; identical to SEQ ID NO: 176516
  derived and/or modified CDS sequence (opt4) from neuraminidase__InfluenzaA__AHG96842

SEQ ID NO: 184450 - RNA, 1410 nt, Artificial Sequence; identical to SEQ ID NO: 176516
  derived and/or modified CDS sequence (opt4) from neuraminidase__InfluenzaA__AHG96854

SEQ ID NO: 184451 - RNA, 1410 nt, Artificial Sequence; identical to SEQ ID NO: 176516
  derived and/or modified CDS sequence (opt4) from neuraminidase__InfluenzaA__AHG96866

SEQ ID NO: 184452 - RNA, 1410 nt, Artificial Sequence; identical to SEQ ID NO: 176516
  derived and/or modified CDS sequence (opt4) from neuraminidase__InfluenzaA__AHG96878

SEQ ID NO: 184453 - RNA, 1410 nt, Artificial Sequence; identical to SEQ ID NO: 176516
  derived and/or modified CDS sequence (opt4) from neuraminidase__InfluenzaA__AHG96890

SEQ ID NO: 184454 - RNA, 1410 nt, Artificial Sequence; identical to SEQ ID NO: 176516
  derived and/or modified CDS sequence (opt4) from neuraminidase__InfluenzaA__AHG96902

SEQ ID NO: 184455 - RNA, 1410 nt, Artificial Sequence; identical to SEQ ID NO: 176516
  derived and/or modified CDS sequence (opt4) from neuraminidase__InfluenzaA__AHG96914

SEQ ID NO: 184456 - RNA, 1410 nt, Artificial Sequence; identical to SEQ ID NO: 176516
  derived and/or modified CDS sequence (opt4) from neuraminidase__InfluenzaA__AHG96926

SEQ ID NO: 184457 - RNA, 1410 nt, Artificial Sequence; identical to SEQ ID NO: 176516
  derived and/or modified CDS sequence (opt4) from neuraminidase__InfluenzaA__AHG96938

SEQ ID NO: 184458 - RNA, 1410 nt, Artificial Sequence; identical to SEQ ID NO: 176516
  derived and/or modified CDS sequence (opt4) from neuraminidase__InfluenzaA__AHG96950

SEQ ID NO: 184459 - RNA, 1410 nt, Artificial Sequence; identical to SEQ ID NO: 176516
  derived and/or modified CDS sequence (opt4) from neuraminidase__InfluenzaA__AHG96962

SEQ ID NO: 184460 - RNA, 1410 nt, Artificial Sequence; identical to SEQ ID NO: 176516
  derived and/or modified CDS sequence (opt4) from neuraminidase__InfluenzaA__AHG96974

SEQ ID NO: 184461 - RNA, 1410 nt, Artificial Sequence; identical to SEQ ID NO: 176516
  derived and/or modified CDS sequence (opt4) from neuraminidase__InfluenzaA__AHG96986

SEQ ID NO: 184462 - RNA, 1410 nt, Artificial Sequence; identical to SEQ ID NO: 176516
  derived and/or modified CDS sequence (opt4) from neuraminidase__InfluenzaA__AHG96998

SEQ ID NO: 184463 - RNA, 1410 nt, Artificial Sequence; identical to SEQ ID NO: 176516
  derived and/or modified CDS sequence (opt4) from neuraminidase__InfluenzaA__AHG97010

SEQ ID NO: 184464 - RNA, 1410 nt, Artificial Sequence; identical to SEQ ID NO: 176516
  derived and/or modified CDS sequence (opt4) from neuraminidase__InfluenzaA__AHG97022

SEQ ID NO: 184465 - RNA, 1410 nt, Artificial Sequence; identical to SEQ ID NO: 176516
  derived and/or modified CDS sequence (opt4) from neuraminidase__InfluenzaA__AHG97034

SEQ ID NO: 184466 - RNA, 1410 nt, Artificial Sequence; identical to SEQ ID NO: 176516
  derived and/or modified CDS sequence (opt4) from neuraminidase__InfluenzaA__AHG97046

SEQ ID NO: 184467 - RNA, 1410 nt, Artificial Sequence
  derived and/or modified CDS sequence (opt4) from neuraminidase__InfluenzaA__AHH00872
augaaccccaaccagaagaucaucaccaucggcagcgugagccugaccaucgccaccaucugcuuccugaugcagaucgccauccuggugaccaccgugacccugcacuucaagcaguacgagugcaaccccccccccaacaaccaggugaugcugugcgagcccaccaucaucgagagaaacaucaccgagaucguguaccugaccaacaccaccaucgagaaggagaucugccccaagcuggccgaguacagaaacuggagcaagccccagugcaacaucaccggcuucgcccccuucagcaaggacaacagcaucagacugagcgccggcggcgacaucugggugaccagagagcccuacgugagcugcgaccccgacaagugcuaccaguucgcccugggccagggcaccacccugaacaacggccacagcaacgacaccgugcacgacagaacccccuacagaacccugcugaugaacgagcugggcgugcccuuccaccugggcaccaagcaggugugcaucgccuggagcagcagcagcugccacgacggcaaggccuggcugcacgugugcgugaccggcgacgacgagaacgccaccgccagcuucaucuacaacggcagacugguggacagcaucggcagcuggagcaagaagauccugagaacccaggagagcgagugcgugugcaucaacggcaccugcaccgugaucaugaccgacggcagcgccagcggcaaggccgacaccaagauccuguucaucgaggagggcaagaucgugcacaccagcccccugagcggcagcgcccagcacguggaggagugcagcugcuaccccagauaccccggcgugagaugcgugugcagagacaacuggaagggcagcaacagacccaucguggacaucaacgugaaggacuacagcaucgugagcagcuacgugugcagcggccuggugggcgacacccccagaaagaacgacagcagcagcagcagccacugccuggaccccaacaacgaggagggcggccacggcgugaagggcugggccuucgacgacggcaacgacguguggaugggcagaaccaucagcgagaagagcagaagcggcuacgagaccuucaaggugaucgagggcuggagcaagcccaacagcaagcugcagaucaacagacaggugaucaucgacagaggcaacagaagcggcuacagcggcaucuucagcguggagggcaagagcugcaucaacagaugcuucuacguggagcugaucagaggcagaaagcaggagaccgaggugcuguggaccagcaacagcaucgugguguucugcggcaccagcggcaccuacggcaccggcagcuggcccgacggcgccgaccugaaccugaugcccaucuga

SEQ ID NO: 184468 - RNA, 1416 nt, Artificial Sequence
  derived and/or modified CDS sequence (opt4) from neuraminidase__InfluenzaA__AHI43497
augaaccccaaccagaagcuguucgcccugagcggcguggccaucgcccugagcauccugaaccugcugaucggcaucagcaacgugggccugaacaucagccugcaccugaagggcaagggccccaagcaggaggagaaccugaccugcaccaccaucaaccagaacaacaccaccgugguggagaacaccuacgugaacaacaccaccaucaucaccaaggagaccgacuggaacacccccagcuaccugcugcugaacaagagccugugcaacguggagggcuggguggugaucgccaaggacaacgccaucagauucggcgagagcgagcagaucaucgugaccagagagcccuacgugagcugcgaccccaccggcugcaagauguacgcccugcaccagggcaccaccaucagaaacaagcacagcaacggcaccauccacgacagaaccgccuucagaggccugaucagcaccccccugggcaccccccccaccgugagcaacagcggcuucaugugcgugggcuggagcagcaccaccugccacgacggcaucggcagaaugaccaucugcauccagggcaacaacgacaacgccaccgccaccguguacuacaacggcagacugaccaccaccaucaagaccugggccagaaacauccugagaacccaggagagcgagugcgugugccacaacggcaccugcgccguggugaugaccgacggcagcgccagcagccaggccuacaccaaggugauguacuuccacaagggccuggugaucaaggaggaggcccugagaggcagcgccagacacaucgaggagugcagcugcuacggccacagccagagagugaccugcgugugcagagacaacuggcagggcgccaacagacccaucaucgagaucgacaugaacacccuggagcacaccagcagauacgugugcaccggcauccugaccgacaccagcagacccggcgacaagagcagcggcgacugcagcaaccccaucaccggcagccccggcgcccagggcgugaagggcuucggcuuccugaacggcgacaacaccuggcugggcagaaccaucagccccagaagcagaagcggcuucgagaugcugaagauccccaacgccggcaccgaccccaacagcagaaucgccgagagacaggagaucguggacaacaacaacuggagcggcuacagcggcagcuucaucgacuacuggaacaacaacagcgagugcuacaaccccugcuucuacguggagcugaucagaggcagacccgaggaggccaaguacgugugguggaccagcaacagccugaucgcccugugcggcagccccuuccccgugggcagcggcagcuuccccgacggcgcccagauccaguacuucagcuga

SEQ ID NO: 184469 - RNA, 1410 nt, Artificial Sequence
  derived and/or modified CDS sequence (opt4) from neuraminidase__InfluenzaA__AHJ57439
augaaccccaaccagaagaucaucaccaucggcagcgugagccugaucaucagcaccaucugcuucuucaugcagguggccauccugcugaccaccgugacccugcacuucaagcaguacgaguucaacagcccccccaacaaccaggugaugcugugcgagcccaccaucaucgagagaaacaucaccgagaucguguaccugaccaacaccaccaucgagaaggagaucugccccaagcccgccgaguacagaaacuggagcaagccccagugcgacaucaccggcuucgcccccuucagcaaggacaacagcaucagacugagcgccggcggcgacaucugggugaccagagagcccuacgugagcugcgaccccgacaagugcuaccaguucgcccugggccagggcaccacccugaacaacgugcacagcaacaacaccgugagagacagaacccccuacagaacccugcugaugaacgagcugggcgugcccuuccaccugggcaccaagcaggugugcaucgccuggagcagcagcagcugccacgacggcaaggccuggcugcacgugugcaucaccggcgacgacaagaacgccaccgccagcuucaucuacaacggcagacugguggacagcguggugagcuggagcaaggacauccugagaacccaggagagcgagugcgugugcaucaacggcaccugcaccguggugaugaccgacggcagcgccagcggcaaggccgacaccaagauccuguucaucgaggagggcaagaucgugcacaccagcacccugagcggcagcgcccagcacguggaggagugcagcugcuaccccagauaccccggcgugagaugcgugugcagagacaacuggaagggcagcaacagacccaucguggacaucaacaucaaggaccacagcaucgugagcagcuacgugugcagcggccuggugggcgacacccccagaaagaacgacagcagcagcagcagccacugccuggaccccaacaacgaggagggcggccacggcgugaagggcugggccuucgacgacggcaacgacguguggaugggcagaaccaucaacgagaccagcagacugggcuacgagaccuucaaggugaucgagggcuggagcaaccccaagagcaagcugcagaucaacagacaggugaucguggacagaggcaacagaagcggcuacagcggcaucuucagcguggagggcaagagcugcaucaacagaugcuucuacguggagcugaucagaggcagaaaggaggagaccgaggugcuguggaccagcaacagcaucgugguguucugcggcaccagcggcaccuacggcaccggcagcuggcccgacggcgccgacaucaaccugaugcccaucuga

SEQ ID NO: 184470 - RNA, 1410 nt, Artificial Sequence
  derived and/or modified CDS sequence (opt4) from neuraminidase__InfluenzaA__AHJ57440
augaaccccaaccagaagaucaucaccaucggcagcgugagccugaucaucagcaccaucugcuucuucaugcagaucgccauccugaucaccaccgugacccugcacuucaagcaguacgaguucaacagcccccccaacaaccagaugaugcugugcgagcccaccaucaucgagagaaacaucaccgagaucguguaccugaccaacaccaccaucgagaaggagaucugccccaagcccgccgaguacagaaacuggagcaagccccagugcgacaucaccggcuucgcccccuucagcaaggacaacagcaucagacugagcgccggcggcgacaucugggugaccagagagcccuacgugagcugcgaccccgacaagugcuaccaguucgcccugggccagggcaccacccugaacaacggccacagcaacaacaccgugagagacagaacccccuacagaacccugcugaugaacgagcugggcgugcccuuccaccugggcaccaagcaggugugcaucgccuggagcagcagcagcugccacgacggcaaggccuggcugcacgugugcaucaccggcgacgacaagaacgccaccgccagcuucaucuacaacggcagacugguggacagcguggugagcuggagcaaggagauccugagaacccaggagagcgagugcgugugcaucaacggcaccugcaccguggugaugaccgacggcagcgccagcggcaaggccgacaccaagauccuguucaucgaggagggcaagaucgugcacaccagcacccugagcggcagcgcccagcacguggaggagugcagcugcuaccccagauaccccggcgugagaugcgugugcagagacaacuggaagggcagcaacagacccaucguggacaucaacaucaaggaccacagcaucgugagcagcuacgugugcagcggccuggugggcgacacccccagaaagaacgacagcagcagcagcagccacugccuggaccccaacaacgaggagggcggccacggcgugaagggcugggccuucgacgacggcaacgacguguggaugggcagaaccaucaacgagaccagcagacugggcuacgagaccuucaaggugaucgagggcuggagcaaccccaagagcaagcugcagaucaacagacaggugaucguggacagaggcgacagaagcggcuacagcggcaucuucagcguggagggcaagagcugcaucaacagaugcuucuacguggagcugaucagaggcagaaaggaggagaccgaggugcuguggaccagcaacagcaucgugguguucugcggcaccagcggcaccuacggcaccggcagcuggcccgacggcgccgacaucaaccugaugcccaucuga

SEQ ID NO: 184471 - RNA, 1410 nt, Artificial Sequence
  derived and/or modified CDS sequence (opt4) from neuraminidase__InfluenzaA__AHJ57441
augaaccccaaccagaagaucaucaccaucggcagcgugagccugaucaucagcaccaucugcuucuucaugcagaucgccauccugaucaccaccgugacccugcacuucaagcaguacgaguucaacagcccccccaacaaccaggugaugcugugcgagcccaccaucaucgagagaaacaagaccgagaucguguaccugaccaacaccaccaucgagaaggagaucugccccaagcccgccgaguacagaaacuggagcaagccccagugcgacaucaccggcuucgcccccuucagcaaggacaacagcaucagacugagcgccggcggcgacaucugggugaccagagagcccuacgugagcugcgaccccgacaagugcuaccaguucgcccugggccagggcaccacccugaacaacgugcacagcaacaacaccgugcacgacagaacccccuacagaacccugcugaugaacgagcugggcgugcccuuccaccugggcaccaagcaggugugcaucgccuggagcagcagcagcugccacgacggcaaggccuggcugcacgugugcaucaccggcgacgacaagaacgccaccgccagcuucaucuacaacggcagacugguggacagcguggugagcuggagcaaggagauccugagaacccaggagagcgagugcgugugcaucaacggcaccugcaccguggugaugaccgacggcagcgccagcggcaaggccgacaccaagauccuguucaucgaggagggcaagaucgugcacaccagcacccugagcggcagcgcccagcacguggaggagugcagcugcuaccccagauaccccggcgugagaugcgugugcagagacaacuggaagggcagcaacagacccaucguggacaucaacaucaaggaccacagcaucgugagcagcuacgugugcagcggccuggugggcgacacccccagaaagaacgacagcagcagcagcagccacugccuggaccccaacaacgaggagggcggccacggcgugaagggcugggccuucgacgacggcaacgacguguggaugggcagaaccaucaacgagaccagcagacugggcuacgagaccuucaaggugaucgagggcuggagcaaccccaagagcaagcugcagaucaacagacaggugaucguggacagaggcaacagaagcggcuacagcggcaucuucagcguggagggcaagagcugcaucaacagaugcuucuacguggagcugaucagaggcagaaaggaggagaccgaggugcuguggaccagcaacagcaucgugguguucugcggcaccagcggcaccuacggcaccggcagcuggcccgacggcgccgacaucaaccugaugcccaucuga

SEQ ID NO: 184472 - RNA, 1413 nt, Artificial Sequence
  derived and/or modified CDS sequence (opt4) from neuraminidase__InfluenzaA__AHJ57654
augaaccccaaccagaagaucaccugcaucagcgccaccggcaugacccugagcguggugagccugcugaucggcaucgccaaccugggccugaacaucggccugcacuacaaggugagcgacagcaccaacaucaacauccccaacaugaacgagaccagccccaccaccaccaucaucaacaaccacccccagaacaacuucaccaacaucaccaacaucaucaugaacaagaacgaggagggcaacuuccugaaccugaccaagccccugugcgaggugaacagcuggcacauccugagcaaggacaacgccaucagaaucggcgagaacgcccacauccuggugaccagagagcccuaccugagcugcgacccccagggcugcagaauguucgcccugagccagggcaccacccugagaggcagacacgccaacggcaccauccacgacagaagccccuucagagcccugaucagcugggagaugggccaggcccccagccccuacaacgccagaguggagugcaucggcuggagcagcaccagcugccacgacggcaucagcagaaugagcaucugcaucagcggccccaacaacaacgccagcgccguggugugguacggcggcagacccgugaccgagauccccagcugggccggcaacauccugagaacccaggagagcgagugcgugugccacggcggcaucugccccguggugaugaccgacggccccgccaacaacagagccgagaccaagaucaucuacuucaaggagggcaaggugcagaagaucgaggagcugaagggcaacgcccagcacaucgaggagugcagcugcuacggcgccagcggcaugaucaagugcaucugcagagacaacuggaagggcgccaacagacccgugaucaccaucgaccccgagaugaugacccacaccagcaaguaccugugcagcaagauccugaccgacaccagcagacccaacgaccccaccaacggcaacugcgacgcccccaucaccggcggcagccccgaccccggcgugaagggcuucgccuuccuggacggcgagaacagcuggcugggcagaaccaucagcaaggacagcagaagcggcuacgagaugcugaagauccccaacgccgagaccgacacccagagcggcgccaucagccaccagaucaucgugaacaaccagaacuggagcggcuacagcggcgccuucaucgacuacugggccaacaaggagugcuucaaccccugcuucuacguggagcugaucagaggcagacccaaggagagcagcgugcuguggaccagcaacagcaucguggcccugugcggcagcagagagagacugggcagcuggagcuggcacgacggcgccgagaucaucuacuucaaguga

SEQ ID NO: 184473 - RNA, 1410 nt, Artificial Sequence
  derived and/or modified CDS sequence (opt4) from neuraminidase__InfluenzaA__AHJ57666
augaaccccaaccagaagaucaucaccaucggcagcgugagccugaccaucgccaccgugagcuuccugaugcagaucgccauccugaccaccaccgugacccugcacuucaagcacaacgagugcaacaugccccccaagaaccaggugaugagcugcgagcccaucaucaucgagagaaacaucaccgagaucguguaccugaacaacaccaccguggagaaggagaucugccccaaggugguggaguacagaaacuggagcaagccccagugcaagaucaccggcuucgcccccuucagcaaggacaacagcaucagacugagcgccggcggcgacaucugggugaccagagagcccuacgugagcugcggccugggcaagugcuaccaguucgcccugggccagggcaccacccuggacaacagccacagcaacggcaccauccacgacagaaucccccacagaacccugcugaugaacgagcugggcgugcccuuccaccugggcaccaagcaggugugcaucgccuggagcagcagcagcugccacgacggcagagccuggcugcacaucugcaucaccggcgacgacagaaacgccaccgccagcuucaucuacgacggcaugcugguggacagcaucggcagcuggagcaagaacauccugagaacccaggagagcgagugcgugugcaucaacggcaccugcgccguggugaugaccgacggcagcgccagcggcguggccgacaccagaauccuguucaucagagagggcaagaucgugcacaucagcccccugagcggcagcgcccagcacaucgaggagugcagcugcuaccccagauaccccgacgugagaugcgugugcagagacaacuggaagggcagcaacagacccgugaucgacaucaacauggccgacuacagcaucgacagcaacuacgugugcagcggccuggugggcgacacccccagaaacgacgacaacagcagcagcagcaacugcagagaccccaacaacgagagaggcaaccccggcgugaagggcugggccuucgacgacggcaacgacguguggaugggcagaaccaucaacagagacagcagaagcggcuacgagaccuucagagugaucggcggcuggaccaccgccaacagcaagagccagaucaacagacaggugaucguggacaacaacaacuggagcggcuacagcggcguguucagcguggagggcaagagcugcaucaacagaugcuucuacguggagcugaucaagggcagaccccaggagcccagagugugguggaccagcaacagcaucgugguguucugcggcaccagcggcaccuacggcaccggcagcuggcccgacggcgccaacaucaacuucaugcccaucuga

SEQ ID NO: 184474 - RNA, 1413 nt, Artificial Sequence
  derived and/or modified CDS sequence (opt4) from neuraminidase__InfluenzaA__AHJ57677
augaaccccaaccagaagaucaccugcaucagcgccaccggcaugacccugagcguggugagcaugcugaucggcaucgccaaccugggccugaacaucggccugcacuacaaggugagcgacagcaccaacaucaacauccccaacaugaacgagaccagccccaccaccaccgugaucaacaaccacccccagaacaacuucaccaacaucaccaacaucaucgugaacaagaacgaggaggagaacuuccugaaccugaccaagccccugugcgaggugaacagcuggcacauccugagcaaggacaacgccaucagaaucggcgagaacgcccacauccuggugaccagagagcccuaccugagcugcgacccccagggcugcagaauguucgcccugagccagggcaccacccugagaggccagcacgccaacggcaccauccacgacagaagccccuucagagcccugaucagcugggagaugggccaggcccccagccccuacaacgccagaguggagugcaucggcuggagcagcaccagcugccacgacggcaucagcagaaugagcaucugcaucagcggccccaacaacaacgccagcgccguggugugguacggcggcagacccgugaccgagauccccagcugggccggcaacauccugagaacccaggagagcgagugcgugugccacggcggcaucugccccguggugaugaccgacggccccgccaacaacagagccgagaccaagaucaucuacuucaaggagggcaagauccagaagguggaggagcugaagggcaacgcccagcacaucgaggagugcagcugcuacggcgccagcggcaugaucaagugcaucugcagagacaacuggaagggcgccaacagacccgugaucaccaucgaccccgagaugaugacccacaccagcaaguaccugugcagcaagauccugaccgacaccagcagacccaacgaccccaccaacggcaacugcgacgcccccaucaccggcggcagccccgaccccggcgugaagggcuucgccuuccuggacggcgagaacagcuggcugggcagaaccaucagcaaggacagcagaagcggcuacgagaugcugaaggugcccaacgccgagaccgacacccagagcggcgccaucagccaccagaugaucgugaacaaccagaacuggagcggcuacagcggcgccuucaucgacuacugggccaagaaggagugcuucaaccccugcuucuacguggagcugaucagaggcagacccaaggagagcagcgugcuguggaccagcaacagcaucguggcccugugcggcagcagagagagacugggcagcuggagcuggcacgacggcgccgagaucaucuacuucaaguga

SEQ ID NO: 184475 - RNA, 1413 nt, Artificial Sequence
  derived and/or modified CDS sequence (opt4) from neuraminidase__InfluenzaA__AHJ57689
augaaccccaaccagaagaucaccugcaucagcgccaccggcaugacccugagcguggugagcaugcugaucggcaucgccaaccugggccugaacaucggccugcacuacaaggugagcgacagcaccaacaucaacauccccaagaugaacgagaccagccccaccaccaccaucaucaacaaccacccccagaacaacuucaccaacaucaccaacaucaucgugaacaagaacgaggaggagaacuuccugaaccugaccaagccccugugcgaggugaacagcuggcacauccugagcaaggacaacgccaucagaaucggcgagaacgcccacauccuggugaccagagagcccuaccugagcugcgacccccagggcugcagaauguucgcccugagccagggcaccacccugagaggccagcacgccaacggcaccauccacgacagaagccccuucagagcccugaucagcugggagaugggccaggcccccagccccuacaacgccagaguggagugcaucggcuggagcagcaccagcugccacgacggcaucagcagaaugagcaucugcaucagcggccccaacaacaacgccagcgccguggugugguacggcggcagacccgugaccgagauccccagcugggccggcaacauccugagaacccaggagagcgagugcgugugccacggcggcaucugccccguggugaugaccgacggccccgccaacaacagagccgagaccaagaucaucuacuucaaggagggcaagauccagaagaucgaggagcugaagggcaacgcccagcacaucgaggagugcagcugcuacggcgccagcggcaugaucaagugcaucugcagagacaacuggaagggcgccaacagacccgugaucaccaucgaccccgagaugaugacccacaccagcaaguaccugugcagcaagauccugaccgacaccagcagacccaacgaccccaccaacggcaacugcgacgcccccaucaccggcggcagccccgaccccggcgugaagggcuucgccuuccuggacggcgagaacagcuggcugggcagaaccaucagcaaggacagcagaagcggcuacgagaugcugaaggugcccaacgccgagaccgacacccagagcggcgccaucagccaccagaucaucgugaacaaccagaacuggagcggcuacagcggcgccuucaucgacuacugggccaacaaggagugcuucaaccccugcuucuacguggagcugaucagaggcagacccaaggagagcagcgugcuguggaccagcaacagcaucguggcccugugcggcagcagagagagacugggcagcuggagcuggcacgacggcgccgagaucaucuacuucaaguga

SEQ ID NO: 184476 - RNA, 1413 nt, Artificial Sequence
  derived and/or modified CDS sequence (opt4) from neuraminidase__InfluenzaA__AHJ57700
augaaccccaaccagaagaucaccugcaucagcgccaccggcaugacccugagcguggugagccugcugaucggcaucgccaaccugggccugaacaucggccugcacuacaaggugagcgacagcaccaacaucaacauccccaacaugaacgagaccagccccaccaccaccaucaucaacaaccacccccagaacaacuucaccaacaucaccaacaucaucaugaacaagaacgaggagggcaacuuccugaaccugaccaagccccugugcgaggugaacagcuggcacauccugagcaaggacaacgccaucagaaucggcgagaacgcccacauccuggugaccagagagcccuaccugagcugcgacccccagggcugcagaauguucgcccugagccagggcaccacccugagaggcagacacgccaacggcaccauccacgacagaagccccuucagagcccugaucagcugggagaugggccaggcccccagccccuacaacgccagaguggagugcaucggcuggagcagcaccagcugccacgacggcaucagcagaaugagcaucugcaucagcggccccaacaacaacgccagcgccguggugugguacggcggcagacccgugaccgagauccccagcugggccggcaacauccugagaacccaggagagcgagugcgugugccacggcggcaucugccccguggugaugaccgacggccccgccaacaacagagccgagaccaagaucaucuacuucaaggagggcaaggugcagaagaucgaggagcugaagggcaacgcccagcacaucgaggagugcagcugcuacggcgccagcggcaugaucaagugcaucugcagagacaacuggaagggcgccaacagacccgugaucaccaucgaccccgagaugaugacccacaccagcaaguaccugugcagcaagauccugaccgacaccagcagacccaacgaccccaccaacggcaacugcgacgcccccaucaccggcggcagccccgaccccggcgugaagggcuucgccuuccuggacggcgagaacagcuggcugggcagaaccaucagcaaggacagcagaagcggcuacgagaugcugaaggugcccaacgccgagaccgacacccagagcggcgccaucagccaccagaucaucgugaacaaccagaacuggagcggcuacagcggcgccuucaucgacuacugggccaacaaggagugcuucaaccccugcuucuacguggagcugaucagaggcagacccaaggagagcagcgugcuguggaccagcaacagcaucguggcccugugcggcagcagagagagacugggcagcuggagcuggcacgacggcgccgagaucaucuacuucaaguga

SEQ ID NO: 184477 - RNA, 1410 nt, Artificial Sequence
  derived and/or modified CDS sequence (opt4) from neuraminidase__InfluenzaA__AHJ57710
augaaccccaaccagaagaucaucaccaucggcagcgugagccugaccaucgccaccgugagcuuccugaugcagaucgccauccugaccaccaccgugacccugcacuucaagcacaacgagugcaacaugccccccaagaaccaggugaugagcugcgagcccaucaucaucgagagaaacaucaccgagaucguguaccugaacaacaccaccguggagaaggagaucugccccaaggugguggaguacagaaacuggagcaagccccagugcaagaucaccggcuucgcccccuucagcaaggacaacagcaucagacugagcgccggcggcgacaucugggugaccagagagcccuacgugagcugcggccugggcaagugcuaccaguucgcccugggccagggcaccacccuggacaacagccacagcaacggcaccauccacgacagaaucccccacagaacccugcugaugaacgagcugggcgugcccuuccaccugggcaccaagcaggugugcaucgccuggagcagcagcagcugccacgacggcagagccuggcugcacaucugcaucaccggcgacgacagaaacgccaccgccagcuucaucuacgacggcaugcugguggacagcaucagcagcuggagcaagaacauccugagaacccaggagagcgagugcgugugcaucaacggcaccugcgccguggugaugaccgacggcagcgccagcggcguggccgacaccagaauccuguucaucagagagggcaagaucgugcacaucagcccccugagcggcagcgcccagcacaucgaggagugcagcugcuaccccagauaccccgacgugagaugcgugugcagagacaacuggaagggcagcaacagacccgugaucaacaucaacauggccgacuacagcaucgacagcaacuacgugugcagcggccuggugggcgacacccccagaaacgacgacaacagcagcagcagcaacugcagagaccccaacaacgagagaggcaaccccggcgugaagggcugggccuucgacgacggcaacgacguguggaugggcagaaccaucaacagagacagcagaagcggcuacgagaccuucagagugaucggcggcuggaccaccgccaacagcaagagccagaucaacagacaggugaucguggacaacaacaacuggagcggcuacagcggcguguucagcguggagggcaagagcugcaucaacagaugcuucuacguggagcugaucagaggcagaccccaggagcccagagugugguggaccagcaacagcaucgugguguucugcggcaccagcggcaccuacggcaccggcagcuggcccgacggcgccaacaucaacuucaugcccaucuga

SEQ ID NO: 184478 - RNA, 1410 nt, Artificial Sequence
  derived and/or modified CDS sequence (opt4) from neuraminidase__InfluenzaA__AHJ57734
augaaccccaaccagaagaucaucaccaucggcagcgugagccugaccaucgccaccgugagcuuccugaugcagaucgccauccugaccaccaccgugacccugcacuucaagcacaacgagugcaacaugccccccaagaaccaggugaugagcugcgagcccaucaucaucgagagaaacaucaccgagaucguguaccugaacaacaccaccguggagaaggagaucugccccaagguggccgaguacagaaacuggagcaagccccagugcaagaucaccggcuucgcccccuucagcaaggacaacagcaucagacugagcgccggcggcgacaucugggugaccagagagcccuacgugagcugcggccugggcaagugcuaccaguucgcccugggccagggcaccacccuggacaacagccacagcaacggcaccauccacgacagaaucccccacagaacccugcugaugaacgagcugggcgugcccuuccaccugggcaccaagcaggugugcaucgccuggagcagcagcagcugccacgacggcagagccuggcugcacaucugcaucaccggcgacgacagaaacgccaccgccagcuucaucuacgacggcaugcugguggacagcaucggcagcuggagcaagaacauccugagaacccaggagagcgagugcgugugcaucaacggcaccugcgccguggugaugaccgacggcagcgccagcggcguggccgacaccagaauccuguucaucagagagggcaagaucgugcacaucagcccccugagcggcagcgcccagcacaucgaggagugcagcugcuaccccagauaccccgacgugagaugcgugugcagagacaacuggaagggcagcaacagacccgugaucaacaucaacauggccgacuacagcaucgacagcaacuacgugugcagcggccuggugggcgacacccccagaaacgacgacaacagcagcagcagcaacugcagagaccccaacaacgagagaggcaaccccggcgugaagggcugggccuucgacgacggcaacgacguguggaugggcagaaccaucaacagagacagcagaagcggcuacgagaccuucagagugaucggcggcuggaccaccgccaacagcaagagccagaucaacagacaggugaucguggacaacaacaacuggagcggcuacagcggcguguucagcguggagggcaagagcugcaucaacagaugcuucuacguggagcugaucagaggcagaccccaggagcccagagugugguggaccagcaacagcaucgugguguucugcggcaccagcggcaccuacggcaccggcagcuggcccgacggcgccaacaucaacuucaugcccaucuga

SEQ ID NO: 184479 - RNA, 1380 nt, Artificial Sequence
  derived and/or modified CDS sequence (opt4) from neuraminidase__InfluenzaA__AHJ57746
augaaccccaaccagaagaucaucaccaucggcagcgugagcaucaccaucgccgccgugugcuuccugaugcagaucgccauccuggccaccaccgugacccugcacuucaagcagaacgagugcaacauccccagcaagaaccacgugauccccugcgagcccaucaucaucgagagaaacaucaccgagguggagaucagacccaagguggccgaguacagagacuggagcaagccccagugccagaucaccggcuucgcccccuucagcaaggacaacagcaucagacugagcgccggcggcaacaucugggugaccagagagcccuacgugagcugcggccccgacaagugcuaccaguucgcccugggccagggcaccacccugggcaacggccacagcaacggcaccauccacgacaagaucccccacagaacccugcugaugaacgagcugggcgugcccuuccaccugggcaccaagcaggugugcaucgccuggagcagcagcagcugccacgacggcagagccuggcugcacgugugcgugaccggcgacgacagaaacgccaccgccagcuucaucuacgacggcaugcugguggacagcaucgccagcuggagccagaacauccugagaacccaggagagcgagugcgugugcaucaacggcaccugcaccguggugaugaccgacggcagcgccagcggcguggccgacaccagaauccuguucaucagagagggcaagaucgugcacaucagcccccugagcggcagcgcccagcacaucgaggagugcagcugcuaccccagacacagcgacgugagaugcgugugcagagacaacuggaagggcagcaacagacccgugguggacaucaacaugaccgacuacagcaucgacagcagcuacgugugcagcggccuggugggcgacacccccagaaacgacgacagcagcagcagcagcaacugcagagaccccaacaacgagagaggcaaccccggcgugaagggcugggccuucgacgacggcgacgacguguggaugggcagaaccaucagcagagacagcagaagcggcuacgagaccuucagagugaucggcggcuggaccaccgccaacagcaagagccagaucaacagacaggugaucguggacaacaacaacuggagcggcuacagcggcguguucagcguggagggcaagagcugcaucaacagaugcuucuacguggagcugaucagaggcagaccccaggagaccagagugugguggaccagcaacagcaucgugguguucugcggcaccagcggcaccuacggcaccggcagcuggcccgacggcgccaacaucaacuucaugcccaucuga

SEQ ID NO: 184480 - RNA, 1410 nt, Artificial Sequence
  derived and/or modified CDS sequence (opt4) from neuraminidase__InfluenzaA__AHJ57758
augaaccccaaccagaagaucaucaccgugggcagcgugagccuggccaucgccaccaucugccugcugaugcagaucgccauccuggccaccaccgugacccugcacuucaagcagaacgagugcaacauccccagcaagaaccaggugaugcccugcgagcccaucaucaucgagagaaacaucaccgaggugguguaccugaacaacaccaucaucgagaaggagaucugccccaaggugguggaguacagaaacuggagcaagccccagugccagaucaccggcuucgcccccuucagcaaggacaacagcaucagacugagcgccggcggcgacaucugggugaccagagagcccuacgugagcugcagccccagcaagugcuaccaguucgcccugggccagggcaccacccuggacaacagccacagcaacggcaccauccacgacagaaucccccacagaacccugcugaugaacgagcugggcgugcccuuccaccugggcaccaagcaggugugcaucgccuggagcagcagcagcugccacgacggcagagccuggcugcacgugugcaucaccggcgacgacagaaacgccaccgccagcuucaucuacaacggcaugcugguggacagcaucagcagcuggagcagaaacauccugagaacccaggagagcgagugcgugugcaucaacggcaccugcaccgugaucaugaccgacggcagcgccagcggcguggccgacaccagaauccuguucaucagagagggcaacaucgugcacgugagcccccugagcggcagcgcccagcacaucgaggagugcagcugcuaccccagauaccccgacgugagaugcgugugcagagacaacuggaagggcagcaacagacccgugguggacaucaacauggccgacuacagcaucgacagccacuacgugugcagcggccuggugggcgacacccccagaaacgacgacagcagcagcagcagcaacugcaaggaccccaacaacgagagaggcaaccccggcgugaagggcugggccuucgacgacggcaacgacguguggaugggcagaaccaucagcagagacagcagaagcggcuacgagaccuucagagugaucggcggcuggaccaccgccaacagcaagagccagaucaacagacaggugaucguggacaacaacaacuggagcggcuacagcggcguguucagcguggagggcaagagcugcaucaacagaugcuucuacguggagcugaucagaggcagaccccaggagaccagagugugguggaccagcaacagcaucgugguguucugcggcaccagcggcaccuacggcaccggcagcuggcccgacggcgccaacaucaacuucaugcccaucuga

SEQ ID NO: 184481 - RNA, 1401 nt, Artificial Sequence
  derived and/or modified CDS sequence (opt4) from neuraminidase__InfluenzaA__AHJ57770
augaaccccaaccagaagaucaucgccaucggcagcgugagccugaccaucgccaucaucugcuuccugaugcagaucgccauccugaccaccaccaugacccugcacuucaagcagaacgagugcagcaaccccagcaacaaccagguggugcccugcgagcccaucaucaucgagagaaacaccgugcaccugaacagcaccaccaucgagaaggagaucugccccaaggugguggaguacaagaacuggagcaagccccagugccagaucaccggcuucgcccccuucagcaaggacaacagcaucagacugagcgccggcggcgacaucugggugaccagagagcccuacgugagcugcagccugggcaagugcuaccaguucgcccugggccagggcaccacccugaagaacaagcacagcaacggcaccacccacgacagaaucccccacagaacccugcugaugaacgagcugggcgugcccuuccaccugggcaccaagcaggugugcaucgccuggagcagcagcagcugcuacgacggcaaggccuggcugcacaucugcgugaccggcgacgacaagaacgccaccgccagcaucaucuacgacggcaugcugguggacagcaucggcagcuggagcaagaacauccugagaacccaggagagcgagugcgugugcaucaacggcaccugcgccguggugaugaccgacggcagcgccagcggcaaggccgacaccagaauccuguucaucagagagggcaagaucaucaacaucagcccccugagcggcagcgcccagcacguggaggagugcagcugcuaccccagauaccccgaggugagaugcgugugcagagacaacuggaagggcagcaacagacccgugcuguacaucaacauggccgacuacagcguggagagcagcuacgugugcagcggccuggugggcgacacccccagaaacgacgacagcagcagcagcagcaacugcagagaccccaacaacgagagaggcgcccccggcgugaagggcugggccuucgacgacggcaacgacguguggaugggcagaaccaucaagaacgacagcagaagcggcuacgagaccuucagaguggugaacggcuggaccaccgccaacagcaagagccagaucaacagacaggugaucguggacagcgagaacuggagcggcuacagcggcaucuucagcguggagggcaagaacugcaucaacagaugcuucuacguggagcugaucagaggcagaccccaggagcccagagugugguggaccagcaacagcaucaucguguucugcggcaccagcggcaccuacggcaccggcagcuggcccgacggcgccaacaucaacuuccugcccaucuga

SEQ ID NO: 184482 - RNA, 1410 nt, Artificial Sequence
  derived and/or modified CDS sequence (opt4) from neuraminidase__InfluenzaA__AHJ57782
augaaccccaaccagaagaucaucaucaucggcagcgugagccugaccaucgccaccgugugcuuccugaugcagaucgccauccuggccaccaccgugacccugcacuucaagcagaacgagugcaacauccccagcaagaaccagguggugcccugcgagcccaucaucaucgagagaaacaucaccgaggugguguaccugaacaacaccaccaucgagaaggagaucugccccgccgugguggaguacagaaacuggagcaagccccagugccagaucaagggcuucgcccccuucagcaaggacaacagcaucagacugagcgccggcggcgacaugugggugaccagagagcccuacgugagcugcagccccagcaagugcuaccaguucgcccugggccagggcaccacccuggacaacaaccacagcaacggcaccauccacgacagaaucccccacagaacccugcugaugaacgagcugggcgugcccuuccaccugggcaccaagcaggugugcaucgccuggagcagcagcagcugccacgacggcaaggccuggcugcacgugugcgugaccggcgacgacagaaacgccaccgccagcuucaucuacgacggcaugcugguggacagcaucggcagcuggagccagaacauccugagaacccaggagagcgagugcgugugcaucaacggcaccugcaccguggugaugaccgacggcagcgccagcggcaucgccgacaccagaauccuguucgugagagagggcaagaucgugcacaucagcccccugagcggcagcgcccagcacaucgaggagugcagcugcuaccccagauaccccgacgugagaugcgugugcagagacaacuggaagggcagcaacagacccaucguggacaucaacauggccgacuacagcaucggcagcagcuacgugugcagcggccuggugggcgacacccccagaaacgacgacagauucagcagcagcaacugcagagaccccaacagcgagagaggcaaccccggcgugaagggcugggccuucgacgacggcgacgacguguggaugggcagaaccaucagcagagacagcagaagcggcuacgagaccuucagagugaucggcggcuggaccaccgccaacagcaagagccagaucaacagacaggugaucguggacaacaacaacuggagcggcuacagcggcguguucagcguggagggcaagagcugcaucaacagaugcuucuacguggagcugaucagaggcagaccccaggagaccagagugugguggaccagcaacagcaucgugguguucugcggcaccagcggcaccuacggcaccggcagcuggcccgacggcgccaacaucaacuucaugcccaucuga

SEQ ID NO: 184483 - RNA, 1410 nt, Artificial Sequence
  derived and/or modified CDS sequence (opt4) from neuraminidase__InfluenzaA__AHJ57794
augaaccccaaccagaagaucaucaccgugggcagcgugagccuggccaucgccaccaucugcuuccugaugcagaucgccauccuggccaccaccgugacccugcacuucaagcagaacgagugcaacauccccagcaagaaccaggugaugcccugcgagcccaucaucaucgagagaaacaucaccgaggugguguaccugaacaacaccaucaucgagaaggagaucugccccaaggugguggaguacagaaacuggagcaagccccagugccagaucaccggcuucgcccccuucagcaaggacaacagcaucagacugagcgccggcggcgacaucugggugaccagagagcccuacgugagcugcagccccagcaagugcuaccaguucgcccugggccagggcaccacccuggacaacagccacagcaacggcaccauccacgacagaaucccccacagaacccugcugaugaacgagcugggcgugcccuuccaccugggcaccaagcaggugugcaucgccuggagcagcagcagcugccacgacggcagagccuggcugcacgugugcaucaccggcgacgacagaaacgccaccgccagcuucaucuacaacggcaugcugguggacagcaucagcagcuggagcagaaacauccugagaacccaggagagcgagugcgugugcaucaacggcaccugcaccgugaucaugaccgacggcagcgccagcggcguggccgacaccagaauccuguucaucagagagggcaacaucgugcacgugagcccccugagcggcagcgcccagcacaucgaggagugcagcugcuaccccagauaccccgacgugagaugcgugugcagagacaacuggaagggcagcaacagacccgugguggacaucaacauggccgacuacagcaucgacagccacuacgugugcagcggccuggugggcgacacccccagaaacgacgacagcagcagcagcagcaacugcaaggaccccaacaacgagagaggcaaccccggcgugaagggcugggccagcgacgacggccacgacguguggaugggcagaaccaucggcagagacagcagaagcggcuacgagaccuucagagugaucggcggcuggaccaccgccaacagcaagagccagaucaacagacaggugaucguggacaacaacaacuggagcggcuacagcggcguguucagcguggagggcaagagcugcaucaacagaugcuucuacguggagcugaucagaggcagaccccaggagaccagagugugguggaccagcaacagcaucgugguguucugcggcaccagcggcaccuacggcaccggcagcuggcccgacggcgccaacaucaacuucaugcccaucuga

SEQ ID NO: 184484 - RNA, 1413 nt, Artificial Sequence
  derived and/or modified CDS sequence (opt4) from neuraminidase__InfluenzaA__AHJ57806
augaaccccaaccagaagaucaccugcaucagcgccaccggcaugacccugagcguggugagccugcugaccggcaucgccaaccugggccugaacaucggccugcacuacaaggugagcgacagcaccaacaucagcauccccaacaugaacgaggccagccccaccaccaccaucaucaacaaccacccccagaacaacuucaccaacaucaccaacaucaucaugaacaagaacgaggagggcaacuuccugaaccugaccaagccccugugcgaggugaacagcuggcacauccugagcaaggacaacgccaucagaaucggcgagaacgcccacauccuggugaccagagagcccuaccugagcugcgacccccagggcugcagaauguucgcccugagccagggcaccacccugagaggcagacacgccaacggcaccauccacgacagaagccccuucagagcccugaucagcugggagaugggccaggcccccagccccuacaacgccagaguggagugcaucggcuggagcagcaccagcugccacgacggcaucagcagaaugagcaucugcaucagcggccccaacaacaacgccagcgccguggugugguacggcggcagacccgugaccgagauccccagcugggccggcaacauccugagaacccaggagagcgagugcgugugccacggcggcaucugccccguggugaugaccgacggccccgccaacaacagagccgagaccaagaucaucuacuucaaggagggcaagauccagaagaucgaggagcugaagggcaacgcccagcacaucgaggagugcagcugcuacggcgccagcggcaugaucaagugcaucugcagagacaacuggaagggcgccaacagacccgugaucaccaucgaccccgagaugaugacccacaccagcaaguaccugugcagcaagauccugaccgacaccagcagacccaacgaccccaccaacggcaacugcgacgcccccaucaccggcggcagccccgaccccggcgugaagggcuucgccuuccuggacggcaagaacagcuggcugggcagaaccaucagcaaggacagcagaagcggcuacgagaugcugaaggugcccaacgccgagaccgacacccagagcggcgccaucagccaccagaucaucgugaacaaccagaacuggagcggcuacagcggcgccuucaucgacuacugggccaacaaggagugcuucaaccccugcuucuacguggagcugaucagaggcagacccaaggagagcagcgugcuguggaccagcaacagcaucguggcccugugcggcagcagagagagacugggcagcuggagcuggcacgacggcgccgagaucaucuacuucaaguga

SEQ ID NO: 184485 - RNA, 1380 nt, Artificial Sequence
  derived and/or modified CDS sequence (opt4) from neuraminidase__InfluenzaA__AHJ57818
augaaccccaaccagaagaucaccugcaucagcgccaccggcgugacccugagcguggugagccugcugaucggcaucgccaaccugggccugaacaucggccugcacuacaaggugagcgacagccccaccaucaacauccccaacaugaacgagaccaaccccaucaccaccaacaucaccaacaucaucgugaacaagaacgaggagggcaccuuccugaaccugaccaagccccugugcgaggugaacagcuggcacauccugagcaaggacaacgccaucagaaucggcgaggacgcccacauccuggugaccagagagcccuaccugagcugcgacccccagggcugcagaauguucgcccugagccagggcaccacccugagaggcagacacgccaacggcaccauccacgacagaagccccuucagagcccugaucagcugggagaugggccaggcccccagccccuacaacaccagaguggagugcaucggcuggagcagcaccagcugccacgacggcaucagcagaaugagcaucugcaucagcggccccaacaacaacgccagcgccguggugugguacagaggcagacccgugaccgagauccccagcugggccggcaacauccugagaacccaggagagcgagugcgugugccacaagggcaucugccccguggugaugaccgacggccccgccaacaacaaggccgccaccaagaucaucuacuucaaggagggcaagauccagaagaucgaggagcugcagggcaacgcccagcacaucgaggagugcagcugcuacggcgccgccggcaugaucaagugcgugugcagagacaacuggaagggcgccaacagacccaucaucaccaucgaccccgagaugaugacccacaccagcaaguaccugugcagcaagauccugaccgacaccagcagacccaacgaccccaccgacggcaacugcgacgcccccaucaccggcggcagccccgaccccggcgugaagggcuucgccuuccuggagggcgagaacagcuggcugggcagaaccaucagcaaggacagcagaagcggcuacgagaugcugaaggugcccaacgccgagaccgacacccagagcggcgccaucagccaccagaugaucgugaacaaccagaacuggagcggcuacagcggcgccuucaucgacuacugggccaacaaggagugcuucaaccccugcuucuacguggagcugaucagaggcagacccaaggagagcagcgugcuguggaccagcaacagcaucguggcccugugcggcagcagagagagacugggcagcuggagcuggcacgacggcgccgagaucaucuacuucaaguga

SEQ ID NO: 184486 - RNA, 1410 nt, Artificial Sequence
  derived and/or modified CDS sequence (opt4) from neuraminidase__InfluenzaA__AHJ57830
augaaccccaaccagaagaucaucaccaucggcagcgugagccugaccaucgccaccgugagcuuccugaugcagaucgccauccugaccaccaccgugacccugcacuucaagcacaacgagugcaacaugccccccaagaaccaggugaugagcugcgagcccaucaucaucgagagaaacaucaccgagaucguguaccugaacaacaccaccaucgagaaggagaucugccccaaggugguggaguacagaaacuggagcaagccccagugcaagaucaccggcuucgcccccuucagcaaggacaacagcaucagacugagcgccggcggcgacaucugggugaccagagagcccuacgugagcugcggccugggcaagugcuaccaguucgcccugggccagggcaccacccuggacaacagccacagcaacggcaccauccacgacagaaucccccacagaacccugcugaugaacgagcugggcgugcccuuccaccugggcaccaagcaggugugcaucgccuggagcagcagcagcugccacgacggcagagccuggcugcacaucugcaucaccggcgacgacagaaacgccaccgccagcuucaucuacgacggcaugcugguggacagcaucggcagcuggagcaagaacauccugagaacccaggagagcgagugcgugugcaucaacggcaccugcgccguggugaugaccgacggcagcgccagcggcguggccgacaccagaauccuguucaucagagagggcaagaucgugcacaucagcccccugagcggcagcgcccagcacaucgaggagugcagcugcuaccccagauaccccgacgugagaugcgugugcagagacaacuggaagggcagcaacagacccgugaucgacaucaacauggccgacuacagcaucgacagcaacuacgugugcagcggccuggugggcgacacccccagaaacgacgacaacagcagcagcagcaacugcagagaccccaacaacgagagaggcaaccccggcgugaagggcugggccuucgacgacggcaacgacguguggaugggcagaaccaucaacagagacagcagaagcggcuacgagaccuucagagugaucggcggcuggaccaccgccaacagcaagagccagaucaacagacaggugaucguggacaacaacaacuggagcggcuacagcggcguguucagcguggagggcaagagcugcaucaacagaugcuucuacguggagcugaucagaggcagaccccaggagcccagagugugguggaccagcaacagcaucgugguguucugcggcaccagcggcaccuacggcaccggcagcuggcccgacggcgccaacaucaacuucaugcccaucuga

SEQ ID NO: 184487 - RNA, 1413 nt, Artificial Sequence
  derived and/or modified CDS sequence (opt4) from neuraminidase__InfluenzaA__AHJ57842
augaaccccaaccagaagaucaccugcaucagcgccaccggcaugacccugagcguggugagcaugcugaucggcaucgccaaccugggccugaacaucggccugcacuacaaggugagcgacagcaccaacaucaacauccccaagaugaacgagaccaaccccaccaccaccaucaucaacaaccacccccagaacaacuucaccaacaucaccaacaucaucgugaacaagaacgaggaggagaacuuccugaaccugaccaagccccugugcgaggugaacagcuggcacauccugagcaaggacaacgccaucagaaucggcgagaacgcccacauccuggugaccagagagcccuaccugagcugcgacccccagggcugcagaauguucgcccugagccagggcaccaccaucagaggccagcacgccaacggcaccauccacgacagaagccccuucagagcccugaucagcugggagaugggccaggcccccagccccuacaacgccagaguggagugcaucggcuggagcagcaccagcugccacgacggcaucagcagaaugagcaucugcaucagcggccccaacaacaacgccagcgccguggugugguacggcggcagacccgugaccgagauccccagcugggccggcaacauccugagaacccaggagagcgagugcgugugccacggcggcaucugccccguggugaugaccgacggccccgccaacaacagagccgagaccaagaucaucuacuucaaggagggcaagauccagaagaucgaggagcugaagggcaacgcccagcacaucgaggagugcagcugcuacggcgccagcggcaugaucaagugcaucugcagagacaacuggaagggcgccaacagacccgugaucaccaucgaccccgagaugaugacccacaccagcaaguaccugugcagcaagauccugaccgacaccagcagacccaacgaccccaccaacggcaacugcgacgcccccaucaccggcggcagcagcgaccccggcgugaagggcuucgccuuccuggacggcgagaacagcuggcugggcagaaccaucagcaaggacagcagaagcggcuacgagaugcugaaggugcccaacgccgagaccgacacccagagcggcgccaucagccaccagaucaucgugaacaaccagaacuggagcggcuacagcggcgccuucaucgacuacugggccaacaaggagugcuucaaccccugcuucuacguggagcugaucagaggcagacccaaggagagcagcgugcuguggaccagcaacagcaucguggcccugugcggcagcagagagagacugggcagcuggagcuggcacgacggcgccgagaucaucuacuucaaguga

SEQ ID NO: 184488 - RNA, 1413 nt, Artificial Sequence
  derived and/or modified CDS sequence (opt4) from neuraminidase__InfluenzaA__AHJ57853
augaaccccaaccagaagaucaccugcaucagcgccaccggcaugacccugagcguggugagccugcugaucggcaucgccaaccugggccugaacgugggccugcacuacaaggugaacgaccccaccaacaucaacauccccaacaugaacgagaccagccccaccaccaccaucaucaacaaccacccccagaacaacuucaccaacaucaccaacaucaucgugaacaagaacgaggaggagaacuuccugaaccugaccaagccccugugcgaggugaacagcuggcacauccugagcaaggacaacgccaucagaaucggcgagaacgcccacauccuggugaccagagagcccuaccugagcugcgacccccagggcugcagaauguucgcccugagccagggcaccacccugagaggccagcacgccaacggcaccauccacgacagaagccccuucagagcccugaucagcugggagaugggccaggcccccagccccuacaacgccagaguggagugcaucggcuggagcagcaccagcugccacgacggcaucagcagaaugagcaucugcaucagcggccccaacaacaacgccagcgccguggugugguacggcggcagacccgugaccgagauccccagcugggccggcaacauccugagaacccaggagagcgagugcgugugccacggcggcaucugccccguggugaugaccgacggccccgccaacaacagagccgagaccaagaucaucuacuucaaggagggcaagauccagaagaucgaggagcugaagggcaacgcccagcacaucgaggagugcagcugcuacggcgccagcggcaugaucaagugcaucugcagagacaacuggaagggcgccaacagacccgugaucaccaucgaccccgagaugaugacccacaccagcaaguaccugugcagcaagauccugaccgacaccagcagacccaacgaccccaccaacggcaacugcgacgcccccaucaccggcggcagccccgaccccggcgugaagggcuucgccuuccuggacggcgagaacagcuggcugggcagaaccaucagcaaggacagcagaagcggcuacgagaugcugaaggugcccaacgccgagaccgacacccagagcggcgccaucagccaccagaugaucgugaacaaccagaacuggagcggcuacagcggcgccuucaucgacuacugggccaacaaggagugcuucaaccccugcuucuacguggagcugaucagaggcagacccaaggagagcagcgugcuguggaccagcaacagcaucguggcccugugcggcagcagagagagacugggcagcuggagcuggcacgacggcgccgagaucaucuacuucaaguga

SEQ ID NO: 184489 - RNA, 1413 nt, Artificial Sequence
  derived and/or modified CDS sequence (opt4) from neuraminidase__InfluenzaA__AHJ57865
augaaccccaaccagaagaucaccugcaucagcgccaccggcaugacccugagcguggugagcaugcugaucggcaucgccaaccugggccugaacaucggccugcacuacaaggugagcgacagcaccaacaucaacauccccaagaugaacgagaccaaccccaccaccaccaucaucaacaaccacccccagaacaacuucaccaacaucaccaacaucaucgugaacaagaacgaggaggagaacuuccugaaccugaccaagccccugugcgaggugaacagcuggcacauccugagcaaggacaacgccaucagaaucggcgagaacgcccacauccuggugaccagagagcccuaccugagcugcgacccccagggcugcagaauguucgcccugagccagggcaccacccugagaggcagacacgccaacggcaccauccacgacagaagccccuucagagcccugaucagcugggagaugggccaggcccccagccccuacaacgccagaguggagugcaucggcuggagcagcaccagcugccacgacggcaucagcagaaugagcaucugcaucagcggccccaacaacaacgccagcgccguggugugguacggcggcagacccgugaccgagauccccagcugggccggcaacauccugagaacccaggagagcgagugcgugugccacggcggcaucugccccguggugaugaccgacggccccgccaacaacagagccgagaccaagaucaucuacuucaaggagggcaagauccagaagaucgaggagcugaagggcaacgcccagcacaucgaggagugcagcugcuacggcgccagcggcaugaucaagugcaucugcagagacaacuggaagggcgccaacagacccgugaucaccaucgaccccgagaugaugacccacaccagcaaguaccugugcagcaagauccugaccgacaccagcagacccaacgaccccaccaacggcaacugcgacgcccccaucaccggcggcagccccgaccccggcgugaagggcuucgccuuccuggacggcgagaacagcuggcugggcagaaccaucagcaaggacagcagaagcggcuacgagaugcugaaggugcccaacgccgagaccgacacccagagcggcgccaucagccaccagaugaucgugaacaaccagaacuggagcggcuacagcggcgccuucaucgacuacugggccaacaaggagugcuucaaccccugcuucuacguggagcugaucagaggcagacccaaggagagcagcgugcuguggaccagcaacagcaucguggcccugugcggcagcagagagagacugggcagcuggagcuggcacgacggcgccgagaucaucuacuucaaguga

SEQ ID NO: 184490 - RNA, 1413 nt, Artificial Sequence
  derived and/or modified CDS sequence (opt4) from neuraminidase__InfluenzaA__AHJ57876
augaaccccaaccagaagaucaccugcaucagcgccaccggcaugacccugagcguggugagccugcugaucggcaucgccaaccugggccugaacaucggccugcacuacaaggugagcgacagcaccaacaucaacauccccaacaugaacgagaccagccccaccaccaccaucaucaacaaccacccccagaacaacuucaccaacaucaccaacaucaucaugaacaagaacgaggagggcaacuuccugaaccugaccaagccccugugcgaggugaacagcuggcacauccugagcaaggacaacgccaucagaaucggcgagaacgcccacauccuggugaccagagagcccuaccugagcugcgacccccagggcugcagaauguucgcccugagccagggcaccacccugagaggcagacacgccaacggcaccauccacgacagaagccccuucagagcccugaucagcugggagaugggccaggcccccagccccuacaacgccagaguggagugcaucggcuggagcagcaccagcugccacgacggcaagagcagaaugagcaucugcaucagcggccccaacaacaacgccagcgccguggugugguacggcggcagacccaucaccgagauccccagcugggccggcaacauccugagaacccaggagagcgagugcgugugccacggcggcaucugccccguggugaugaccgacggccccgccaacaacagagccgagaccaagaucaucuacuucaaggagggcaaggugcagaagaucgaggagcugaagggcaacgcccagcacaucgaggagugcagcugcuacggcgccagcggcaugaucaagugcaucugcagagacaacuggaagggcgccaacagacccgugaucaccaucgaccccgagaugaugacccacaccagcaaguaccugugcagcaagauccugaccgacaccagcagacccaacgaccccaccaacggcaacugcgacgcccccaucaccggcggcagccccgaccccggcgugaagggcuucgccuuccuggacggcgagaacagcuggcugggcagaaccaucagcaaggacagcagaagcggcuacgagaugcugaaggugcccaacgccgagaccgacacccagagcggcgccaucagccaccagaucaucgugaacaaccagaacuggagcggcuacagcggcgccuucaucgacuacugggccaacaaggagugcuucaaccccugcuucuacguggagcugaucagaggcagacccaaggagagcagcgugcuguggaccagcaacagcaucguggcccugugcggcagcagagagagacugggcagcuggagcuggcacgacggcgccgagaucaucuacuucaaguga

SEQ ID NO: 184491 - RNA, 1413 nt, Artificial Sequence
  derived and/or modified CDS sequence (opt4) from neuraminidase__InfluenzaA__AHJ57888
augaaccccaaccagaagaucaccugcaucagcgccaccggcaugacccugagcguggugagcaugcugaucggcaucgccaaccugggccugaacaucggccugcacuacaaggugagcgacagcaccaacaucaacauccccaacaugaacgagaccagccccaccaccaccaucaccaacaaccacccccagaacaacuucaccaacaucaccaacaucaucgugagcaagaacgaggaggagaacuuccugaaccugaccaagccccugugcgaggugaacagcuggcacauccugagcaaggacaacgccaucagaaucggcgagaacgcccacauccuggugaccagagagcccuaccugagcugcgacccccagggcugcagaauguucgcccugagccagggcaccacccugagaggccagcacgccaacggcaccauccacgacagaagccccuucagagcccugaucagcugggagaugggccaggcccccagccccuacaacgccagaguggagugcaucggcuggagcagcaccagcugccacgacggcaucagcagaaugagcaucugcaucagcggccccaacaacaacgccagcgccguggugugguacggcggcagacccgugaccgagauccccagcugggccggcaacauccugagaacccaggagagcgagugcgugugccacggcggcaucugccccguggugaugaccgacggccccgccaacaacagagccgagaccaagaucaucuacuucaaggagggcaagauccagaagaucgaggagcugaagggcaacgcccagcacaucgaggagugcagcugcuacggcgccagcggcaugaucaagugcaucugcagagacaacuggaagggcgccaacagacccgugaucaccaucgaccccgagaugaugacccacaccagcaaguaccugugcagcaagauccugaccgacaccagcagacccaacgaccccaccaacggcaacugcgacgcccccaucaccggcggcagccccgaccccggcgugaagggcuucgccuuccuggacggcgagaacagcuggcugggcagaaccaucagcaaggacagcagaagcggcuacgagaugcugaaggugcccaacgccgagaccgacacccagagcggcgccaucagccaccagaugaucgugaacaaccagaacuggagcggcuacagcggcgccuucaucgacuacugggccaacaaggagugcuucaaccccugcuucuacguggagcugaucagaggcagacccaaggagagcagcgugcuguggaccagcaacagcaucguggcccugugcggcagcagagagagacugggcagcuggagcuggcacgacggcgccgagaucaucuacuucaaguga

SEQ ID NO: 184492 - RNA, 1413 nt, Artificial Sequence
  derived and/or modified CDS sequence (opt4) from neuraminidase__InfluenzaA__AHJ57900
augaaccccaaccagaagaucaccugcaucagcgccaccggcaugacccugagcguggugagccugcugaucggcaucgccaaccugggccugaacaucggccugcacuacaaggugagcgacagcaccaacaucaacauccccaacaugaacgagaccagccccaccgccaccaucaucaacaaccacccccagaacaacuucaccaacaucaccaacaucaucgugaacaagaacgaggaggagaacuucuucaaccuggccaagccccugugcgaggugaacagcuggcacauccugagcaaggacaacgccaucagaaucggcgagaacgcccacauccuggugaccagagagcccuaccugagcugcgacccccagggcugcagaauguucgcccugagccagggcaccacccugagaggccagcacgccaacggcaccauccacgacagaagccccuucagagcccugaucagcugggagaugggccaggcccccagccccuacaacgccagaguggagugcaucggcuggagcagcaccagcugccacgacggcaucagcagaaugagcaucugcaucagcggccccaacaacaacgccagcgccguggugugguacggcggcagacccgugaccgagauccccagcugggccggcaacauccugagaacccaggagagcgagugcgugugccacggcggcaucugccccguggugaugaccgacggccccgccaacaacagagccgagaccaagaucaucuacuucaaggagggcaagauccagaagaucgaggaccugaagggcaacgcccagcacaucgaggagugcagcugcuacggcgccagcggcaugaucaagugcaucugcagagacaacuggaagggcgccaacagacccgugaucaccaucgaccccgagaugaugacccacaccagcaaguaccugugcagcaagauccugaccgacaccagcagacccaacgaccccaccaacggcaacugcgacgcccccaucaccggcggcagccccgaccccggcgugaagggcuucgccuuccuggacggcgagaacagcuggcugggcagaaccaucagcaaggacagcagaagcggcuacgagaugcugaaggugcccaacgccgagaccgacacccagagcggcgccaucagccaccagaugaucgugaacaaccagaacuggagcggcuacagcggcgccuucaucgacuacugggccaacaaggagugcuucaaccccugcuucuacguggagcugaucagaggcagacccaaggagagcagcgugcuguggaccagcaacagcaucguggcccugugcggcagcagagagagacugggcagcuggagcuggcacgacggcgccgagaucaucuacuucaaguga

SEQ ID NO: 184493 - RNA, 1413 nt, Artificial Sequence
  derived and/or modified CDS sequence (opt4) from neuraminidase__InfluenzaA__AHJ57911
augaaccccaaccagaagaucaccugcaucagcgccaccggcgugacccugagcguggugagccugcugaucggcaucgccaaccugggccugaacaucggccugcacuacaaggugagcgacagcagcaacaucaacauccccaacaugaacgagaccaaccccaccaccaccaucaucaacaaccacacccagaacaacuucaagaacaucaccaacaucaucgugaacaagaacgaggagggcaucuuccugaaccugaccaagccccugugcgaggugaacagcuggcacauccugagcaaggacaacgccaucagaaucggcgaggacgcccacauccuggugaccagagagcccuaccugagcugcgacccccagggcugcagaauguucgcccugagccagggcaccacccugagaggcagacacgccaacggcaccauccacgacagaagccccuucagagcccugaucagcugggagaugggccaggcccccagccccuacaacgccagaguggagugcaucggcuggagcagcaccagcugccacgacggcaucagcagaaugagcaucugcaucagcggccccaacaacaacgccagcgccguggugugguacagaggcagacccgugaccgagauccccagcugggccggcaacauccugagaacccaggagagcgagugcgugugccacaagggcaucugccccguggugaugaccgacggccccgccaacaacagagccgccaccaagaucaucuacuucaaggagggcaagauccagaagaucgaggagcugaagggcaacgcccagcacaucgaggagugcagcugcuacggcgccgccggcaugaucaagugcaucugcagagacaacuggagaggcgccaacagacccgugaucaccaucgaccccgagaugaugacccacaccagcaaguaccugugcagcaagauccugaccgacaccagcagacccaacgaccccaccaacggcaacugcgacgcccccaucaccggcggcagccccgaccccggcgugaagggcuucgccuuccuggacggcgagaacagcuggcugggcagaaccaucagcaaggacagcagaagcggcuacgagaugcugaaggugcccaacgccgagaccgacacccagagcggcagcaccagcuaccagaucaucgugaacaaccagaacuggagcggcuacagcggcgccuucaucgacuacugggccaacaaggagugcuucaaccccugcuucuacguggagcugaucagaggcagacccaaggagagcagcgugcuguggaccagcaacagcaucguggcccugugcggcagcagagagagacugggcagcuggagcuggcacgacggcgccgagaucaucuacuucaaguga

SEQ ID NO: 184494 - RNA, 1410 nt, Artificial Sequence
  derived and/or modified CDS sequence (opt4) from neuraminidase__InfluenzaA__AHJ57923
augaaccccaaccagaagaucaucaccgugggcagcgugagccuggccaucgccaccaucugcuuccugaugcagaucgccauccuggccaccaccgugacccugcacuucaagcagaacgagugcaacauccccagcaagaaccaggugaugcccugcgagcccaucaucaucgagagaaacaucaccgaggugguguaccugaacaacaccaucaucgagaaggagaucugccccaaggugguggaguacagaaacuggagcaagccccagugccagaucaccggcuucgcccccuucagcaaggacaacagcaucagacugagcgccggcggcgacaucugggugaccagagagcccuacgugagcugcagccccagcaagugcuaccaguucgcccugggccagggcaccacccuggacaacagccacagcaacggcaccauccacgacagaaucccccacagaacccugcugaugaacgagcugggcgugcccuuccaccugggcaccaagcaggugugcaucgccuggagcagcagcagcugccacgacggcagagccuggcugcacgugugcaucaccggcgacgacagaaacgccaccgccagcuucaucuacaacggcaugcugguggacagcaucagcagcuggagcagaaacauccugagaacccaggagagcgagugcgugugcaucaacggcaccugcaccgugaucaugaccgacggcagcgccagcggcguggccgacaccagaauccuguucaucagagagggcaagaucgugcacgugagcccccugagcggcagcgcccagcacaucgaggagugcagcugcuaccccagauaccccgacgugagaugcgugugcagagacaacuggaagggcagcaacagacccgugguggacaucaacauggccgacuacagcaucgacagccacuacgugugcagcggccuggugggcgacacccccagaaacgacgacagcagcagcagcagcaacugcaaggaccccaacaacgagagaggcaaccccggcgugaagggcugggccuucgacgacggcaacgacguguggaugggcagaaccaucagcagagacagcagaagcggcuacgagaccuucagagugaucggcggcuggaccaccgccaacagcaagagccagaucaacagacaggugaucguggacaacaacaacuggagcggcuacagcggcguguucagcguggagggcaagagcugcaucaacagaugcuucuacguggagcugaucagaggcagaccccaggagaccagagugugguggaccagcaacagcaucgugguguucugcggcaccagcggcaccuacggcaccggcagcuggcccgacggcgccaacaucaacuucaugcccaucuga

SEQ ID NO: 184495 - RNA, 1380 nt, Artificial Sequence
  derived and/or modified CDS sequence (opt4) from neuraminidase__InfluenzaA__AHJ57935
augaaccccaaccagaagaucaccugcaucagcgccaccggcgugacccugagcguggugagccugcugaucggcaucgccaaccugggccugaacaucggccugcacuacaaggugagcgacagccccaccaucaacauccccaacaugaacgagaccaaccccaccaccaccaacaucaccaacaucaucgugaacaagaacgaggagggcaccuuccugaaccugaccaagccccugugcgaggugaacagcuggcacauccugagcaaggacaacgccaucagaaucggcgaggacgcccacauccuggugaccagagagcccuaccugagcugcgacccccagggcugcagaauguucgcccugagccagggcaccacccugagaggcagacacgccaacggcaccauccacgacagaagccccuucagagcccugaucagcugggagaugggccaggcccccagccccuacaacaccagaguggagugcaucggcuggagcagcaccagcugccacgacggcaucagcagaaugagcaucugcaucagcggccccaacaacaacgccagcgccguggugugguacagaggcagacccgugaccgagauccccagcugggccggcaacauccugagaacccaggagagcgagugcgugugccacaagggcaucugccccguggugaugaccgacggccccgccaacaacaaggccgccaccaagaucaucuacuucaaggagggcaagauccagaagaucgaggagcugcagggcaacgcccagcacaucgaggagugcagcugcuacggcgccgccggcaugaucaagugcgugugcagagacaacuggaagggcgccaacagacccaucaucaccaucgaccccgagaugaugacccacaccagcaaguaccugugcagcaagauccugaccgacaccagcagacccaacgaccccaccaacggcaacugcgacgcccccaucaccggcggcagccccgaccccggcgugaagggcuucgccuuccuggacggcgagaacagcuggcugggcagaaccaucagcaaggacagcagaagcggcuacgagaugcugaaggugcccaacgcccagaccgacacccagagcggccccaccagcuaccagcugaucgugaacaaccagaacuggagcggcuacagcggcgccuucaucgacuacugggccaacaaggagugcuucaaccccugcuucuacguggagcugaucagaggcagacccaaggagagcaacgugcuguggaccagcaacagcaugguggcccugugcggcagcagagagagacugggcagcuggagcuggcacgacgacgccgagaucaucuacuucaaguga

SEQ ID NO: 184496 - RNA, 1410 nt, Artificial Sequence
  derived and/or modified CDS sequence (opt4) from neuraminidase__InfluenzaA__AHJ57946
augaaccccaaccagaagaucaucaccaucggcagcgugagccugaccaucgccaccgugagcuuccugaugcagaucgccauccugaccaccaccgugacccugcacuucaagcacaacgagugcaacaugccccccaagaaccaggugaugagcugcgagcccaucaucaucgagagaaacaucaccgagaucguguaccugaacaacaccaccguggagaaggagaucugccccaaggugguggaguacagaaacuggagcaagccccagugcaagaucaccggcuucgcccccuucagcaaggacaacagcaucagacugagcgccggcggcgacaucugggugaccagagagcccuacgugagcugcggccugggcaagugcuaccaguucgcccugggccagggcaccacccuggacaacagccacagcaacggcaccauccacgacagaaucccccacagaacccugcugaugaacgagcugggcgugcccuuccaccugggcaccaagcaggugugcaucgccuggagcagcagcagcugccacgacggcagagccuggcugcacaucugcaucaccggcgacgacagaaacgccaccgccagcuucaucuacgacggcaugcugguggacagcaucggcagcuggagcaagaacauccugagaacccaggagagcgagugcgugugcaucaacggcaccugcgccguggugaugaccgacggcagcgccagcggcguggccgacaccagaauccuguucaucagagagggcaagaucgugcacaucagcccccugagcggcagcgcccagcacaucgaggagugcagcugcuaccccagauaccccgacgugagaugcgugugcagagacaacuggaagggcagcaacagacccgugaucgacaucaacauggccgacuacagcaucgacagccacuacgugugcagcggccuggugggcgacacccccagaaacgacgacaacagcagcagcagcaacugcagagaccccaacaacgagagaggcaaccccggcgugaagggcugggccuucgacgacggcaacgacguguggaugggcagaaccaucaacagagacagcagaagcggcuacgagaccuucagagugaucggcggcuggaccaccgccaacagcaagagccagaucaacagacaggugaucguggacaacaacaacuggagcggcuacagcggcguguucagcguggagggcaagagcugcaucaacagaugcuucuacguggagcugaucagaggcagaccccaggagcccagagugugguggaccagcaacagcaucgugguguucugcggcaccagcggcaccuacggcaccggcagcuggcccgacggcgccaacaucaacuucaugcccaucuga

SEQ ID NO: 184497 - RNA, 1410 nt, Artificial Sequence
  derived and/or modified CDS sequence (opt4) from neuraminidase__InfluenzaA__AHJ57957
augaaccccaaccagaagaucaucaccaucggcagcgugagccugaccaucgccaccgugagcuuccugaugcagaucgccauccugaccaccaccgugacccugcacuucaagcagaacgagugcaacaugccccccaagaaccaggugaugagcugcgagcccaucaucaucgagagaaacaucaccgagaucguguaccugaacaacaccaccguggagaaggagaucugccccaaggugguggaguacagaaacuggagcaagccccagugcaagaucaccggcuucgcccccuucagcaaggacaacagcaucagacugagcgccggcggcgacaucugggugaccagagagcccuacgugagcugcggccugggcaagugcuaccaguucgcccugggccagggcaccacccuggacaacagccacagcaacggcaccauccacgacagaaucccccacagaacccugcugaugaacgagcugggcgugcccuuccaccugggcaccaagcaggugugcaucgccuggagcagcagcagcugccacgacggcagagccuggcugcacaucugcaucaccggcgacgacagaaacgccaccgccagcuucaucuacgacggcaugcugguggacagcaucggcagcuggagcaagaacauccugagaacccaggagagcgagugcgugugcaucaacggcaccugcgccguggugaugaccgacggcagcgccagcggcguggccgacaccagaauccuguucaucagagagggcaagaucgugcacaucagcccccugagcggcagcgcccagcacaucgaggagugcagcugcuaccccagauaccccgacgugagaugcgugugcagagacaacuggaagggcagcaacagacccgugaucgacaucaacauggccgacuacagcaucgacagcaacuacgugugcagcggccuggugggcgacacccccagaaacgacgacaacagcagcagcagcaacugcagagaccccaacaacgagagaggcaaccccggcgugaagggcugggccuucgacuacggcaacgacguguggaugggcagaaccaucaacagagacagcagaagcggcuacgagaccuucagagugaucggcggcuggaccaccgccaacagcaagagccagaucaacagacaggugaucguggacaacaacaacuggagcggcuacagcggcguguucagcguggagggcaagagcugcaucaacagaugcuucuacguggagcugaucagaggcagaccccaggagcccagagugugguggaccagcaacagcaucgugguguucugcggcaccagcggcaccuacggcaccggcagcuggcccgacggcgccaacaucaacuucaugcccaucuga

SEQ ID NO: 184498 - RNA, 1410 nt, Artificial Sequence
  derived and/or modified CDS sequence (opt4) from neuraminidase__InfluenzaA__AHJ57968
augaaccccaaccagaagaucaucaccgugggcagcgugagccuggccaucgccaccaucugccugcugaugcagaucgccauccuggccaccaccgugacccugcacuucaagcagaacgagugcaacauccccagcaagaaccaggugaugcccugcgagcccaucaucaucgagagaaacaucaccgaggugguguaccugaacaacaccaucaucgagaaggagaucugccccaaggugguggaguacagaaacuggagcaagccccagugccagaucaccggcuucgcccccuucagcaaggacaacagcaucagacugagcgccggcggcgacaucugggugaccagagagcccuacgugagcugcagccccagcaagugcuaccaguucgcccugggccagggcaccacccuggacaacagccacagcaacggcaccauccacgacagaaucccccacagaacccugcugaugaacgagcugggcgugcccuuccaccugggcaccaagcaggugugcaucgccuggagcagcagcagcugccacgacggcagagccuggcugcacgugugcaucaccggcgacgacagaaacgccaccgccagcuucaucuacaacggcaugcugguggacagcaucagcagcuggagcagaaacauccugagaacccaggagagcgagugcgugugcaucaacggcaccugcaccgugaucaugaccgacggcagcgccagcggcguggccgacaccagaauccuguucaucagagagggcaagaucgugcacaucagcccccugagcggcagcgcccagcacaucgaggagugcagcugcuaccccagauaccccgacgugagaugcgugugcagagacaacuggaagggcagcaacagacccgugaucgacaucaacauggccgacuacagcaucgacagcaacuacgugugcagcggccuggugggcgacacccccagaaacgacgacaacagcagcagcagcaacugcagagaccccaacaacgagagaggcaaccccggcgugaagggcugggccuucgacgacggcaacgacguguggaugggcagaaccaucaacagagacagcagaagcggcuacgagaccuucagagugaucggcggcuggaccaccgccaacagcaagagccagaucaacagacaggugaucguggacaacaacaacuggagcggcuacagcggcguguucagcguggagggcaagagcugcaucaacagaugcuucuacguggagcugaucagaggcagaccccaggagaccagagugugguggaccagcaacagcaucgugguguucugcggcaccagcugcaccuacggcaccggcagcuggcccgacggcgccaacaucaacuucaugcccaucuga

SEQ ID NO: 184499 - RNA, 1413 nt, Artificial Sequence
  derived and/or modified CDS sequence (opt4) from neuraminidase__InfluenzaA__AHJ57980
augaaccccaaccagaagaacaccugcaucagcgccaucggcaugacccugagcguggugagccugcugaucggcguggccgaccugggccugaacaucggccugcacuacaaggugagcgacagcagcaacaucaacauccccaacaugaacgagaccaaccccaccaccaccaucaucaacaacaacccccagaacaacuucaccaacaucaccaacaucaucgugaacaagaacgaggaggagaaguuccugaaccugaccaagccccugugcgaggugaacagcuggcacauccugagcaaggacaacgccaucagaaucggcgaggacgcccacauccuggugaccagagagcccuaccugagcugcgacccccagggcugcagaauguucgcccugagccagggcaccacccugagaggcagacacgccaacggcaccauccacgacagaagccccuucagagcccugaucagcugggagaugggccaggcccccagccccuacaacgccagaguggagugcaucggcuggagcagcaccagcugccacgacggcaucagcagaaugagcaucugcaucagcggccccaacaacaacgccagcgccguggugugguacggcggcagacccgugaccgagauccccagcugggccggcaacauccugagaacccaggagagcgagugcgugugccacaagggcaucugccccguggugaugaccgacggccccgccaacaacagagccgccaccaagaucaucuacuucaaggagggcaagauccagaagaucgaggagcugaagggcaacgcccagcacaucgaggagugcagcugcuacggcgccgccggcaugaucaagugcaucugcagagacaacuggaagggcgccaacagacccgugaucaccaucgaccccgagaugaugacccacaccagcaaguaccugugcagcaagauccugaccgacaccagcagacccaacgaccccaccagcggcaacugcgacgcccccaucaccggcggcagccccgaccccggcgugaagggcuucgccuuccuggacggcgagaacagcuggcugggcagaaccaucagcaaggacagcagaagcggcuacgagaugcugaaggugcccaacgccgagaccgacacccagagcggccccaucagcuaccagaccaucgugaacaaccagaacuggagcggcuacagcggcgccuucaucgacuacugggccaacaaggagugcuucaaccccugcuucuacguggagcugaucagaggcagacccaaggagagcagcgugcuguggaccagcaacagcaucguggcccugugcggcagcagagagagacugggcagcuggagcuggcacgacggcgccgagaucaucuacuucaaguga

SEQ ID NO: 184500 - RNA, 1410 nt, Artificial Sequence
  derived and/or modified CDS sequence (opt4) from neuraminidase__InfluenzaA__AHJ57992
augaaccccaaccagaagaucaucaccaucggcagcgugagccugaccaucgccaccgugagcuuccugaugcagaucgccauccugaccaccaccgugacccugcacuucaagcacaacgagugcaacaugccccccaagaaccaggugaugagcugcgagcccaucaucaucgagagaaacaucaccgagaucguguaccugaacaacaccaccguggagaaggagaucugccccaaggugguggaguacagaaacuggagcaagccccagugcaagaucaccggcuucgcccccuucagcaaggacaacagcaucagacugagcgccggcggcgacaucugggugaccagagagcccuacgugagcugcggccugggcaagugcuaccaguucgcccugggccagggcaccacccuggacaacagccacagcaacggcaccauccacgacagaaucccccacagaacccugcugaugaacgagcugggcgugcccuuccaccugggcaccaagcaggugugcaucgccuggagcagcagcagcugccacgacggcagagccuggcugcacaucugcaucaccggcgacgacagaaacgccaccgccagcuucaucuacgacggcaugcugguggacagcaucggcagcuggagcaagaacauccugagaacccaggagagcgagugcgugugcaucaacggcaccugcgccguggugaugaccgacggcagcgccagcggcguggccgacaccagaauccuguucaucagagagggcaagaucgugcacaucagcccccugagcggcagcgcccagcacaucgaggagugcagcugcuaccccagauaccccgacgugagaugcgugugcagagacaacuggaagggcagcaacagacccgugaucaacaucaacauggccgacuacagcaucgacagcaacuacgugugcagcggccuggugggcgacacccccagaaacgacgacaacagcagcagcagcaacugcagagaccccaacaacgagagaggcaaccccggcgugaagggcugggccuucgacgacggcaacgacguguggaugggcagaaccaucaacagagacagcagaagcggcuacgagaccuucagagugaucggcggcuggaccaccgccaacagcaagagccagaucaacagacaggugaucguggacaacaacaacuggagcggcuacagcggcguguucagcguggagggcaagagcugcaucaacagaugcuucuacguggagcugaucagaggcagaccccaggagcccagagugugguggaccagcaacagcaucgugguguucugcggcaccagcggcaccuacggcaccggcagcuggcccgacggcgccaacaucaacuucaugcccaucuga

SEQ ID NO: 184501 - RNA, 1413 nt, Artificial Sequence
  derived and/or modified CDS sequence (opt4) from neuraminidase__InfluenzaA__AHJ58004
augaaccccaaccagaagaucaccugcaucagcgccaccggcgugacccugagcguggugagccugcugaucggcaucgccaaccugggccugaacaucggccugcacuacaaggugagcgacagcagcaacaucaacauccccaacaugaacgagaccaaccccaccaccaccaucaucaacaaccacacccagaacaacuucaagaacaucaccaacaucaucgugaacaagaacgaggagggcaccuuccugaaccugaccaagccccugugcgaggugaacagcuggcacauccugagcaaggacaacgccaucagaaucggcgaggacgcccacauccuggugaccagagagcccuaccugagcugcgacccccagggcugcagaauguucgcccugagccagggcaccacccugagaggcagacacgccaacggcaccauccacgacagaagccccuucagagcccugaucagcugggagaugggccaggcccccagccccuacaacgccagaguggagugcaucggcuggagcagcaccagcugccacgacggcaucagcagaaugagcaucugcaucagcggccccaacaacaacgccagcgccguggugugguacagaggcagacccgugaccgagauccccagcugggccggcaacauccugagaacccaggagagcgagugcgugugccacaagggcaucugccccguggugaugaccgacggccccgccaacaacagagccgccaccaagaucaucuacuucaaggagggcaagauccagaagaucgaggagcugaagggcaacgcccagcacaucgaggagugcagcugcuacggcgccgccggcaugaucaagugcaucugcagagacaacuggagaggcgccaacagacccgugaucaccaucgaccccgagaugaugacccacaccagcaaguaccugugcagcaagauccugaccgacaccagcagacccaacgaccccaccaacggcaacugcgacgagcccaucaccggcggcagccccgaccccggcgugaagggcuucgccuuccuggacggcgagaacagcuggcugggcagaaccaucagcaaggacagcagaagcggcuacgagaugcugaaggugcccaacgccgagaccgacacccagagcggccccaccagcuaccagaucaucgugaacaaccagaacuggagcggcuacagcggcgccuucaucgacuacugggccaacaaggagugcuucaaccccugcuucuacguggagcugaucagaggcagacccaaggagagcagcgugcuguggaccagcaacagcaucguggcccugugcggcagcagagagagacugggcagcuggagcuggcacgacggcgccgagaucaucuacuucaaguga

SEQ ID NO: 184502 - RNA, 1413 nt, Artificial Sequence
  derived and/or modified CDS sequence (opt4) from neuraminidase__InfluenzaA__AHJ58016
augaaccccaaccagaagaucaccugcaucagcgccaccggcaugacccugagcguggugagcaugcugaucggcaucgccaaccugggccugaacaucggccugcacuacaaggugagcgacagcaccaacaucaacauccccaagaugaacgagaccaaccccaccaccaccaucaucaacaaccacccccagaacaacuucaccaacaucaccaacaucaucgugaacaagaacgaggaggagaacuuccugaaccugaccaagccccugugcgaggugaacagcuggcacauccugagcaaggacaacgccaucagaaucggcgagaacgcccacauccuggugaccagagagcccuaccugagcugcgacccccagggcugcagaauguucgcccugagccagggcaccacccugagaggcagacacgccaacggcaccauccacgacagaagccccuucagagcccugaucagcugggagaugggccaggcccccagccccuacaacgccagaguggagugcaucggcuggagcagcaccagcugccacgacggcaucagcagaaugagcaucugcaucagcggccccaacaacaacgccagcgccguggugugguacggcggcagacccgugaccgagauccccagcugggccggcaacauccugagaacccaggagagcgagugcgugugccacggcggcaucugccccguggugaugaccgacggccccgccaacaacagagccgagaccaagaucaucuacuucaaggagggcaagauccagaagaucgaggagcugaagggcaacgcccagcacaucgaggagugcagcugcuacggcgccagcggcaugaucaagugcaucugcagagacaacuggaagggcgccaacagacccgugaucaccaucgaccccgagaugaugacccacaccagcaaguaccugugcagcaagauccugaccgacaccagcagacccaacgaccccaccaacggcaacugcgacgcccccaucaccggcggcagccccgaccccggcgugaagggcuucgccuuccuggacggcaagaacagcuggcugggcagaaccaucagcaaggacagcagaagcggcuacgagaugcugaaggugcccaacgccgagaccgacacccagagcggcgccaucagccaccagaucaucgugaacaaccagaacuggagcggcuacagcggcgccuucaucgacuacugggccaacaaggagugcuucaaccccugcuucuacguggagcugaucagaggcagacccaaggagagcagcgugcuguggaccagcaacagcaucguggcccugugcggcagcagagagagacugggcagcuggagcuggcacgacggcgccgagaucaucuaccugaaguga

SEQ ID NO: 184503 - RNA, 1413 nt, Artificial Sequence
  derived and/or modified CDS sequence (opt4) from neuraminidase__InfluenzaA__AHJ58028
augaaccccaaccagaagaucaccugcaucagcgccaccggcaugacccugagcguggugagcaugcugaucggcaucgccaaccugggccugaacaucggccugcacuacaaggugagcgacagcaccaacaucaacauccccaagaugaacgagaccaaccccaccaccaccaucaucaacaaccacccccagaacaacuucaccaacaucaccaacaucaucgugaacaagaacgaggaggagaacuuccugaaccugaccaagccccugugcgaggugaacagcuggcacauccugagcaaggacaacgccgugagaaucggcgaggacgcccacauccuggugaccagagagcccuaccugagcugcgacccccagggcugcagaauguucgcccugagccagggcaccacccugagaggcagacacgccaacggcaccauccacgacagaagccccuucagagcccugaucagcugggagaugggccaggcccccagccccuacaacaccagaguggagugcaucggcuggagcagcaccagcugccacgacggcaucagcagaaugagcaucugcaucagcggccccaacaacaacgccagcgccguggugugguacagaggcagacccgugaccgagauccccagcugggccggcaacauccugagaacccaggagagcgagugcgugugccacaagggcaucugccccguggugaugaccgacggccccgccaacaacagagccgagaccaagaucaucuacuucaaggagggcaagauccagaagaucgaggagcuggagggcaacgcccagcacaucgaggagugcagcugcuacggcaccgccggcaugaucaagugcaucugcagagacaacuggagaggcgccaacagacccgugaucaccaucgaccccgagaugaugacccacaccagcagauaccugugcagcaagauccugaccgacaccagcagacccaacgaccccaccaacggcaacugcgacgcccccaucaccggcggcagccccgaccccggcgugaagggcuucgccuuccuggacggcaagaacagcuggcugggcagaaccaucagcaaggacagcagaagcggcuacgagaugcugaaggugcccaacgccgagaccgacauccagagcggccccaccagcaaccagaucaucgugaacaaccagaacuggagcggcuacagcggcgccuucaucgacuacugggccaacaaggagugcuucaaccccugcuucuacguggagcugaucagaggcagacccaaggagagcaacgugcuguggaccagcaacagcaucguggcccugugcggcagcagagagagacugggcagcuggagcuggcacgacggcgccgagaucaucuacuucaaguga

SEQ ID NO: 184504 - RNA, 1410 nt, Artificial Sequence
  derived and/or modified CDS sequence (opt4) from neuraminidase__InfluenzaA__AHJ58040
augaaccccaaccagaagaucaucaccgugggcagcgugagccuggccaucgccaccaucugccugcugaugcagaucgccauccuggccaccaccgugacccugcacuucaagcagaacgagugcaacauccccagcaagaaccaggugaugcccugcgagcccaucaucaucgagagaaacaucaccgaggugguguaccugaacaacaccaucaucgagaaggagaucugccccaaggugguggaguacagaaacuggagcaagccccagugccagaucaccggcuucgcccccuucagcaaggacaacagcaucagacugagcgccggcggcgacaucugggugaccagagagcccuacgugagcugcagccccagcaagugcuaccaguucgcccugggccagggcaccacccuggacaacagccacagcaacggcaccauccacgacagaaucccccacagaacccugcugaugaacgagcugggcgugcccuuccaccugggcaccaagcaggugugcaucgccuggagcagcagcagcugccacgacggcagagccuggcugcacgugugcaucaccggcgacgacagaaacgccaccgccagcuucaucuacaacggcaugcugguggacagcaucagcagcuggagcagaaacauccugagaacccaggagagcgagugcgugugcaucaacggcaccugcaccgugaucaugaccgacggcagcgccagcggcguggccgacaccagaauccuguucaucagagagggcaagaucgugcacgugagcccccugagcggcagcgcccagcacaucgaggagugcagcugcuaccccagauaccccgacgugagaugcgugugcagagacaacuggaagggcagcaacagacccgugguggacaucaacauggccgacuacagcaucgacagccacuacgugugcagcggccuggugggcgacacccccagaaacgacgacagcagcagcagcagcaacugcaaggaccccaacaacgagagaggcaaccccggcgugaagggcugggccuucgacgacggcaacgacguguggaugggcagaaccaucagcagagacagcagaagcggcuacgagaccuucagagugaucggcggcuggaccaccgccaacagcaagagccagaucaacagacaggugaucguggacaacaacaacuggagcggcuacagcggcguguucagcguggagggcaagagcugcaucaacagaugcuucuacguggagcugaucagaggcagaccccaggagaccagagugugguggaccagcaacagcaucgugguguucugcggcaccagcggcaccuacggcaccggcagcuggcccgacggcgccaacaucaacuucaugcccaucuga

SEQ ID NO: 184505 - RNA, 1410 nt, Artificial Sequence
  derived and/or modified CDS sequence (opt4) from neuraminidase__InfluenzaA__AHJ58052
augaaccccaaccagaagaucaucaccaucggcagcgugagccugaccaucgccaccgugagcuuccugaugcagaucgccauccugaccaccaccgugacccugcacuucaagcacaacgagugcaacaugccccccaagaaccaggugaugagcugcgagcccaucaucaucgagagaaacaucaccgagaucguguaccugaacaacaccaccguggagaaggagaucugccccaaggugguggaguacagaaacuggagcaagccccagugcaagaucaccggcuucgcccccuucagcaaggacaacagcaucagacugagcgccggcggcgacaucugggugaccagagagcccuacgugagcugcggccugggcaagugcuaccaguucgcccugggccagggcaccacccuggacaacagccacagcaacggcaccauccacgacagaaucccccacagaacccugcugaugaacgagcugggcgugcccuuccaccugggcaccaagcaggugugcaucgccuggagcagcagcagcugccacgacggcagagccuggcugcacaucugcaucaccggcgacgacagaaacgccaccgccagcuucaucuacgacggcaugcugguggacagcaucggcagcuggagcaagaacauccugagaacccaggagagcgagugcgugugcaucaacggcaccugcgccguggugaugaccgacggcagcgccagcggcguggccgacaccagaauccuguucaucagagagggcaagaucgugcacaucagcccccugagcggcagcgcccagcacaucgaggagugcagcugcuaccccagauaccccgacgugagaugcgugugcagagacaacuggaagggcagcaacagacccgugaucgacaucaacauggccgacuacagcaucgacagcaacuacgugugcagcggccuggugggcgacacccccagaaacgacgacaacagcagcagcagcaacugcagagaccccaacaacgagagaggcaaccccggcgugaagggcugggccuucgacgacggcaacgacguguggaugggcagaaccaucaacagagacagcagaagcggcuacgagaccuucagagugaucggcggcuggaccaccgccaacagcaagagccagaucaacagacaggugaucguggacaacaacaacuggagcggcuacagcggcguguucagcguggagggcaagagcugcaucaacagaugcuucuacguggagcugaucagaggcagaccccaggagcccagagugugguggaccagcaacagcaucgugguguucugcggcaccagcggcaccuacggcaccggcagcuggcccgacggcgccaacaucaacuucaugcccaucuga

SEQ ID NO: 184506 - RNA, 1413 nt, Artificial Sequence
  derived and/or modified CDS sequence (opt4) from neuraminidase__InfluenzaA__AHJ58064
augaaccccaaccagaagaucaccugcaucagcgccaccggcaugacccugagcguggugagccugcugaucggcaucgccaaccugggccugaacaucggccugcacuacaaggugagcgacagcaccaacaucaacauccccaacaugaacgagaccagccccaccaccaccaucaucaacaaccacccccagaacaacuucaccaacaucaccaacaucaucgugaacaagaacgaggaggagaacuuccugaaccugaccaagccccugugcgaggugaacagcuggcacauccugagcaaggacaacgccaucagaaucggcgagaacgcccacauccuggugaccagagagcccuaccugagcugcgacccccagggcugcagaauguucgcccugagccagggcaccacccugagaggccagcacgccaacggcaccauccacgacagaagccccuucagagcccugaucagcugggagaugggccaggcccccagccccuacaacgccagaguggagugcaucggcuggagcagcaccagcugccacgacggcaucagcagaaugagcaucugcaucagcggccccaacaacaacgccagcgccguggugugguacggcggcagacccgugaccgagauccccagcugggccggcaacauccugagaacccaggagagcgagugcgugugccacggcggcaucugccccguggugaugaccgacggccccgccaacaacagagccgagaccaagaucaucuacuucaaggagggcaagauccagaagaucgaggagcugaagggcaacgcccagcacaucgaggagugcagcugcuacggcgccagcggcaugaucaagugcaucugcagagacaacuggaagggcgccaacagacccgugaucaccaucgaccccgagaugaugacccacaccagcaaguaccugugcagcaagauccugaccgacaccagcagacccaacgaccccaucaacggcaacugcgacgcccccaucaccggcggcagccccgaccccggcgugaagggcuucgccuuccuggacggcgagaacagcuggcugggcagaaccaucagcaaggacagcagaagcggcuacgagaugcugaaggugcccaacgccgagaccgacacccagagcggcgccaucagccaccagaugaucgugaacaaccagaacuggagcggcuacagcggcgccuucaucgacuacugggccaacaaggagugcuucaaccccugcuucuacguggagcugaucagaggcagacccaaggagagcagcgugcuguggaccagcaacagcaucguggcccugugcggcagcagagagagacugggcagcuggagcuggcacgacggcgccgagaucaucuacuucaaguga

SEQ ID NO: 184507 - RNA, 1401 nt, Artificial Sequence
  derived and/or modified CDS sequence (opt4) from neuraminidase__InfluenzaA__AHJ58075
augaaccccaaccagaagaucaucgccaucggcagcgugagccugaccaucgccaucaucugcuuccugcugcagaucgccauccugaccaccaccaugacccugcacuucagacagaacgagugcagcaaccccagcaacaaccagguggugcccugcgagcccaucaucaucgagagaaacaccgugcaccugaacagcaccaccaucgagaaggagaucugccccaagguggccgaguacaagaacuggagcaagccccagugccagaucaccggcuucgcccccuucagcaaggacaacagcaucagacugagcgccggcggcgacaucugggugaccagagagcccuacgugagcugcagccugggcaagugcuaccaguucgcccugggccagggcaccacccugaagaacaagcacagcaacggcaccacccacgacagaaucccccacagaacccugcugaugaacgagcugggcgugcccuuccaccugggcaccaagcaggugugcaucgccuggagcagcagcagcugccacgacggcaaggccuggcugcacaucugcgugaccggcgacgacaagaacgccaccgccagcaucaucuacgacggcaugcugguggacagcaucggcagcuggagcaagaacauccugagaacccaggagagcgagugcgugugcaucaacggcaccugcgccguggugaugaccgacggcagcgccagcggcaaggccgacaccagaauccuguucaucagagagggcaagaucaucaacaucagcccccugagcggcagcgcccagcacguggaggagugcagcugcuaccccagauaccccgaggugagaugcgugugcagagacaacuggaagggcagcaacagacccgugcuguacaucaacauggccgacuacagcaucgagagcagcuacgugugcagcggccuggugggcgacacccccagagacgacgacagcagcagcagcagcaacugcagagaccccaacaacgagagaggcgcccccggcgugaagggcugggccuucgacgacggcaacgacaucuggaugggcagaaccaucaagagcgacagcagaagcggcuacgagaccuucagaguggugaacggcuggaccaccgccaacagcaagagccagaucaacagacaggugaucguggacagcgacagcuggagcggcuacagcggcaucuucagcguggagggcaagaacugcaucaacagaugcuucuacguggagcugaucagaggcagaccccaggagaccagagugugguggaccagcaacagcaucaucguguucugcggcaccagcggcaccuacggcaccggcagcuggcccgacggcgccaacaucaacuucaugcccaucuga

SEQ ID NO: 184508 - RNA, 1413 nt, Artificial Sequence
  derived and/or modified CDS sequence (opt4) from neuraminidase__InfluenzaA__AHJ58087
augaaccccaaccagaagaucaccugcaucagcgccaccggcaugacccugagcguggugagccugcugaucggcaucgccaaccugggccugaacaucggccugcacuacaaggugagcgacagcaccaacaucaacauccccaacaugaacgagaccagccccaccaccaccaucaucaacaaccacccccagaacaacuucaccaacaucaccaacaucaucgugaacaagaacgaggaggagaacuuccugaaccugaccaagccccugugcgaggugaacagcuggcacauccugagcaaggacaacgccaucagaaucggcgagaacgcccacauccuggugaccagagagcccuaccugagcugcgacccccagggcugcagaauguucgcccugagccagggcaccacccugagaggccagcacgccaacggcaccauccacgacagaagccccuucagagcccugaucagcugggagaugggccaggcccccagccccuacaacgccagaguggagugcaucggcuggagcagcaccagcugccacgacggcaucagcagaaugagcaucugcaucagcggccccaacaacaacgccagcgccguggugugguacggcggcagacccgugaccgagauccccagcugggccggcaacauccugagaacccaggagagcgagugcgugugccacggcggcaucugccccguggugaugaccgacggccccgccaacaacagagccgagaccaagaucaucuacuucaaggagggcaagauccagaagaucgaggagcugaagggcaacgcccagcacaucgaggagugcagcugcuacggcgccagcggcaugaucaagugcaucugcagagacaacuggaagggcgccaacagacccgugaucaccaucgaccccgagaugaugacccacaccagcaaguaccugugcagcaagauccugaccgacaccagcagacccaacgaccccaucaacggcaacugcgacgcccccaucaccggcggcagccccgaccccggcgugaagggcuucgccuuccuggacggcgacaacagcuggcugggcagaaccaucagcaaggacagcagaagcggcuacgagaugcugaaggugcccaacgccgagaccgacacccagagcggcgccaucagccaccagaugaucgugaacaaccagaacuggagcggcuacagcggcgccuucaucgacuacugggccaacaaggagugcuucaaccccugcuucuacguggagcugaucagaggcagacccaaggagagcagcgugcuguggaccagcaacagcaucguggcccugugcggcagcagagagagacugggcagcuggagcuggcacgacggcgccgagaucaucuacuucaaguga

SEQ ID NO: 184509 - RNA, 1410 nt, Artificial Sequence
  derived and/or modified CDS sequence (opt4) from neuraminidase__InfluenzaA__AHL80721
augaaccccaaccagaagaucaucaccaucggcagcgugugcaugaccaucggcauggccaaccugauccugcagaucggcaacaucaucagcaucuggaucagccacagcauccagcugggcaaccagaaccagaucgagaccugcaaccagagcgugaucaccuacgagaacaacaccugggugaaccagaccuacgugaacaucagcaacaccaacuucgccgccggccagagcguggugagcgugaagcuggccggcaacagcagccugugccccgugagcggcugggccaucuacagcaaggacaacagcaucagaaucggcagcaagggcgacguguucgugaucagagagcccuucaucagcugcagcccccuggagugcagaaccuucuuccugacccagggcgcccugcugaacgacaagcacagcaacggcaccaucaaggacagaagccccuacagaacccugaugagcugccccaucggcgaggugcccagccccuacaacagcagauucgagagcguggccuggagcgccagcgccugccacgacggcaucaacuggcugaccaucggcaucagcggccccgacaacggcgccguggccgugcugaaguacaacggcaucaucaccgacaccaucaagagcuggagaaacaacauccugagaacccaggagagcgagugcgccugcgugaacggcagcugcuucaccgugaugaccgacggccccagcgacggccaggccagcuacaagaucuucagaaucgagaagggcaagaucgugaagagcguggagaugaacgcccccaacuaccacuacgaggagugcagcugcuaccccgacagcagcgagaucaccugcgugugcagagacaacuggcacggcagcaacagacccugggugagcuucaaccagaaccuggaguaccagaucggcuacaucugcagcggcaucuucggcgacaaccccagacccaacgacaagaccggcagcugcggccccgugagcagcaacggcgccaacggcgugaagggcuucagcuucaaguacggcaacggcguguggaucggcagaaccaagagcaucagcagcagaaagggcuucgagaugaucugggaccccaacggcuggaccggcaccgacaacaacuucagcaucaagcaggacguggugggcaucaacgaguggagcggcuacagcggcagcuucgugcagcaccccgagcugaccggccuggacugcaucagacccugcuucuggguggagcugaucagaggcagacccaaggagaacaccaucuggaccagcggcagcagcaucagcuucugcggcgugaacagcgacaccgugggcuggagcuggcccgacggcgccgagcugcccuucaccaucgacaaguga

SEQ ID NO: 184510 - RNA, 1410 nt, Artificial Sequence
  derived and/or modified CDS sequence (opt4) from neuraminidase__InfluenzaA__AHL80732
augaaccccaaccagaagaucaucaccaucggcagcgugugcaugaccaucggcauggccaaccugauccugcagaucggcaacaucaucagcaucuggaucagccacagcauccagcugggcaaccagaaccagaucgagaccugcaaccagagcgugaucaccuacgagaacaacaccugggugaaccagaccuacgugaacaucagcaacaccaacuucgccgccggccagagcguggugagcgugaagcuggccggcaacagcagccugugccccgugagcggcugggccaucuacagcaaggacaacagcaucagaaucggcagcaagggcgacguguucgugaucagagagcccuucaucagcugcagcccccuggagugcagaaccuucuuccugacccagggcgcccugcugaacgacaagcacagcaacggcaccaucaaggacagaagccccuacagaacccugaugagcugccccaucggcgaggugcccagccccuacaacagcagauucgagagcguggccuggagcgccagcgccugccacgacggcaucaacuggcugaccaucggcaucagcggccccgacaacggcgccguggccgugcugaaguacaacggcaucaucaccgacaccaucaagagcuggagaaacaacauccugagaacccaggagagcgagugcgccugcgugaacggcagcugcuucaccgugaugaccgacggccccagcgacggccaggccagcuacaagaucuucagaaucgagaagggcaagaucgugaagagcguggagaugaacgcccccaacuacuacuacgaggagugcagcugcuaccccgacagcagcgagaucaccugcgugugcagagacaacuggcacggcagcaacagacccugggugagcuucaaccagaaccuggaguaccagaucggcuacaucugcagcggcaucuucggcgacaaccccagacccaacgacaagaccggcagcugcggccccgugagcagcaacggcgccaacggcgugaagggcuucagcuucaaguacggcaacggcguguggaucggcagaaccaagagcaucagcagcagaaacggcuucgagaugaucugggaccccaacggcuggaccggcaccgacaacaacuucagcaucaagcaggacaucgugggcaucaacgaguggagcggcuacagcggcagcuucgugcagcaccccgagcugaccggccuggacugcaucagacccugcuucuggguggagcugaucagaggcagacccaaggagaacaccaucuggaccagcggcagcagcaucagcuucugcggcgugaacagcgacaccgugggcuggagcuggcccgacggcgccgagcugcccuucaucaucgacaaguga

SEQ ID NO: 184511 - RNA, 1410 nt, Artificial Sequence; identical to SEQ ID NO: 176798
  derived and/or modified CDS sequence (opt4) from neuraminidase__InfluenzaA__AHL80743

SEQ ID NO: 184512 - RNA, 1410 nt, Artificial Sequence
  derived and/or modified CDS sequence (opt4) from neuraminidase__InfluenzaA__AHL80754
augaaccccaaccagaagaucaucaccaucggcagcgugugcaugaccaucggcauggccaaccugauccugcagaucggcaacaucaucagcaucuggaucagccacagcauccagcugggcaaccagaaccagaucgagaccugcaaccagagcgugaucaccuacgagaacaacaccugggugaaccagaccuacgugaacaucagcaacaccaacuucgccgccggccagagcguggugagcgugaagcuggccggcaacagcagccugugccccgugagcggcugggccaucuacagcaaggacaacagcaucagaaucggcagcaagggcgacguguucgugaucagagagcccuucaucagcugcagcccccuggagugcagaaccuucuuccugacccagggcgcccugcugaacgacaagcacagcaacggcaccaucaaggacagaagccccuacagaacccugaugagcugccccaucggcgaggugcccagccccuacaacagcagauucgagagcguggccuggagcgccagcgccugccacgacggcaucaacuggcugaccaucggcaucagcggccccgacaacggcgccguggccgugcugaaguacaacggcaucaucaccgacaccaucaagagcuggagaaacaacauccugagaacccaggagagcgagugcgugugcgugaacggcagcugcuucaccgugaugaccgacggccccagcgacggccaggccagcuacaagaucuucagaaucgagaagggcaagaucgugaagagcguggagaugaacgcccccaacuaccacuacgaggagugcagcugcuaccccgacagcagcgagaucaccugcgugugcagagacaacuggcacggcagcaacagacccugggugagcuucaaccagaaccuggaguaccagaucggcuacaucugcagcggcaucuucggcgacaaccccagacccaacgacaagaccggcagcugcggccccgugagcagcaacggcgccaacggcgugaagggcuucagcuucaaguacggcaacggcguguggaucggcagaaccaagagcaucagcagcagaaacggcuucgagaugaucugggaccccaacggcuggaccggcaccgacaacaacuucagcaucaagcaggacaucgugggcaucaacgaguggagcggcuacagcggcagcuucgugcagcaccccgagcugaccggccuggacugcaucagacccugcuucuggguggagcugaucagaggcagacccaaggagaacaccaucuggaccagcggcagcagcaucagcuucugcggcgugaacagcgacaccgugggcuggagcuggcccgacggcgccgagcugcccuucaccaucgacaaguga

SEQ ID NO: 184513 - RNA, 1410 nt, Artificial Sequence; identical to SEQ ID NO: 176798
  derived and/or modified CDS sequence (opt4) from neuraminidase__InfluenzaA__AHL80765

SEQ ID NO: 184514 - RNA, 1410 nt, Artificial Sequence; identical to SEQ ID NO: 176798
  derived and/or modified CDS sequence (opt4) from neuraminidase__InfluenzaA__AHL80776

SEQ ID NO: 184515 - RNA, 1410 nt, Artificial Sequence; identical to SEQ ID NO: 176798
  derived and/or modified CDS sequence (opt4) from neuraminidase__InfluenzaA__AHL80787

SEQ ID NO: 184516 - RNA, 1410 nt, Artificial Sequence
  derived and/or modified CDS sequence (opt4) from neuraminidase__InfluenzaA__AHL80798
augaaccccaaccagaagaucaucaccaucggcagcgugugcaugaccaucggcauggccaaccugauccugcagaucggcaacaucaucagcaucuggaucagccacagcauccagcugggcaaccagaaccagaucgagaccugcaaccagagcgugaucaccuacgagaacaacaccugggugaaccagaccuacgugaacaucagcaacaccaacuucgccgccggccagagcguggugagcgugaagcuggccggcaacagcagccugugccccgugagcggcugggccaucuacagcaaggacaacagcaucagaaucggcagcaagggcgacguguucgugaucagagagcccuucaucagcugcagcccccuggagugcagaaccuucuuccugacccagggcgcccugcugaacgacaagcacagcaacggcaccaucaaggacagaagccccuacagaacccugaugagcugccccaucggcgaggugcccagccccuacaacagcagauucgagagcguggccuggagcgccagcgccugccacgacggcaucaacuggcugaccaucggcaucagcggccccgacaacggcgccguggccgugcugaaguacaacggcaucaucaccgacaccaucaagagcuggagaaacaacauccugagaacccaggagagcgagugcgccugcgugaacggcagcugcuucaccgugaugaccgacggccccagcgacggccaggccagcuacaagaucuucagaaucgagaagggcaagaucgugaagagcguggagaugaacgcccccaacuaccacuacgaggagugcagcugcuaccccgacagcagcgagaucaccugcgugugcagagacaacuggcacggcagcaacagacccugggugagcuucaaccagaaccuggaguaccagaucggcuacaucugcagcggcaucuucggcgacaaccccagacccaacgacaagaagggcagcugcggccccgugagcagcaacggcgccaacggcgugaagggcuucagcuucaaguacggcaacggcguguggaucggcagaaccaagagcaucagcagcagaaacggcuucgagaugaucugggaccccaacggcuggaccggcaccgacaacaacuucagcgugaagcaggacaucgugggcaucaacgaguggagcggcuacagcggcagcuucgugcagcaccccgagcugaccggccuggacugcaucagacccugcuucuggguggagcugaucagaggcagacccaaggagaacaccaucuggaccagcggcagcagcaucagcuucugcggcgugaacagcgacaccgugggcuggagcuggcccgacggcgccgagcugcccuucaccaucgacaaguga

SEQ ID NO: 184517 - RNA, 1410 nt, Artificial Sequence; identical to SEQ ID NO: 176798
  derived and/or modified CDS sequence (opt4) from neuraminidase__InfluenzaA__AHL80809

SEQ ID NO: 184518 - RNA, 1410 nt, Artificial Sequence; identical to SEQ ID NO: 176798
  derived and/or modified CDS sequence (opt4) from neuraminidase__InfluenzaA__AHL80820

SEQ ID NO: 184519 - RNA, 1410 nt, Artificial Sequence; identical to SEQ ID NO: 176798
  derived and/or modified CDS sequence (opt4) from neuraminidase__InfluenzaA__AHL80831

SEQ ID NO: 184520 - RNA, 1410 nt, Artificial Sequence; identical to SEQ ID NO: 176798
  derived and/or modified CDS sequence (opt4) from neuraminidase__InfluenzaA__AHL80842

SEQ ID NO: 184521 - RNA, 1410 nt, Artificial Sequence; identical to SEQ ID NO: 178086
  derived and/or modified CDS sequence (opt4) from neuraminidase__InfluenzaA__AHL80853

SEQ ID NO: 184522 - RNA, 1410 nt, Artificial Sequence
  derived and/or modified CDS sequence (opt4) from neuraminidase__InfluenzaA__AHL80864
augaaccccaaccagaagaucaucaccaucggcagcgugugcaugaccaucggcauggccaaccugauccugcagaucggcaacaucaucagcaucuggaucagccacagcauccagcugggcaaccagaaccagaucgagaccugcaaccagagcgugaucaccuacgagaacaacaccugggugaaccagaccuacgugaacaucagcaacaccaacuucgccgccggccagagcguggugagcgugaagcuggccggcaacagcagccugugccccgugagcggcugggccaucuacagcaaggacaacagcaucagaaucggcagcaagggcgacguguucgugaucagagagcccuucaucagcugcagcccccuggagugcagaaccuucuuccugacccagggcgcccugcugaacgacaagcacagcaacggcaccaucaaggacagaagccccuacagaacccugaugagcugccccaucggcgaggugcccagccccuacaacagcagauucgagagcguggccuggagcgccagcgccugccacgacggcaucaacuggcugaccaucggcaucagcggccccgacaacggcgccguggccgugcugaaguacaacggcaucaucaccgacaccaucaagagcuggagaaacaacauccugagaacccaggagagcgagugcgccugcgugaacggcagcugcuucaccgugaugaccgacggccccagcgacggccaggccagcuacaagaucuucagaaucgagaagggcaagaucgugaagagcguggagaugaacgcccccaacuacuacuacgaggagugcagcugcuaccccgacagcagcgagaucaccugcgugugcagagacaacuggcacggcagcaacagacccugggugagcuucaaccagaaccuggaguaccagaucggcuacaucugcagcggcaucuucggcgacaaccccagacccaacgacaagaagggcagcugcggccccgugagcagcaacggcgccaacggcgugaagggcuucagcuucaaguacggcaacggcguguggaucggcagaaccaagagcaucagcagcagaaacggcuucgagaugaucugggaccccaacggcuggaccggcaccgacaacaacuucagcaucaagcaggacaucgugggcaucaacgaguggagcggcuacagcggcagcuucgugcagcaccccgagcugaccggccuggacugcaucagacccugcuucuggguggagcugaucagaggcagacccaaggagaacaccaucuggaccagcggcagcagcaucagcuucugcggcgugaacagcgacaccgugggcuggagcuggcccgacggcgccgagcugcccuucaccaucgacaaguga

SEQ ID NO: 184523 - RNA, 1410 nt, Artificial Sequence; identical to SEQ ID NO: 178086
  derived and/or modified CDS sequence (opt4) from neuraminidase__InfluenzaA__AHL80875

SEQ ID NO: 184524 - RNA, 1410 nt, Artificial Sequence; identical to SEQ ID NO: 178086
  derived and/or modified CDS sequence (opt4) from neuraminidase__InfluenzaA__AHL80886

SEQ ID NO: 184525 - RNA, 1410 nt, Artificial Sequence
  derived and/or modified CDS sequence (opt4) from neuraminidase__InfluenzaA__AHL80897
augaaccccaaccagaagaucaucaccaucggcagcgugugcaugaccaucggcauggccaaccugauccugcagaucggcaacaucaucagcaucuggaucagccacagcauccagcugggcaaccagaaccagaucgagaccugcaaccagagcgugaucaccuacgagaacaacaccugggugaaccagaccuacgugaacaucagcaacaccaacuucgccgccggccagagcguggugagcgugaagcuggccggcaacagcagccugugccccgugagcggcugggccaucuacagcaaggacaacagcaucagaaucggcagcaagggcgacguguucgugaucagagagcccuucaucagcugcagcccccuggagugcagaaccuucuuccugacccagggcgcccugcugaacgacaagcacagcaacggcaccaucaaggacagaagccccuacagaacccugaugagcugccccaucggcgaggugcccagccccuacaacagcagauucgagagcguggccuggagcgccagcgccugccacgacggcaucaacuggcugaccaucggcaucagcggccccgacaacggcgccguggccgugcugaaguacaacggcaucaucaccgacaccaucaagagcuggagaaacaacauccugagaacccaggagagcgagugcgccugcaucaacggcagcugcuucaccgugaugaccgacggccccagcgacggccaggccagcuacaagaucuucagaaucgagaagggcaagaucgugaagagcguggagaugaacgcccccaacuaccacuacgaggagugcagcugcuaccccgacagcagcgagaucaccugcgugugcagagacaacuggcacggcagcaacagacccugggugagcuucaaccagaaccuggaguaccagaucggcuacaucugcagcggcaucuucggcgacaaccccagacccaacgacaagaagggcagcugcggccccgugagcagcaacggcgccaacggcgugaagggcuucagcuucaaguacggcaacggcguguggaucggcagaaccaagagcaucagcagcagaaacggcuucgagaugaucugggaccccaacggcuggaccggcaccgacaacaacuucagcaucaagcaggacaucgugggcaucaacgaguggagcggcuacagcggcagcuucgugcagcaccccgagcugaccggccuggacugcaucagacccugcuucuggguggagcugaucagaggcagacccaaggagaacaccaucuggaccagcggcagcagcaucagcuucugcggcgugaacagcgacaccgugggcuggagcuggcccgacggcgccgagcugcccuucaccaucgacaaguga

SEQ ID NO: 184526 - RNA, 1410 nt, Artificial Sequence
  derived and/or modified CDS sequence (opt4) from neuraminidase__InfluenzaA__AHL80908
augaaccccaaccagaagaucaucaccaucggcagcgugugcaugaccaucggcauggccaaccugauccugcagaucggcaacaucaucagcaucuggaucagccacagcauccagcugggcaaccagaaccagaucgagaccugcaaccagagcgugaccauccacgagaacaacaccugggugaaccagaccuacgugaacaucagcaacaccaacuucgccgccggccagagcguggugagcgugaagcuggccggcaacagcagccugugccccgugagcggcugggccaucuacagcaaggacaacagcaucagaaucggcagcaagggcgacguguucgugaucagagagcccuucaucagcugcagcccccuggagugcagaaccuucuuccugacccagggcgcccugcugaacgacaagcacagcaacggcaccaucaaggacagaagccccuacagaacccugaugagcugccccaucggcgaggugcccagccccuacaacagcagauucgagagcguggccuggagcgccagcgccugccacgacggcaucaacuggcugaccaucggcaucagcggccccgacaacggcgccguggccgugcugaaguacaacggcaucaucaccgacaccaucaagagcuggagaaacaacauccugagaacccaggagagcgagugcgccugcgugaacggcagcugcuucaccgugaugaccgacggccccagcgacggccaggccagcuacaagaucuucagaaucgagaagggcaagaucgugaagagcguggagaugaacgcccccaacuacuacuacgaggagugcagcugcuaccccgacagcagcgagaucaccugcgugugcagagacaacuggcacggcagcaacagacccugggugagcuucaaccagaaccuggaguaccagaucggcuacaucugcagcggcaucuucggcgacaaccccagacccaacgacaagaagggcagcugcggccccgugagcagcaacggcgccaacggcgugaagggcuucagcuucaaguacggcaacggcguguggaucggcagaaccaagagcaucagcagcagaaacggcuucgagaugaucugggaccccaacggcuggaccggcaccgacaacaacuucagcaucaagcaggacaucgugggcaucaacgaguggagcggcuacagcggcagcuucgugcagcaccccgagcugaccggccuggacugcaucagacccugcuucuggguggagcugaucagaggcagacccaaggagaacaccaucuggaccagcggcagcagcaucagcuucugcggcgugaacagcgacaccgugggcuggagcuggcccgacggcgccgagcugcccuucaccaucgacaaguga

SEQ ID NO: 184527 - RNA, 1410 nt, Artificial Sequence
  derived and/or modified CDS sequence (opt4) from neuraminidase__InfluenzaA__AHL80919
augaaccccaaccagaagaucaucaccaucggcagcgugugcaugaccaucggcauggccaaccugauccugcagaucggcaacaucaucagcaucuggaucagccacagcauccagcugggcaaccagagccagaucgagaccugcaaccagagcgugaucaccuacgagaacaacaccugggugaaccagaccuacgugaacaucagcaacaccaacuucgccgccggccagagcguggugagcgugaagcuggccggcaacagcagccugugccccgugagcggcugggccaucuacagcaaggacaacagcaucagaaucggcagcaagggcgacguguucgugaucagagagcccuucaucagcugcagcccccuggagugcagaaccuucuuccugacccagggcgcccugcugaacgacaagcacagcaacggcaccaucaaggacagaagccccuacagaacccugaugagcugccccaccggcgaggugcccagccccuacaacagcagauucgagagcguggccuggagcgccagcgccugccacgacggcaucaacuggcugaccaucggcaucagcggccccgacaacggcgccguggccgugcugaaguacaacggcaucaucaccgacaccaucaagagcuggagaaacaacauccugagaacccaggagagcgagugcgccugcgugaacggcagcugcuucaccaucaugaccgacggccccagcgacggccaggccagcuacaagaucuucagaaucgagaagggcaagaucgugaagagcguggagaugaacgcccccaacuaccacuacgaggagugcagcugcuaccccgacagcagcgagaucaccugcgugugcagagacaacuggcacggcagcaacagacccugggugagcuucaaccagaaccuggaguaccagaucggcuacaucugcagcggcaucuucggcgacaaccccagacccaacgacaagaccggcagcugcggccccgugagcagcaacggcgccaacggcgugaagggcuucagcuucaaguacggcaacggcguguggaucggcagaaccaagagcaucagcagcagaaagggcuucgagaugaucugggaccccaacggcuggaccggcaccgacaacaacuucagcaucaagcaggacaucgugggcaucaacgaguggagcggcuacagcggcagcuucgugcagcaccccgagcugaccggccuggacugcaucagacccugcuucuggguggagcugaucagaggcagacccaaggagaacaccaucuggaccagcggcagcagcaucagcuucugcggcgugaacagcgacaccgugggcuggagcuggcccgacggcgccgagcugcccuucaccaucgacaaguga

SEQ ID NO: 184528 - RNA, 1410 nt, Artificial Sequence; identical to SEQ ID NO: 179578
  derived and/or modified CDS sequence (opt4) from neuraminidase__InfluenzaA__AHL80930

SEQ ID NO: 184529 - RNA, 1410 nt, Artificial Sequence; identical to SEQ ID NO: 179578
  derived and/or modified CDS sequence (opt4) from neuraminidase__InfluenzaA__AHL80949

SEQ ID NO: 184530 - RNA, 1410 nt, Artificial Sequence
  derived and/or modified CDS sequence (opt4) from neuraminidase__InfluenzaA__AHL80961
augaaccccaaccagaagaucaucaccaucggcagcgugugcaugaccaucggcauggccaaccugauccugcagaucggcaacaucaucagcaucuggaucagccacagcauccagcugggcaaccagaaccagaucgagaccugcaaccagagcgugaucaccuacgagaacaacaccugggugaaccagaccuacgugaacaucagcaacaccaacuucgccgccggccagagcguggugagcgugaagcuggccggcaacagcagccugugccccgugagcggcugggccaucuacagcaaggacaacagcaucagaaucggcagcaagggcgacguguucgugaucagagagcccuucaucagcugcagcccccuggagugcagaaccuucuuccugacccagggcgcccugcugaacgacaagcacagcaacggcaccaucaaggacagaagccccuacagaacccugaugagcugccccaucggcgaggugcccagccccuacaacagcagauucgagagcguggccuggagcgccagcgccugccacgacggcaucaacuggcugaccaucggcaucagcggccccgacaacggcgccguggccgugcugaaguacaacggcaucaucaccgacaccaucaagagcuggagaaacaacauccugagaacccaggagagcgagugcgccugcgugaacggcagcugcuucaccaucaugaccgacggccccagcgacggccaggccagcuacaagaucuucagaaucgagaagggcaagaucgugaagagcguggagaugaacgcccccaacuaccacuacgaggagugcagcugcuaccccgacagcagcgagaucaccugcgugugcagagacaacuggcacggcagcaacagacccugggugagcuucaaccagaaccuggaguaccagaucggcuacaucugcagcggcaucuucggcgacaaccccagacccaacgacaagaccggcagcugcggccccgugagcagcaacggcgccaacggcgugaagggcuucagcuucaaguacggcaacggcguguggaucggcagaaccaagagcaucagcagcagaaagggcuucgagaugaucugggaccccaacggcuggaccggcaccgacaacaacuucagcaucaagcaggacguggugggcaucaacgaguggagcggcuacagcggcagcuucgugcagcaccccgagcugaccggccuggacugcaucagacccugcuucuggguggagcugaucagaggcagacccaaggagaacaccaucuggaccagcggcagcagcaucagcuucugcggcgugaacagcgacaccgugggcuggagcuggcccgacggcgccgagcugcccuucaccaucgacaaguga

SEQ ID NO: 184531 - RNA, 1410 nt, Artificial Sequence; identical to SEQ ID NO: 184530
  derived and/or modified CDS sequence (opt4) from neuraminidase__InfluenzaA__AHL80972

SEQ ID NO: 184532 - RNA, 1410 nt, Artificial Sequence; identical to SEQ ID NO: 179578
  derived and/or modified CDS sequence (opt4) from neuraminidase__InfluenzaA__AHL80983

SEQ ID NO: 184533 - RNA, 1410 nt, Artificial Sequence; identical to SEQ ID NO: 179578
  derived and/or modified CDS sequence (opt4) from neuraminidase__InfluenzaA__AHL80992

SEQ ID NO: 184534 - RNA, 1410 nt, Artificial Sequence; identical to SEQ ID NO: 179578
  derived and/or modified CDS sequence (opt4) from neuraminidase__InfluenzaA__AHL81004

SEQ ID NO: 184535 - RNA, 1410 nt, Artificial Sequence
  derived and/or modified CDS sequence (opt4) from neuraminidase__InfluenzaA__AHL81016
augaaccccaaccagaagaucaucaccaucggcagcgugagccugaccaucagcaccaucugcuucuucaugcagaucgccauccugaucaccaccgugacccugcacuucaagcaguacgaguucaacagcccccccaacaaccaggugaugcugugcgagcccaccaucaucgagagaaacaucaccgagaucguguaccugaccaacaccaccaucgagaaggagaucugccccaagcuggccgaguacagaaacuggagcaagccccagugcgacaucaccggcuucgcccccuucagcaaggacaacagcaucagacugagcgccggcggcgacaucugggugaccagagagcccuacgugagcugcgacagcgacaagugcuaccaguucgcccugggccagggcaccacccugaacaacgugcacagcaacaacaccgugagagacagaacccccuacagaacccugcugaugaacgagcugggcgugcccuuccaccugggcaccaagcaggugugcaucgccuggagcagcagcagcugccacgacggcaaggccuggcugcacgugugcaucaccggcgacgacaagaacgccaccgccagcuucaucuacaacggcagacugguggacagcguggugagcuggagcaaggagauccugagaacccaggagagcgagugcgugugcaucaacggcaccugcaccguggugaugaccgacggcagcgccagcggcaaggccgacaccaagauccuguucaucgaggagggcaagaucgugcacaccagcacccugagcggcagcgcccagcacguggaggagugcagcugcuaccccagauaccccggcgugagaugcgugugcagagacaacuggaagggcagcaacagacccaucguggacaucaacaucaaggaccacagcaucgugagcagcuacgugugcagcggccuggugggcgacacccccagaaagaacgacagcagcagcagcagccacugccuggaccccaacaacgaggagggcggccacggcgugaagggcugggccuucgacgacggcaacgacguguggaugggcagaaccaucaacgagaccagcagacugggcuacgagaccuucaaggugaucgagggcuggagcaaccccaagagcaagcugcagaucaacagacaggugaucguggacagaggcaacagaagcggcuacagcggcaucuucagcguggagggcaagagcugcaucaacagaugcuucuacguggagcugaucagaggcagaaaggaggagaccgaggugcuguggaccagcaacagcaucgugguguucugcggcaccagcggcaccuacggcaccggcagcuggcccgacggcgccgaccugaaccugaugcccaucuga

SEQ ID NO: 184536 - RNA, 1410 nt, Artificial Sequence; identical to SEQ ID NO: 179578
  derived and/or modified CDS sequence (opt4) from neuraminidase__InfluenzaA__AHL81028

SEQ ID NO: 184537 - RNA, 1410 nt, Artificial Sequence; identical to SEQ ID NO: 179578
  derived and/or modified CDS sequence (opt4) from neuraminidase__InfluenzaA__AHL81040

SEQ ID NO: 184538 - RNA, 1410 nt, Artificial Sequence; identical to SEQ ID NO: 179578
  derived and/or modified CDS sequence (opt4) from neuraminidase__InfluenzaA__AHL81052

SEQ ID NO: 184539 - RNA, 1410 nt, Artificial Sequence; identical to SEQ ID NO: 184530
  derived and/or modified CDS sequence (opt4) from neuraminidase__InfluenzaA__AHL81064

SEQ ID NO: 184540 - RNA, 1410 nt, Artificial Sequence; identical to SEQ ID NO: 184530
  derived and/or modified CDS sequence (opt4) from neuraminidase__InfluenzaA__AHL81075

SEQ ID NO: 184541 - RNA, 1410 nt, Artificial Sequence
  derived and/or modified CDS sequence (opt4) from neuraminidase__InfluenzaA__AHL81086
augaaccccaaccagaagaucaucaccaucggcagcgugagccugaccaucagcaccaucugcuucuucaugcagaucgccauccugaucaccaccgugacccugcacuucaagcaguacgaguucaacagcccccccaacaaccaggugaugcugugcaagcccaccaucaucgagagaaacaucaccgagaucguguaccugaccaacaccaccaucgagaaggagaucugccccaagcuggccgaguacagaaacuggagcaagccccagugcgacaucaccggcuucgcccccuucagcaaggacaacagcaucagacugagcgccggcggcgacaucugggugaccagagagcccuacgugagcugcgaccccgacaagugcuaccaguucgcccugggccagggcaccacccugaacaacgugcacagcaacaacaccgugagagacagaacccccuacagaacccugcugaugaacgagcugggcgugcccuuccaccugggcaccaagcaggugugcaucgccuggagcagcagcagcugccacgacggcaaggccuggcugcacgugugcaucaccggcgacgacaagaacgccaccgccagcuucaucuacaacggcagacugguggacagcguggugagcuggagcaaggagauccugagaacccaggagagcgagugcgugugcaucaacggcaccugcaccguggugaugaccgacggcagcgccagcggcaaggccgacaccaagauccuguucaucgaggagggcaagaucgugcacaccagcacccugagcggcagcgcccagcacguggaggagugcagcugcuaccccagauaccccggcgugagaugcgugugcagagacaacuggaagggcagcaacagacccaucguggacaucaacaucaaggaccacagcaucgugagcagcuacgugugcagcggccuggugggcgacacccccagaaagaacgacagcagcagcagcagccacugccuggaccccaacaacgaggagggcggccacggcgugaagggcugggccuucgacgacggcaacgacguguggaugggcagaaccaucaacgagaccagcagacugggcuacgagaccuucaaggugaucgagggcuggagcaaccccaagagcaagcugcagaucaacagacaggugaucguggacagaggcaacagaagcggcuacagcggcaucuucagcguggagggcaagagcugcaucaacagaugcuucuacguggagcugaucagaggcagaaaggaggagaccgaggugcuguggaccagcaacagcaucgugguguucugcggcaccagcggcaccuacggcaccggcagcuggcccgacggcgccgaccugaaccugaugcccaucuga

SEQ ID NO: 184542 - RNA, 1410 nt, Artificial Sequence
  derived and/or modified CDS sequence (opt4) from neuraminidase__InfluenzaA__AHL81098
augaaccccaaccagaagaucaucaccaucggcagcgugagccugaccaucagcaccaucugcuucuucgugcagaucgccauccugaucaccaccgugacccugcacuucaagcaguacgaguucaacagcccccccaacaaccaggugaugcugugcgagcccaccaucaucgagagaaacaucaccgagaucguguaccugaccaacaccaccaucgagaaggagaucugccccaagcuggccgaguacagaaacuggagcaagccccagugcgacaucaccggcuucgcccccuucagcaaggacaacagcaucagacugagcgccggcggcgacaucugggugaccagagagcccuacgugagcugcgaccccgacaagugcuaccaguucgcccugggccagggcaccacccugaacaacgugcacagcaacaacaccgugagagacagaacccccuacagaacccugcugaugaacgagcugggcgugcccuuccaccugggcaccaagcaggugugcaucgccuggagcagcagcagcugccacgacggcaaggccuggcugcacgugugcaucaccggcgacgacaagaacgccaccgccagcuucaucuacaacggcagacugguggacagcguggugagcuggagcaaggagauccugagaacccaggagagcgagugcgugugcaucaacggcaccugcaccguggugaugaccgacggcagcgccagcggcaaggccgacaccaagauccuguucaucgaggagggcaagaucgugcacaccagcacccugagcggcagcgcccagcacguggaggagugcagcugcuaccccagauaccccggcgugagaugcgugugcagagacaacuggaagggcagcaacagacccaucguggacaucaacaucaaggaccacagcaucgugagcagcuacgugugcagcggccuggugggcgacacccccagaaagaacgacagcagcagcagcagccacugccuggaccccaacaacgaggagggcggccacggcgugaagggcugggccuucgacgacggcaacgacguguggaugggcagaaccaucaacgagaccagcagacugggcuacgagaccuucaaggugaucgagggcuggagcaaccccaagagcaagcugcagaucaacagacaggugaucguggacagaggcaacagaagcggcuacagcggcaucuucagcguggagggcaagagcugcaucaacagaugcuucuacguggagcugaucagaggcagaaaggaggagaccgaggugcuguggaccagcaacagcaucgugguguucugcggcaccagcggcaccuacggcaccggcagcuggcccgacggcgccgaccugaaccugaugcccaucuga

SEQ ID NO: 184543 - RNA, 1410 nt, Artificial Sequence; identical to SEQ ID NO: 180769
  derived and/or modified CDS sequence (opt4) from neuraminidase__InfluenzaA__AHL81110

SEQ ID NO: 184544 - RNA, 1410 nt, Artificial Sequence; identical to SEQ ID NO: 180769
  derived and/or modified CDS sequence (opt4) from neuraminidase__InfluenzaA__AHL81121

SEQ ID NO: 184545 - RNA, 1410 nt, Artificial Sequence; identical to SEQ ID NO: 179578
  derived and/or modified CDS sequence (opt4) from neuraminidase__InfluenzaA__AHL81132

SEQ ID NO: 184546 - RNA, 1410 nt, Artificial Sequence; identical to SEQ ID NO: 179578
  derived and/or modified CDS sequence (opt4) from neuraminidase__InfluenzaA__AHL81144

SEQ ID NO: 184547 - RNA, 1410 nt, Artificial Sequence; identical to SEQ ID NO: 179578
  derived and/or modified CDS sequence (opt4) from neuraminidase__InfluenzaA__AHL81156

SEQ ID NO: 184548 - RNA, 1410 nt, Artificial Sequence; identical to SEQ ID NO: 181847
  derived and/or modified CDS sequence (opt4) from neuraminidase__InfluenzaA__AHL81168

SEQ ID NO: 184549 - RNA, 1410 nt, Artificial Sequence; identical to SEQ ID NO: 181847
  derived and/or modified CDS sequence (opt4) from neuraminidase__InfluenzaA__AHL81180

SEQ ID NO: 184550 - RNA, 1410 nt, Artificial Sequence; identical to SEQ ID NO: 179578
  derived and/or modified CDS sequence (opt4) from neuraminidase__InfluenzaA__AHL81192

SEQ ID NO: 184551 - RNA, 1410 nt, Artificial Sequence
  derived and/or modified CDS sequence (opt4) from neuraminidase__InfluenzaA__AHL81215
augaaccccaaccagaagaucaucaccaucggcagcgugagccugaccaucagcaccaucugcuucuucaugcagaucgccauccugaucaccaccgugacccugcacuucaagcaguacgaguucaacagcccccccaacaaccaggugaugcugugcgagcccaccaucaucgagagaaacaucaccgagaucauguaccugaccaacaccaccaucgagaaggagaucugccccaagcuggccgaguacagaaacuggagcaagccccagugcgacaucaccggcuucgcccccuucagcaaggacaacagcaucagacugagcgccggcggcgacaucugggugaccagagagcccuacgugagcugcgaccccgacaagugcuaccaguucgcccugggccagggcaccacccugaacaacgugcacagcaacaacaccgugagagacagaacccccuacagaacccugcugaugaacgagcugggcgugcccuuccaccugggcaccaagcaggugugcaucgccuggagcagcagcagcugccacgacggcaaggccuggcugcacgugugcaucaccggcgacgacaagaacgccaccgccagcuucaucuacaacggcagacugguggacagcguggugagcuggagcaaggagauccugagaacccaggagagcgagugcgugugcaucaacggcaccugcaccguggugaugaccgacggcagcgccagcggcaaggccgacaccaagauccuguucaucgaggagggcaagaucgugcacaccagcacccugagcggcagcgcccagcacguggaggagugcagcugcuaccccagauaccccggcgugagaugcgugugcagagacaacuggaagggcagcaacagacccaucguggacaucaacaucaaggaccacagcaucgugagcagcuacgugugcagcggccuggugggcgacacccccagaaagaacgacagcagcagcagcagccacugccuggaccccaacaacgaggagggcggccacggcgugaagggcugggccuucgacgacggcaacgacguguggaugggcagaaccaucaacgagaccagcagacugggcuacgagaccuucaaggugaucgagggcuggagcaaccccaagagcaagcugcagaucaacagacaggugaucguggacagaggcaacagaagcggcuacagcggcaucuucagcguggagggcaagagcugcaucaacagaugcuucuacguggagcugaucagaggcagaaaggaggagaccgaggugcuguggaccagcaacagcaucgugguguucugcggcaccagcggcaccuacggcaccggcagcuggcccgacggcgccgaccugaacuucaugcccaucuga

SEQ ID NO: 184552 - RNA, 1410 nt, Artificial Sequence
  derived and/or modified CDS sequence (opt4) from neuraminidase__InfluenzaA__AHL81227
augaaccccaaccagaagaucaucaccaucggcagcgugugcaugaccaucggcauggccaaccugauccugcagaucggcaacaucaucagcaucuggaucagccacagcauccagcugggcaaccagagccagaucgagaccugcaaccagagcgugaucaccuacgagaacaacaccugggugaaccagaccuacgugaacaucagcaacaccaacuucgccgccggccagagcguggugagcgugaagcuggccggcaacagcagccugugccccgugagcggcugggccaucuacagcaaggacaacagcaucagaaucggcagcaagggcgacguguucgugaucagagagcccuucaucagcugcagcccccuggagugcagaaccuucuuccugacccagggcgcccugcugaacgacaagcacagcaacggcaccaucaaggacagaagccccuacagaacccugaugagcugccccaccggcgaggugcccagccccuacaacagcagauucgagagcguggccuggagcgccagcgccugccacgacggcaucaacuggcugaccaucggcaucagcggccccgacaacggcgccguggccgugcugaaguacaacggcaucaucaccgacaccaucaagagcuggagaaacaacauccugagaacccaggagagcgagugcgccugcgugaacggcagcugcuucaccaucaugaccgacggccccagcgacggccaggccagcuacaagaucuucagaaucgagaagggcaagaucgugaagagcguggagaugaacgcccccaacuaccacuacgaggagugcagcugcuaccccgacagcagcgagaucaccugcgugugcagagacaacuggcacggcagcaacagacccugggugagcuucaaccagaaccuggaguaccagaucggcuacaucugcagcggcaucuucggcgacaaccccagacccaacgacaagaccggcagcugcggccccgugagcagcaacggcgccaacggcgugaagggcuucagcuucaaguacggcaacggcguguggaucggcagaaccaagagcaucagcagcagaaagggcuucgagaugaucugggaccccaacggcuggaccggcaccgacaacaacuucagcaucaagcaggacaucaucggcaucaacgaguggagcggcuacagcggcagcuucgugcagcaccccgagcugaccggccuggacugcaucagacccugcuucuggguggagcugaucagaggcagacccaaggagaacaccaucuggaccagcggcagcagcaucagcuucugcggcgugaacagcgacaccgugggcuggagcuggcccgacggcgccgagcugcccuucaccaucgacaaguga

SEQ ID NO: 184553 - RNA, 1410 nt, Artificial Sequence; identical to SEQ ID NO: 179578
  derived and/or modified CDS sequence (opt4) from neuraminidase__InfluenzaA__AHL81238

SEQ ID NO: 184554 - RNA, 1410 nt, Artificial Sequence; identical to SEQ ID NO: 179578
  derived and/or modified CDS sequence (opt4) from neuraminidase__InfluenzaA__AHL81250

SEQ ID NO: 184555 - RNA, 1410 nt, Artificial Sequence; identical to SEQ ID NO: 179578
  derived and/or modified CDS sequence (opt4) from neuraminidase__InfluenzaA__AHL81262

SEQ ID NO: 184556 - RNA, 1410 nt, Artificial Sequence; identical to SEQ ID NO: 179578
  derived and/or modified CDS sequence (opt4) from neuraminidase__InfluenzaA__AHL81274

SEQ ID NO: 184557 - RNA, 1410 nt, Artificial Sequence; identical to SEQ ID NO: 179578
  derived and/or modified CDS sequence (opt4) from neuraminidase__InfluenzaA__AHL81286

SEQ ID NO: 184558 - RNA, 1410 nt, Artificial Sequence; identical to SEQ ID NO: 179578
  derived and/or modified CDS sequence (opt4) from neuraminidase__InfluenzaA__AHL81298

SEQ ID NO: 184559 - RNA, 1410 nt, Artificial Sequence; identical to SEQ ID NO: 184530
  derived and/or modified CDS sequence (opt4) from neuraminidase__InfluenzaA__AHL81310

SEQ ID NO: 184560 - RNA, 1410 nt, Artificial Sequence; identical to SEQ ID NO: 180769
  derived and/or modified CDS sequence (opt4) from neuraminidase__InfluenzaA__AHL81332

SEQ ID NO: 184561 - RNA, 1410 nt, Artificial Sequence
  derived and/or modified CDS sequence (opt4) from neuraminidase__InfluenzaA__AHL81343
augaaccccaaccagaagaucaucaccaucggcagcgugagccugaccaucagcaccaucugcuuccugaugcagaucgccauccugaucaccaccgugacccugcacuucaagcaguacgaguucaacagcccccccaacaaccaggugaugcugugcgagcccaccaucaucgagagaaacaucaccgagaucguguaccugaccaacaccaccaucgagaaggagaucugccccaagcuggccgaguacagaaacuggagcaagccccagugcgacaucaccggcuucgcccccuucagcaaggacaacagcaucagacugagcgccggcggcgacaucugggugaccagagagcccuacgugagcugcgaccccgacaagugcuaccaguucgcccugggccagggcaccacccugaacaacgugcacagcaacaacaccgugagagacagaacccccuacagaacccugcugaugaacgagcugggcgugcccuuccaccugggcaccaagcaggugugcaucgccuggagcagcagcagcugccacgacggcaaggccuggcugcacgugugcaucaccggcgacgacaagaacgccaccgccagcuucaucuacaacggcagacugguggacagcguggugagcuggagcaaggagauccugagaacccaggagagcgagugcgugugcaucaacggcaccugcaccguggugaucaccgacggcagcgccagcggcaaggccgacaccaagauccuguucaucgaggagggcaagaucgugcacaccagcacccugagcggcagcgcccagcacguggaggagugcagcugcuaccccagauaccccggcgugagaugcgugugcagagacaacuggaagggcagcaacagacccaucguggacaucaacaucaaggaccacagcaucgugagcagcuacgugugcagcggccuggugggcgacacccccagaaagaacgacagcagcagcagcagccacugcagcgaccccaacaacgaggagggcggccacggcgugaagggcugggccuucgacgacggcaacgacguguggaugggcagaaccaucagcgagaagagcagacugggcuacgagaccuucaaggugaucgagggcuggagcaaccccaagagcaagcugcagaucaacagacaggugaucguggacagaggcaacagaagcggcuacagcggcaucuucagcguggagggcaagagcugcaucaacagaugcuucuacguggagcugaucagaggcagaaaggaggagaccgaggugcuguggaccagcaacagcaucgugguguucugcggcaccagcggcaccuacggcaccggcagcuggcccgacggcgccgacaucaaccugaugcccaucuga

SEQ ID NO: 184562 - RNA, 1410 nt, Artificial Sequence; identical to SEQ ID NO: 179578
  derived and/or modified CDS sequence (opt4) from neuraminidase__InfluenzaA__AHL81355

SEQ ID NO: 184563 - RNA, 1410 nt, Artificial Sequence; identical to SEQ ID NO: 180769
  derived and/or modified CDS sequence (opt4) from neuraminidase__InfluenzaA__AHL81367

SEQ ID NO: 184564 - RNA, 1410 nt, Artificial Sequence; identical to SEQ ID NO: 180769
  derived and/or modified CDS sequence (opt4) from neuraminidase__InfluenzaA__AHL81378

SEQ ID NO: 184565 - RNA, 1410 nt, Artificial Sequence; identical to SEQ ID NO: 180769
  derived and/or modified CDS sequence (opt4) from neuraminidase__InfluenzaA__AHL81389

SEQ ID NO: 184566 - RNA, 1410 nt, Artificial Sequence; identical to SEQ ID NO: 179578
  derived and/or modified CDS sequence (opt4) from neuraminidase__InfluenzaA__AHL81400

SEQ ID NO: 184567 - RNA, 1410 nt, Artificial Sequence; identical to SEQ ID NO: 184551
  derived and/or modified CDS sequence (opt4) from neuraminidase__InfluenzaA__AHL81412

SEQ ID NO: 184568 - RNA, 1410 nt, Artificial Sequence; identical to SEQ ID NO: 176798
  derived and/or modified CDS sequence (opt4) from neuraminidase__InfluenzaA__AHL81422

SEQ ID NO: 184569 - RNA, 1410 nt, Artificial Sequence; identical to SEQ ID NO: 178086
  derived and/or modified CDS sequence (opt4) from neuraminidase__InfluenzaA__AHL81433

SEQ ID NO: 184570 - RNA, 1410 nt, Artificial Sequence
  derived and/or modified CDS sequence (opt4) from neuraminidase__InfluenzaA__AHL88954
augaaccccaaccagaagaucaucaccaucggcagcgugagccugaccaucagcaccaucugcuucuucaugcagaucgccauccugaucaccaccgugacccugcacuucaagcaguacgaguucaacagcccccccaacaaccaggugaugcugugcgagcccaccaucaucgagagaaacaucaccgagaucguguaccugaccaacaccaccaucgagaaggagaucugccccaagcuggccgaguacagaaacuggagcaagccccagugcaacaucaccggcuucgcccccuucagcaaggacaacagcaucagacugagcgccggcggcgacaucugggugaccagagagcccuacgugagcugcgaccccgacaagugcuaccaguucgcccugggccagggcaccacccugaacaacgugcacagcaacgacaccgugcacgacagaacccccuacagaacccugcugaugaacgagcugggcgugcccuuccaccugggcaccaagcaggugugcaucgccuggagcagcagcagcugccacgacggcaaggccuggcugcacgugugcgugaccggcgacgacaagaacgccaccgccagcuucaucuacaacggcagacugguggacagcaucgugagcuggagcaaggagauccugagaacccaggagagcgagugcgugugcaucaacggcaccugcaccguggugaugaccgacggcagcgccagcggcaaggccgacaccaagauccuguucaucaaggagggcaagaucgugcacaccagcacccugagcggcagcgcccagcacguggaggagugcagcugcuaccccagauaccccggcgugagaugcgugugcagagacaacuggaagggcagcaacagacccaucguggacaucaacaucaaggacuacagcaucgugagcagcuacgugugcagcggccuggugggcgacacccccagaaagaacgacagcagcagcagcagccacugccuggaccccaacaacgaggagggcggccacggcgugaagggcugggccuucgacgacggcaacgacguguggaugggcagaaccaucagcgagaagcugagaagcggcuacgagaccuucaaggugaucgagggcuggagcaaccccaacagcaagcugcagaucaacagacaggugaucguggacagagacaacagaagcggcuacagcggcaucuucagcguggagggcaagagcugcaucaacagaugcuucuacguggagcugaucagaggcagaaaggaggagaccgaggugcuguggaccagcaacagcaucgugguguucugcggcaccagcggcaccuacggcaccggcagcuggcccgacggcgccgacaucaaccugaugcccaucuga

SEQ ID NO: 184571 - RNA, 1410 nt, Artificial Sequence
  derived and/or modified CDS sequence (opt4) from neuraminidase__InfluenzaA__AHL89033
augaaccccaaccagaagaucaucaccaucggcagcgugagccugaccaucagcaccaucugcuucuucaugcagaucgccauccugaucaccaccgugacccugcacuucaagcaguacgaguucaacagcccccccaacaaccaggugaugcugugcgagcccaccaucaucgagagaaacaucaccgagaucguguaccugaccaacaccaccaucgagaaggagaucugccccaagcuggccgaguacagaaacuggagcaagccccagugcaacaucaccggcuucgcccccuucagcaaggacaacagcaucagacugagcgccggcggcgacaucugggugaccagagagcccuacgugagcugcgaccccgacaagugcuaccaguucgcccugggccagggcaccacccugaacaacgugcacagcaacgacaccgugcacgacagaacccccuacagaacccugcugaugaacgagcugggcgugcccuuccaccugggcaccaagcaggugugcaucgccuggagcagcagcagcugccacgacggcaaggccuggcugcacgugugcgugaccggcgacgacaagaacgccaccgccagcuucaucuacaacggcagacugguggacagcaucgugagcuggagcaaggagauccugagaacccaggagagcgagugcgugugcaucaacggcaccugcaccguggugaugaccgacggcagcgccagcggcaaggccgacaccaagauccuguucaucgaggagggcaagaucgugcacaccagcacccugagcggcagcgcccagcacguggaggagugcagcugcuaccccagauaccccggcgugagaugcgugugcagagacaacuggaagggcagcaacagacccaucguggacaucaacaucaaggacuacagcaucgugagcagcuacgugugcagcggccuggugggcgacacccccagaaagaacgacagcagcagcagcagccacugccuggaccccaacaacgaggagggcggccacggcgugaagggcugggccuucgacgacggcaacgacguguggaugggcagaaccaucagcgagaagcugagaagcggcuacgagaccuucaaggugaucgagggcuggagcaaccccaacagcaagcugcagaucaacagacaggugaucguggacagaggcaacagaagcggcuacagcggcaucuucagcguggaggacaagagcugcaucaacagaugcuucuacguggagcugaucagaggcagaaaggaggagaccgaggugcuguggaccagcaacagcaucgugguguucugcggcaccagcggcaccuacggcaccggcagcuggcccgacggcgccgacaucaaccugaugcccaucuga

SEQ ID NO: 184572 - RNA, 1410 nt, Artificial Sequence
  derived and/or modified CDS sequence (opt4) from neuraminidase__InfluenzaA__AHL89045
augaaccccaaccagaagaucaucaccaucggcagcgugagccugaccaucagcaccaucugcuucuucaugcagaucgccauccugaucaccaccgugacccugcacuucaagcaguacgaguucaacagcccccccaacaaccaggugaugcugugcgagcccaccaucaucgagagaaacaucaccgagaucguguaccugaccaacaccaccaucgagaaggagaucugccccaagcuggccgaguacagaaacuggagcaagccccagugcaacaucaccggcuucgcccccuucagcaaggacaacagcaucagacugagcgccggcggcgacaucugggugaccagagagcccuacgugagcugcgaccccgacaagugcuaccaguucgcccugggccagggcaccacccugaacaacgugcacagcaacgacaccgugcacgacagaacccccuacagaacccugcugaugaacgagcugggcgugcccuuccaccugggcaccaagcaggugugcaucgccuggagcagcagcagcugccacgacggcaaggccuggcugcacgugugcgugaccggcgacgacaagaacgccaccgccagcuucaucuacaacggcagacugguggacagcaucgugagcuggagcaaggagauccugagaacccaggagagcgagugcgugugcaucaacggcaccugcaccguggugaugaccgacggcagcgccagcggcaaggccgacaccaagauccuguucaucgaggagggcaagaucgugcacaccagcacccugagcggcagcgcccagcacguggaggagugcagcugcuaccccagacaccccggcgugagaugcgugugcagagacaacuggaagggcagcaacagacccaucguggacaucaacaucaaggacuacagcaucgugagcagcuacgugugcagcggccuggugggcgacacccccagaaagaacgacagcagcagcagcagccacugccuggaccccaacaacgaggagggcggccacggcgugaagggcugggccuucgacgacggcaacgacguguggaugggcagaaccaucagcgagaagcugagaagcggcuacgagaccuucaaggugaucgagggcuggagcaaccccaacagcaagcugcagaccaacagacaggugaucguggacagaggcaacagaagcggcuacagcggcaucuucagcguggagggcaagagcugcaucaacagaugcuucuacguggagcugaucagaggcagaaaggaggagaccgaggugcuguggaccagcaacagcaucgugguguucugcggcaccagcggcaccuacggcaccggcagcuggcccgacggcgccgacaucaaccugaugcccaucuga

SEQ ID NO: 184573 - RNA, 1410 nt, Artificial Sequence
  derived and/or modified CDS sequence (opt4) from neuraminidase__InfluenzaA__AHL89057
augaaccccaaccagaagaucaucaccaucggcagcgugagccugaccaucagcaccaucugcuucuucaugcagaucgccauccugaucaccaccgugacccugcacuucaagcaguacgaguucaacagcccccccaacaaccaggugaugcugugcgagcccaccaucaucgagagaaacaucaccgagaucguguaccugaccaacaccaccaucgagaaggagaucugccccaagcuggccgaguacagaaacuggagcaagccccagugcaacaucaccggcuucgcccccuucagcaaggacaacagcaucagacugagcgccggcggcgacaucugggugaccagagagcccuacgugagcugcgaccccgacaagugcuaccaguucgcccugggccagggcaccacccugaacaacgugcacagcaacgacaccgugcacgacagaacccccuacagaacccugcugaugaacgagcugggcgugcccuuccaccugggcaccaagcaggugugcaucgccuggagcagcagcagcugccacgacggcaaggccuggcugcacgugugcgugaccggcgacgacaagaacgccaccgccagcuucaucuacaacggcagacugguggacagcaucgugagcuggagcaaggagauccugagaacccaggagagcgagugcgugugcaucaacggcaccugcaccguggugaugaccgacggcagcgccagcggcaaggccgacaccaagauccuguucaucgaggagggcaagaucgugcacaccagcacccugagcggcagcgcccagcacguggaggagugcagcugcuaccccagauaccccggcgugagaugcgugugcagagacaacuggaagggcagcaacagacccaucguggacaucaacaucaaggacuacagcaucgugagcagcuacgugugcagcggccuggugggcgacacccccagaaagaacgacagcagcagcagcagccacugccuggaccccaacaacgaggagggcggccacggcgugaagggcugggccuucgacgacggcaacgacguguggaugggcagaaccaucagcgagaagcugagaagcggcuacgagaccuucaaggugaucgagggcuggagcaagcccaacagcaagcugcagaucaacagacaggugaucguggacagaggcaacagaagcggcuacagcggcaucuucagcguggagggcaagagcugcaucaacagaugcuucuacguggagcugaucagaggcagaaaggaggagaccgaggugcuguggaccagcaacagcaucgugguguucugcggcaccagcggcaccuacggcaccggcagcuggcccgacggcgccgacaucaaccugaugcccaucuga

SEQ ID NO: 184574 - RNA, 1410 nt, Artificial Sequence; identical to SEQ ID NO: 175767
  derived and/or modified CDS sequence (opt4) from neuraminidase__InfluenzaA__AHL89069

SEQ ID NO: 184575 - RNA, 1410 nt, Artificial Sequence; identical to SEQ ID NO: 174772
  derived and/or modified CDS sequence (opt4) from neuraminidase__InfluenzaA__AHL89081

SEQ ID NO: 184576 - RNA, 1410 nt, Artificial Sequence; identical to SEQ ID NO: 174772
  derived and/or modified CDS sequence (opt4) from neuraminidase__InfluenzaA__AHL89093

SEQ ID NO: 184577 - RNA, 1410 nt, Artificial Sequence; identical to SEQ ID NO: 174772
  derived and/or modified CDS sequence (opt4) from neuraminidase__InfluenzaA__AHL89117

SEQ ID NO: 184578 - RNA, 1410 nt, Artificial Sequence; identical to SEQ ID NO: 174772
  derived and/or modified CDS sequence (opt4) from neuraminidase__InfluenzaA__AHL89129

SEQ ID NO: 184579 - RNA, 1410 nt, Artificial Sequence
  derived and/or modified CDS sequence (opt4) from neuraminidase__InfluenzaA__AHL89141
augaaccccaaccagaagaucaucaccaucggcagcgugagccugaccaucagcaccaucugcuucuucaugcagaucgccauccugaucaccaccgugacccugcacuucaagcaguacgaguucaacagcccccccaacaaccaggugaugcugugcgagcccaccaucaucgagagaaacaucaccgagaucguguaccugaccaacaccaccaucgagaaggagaucugccccaagcuggccgaguacagaaacuggagcaagccccagugcaacaucaccggcuucgcccccuucagcaaggacaacagcaucagacugagcgccggcggcgacaucugggugaccagagagcccuacgugagcugcgaccccgacaagugcuaccaguucgcccugggccagggcaccacccugaacaacgugcacagcaacgacaccgugcacgacagaacccccuacagaacccugcugaugaacgagcugggcgugcccuuccaccugggcaccaagcaggugugcaucgccuggagcagcagcagcugccacgacggcaaggccuggcugcacgugugcgugaccggcgacgacaagaacgccaccgccagcuucaucuacaacggcagacugguggacagcaucgugagcuggagcaaggagauccugagaacccaggagagcgagugcgugugcaucaacggcaccugcaccguggugaugaccgacggcagcgccagcggcaaggccgacaccaagauccuguucaucgaggagggcaagaucgugcacaccagcacccugagcggcagcgcccagcacguggaggagugcagcugcuaccccagauaccccggcgugagaugcgugugcagagacaacuggaagggcagcaacagacccaucguggacaucaacaucaaggacuacagcaucgugagcagcuacgugugcagcggccuggugggcgacacccccagaaagaacgacagcagcagcagcagccacugccuggaccccaacaacgaggagggcggccacggcgugaagggcugggccuucgacgacggcaacgacguguggaugggcagaaccaucagcgagaagcugagacugggcuacgagaccuucaaggugaucgagggcuggagcaaccccaacagcaagcugcagaccaacagacaggugaucguggacagaggcaacagaagcggcuacagcggcaucuucagcguggagggcaagagcugcaucaacagaugcuucuacguggagcugaucagaggcagaaaggaggagaccgaggugcuguggaccagcaacagcaucgugguguucugcggcaccagcggcaccuacggcaccggcagcuggcccgacggcgccgacaucaaccugaugcccaucuga

SEQ ID NO: 184580 - RNA, 1410 nt, Artificial Sequence
  derived and/or modified CDS sequence (opt4) from neuraminidase__InfluenzaA__AHL89153
augaaccccaaccagaagaucaucaccaucggcagcgugagccugaccaucagcaccaucugcuucuucaugcagaucgccauccugaucaccaccgugacccugcacuucaagcaguacgaguucaacagcccccccaacaaccaggugaugcugugcgagcccaccaucaucgagagaaacaucaccgagaucguguaccugaccaacaccaccaucgagaaggagaucugccccaagcuggccgaguacagaaacuggagcaagccccagugcaacaucaccggcuucgcccccuucagcaaggacaacagcaucagacugagcgccggcggcgacaucugggugaccagagagcccuacgugagcugcgaccccgacaagugcuaccaguucagccugggccagggcaccacccugaacaacgugcacagcaacgacaccgugcacgacagaacccccuacagaacccugcugaugaacgagcugggcgugcccuuccaccugggcaccaagcaggugugcaucgccuggagcagcagcagcugccacgacggcaaggccuggcugcacgugugcgugaccggcgacgacaagaacgccaccgccagcuucaucuacaacggcagacugguggacagcaucgugagcuggagcaaggagauccugagaacccaggagagcgagugcgugugcaucaacggcaccugcaccguggugaugaccgacggcagcgccagcggcaaggccgacaccaagauccuguucaucgaggagggcaagaucgugcacaccagcacccugagcggcagcgcccagcacguggaggagugcagcugcuaccccagauaccccggcgugagaugcgugugcagagacaacuggaagggcagcaacagacccaucguggacaucaacaucaaggacuacagcaucgugagcagcuacgugugcagcggccuggugggcgacacccccagaaagaacgacagcagcagcagcagccacugccuggaccccaacaacgaggagggcggccacggcgugaagggcugggccuucgacgacggcaacgacguguggaugggcagaaccaucagcgagaagcugagaagcggcuacgagaccuucaaggugaucgagggcuggagcaaccccaacagcaagcugcagaucaacagacaggugaucguggacagaggcaacagaagcggcuacagcggcaucuucagcguggagggcaagagcugcaucaacagaugcuucuacguggagcugaucagaggcagaaaggaggagaccgaggugcuguggaccagcaacagcaucgugguguucugcggcaccagcggcaccuacggcaccggcagcuggcccgacggcgccgacaucaaccugaugcccaucuga

SEQ ID NO: 184581 - RNA, 1410 nt, Artificial Sequence; identical to SEQ ID NO: 174772
  derived and/or modified CDS sequence (opt4) from neuraminidase__InfluenzaA__AHL89165

SEQ ID NO: 184582 - RNA, 1410 nt, Artificial Sequence
  derived and/or modified CDS sequence (opt4) from neuraminidase__InfluenzaA__AHL89177
augaaccccaaccagaagaucaucaccaucggcagcgugagccugaccaucagcaccaucugcuucuucaugcagaucgccauccugaucaccaccgugacccugcacuucaagcaguacgaguucaacagcccccccaacaaccaggugaugcugugcgagcccaccaucaucgagagaaacaucaccgagaucguguaccugaccaacaccaccaucgagaaggagaucugccccaagcuggccgaguacagaaacuggagcaagccccagugcaacaucaccggcuucgcccccuucagcaaggacaacagcaucagacugagcgccggcggcgacaucugggugaccagagagcccuacgugagcugcgaccccgacaagugcuaccaguucgcccugggccagggcaccacccugaacaacgugcacagcaacgacaccgugcacgacagaacccccuacagaacccugcugaugaacgagcugggcgugcccuuccaccugggcaccaagcaggugugcaucgccuggagcagcagcagcugccacgacggcaaggccuggcugcacgugugcgugaccggcgacgacaagaacgccaccgccagcuucaucuacaacggcagacugguggacagcaucgugagcuggagcaacgagauccugagaacccaggagagcgagugcgugugcaucaacggcaccugcaccguggugaugaccgacggcagcgccagcggcaaggccgacaccaagauccuguucaucgaggagggcaagaucgugcacaccagcacccugagcggcagcgcccagcacguggaggagugcagcugcuaccccagauaccccggcgugagaugcgugugcagagacaacuggaagggcagcaacagacccaucguggacaucaacaucaaggacuacagcaucgugagcagcuacgugugcagcggccuggugggcgacacccccagaaagaacgacagcagcagcagcagccacugccuggaccccaacaacgaggagggcggccacggcgugaagggcugggccuucgacgacggcaacgacguguggaugggcagaaccaucagcgagaagcugagaagcggcuacgagaccuucaaggugaucgagggcuggagcaaccccaacagcaagcugcagaucaacagacaggugaucguggacagaggcaacagaagcggcuacagcggcaucuucagcguggagggcaagagcugcaucaacagaugcuucuacguggagcugaucagaggcagaaaggaggagaacgaggugcuguggaccagcaacagcaucgugguguucugcggcaccagcggcaccuacggcaccggcagcuggcccgacggcgccgacaucaaccugaugcccaucuga

SEQ ID NO: 184583 - RNA, 1410 nt, Artificial Sequence; identical to SEQ ID NO: 176624
  derived and/or modified CDS sequence (opt4) from neuraminidase__InfluenzaA__AHL89189

SEQ ID NO: 184584 - RNA, 1410 nt, Artificial Sequence; identical to SEQ ID NO: 175767
  derived and/or modified CDS sequence (opt4) from neuraminidase__InfluenzaA__AHL89201

SEQ ID NO: 184585 - RNA, 1410 nt, Artificial Sequence; identical to SEQ ID NO: 176624
  derived and/or modified CDS sequence (opt4) from neuraminidase__InfluenzaA__AHL89213

SEQ ID NO: 184586 - RNA, 1410 nt, Artificial Sequence
  derived and/or modified CDS sequence (opt4) from neuraminidase__InfluenzaA__AHL89225
augaaccccaaccagaagaucaucaccaucggcagcgugagccugaccaucagcaccaucugcuucuucaugcagaucgccauccugaucaccaccgugacccugcacuucaagcaguacgaguucaaccccccccccaacaaccaggugaugcugugcgagcccaccaucaucgagagaaacaucaccgagaucguguaccugaccaacaccaccaucgagaaggagaucugccccaagcuggccgaguacagaaacuggagcaagccccagugcaacaucaccggcuucgcccccuucagcaaggacaacagcaucagacugagcgccggcggcgacaucugggugaccagagagcccuacgugagcugcgaccccgacaagugcuaccaguucgcccugggccagggcaccacccugaacaacgugcacagcaacgacaccgugcacgacagaacccccuacagaacccugcugaugaacgagcugggcgugcccuuccaccugggcaccaagcaggugugcaucgccuggagcagcagcagcugccacgacggcaaggccuggcugcacgugugcgugaccggcgacgacaagaacgccaccgccagcuucaucuacaacggcagacugguggacagcaucgugagcuggagcaaggagauccugagaacccaggagagcgagugcgugugcaucaacggcaccugcaccguggugaugaccgacggcagcgccagcggcaaggccgacaccaagauccuguucaucgaggagggcaagaucgugcacaccagcacccugagcggcagcgcccagcacguggaggagugcagcugcuaccccagauaccccggcgugagaugcgugugcagagacaacuggaagggcagcaacagacccaucguggacaucaacaucaaggacuacagcaucgugagcagcuacgugugcagcggccuggugggcgacacccccagaaagaacgacagcagcagcagcagccacugccuggaccccaacaacgaggagggcggccacggcgugaagggcugggccuucgacgacggcaacgacguguggaugggcagaaccaucagcgagaagcugagacugggcuacgagaccuucaaggugaucgagggcuggagcaaccccaacagcaagcugcagaccaacagacaggugaucguggacagaggcaacagaagcggcuacagcggcaucuucagcguggagggcaagagcugcaucaacagaugcuucuacguggagcugaucagaggcagaaaggaggagaccgaggugcuguggaccagcaacagcaucgugguguucugcggcaccagcggcaccuacggcaccggcagcuggcccgacggcgccgacaucaaccugaugcccaucuga

SEQ ID NO: 184587 - RNA, 1410 nt, Artificial Sequence; identical to SEQ ID NO: 176624
  derived and/or modified CDS sequence (opt4) from neuraminidase__InfluenzaA__AHL89237

SEQ ID NO: 184588 - RNA, 1410 nt, Artificial Sequence; identical to SEQ ID NO: 175767
  derived and/or modified CDS sequence (opt4) from neuraminidase__InfluenzaA__AHL89261

SEQ ID NO: 184589 - RNA, 1410 nt, Artificial Sequence
  derived and/or modified CDS sequence (opt4) from neuraminidase__InfluenzaA__AHL89273
augaaccccaaccagaagaucaucaccaucggcagcgugagccugaccaucagcaccaucugcuucuucaugcagaucgccauccugaucaccaccgugacccugcacuucaagcaguacgaguucaacagcccccccaacaaccaggugaugcugugcgagcccaccaucaucgagagaaacaucaccgagaucguguaccugaccaacaccaccaucgagaaggagaucugccccaagcuggccgaguacagaaacuggagcaagccccagugcaacaucaccggcuucgcccccuucagcaaggacaacagcaucagacugagcgccggcggcgacaucugggugaccagagagcccuacgugagcugcgaccccgacaagugcuaccaguucgcccugggccagggcaccacccugaacaacgugcacagcaacgacaccgugcacgacagaacccccuacagaacccugcugaugaacgagcugggcgugcccuuccaccugggcaccaagcaggugugcaucgccuggagcagcagcagcugccacgacggcaaggccuggcugcacgugugcgugaccggcgacgacaagaacgccaccgccagcuucaucuacaacggcagacugguggacagcaucgugagcuggagcaaggagauccugagaacccaggagagcgagugcgugugcaucaacggcaccugcaccguggugaugaccgacggcagcgccagcggcaaggccgacaccaagauccuguucaucgaggagggcaagaucgugcacaccagcacccugagcggcagcgcccagcacguggaggagugcagcugcuaccccagauaccccggcgugagaugcgugugcagagacaacuggaagggcagcaacagacccaucguggacaucaacaucaaggacuacagcaucgugagcagcuacgugugcagcggccuggugggcgacacccccagaaagaacgacagcagcagcagcagccacugccuggaccccaacaacgaggagggcggccacggcgugaagggcugggccuucgacgacggcaacgacguguggaugggcagaaccaucagcgagaagcugagacugggcuacgagaccuucaaggugaucgagggcuggagcaaccccaacagcaagcugcagaccaacagacaggugaucguggacagaggcaacagaagcggcuacagcggcaucuucagcguggagggcaagagcugcaucaacagaugcuucuacguggagcugaucagaggcagaaaggaggagaccgacgugcuguggaccagcaacagcaucgugguguucugcggcaccagcggcaccuacggcaccggcagcuggcccgacggcgccgacaucaaccugaugcccaucuga

SEQ ID NO: 184590 - RNA, 1410 nt, Artificial Sequence
  derived and/or modified CDS sequence (opt4) from neuraminidase__InfluenzaA__AHL89285
augaaccccaaccagaagaucaucaccaucggcagcgugagccugaccaucagcaccaucugcuucuucaugcagaucgccauccugaucaccaccgugacccugcacuucaagcaguacgaguucaacagcccccccaacaaccaggugaugcugugcgagcccaccaucaucgagagaaacaucaccgagaucguguaccugaccaacaccaccaucgagaaggagaucugccccaagcuggccgaguacagaaacuggagcaagccccagugcaacaucaccggcuucgcccccuucagcaaggacaacagcaucagacugagcgccggcggcgacaucugggugaccagagagcccuacgugagcugcgaccccgacaagugcuaccaguucgcccugggccagggcaccacccugaacaacgugcacagcaacgacaccgugcacgacagaacccccuacagaacccugcugaugaacgagcugggcgugcccuuccaccugggcaccaagcaggugugcaucgccuggagcagcagcagcugccacgacggcaaggccuggcugcacgugugcgugaccggcgacgacaagaacgccaccgccagcuucaucuacaacggcagacugguggacagcaucgugagcuggagcaaggagauccugagaacccaggagagcgagugcgugugcaucaacggcaccugcaccguggugaugaccgacggcagcgccagcggcaaggccgacaccaagauccuguucaucgaggagggcaagaucgugcacaccagcacccugagcggcagcgcccagcacguggaggagugcagcugcuaccccagauaccccggcgugagaugcgugugcagagacaacuggaagggcagcaacagacccaucguggacaucaacaucaaggacuacagcaucgugagcagcuacgugugcagcggccuggugggcgacacccccagaaagaacgacagcagcagcagcagccacugccuggaccccaacaacgaggagggcggccacggcgugaagggcugggccuucgacgacggcaacgacguguggaugggcagaaccaucagcgagaagcugagacugggcuacgagaccuucaaggugaucgagggcuggagcaaccccaacagcaagcugcagaccaacagacaggugaucguggacagaggcaacagaagcggcuacagcggcaucuucagcguggagggcaagagcugcaucaacagaugcuucuacguggagcugaucagaggcagaaaggaggagaccgacgugcuguggaccagcaacagcaucgugguguucugcagcaccagcggcaccuacggcaccggcagcuggcccgacggcgccgacaucaaccugaugcccaucuga

SEQ ID NO: 184591 - RNA, 1410 nt, Artificial Sequence; identical to SEQ ID NO: 184589
  derived and/or modified CDS sequence (opt4) from neuraminidase__InfluenzaA__AHL89297

SEQ ID NO: 184592 - RNA, 1410 nt, Artificial Sequence; identical to SEQ ID NO: 184589
  derived and/or modified CDS sequence (opt4) from neuraminidase__InfluenzaA__AHL89309

SEQ ID NO: 184593 - RNA, 1410 nt, Artificial Sequence
  derived and/or modified CDS sequence (opt4) from neuraminidase__InfluenzaA__AHL89321
augaaccccaaccagaagaucaucaccaucggcagcgugagccugaccaucagcaccaucugcuucuucaugcagaucgccauccugaucaccaccgugacccugcacuucaagcaguacgaguucaacagcccccccaacaaccaggugaugcugugcgagcccaccaucaucgagagaaacaucaccgagaucguguaccugaccaacaccaccaucgagaaggagaucugccccaagcuggccgaguacagaaacuggagcaagccccagugcgacaucaccggcuucgcccccuucagcaaggacaacagcaucagacugagcgccggcggcgacaucugggugaccagagagcccuacgugagcugcgaccccgacaagugcuaccaguucgcccugggccagggcaccacccugaacaacgugcacagcaacgacaccgugcacgacagaacccccuacagaacccugcugaugaacgagcugggcgugcccuuccaccugggcaccaagcaggugugcaucgccuggagcagcagcagcugccacgacggcaaggccuggcugcacgugugcgugaccggcgacgacaagaacgccaccgccagcuucaucuacaacggcagacugguggacagcguggugagcuggagcaaggacauccugagaacccaggagagcgagugcgugugcaucaacggcaccugcaccguggugaugaccgacggcagcgccagcggcaaggccgacaccaagauccuguucaucgaggagggcaagaucgugcacaucagcacccugagcggcagcgcccagcacguggaggagugcagcugcuaccccagauaccccggcgugagaugcgugugcagagacaacuggaagggcagcaacagacccaucguggacaucaacaucaagaacuacagcaucgugagcagcuacgugugcagcggccuggugggcgacacccccagaaagaccgacagcagcagcagcagccacugccuggaccccaacaacgaggagggcggccacggcgugaagggcugggccuucgacgacggcaacgacguguggaugggcagaaccaucagcgagaagcugagacugggcuacgagaccuucaaggugaucgagggcuggagcaaccccaacagcaagcugcagaucaacagacaggugaucguggacagaggcaacagaagcggcuacagcggcaucuucagcguggagggcaagagcugcaucaacagaugcuucuacguggagcugaucagaggcagaaaggaggagaccgaggugcuguggaccagcaacagcaucgugguguucugcggcaccagcggcaccuacggcaccggcagcuggcccgacggcgccgacaucaaccugaugcccaucuga

SEQ ID NO: 184594 - RNA, 1410 nt, Artificial Sequence
  derived and/or modified CDS sequence (opt4) from neuraminidase__InfluenzaA__AHL89333
augaaccccaaccagaagaucaucaccaucggcagcgugagccugaccaucagcaccaucugcuucuucaugcagaucgccauccugaucgccaccgugacccugcacuucaagcaguacgaguucaacagcccccccaacaaccaggugaugcugugcgagcccaccaucaucgagagaaacaucaccgagaucguguaccugaccaacaccaccaucgagaaggagaucugccccaagcuggccgaguacagaaacuggagcaagccccagugcaacaucaccggcuucgcccccuucagcaaggacaacagcaucagacugagcgccggcggcgacaucugggugaccagagagcccuacgugagcugcgaccccgacaagugcuaccaguucgcccugggccagggcaccacccugaacaacgugcacagcaacgacaccgugcacgacagaacccccuacagaacccugcugaugaacgagcugggcgugcccuuccaccugggcaccaagcaggugugcaucgccuggagcagcagcagcugccacgacggcaaggccuggcugcacgugugcgugaccggcgacgacaagaacgccaccgccagcuucaucuacaacggcagacugguggacagcaucgugagcuggagcaaggagauccugagaacccaggagagcgagugcgugugcaucaacggcaccugcgccguggugaugaccgacggcagcgccagcggcaaggccgacaccaagauccuguucaucgaggagggcaagaucgugcacaccagcacccugagcggcagcgcccagcacguggaggagugcagcugcuaccccagauaccccggcgugagaugcgugugcagagacaacuggaagggcagcaacagacccaucguggacaucaacaucaaggacuacagcaucgugagcagcuacgugugcagcggccuggugggcgacacccccagaaagaacgacagcagcagcagcagccacugccuggaccccaacaacgaggagggcggccacggcgugaagggcugggccuucgacgacggcaacgacguguggaugggcagaaccaucagcgagaagcugagacugggcuacgagaccuucaaggugaucgagggcuggagcaaccccaacagcaagcugcagaccaacagacaggugaucguggacagaggcaacagaagcggcuacagcggcaucuucagcguggagggcaagagcugcaucaacagaugcuucuacguggagcugaucagaggcagaaaggaggagaccgaggugcuguggaccagcaacagcaucgugguguucugcggcaccagcggcaccuacggcaccggcagcuggcccgacggcgccgacaucaaccugaugcccaucuga

SEQ ID NO: 184595 - RNA, 1410 nt, Artificial Sequence; identical to SEQ ID NO: 174772
  derived and/or modified CDS sequence (opt4) from neuraminidase__InfluenzaA__AHL89345

SEQ ID NO: 184596 - RNA, 1410 nt, Artificial Sequence; identical to SEQ ID NO: 175766
  derived and/or modified CDS sequence (opt4) from neuraminidase__InfluenzaA__AHL89357

SEQ ID NO: 184597 - RNA, 1410 nt, Artificial Sequence; identical to SEQ ID NO: 175767
  derived and/or modified CDS sequence (opt4) from neuraminidase__InfluenzaA__AHL89369

SEQ ID NO: 184598 - RNA, 1410 nt, Artificial Sequence
  derived and/or modified CDS sequence (opt4) from neuraminidase__InfluenzaA__AHL89381
augaaccccaaccagaagaucaucaccaucggcagcgugagccugaccaucagcaccaucugcuucuucaugcagaucgccauccugaucaccaccgugacccugcacuucaagcaguacgaguacaacagcccccccaacaaccaggugaugcugugcgagcccaccaucaucgagagaaacaucaccgagaucguguaccugaccaacaccaccaucgagaaggagaucugccccaagcuggccgaguacagaaacuggagcaagccccagugcaacaucaccggcuucgcccccuucagcaaggacaacagcaucagacugagcgccggcggcgacaucugggugaccagagagcccuacgugagcugcgaccccgacaagugcuaccaguucgcccugggccagggcaccacccugaacaacgugcacagcaacgacaccgugcacgacagaacccccuacagaacccugcugaugaacgagcugggcgugcccuuccaccugggcaccaagcaggugugcaucgccuggagcagcagcagcugccacgacggcaaggccuggcugcacgugugcgugaccggcgacgacaagaacgccaccgccagcuucaucuacaacggcagacugguggacagcaucgugagcuggagcaaggagauccugagaacccaggagagcgagugcgugugcaucaacggcaccugcaccguggugaugaccgacggcagcgccagcggcaaggccgacaccaagauccuguucaucgaggagggcaagaucgugcacaccagcacccugagcggcagcgcccagcacguggaggagugcagcugcuaccccagauaccccggcgugagaugcgugugcagagacaacuggaagggcagcaacagacccaucguggacaucaacaucaaggacuacagcaucgugagcagcuacgugugcagcggccuggugggcgacacccccagaaagaacgacagcagcagcagcagccacugccuggaccccaacaacgaggagggcggccacggcgugaagggcugggccuucgacgacggcaacgacguguggaugggcagaaccaucagcgagaagcugagacugggcuacgagaccuucaaggugaucgagggcuggagcaaccccaacagcaagcugcagaccaacagacaggugaucguggacagaggcaacagaagcggcuacagcggcaucuucagcguggagggcaagagcugcaucaacagaugcuucuacguggagcugaucagaggcagaaaggaggagaccgaggugcuguggaccagcaacagcaucgugguguucugcggcaccagcggcaccuacggcaccggcagcuggcccgacggcgccgacaucaaccugaugcccaucuga

SEQ ID NO: 184599 - RNA, 1410 nt, Artificial Sequence; identical to SEQ ID NO: 184589
  derived and/or modified CDS sequence (opt4) from neuraminidase__InfluenzaA__AHL89405

SEQ ID NO: 184600 - RNA, 1410 nt, Artificial Sequence
  derived and/or modified CDS sequence (opt4) from neuraminidase__InfluenzaA__AHL89417
augaaccccaaccagaagaucaucaccaucggcagcgugagccugaccaucagcaccaucugcuucuucaugcagaucgccauccugaucaccaccgugacccugcacuucaagcaguacgaguucaacagcccccccaacaaccaggugaugcugugcgagcccaccaucaucgagagaaacaucaccgagaucguguaccugaccaacaccaccaucgagaaggagaucugccccaagcuggccgaguacagaaacuggagcaagccccagugcgacaucaccggcuucgcccccuucagcaaggacaacagcaucagacugagcgccggcggcgacaucugggugaccagagagcccuacgugagcugcgaccccgacaagugcuaccaguucgcccugggccagggcaccacccugaacaacgugcacagcaacgacaccgugcacgacagaacccccuacagaacccugcugaugaacgagcugggcgugcccuuccaccugggcaccaagcaggugugcaucgccuggagcagcagcagcugccacgacggcaaggccuggcugcacgugugcgugaccggcgacgacaagaacgccaccgccagcuucaucuacaacggcagacugguggacagcguggugagcuggagcaaggacauccugagaacccaggagagcgagugcgugugcaucaacggcaccugcaccguggugaugaccgacggcagcgccagcggcaaggccgacaccaagauccuguucaucgaggagggcaagaucgugcacaccagcacccugagcggcagcgcccagcacguggaggagugcagcugcuaccccagauaccccggcgugagaugcgugugcagagacaacuggaagggcagcaacagacccaucguggacaucgacaucaagaacuacagcaucgugagcagcuacgugugcagcggccuggugggcgacacccccagaaagaccgacagcagcagcagcagccacugccuggaccccaacaacgaggagggcggccacggcgugaagggcugggccuucgacgacggcaacgacguguggaugggcagaaccaucagcgagaagcugagacugggcuacgagaccuucaaggugaucgagggcuggagcaaccccaacagcaagcugcagaucaacagacaggugaucguggacagaggcaacagaagcggcuacagcggcaucuucagcguggagggcaagagcugcaucaacagaugcuucuacguggagcugaucagaggcagaaaggaggagaccgaggugcuguggaccagcaacagcaucgugguguucugcggcaccagcggcaccuacggcaccggcagcuggcccgacggcgccgacaucaaccugaugcccaucuga

SEQ ID NO: 184601 - RNA, 1410 nt, Artificial Sequence; identical to SEQ ID NO: 175767
  derived and/or modified CDS sequence (opt4) from neuraminidase__InfluenzaA__AHL89429

SEQ ID NO: 184602 - RNA, 1410 nt, Artificial Sequence; identical to SEQ ID NO: 174772
  derived and/or modified CDS sequence (opt4) from neuraminidase__InfluenzaA__AHL89441

SEQ ID NO: 184603 - RNA, 1410 nt, Artificial Sequence; identical to SEQ ID NO: 174772
  derived and/or modified CDS sequence (opt4) from neuraminidase__InfluenzaA__AHL89453

SEQ ID NO: 184604 - RNA, 1410 nt, Artificial Sequence
  derived and/or modified CDS sequence (opt4) from neuraminidase__InfluenzaA__AHL89465
augaaccccaaccagaagaucaucaccaucggcagcgugagccugaccaucagcaccaucugcuucuucaugcagaucgccauccugaucaccaccgugacccugcacuucaagcaguacgaguucaacagcccccccaacaaccaggugaugcugugcgagcccaccaucaucgagagaaacaucaccgagaucguguaccugaccaacaucaccaucgagaaggagaagugccccaagcuggccgaguacagaaacuggagcaagccccagugcaacaucaccggcuucgcccccuucagcaaggacaacagcaucagacugagcgccggcggcgacaucugggugaccagagagcccuacgugagcugcgaccccgacagaugcuaccaguucgcccugggccagggcaccacccugaacaacgugcacagcaacgacaccgugcacgacagaacccccuacagaacccugcugaugaacgagcugggcgugcccuuccaccugggcaccaagcaggugugcaucgccuggagcagcagcagcugccacgacggcaaggccuggcugcacgugugcgugaccggcgacgacaagaacgccaccgccagcuucaucuacaacggcagacugguggacagcaucgugagcuggagcaaggagauccugagaacccaggagagcgagugcgugugcaucaacggcaccugcaccguggugaugaccgacggcagcgccagcggcaaggccgacaccaagauccuguucaucgaggagggcaagaucgugcacaccagcacccugagcggcagcgcccagcacguggaggagugcagcugcuaccccagauaccccggcgugagaugcgugugcagagacaacuggaagggcagcaacagacccaucguggacaucaacaucaaggacuacagcaucgugagcagcuacgugugcagcggccuggugggcgacacccccagaaagaacgacagcagcagcagcagccacugccuggaccccaacaacgaggagggcggccacggcgugaagggcugggccuucgacgacggcaacgacguguggaugggcagaaccaucagcgagaagcugagacugggcuacgagaccuucaaggugaucgagggcuggagcaaccccaacagcaagcugcagaccaacagacaggugaucguggacagaggcaacagaagcggcuacagcggcaucuucagcguggagggcaagagcugcaucaacagaugcuucuacguggagcugaucagaggcagaaaggaggagaccgaggugcuguggaccagcaacagcaucgugguguucugcggcaccagcggcaccuacggcaccggcagcuggcccgacggcgccgacaucaaccugaugcccaucuga

SEQ ID NO: 184605 - RNA, 1410 nt, Artificial Sequence; identical to SEQ ID NO: 184579
  derived and/or modified CDS sequence (opt4) from neuraminidase__InfluenzaA__AHL89477

SEQ ID NO: 184606 - RNA, 1410 nt, Artificial Sequence
  derived and/or modified CDS sequence (opt4) from neuraminidase__InfluenzaA__AHL89489
augaaccccaaccagaagaucaucaccaucggcagcgugagccugaccaucagcaccaucugcuucuucaugcagaucgccauccugaucaccaccgugacccugcacuucaagcaguacgaguucaacagcccccccaacaaccaggugaugcugugcgagcccaccaucaucgagagaaacaucaccgagaucguguaccugaccaacaccaccaucgagaaggagaucugccccaagcuggccgaguacagaaacuggagcaagccccagugcagcaucaccggcuucgcccccuucagcaaggacaacagcaucagacugagcgccggcggcgacaucugggugaccagagagcccuacgugagcugcgaccccgacaagugcuaccaguucgcccugggccagggcaccacccugaacaacgugcacagcaacgacaccgugcacgacagaacccccuacagaacccugcugaugaacgagcugggcgugcccuuccaccugggcaccaagcaggugugcaucgccuggagcagcagcagcugccacgacggcaaggccuggcugcacgugugcgugaccggcgacgacaagaacgccaccgccagcuucaucuacaacggcagacugguggacagcaucgugagcuggagcaaggagauccugagaacccaggagagcgagugcgugugcaucaacggcaccugcaccguggugaugaccgacggcagcgccagcggcaaggccgacaccaagauccuguucaucgaggagggcaagaucgugcacaccagcacccugagcggcagcgcccagcacguggaggagugcagcugcuaccccagauaccccggcgugagaugcgugugcagagacaacuggaagggcagcaacagacccaucguggacaucaacaucaaggacuacagcaucgugagcagcuacgugugcagcggccuggugggcgacacccccagaaagaacgacagaagcagcagcagccacugccuggaccccaacaacgaggagggcggccacggcgugaagggcugggccuucgacgacggcaacgacguguggaugggcagaaccaucagcgagaagagcagaagcggcuacgagaccuucaaggugaucgagggcuggagcaacccccacagcaagcugcagaucaacagacaggugaucguggacagaggcaacagaagcggcuacagcggcaucuucagcguggagggcaagagcugcaucaacagaugcuucuacguggagcugaucagaggcagaaaggaggagaccgaggugcuguggaccagcaacagcaucgugguguucugcggcaccagcggcaccuacggcaccggcagcuggcccgacggcgccgacaucaaccugaugcccaucuga

SEQ ID NO: 184607 - RNA, 1410 nt, Artificial Sequence; identical to SEQ ID NO: 175767
  derived and/or modified CDS sequence (opt4) from neuraminidase__InfluenzaA__AHL89501

SEQ ID NO: 184608 - RNA, 1410 nt, Artificial Sequence; identical to SEQ ID NO: 175767
  derived and/or modified CDS sequence (opt4) from neuraminidase__InfluenzaA__AHL89513

SEQ ID NO: 184609 - RNA, 1410 nt, Artificial Sequence; identical to SEQ ID NO: 175767
  derived and/or modified CDS sequence (opt4) from neuraminidase__InfluenzaA__AHL89525

SEQ ID NO: 184610 - RNA, 1410 nt, Artificial Sequence; identical to SEQ ID NO: 175767
  derived and/or modified CDS sequence (opt4) from neuraminidase__InfluenzaA__AHL89537

SEQ ID NO: 184611 - RNA, 1413 nt, Artificial Sequence
  derived and/or modified CDS sequence (opt4) from neuraminidase__InfluenzaA__AHL89549
augaaccccaaccagaagaucaucaccaucggcagcaucagcaucgccaucggcaucaucagccugaugcugcagaucggcaacaucaucagcaucugggccagccacagcauccagaccggcagccagaaccacaccggcaucugcaaccagagaaucaucaccuacgagaacagcaccugggugaaccacaccuacgugaacaucaacaacaccaacgugguggccggcaaggacaagaccagcgugacccuggccggcaacagcagccugugcagcaucagcggcugggccaucuacaccaaggacaacagcaucagaaucggcagcaagggcgacguguucgugaucagagagcccuucaucagcugcagccaccuggagugcagaaccuucuuccugacccagggcgcccugcugaacgacaagcacagcaacggcaccgugaaggacagaagccccuacagagcccugaugagcugcccccugggcgaggcccccagccccuacaacagcaaguucgagagcguggccuggagcgccagcgccugccacgacggcaugggcuggcugaccaucggcaucagcggccccgacaacggcgccguggccgugcugaaguacaacggcaucaucaccgagaccaucaagagcuggaagaagagaauccugagaacccaggagagcgagugcgugugcgugaacggcagcugcuucaccaucaugaccgacggccccagcaacggcgccgccagcuacaagaucuucaagaucgagaagggcaaggugaccaagagcaucgagcugaacgcccccaacuuccacuacgaggagugcagcugcuaccccgacaccggcaccgugaugugcgugugcagagacaacuggcacggcagcaacagacccugggugagcuucaaccagcaccuggacuaccagaucggcuacaucugcagcggcguguucggcgacaaccccagacccaaggacggcaagggcagcugcaaccccgugaccguggacggcgccgacggcgugaagggcuucagcuacaaguacggcaacggcguguggaucggcagaaccaagagcaacagacugagaaagggcuucgagaugaucugggaccccaacggcuggaccgacaccgacagcgacuucagcgugaagcaggacgugguggccaucaccgacuggagcggcuacagcggcagcuucgugcagcaccccgagcugaccggccuggacugcaucagacccugcuucuggguggagcuggugagaggccugcccagagagaacaccaccaucuggaccagcggcagcagcaucagcuucugcggcguggacagcgacaccgccaacuggagcuggcccgacggcgccgagcugcccuucaccaucgacaaguga

SEQ ID NO: 184612 - RNA, 1413 nt, Artificial Sequence; identical to SEQ ID NO: 176090
  derived and/or modified CDS sequence (opt4) from neuraminidase__InfluenzaA__AHL89561

SEQ ID NO: 184613 - RNA, 1413 nt, Artificial Sequence; identical to SEQ ID NO: 176090
  derived and/or modified CDS sequence (opt4) from neuraminidase__InfluenzaA__AHL89573

SEQ ID NO: 184614 - RNA, 1413 nt, Artificial Sequence; identical to SEQ ID NO: 176125
  derived and/or modified CDS sequence (opt4) from neuraminidase__InfluenzaA__AHL89585

SEQ ID NO: 184615 - RNA, 1413 nt, Artificial Sequence
  derived and/or modified CDS sequence (opt4) from neuraminidase__InfluenzaA__AHL89597
augaaccccaaccagaagaucaucaccaucggcagcaucagcaucgccaucggcaucaucagccugaugcugcagaucggcaacaucaucagcaucugggccagccacagcauccagaccggcagccagaaccacaccggcaucugcaaccagagaaucaucaccuacgagaacagcaccugggugaaccacaccuacgugaacaucaacaacaccaacgugguggccggcaaggacaagaccagcgugacccuggccggcaacagcagccugugcagcaucagcggcugggccaucuacaccaaggacaacagcaucagaaucggcagcaagggcgacguguucgugaucagagagcccuucaucagcugcagccaccuggagugcagaaccuucuuccugacccagggcgcccugcugaacgacaagcacagcaacggcaccgugagagacagaagccccuacagagcccugaugagcugcccccugggcgaggcccccagccccuacaacagcaaguucgagagcguggccuggagcgccagcgccugccacgacggcaugggcuggcugaccaucggcaucagcggccccgacaacggcgccguggccgugcugaaguacaacggcaucaucaccgagaccaucaagagcuggaagaagagaauccugagaacccaggagagcgagugcgugugcgugaacggcagcugcuucaccaucaugaccgacggccccagcaacggcgccgccagcuacaagaucuucaagaucgagaagggcaaggugaccaagagcaucgagcugaacgcccccaacuuccacuacgaggagugcagcugcuaccccgacaccggcaccgugaugugcgugugcagagacaacuggcacggcagcaacagacccugggugagcuucaaccagaaccuggacuaccaggugggcuacaucugcagcggcguguucggcgacaaccccagacccaaggacggcaagggcagcugcaaccccaugaccguggacggcgccgacggcgugaagggcuucagcuacaaguacggcaacggcguguggaucggcagaaccaagagcaacaagcugagaaagggcuucgagaugaucugggaccccaacggcuggaccgacaccgacagcgacuucagcgugaagcaggacgugguggccaucaccgacuggagcggcuacagcggcagcuucgugcagcaccccgagcugaccggccuggacugcaucagacccugcuucuggguggagcuggugagaggccugcccagagagaacaccaccaucuggaccagcggcagcagcaucagcuucugcggcguggacagcgacaccgccaacuggagcuggcccgacggcgccgagcugcccuucaccaucgacaaguga

SEQ ID NO: 184616 - RNA, 1413 nt, Artificial Sequence; identical to SEQ ID NO: 176125
  derived and/or modified CDS sequence (opt4) from neuraminidase__InfluenzaA__AHL89609

SEQ ID NO: 184617 - RNA, 1413 nt, Artificial Sequence
  derived and/or modified CDS sequence (opt4) from neuraminidase__InfluenzaA__AHL89621
augaaccccaaccagaagaucaucaccaucggcagcaucagcaucgccaucggcaucaucagccugaugcugcagaucggcaacaucaucagcaucugggccagccacagcauccagaccggcagccagaaccacaccggcaucugcaaccagagaaucaucaccuacgagaacagcaccugggugaaccacaccuacgugagcaucaacaacaccaacgugguggccggcaaggacaagaccagcgugacccuggccggcaacagcagccugugcagcaucagcggcugggccaucuacaccaaggacaacagcaucagaaucggcagcaagggcgacguguucgugaucagagagcccuucaucagcugcagccaccuggagugcagaaccuucuuccugacccagggcgcccugcugaacgacaagcacagcaacggcaccgugaaggacagaagccccuacagagcccugaugagcugcccccugggcgaggcccccagccccuacaacagcaaguucgagagcguggccuggagcgccagcgccugccacgacggcaugggcuggcugaccaucggcaucagcggccccgacaacggcgccguggccgugcugaaguacaacggcaucaucaccgagaccaucaagagcuggaagaagagaauccugagaacccaggagagcgagugcgugugcgugaacggcagcugcuucaccaucaugaccgacggccccagcaacggcgccgccagcuacaagaucuucaagaucgagaagggcaaggugaccaagagcaucgagcugaacgcccccaacuuccacuacgaggagugcagcugcuaccccgacaccggcaccgugaugugcgugugcagagacaacuggcacggcagcaacagacccugggugagcuucaaccagaaccuggacuaccagaucggcuacaucugcagcggcguguucggcgacaaccccagacccaaggacggcaagggcagcugcaaccccgugaccguggacggcgccgacggcgugaagggcuucagcuacaaguacggcaacggcguguggaucggcagaaccaagagcaacagacacagaaagggcuucgagaugaucugggaccccaacggcuggaccgacaccgacagcgacuucagcgugaagcaggacgugguggccaucaccgacuggagcggcuacagcggcagcuucgugcagcaccccgagcugaccggccuggacugcaucagacccugcuucuggguggagcuggugagaggccugcccagagagaacaccaccaucuggaccagcggcagcagcaucagcuucugcggcguggacagcgacaccgccaacuggagcuggcccgacggcgccgagcugcccuucaccaucgacaaguga

SEQ ID NO: 184618 - RNA, 1413 nt, Artificial Sequence; identical to SEQ ID NO: 176116
  derived and/or modified CDS sequence (opt4) from neuraminidase__InfluenzaA__AHL89633

SEQ ID NO: 184619 - RNA, 1413 nt, Artificial Sequence; identical to SEQ ID NO: 176125
  derived and/or modified CDS sequence (opt4) from neuraminidase__InfluenzaA__AHL89645

SEQ ID NO: 184620 - RNA, 1413 nt, Artificial Sequence; identical to SEQ ID NO: 176090
  derived and/or modified CDS sequence (opt4) from neuraminidase__InfluenzaA__AHL89657

SEQ ID NO: 184621 - RNA, 1413 nt, Artificial Sequence
  derived and/or modified CDS sequence (opt4) from neuraminidase__InfluenzaA__AHL89669
augaaccccaaccagaagaucaucaccaucggcagcaucagcaucgccaucggcaucaucagccugaugcugcagaucggcaacaucaucagcaucugggccagccacagcauccagaccggcagccagaaccacaccggcaucugcaaccagagaaucaucaccuacgagaacagcaccugggugaaccacaccuacgugaacaucaacaacaccaacgugguggccggcaaggacaagaccagcgugacccuggccggcaacagcagccugugcagcaucagcggcugggccaucuacaccaaggacaacagcaucagaaucggcagcaagggcgacguguucgugaucagagagcccuucaucagcugcagccaccuggagugcagaaccuucuuccugacccagggcgcccugcugaacgacaagcacagcaacggcaccgugaaggacagaagccccuacagagcccugaugagcugcccccugggcgaggcccccagccccuacaacagcaaguucgagagcguggccuggagcgccagcgccugccacgacggcaugggcuggcugaccaucggcaucagcggccccgacaacggcgccguggccgugcugaaguacaacggcaucaucaccgagaccaucaagagcuggaagaagagaauccugagaacccaggagagcgagugcgugugcgugaacggcagcugcuucaccaucaugaccgacggccccagcaacggcgccgccagcuacaagaucuucaagaucgagaagggcaaggugaccaagagcaucgagcugaacgcccccaacuuccacuacgaggagugcagcugcuaccccgacaccggcaccgugaugugcgugugcagagacaacuggcacggcagcaacagacccugggugagcuucaaccagaaccuggacuaccaggugggcuacaucugcagcggcguguucggcgacaaccccagacccaaggacggcaagggcagcugcaaccccaugaccguggacggcgccgacggcgugaagggcuucagcuacaaguacggcaacggcguguggaucggcagaaccaagagcaacgagcugagaaagggcuucgagaugaucugggaccccaacggcuggaccgacaccgacagcgacuucagcgugaagcaggacgugguggccaucaccgacuggagcggcuacagcggcagcuucgugcagcaccccgagcugaccggccuggacugcaucagacccugcuucuggguggagcuggugagaggccugcccagagagaacaccaccaucuggaccagcggcagcagcaucagcuucugcggcguggacagcgacaccgccaacuggagcuggcccgacggcgccgagcugcccuucaccaucgacaaguga

SEQ ID NO: 184622 - RNA, 1413 nt, Artificial Sequence
  derived and/or modified CDS sequence (opt4) from neuraminidase__InfluenzaA__AHL89681
augaaccccaaccagaagaucaucaccaucggcagcaucagcaucgccaucggcaucaucagccugaugcugcagaucggcaacaucaucagcaucugggccagccacagcauccagaccggcagccagaaccacaccggcaucugcaaccagagaaucaucaccuacgagaacagcaccugggugaaccacaccuacgugaacaucaacaacaccaacgugguggccggcaaggacaagaccagcgugacccuggccggcaacagcagccugugcagcaucagcggcugggccaucuacaccaaggacaacagcaucagaaucggcagcaagggcgacguguucgugaucagagagcccuucaucagcugcagccaccuggagugcagaaccuucuuccugacccagggcgcccugcugaacgacaagcacagcaacggcaccgugaaggacagaagccccuacagagcccugaugagcugcccccugggcgaggcccccagccccuacaacagcaaguucgagagcguggccuggagcgccagcgccugccacgacggcaugggcuggcugaccaucggcaucagcggccccgacaacggcgccguggccgugcugaaguacaacggcaucaucaccgagaccaucaagagcuggaagaagagaauccugagaacccaggagagcgagugcgugugcgugaacggcagcugcuucaccaucaugaccgacggccccagcaacggcgccgccagcuacaagaucuucaagaucgagaagggcaagaucaccaagagcaucgagcugaacgcccccaacuuccacuacgaggagugcagcugcuaccccgacaccggcaccgugaugugcgugugcagagacaacuggcacggcagcaacagacccugggugagcuucaaccagaaccuggacuaccaggugggcuacaucugcagcggcguguucggcgacaaccccagacccaaggacggcaagggcagcugcaaccccaugaccguggacggcgccgacggcgugaagggcuucagcuacaaguacggcaacggcguguggaucggcagaaccaagagcaacaagcugagaaagggcuucgagaugaucugggaccccaacggcuggaccgacaccgacagcgacuucagcgugaagcaggacgugguggccaucaccgacuggagcggcuacagcggcagcuucgugcagcaccccgagcugaccggccuggacugcaucagacccugcuucuggguggagcuggugagaggccugcccagagagaacgccaccaucuggaccagcggcagcagcaucagcuucugcggcguggacagcgacaccgccaacuggagcuggcccgacggcgccgagcugcccuucaccaucgacaaguga

SEQ ID NO: 184623 - RNA, 1413 nt, Artificial Sequence
  derived and/or modified CDS sequence (opt4) from neuraminidase__InfluenzaA__AHL89693
augaaccccaaccagaagaucaucaccaucggcagcaucagcaucgccaucggcaucaucagccugaugcugcagaucggcaacaucaucagcaucugggccagccacagcauccagaccggcagccagaaccacaccggcaucugcaaccagagaaucaucaccuacgagaacagcaccugggugaaccacaccuacgugaacaucaacaacaccaacgugguggccggcaaggacaagaccagcgugacccuggccggcaacagcagccugugcagcaucagcggcugggccaucuacaccaaggacaacagcaucagaaucggcagcaagggcgacguguucgugaucagagagcccuucaucagcugcagccaccuggagugcagaaccuucuuccugacccagggcgcccugcugaacgacaagcacagcaacggcaccgugaaggacagaagccccuacagagcccugaugagcugcccccugggcgaggcccccagccccuacaacagcaaguucgagagcguggccuggagcgccagcgccugccacgacggcaugggcuggcugaccaucggcaucagcggccccgacaacggcgccguggccgugcugaaguacaagggcaucaucaccggcaccaucaagagcuggagaaagcagauccugagaacccaggagagcgagugcgugugcaugaacggcagcugcuucaccaucaugaccgacggccccagcaacggcgccgccagcuacaagaucuucaagaucgagaagggcaaggugaccaagagcaucgagcugaacgcccccaacuuccacuacgaggagugcagcugcuaccccgacaccggcaucgugaugugcgugugcagagacaacuggcacggcagcaacagacccugggugagcuucaaccagaaccuggacuaccagaucggcuacaucugcagcggcguguucggcgacaaccccagacccaaggacggcgagggcagcugcaaccccgugaccguggacggcgccgacggcgugaagggcuucagcuacaaguacgacgacggcguguggaucggcagaaccaagagcaacagacugagaaagggcuucgagaugaucugggaccccaacggcuggaccaacaccgacagcgacuucagcgugaagcaggacgugguggccaucaccgacuggagcggcuacagcggcagcuucgugcagcaccccgagcugaccggccuggacugcaucagacccugcuucuggguggagcuggugagaggccugcccagagagaacaccaccaucuggaccagcggcagcagcaucagcuucugcggcgugaacagcgacaccgccaacuggagcuggcccgacggcgccgagcugcccuucaccaucgacaaguga

SEQ ID NO: 184624 - RNA, 1413 nt, Artificial Sequence
  derived and/or modified CDS sequence (opt4) from neuraminidase__InfluenzaA__AHL89705
augaaccccaaccagaagaucaucaccaucggcagcaucagcaucgccaucggcaucaucagccugaugcugcagaucggcaacaucaucagcaucugggccagccacagcauccagaacggcagccagaaccacaccggcaucugcaaccagagaaucaucaccuacgagaacagcaccugggugaaccacaccuacgugagcaucaacaacaccaacgugguggccggcaaggacaagaccagcgugacccuggccggcaacagcagccugugcagcaucagcggcugggccaucuacaccaaggacaacagcaucagaaucggcagcaagggcgacguguucgugaucagagagcccuucaucagcugcagccaccuggagugcagaaccuucuuccugacccagggcgcccugcugaacgacaagcacagcaacggcaccgugaaggacagaagccccuacagagcccugaugagcugcccccugggcgaggcccccagccccuacaacagcaaguucgagagcguggccuggagcgccagcgccugccacgacggcaugggcuggcugaccaucggcaucagcggccccgacaacggcgccguggccgugcugaaguacaacggcaucaucaccgagaccaucaagagcuggaagaagagaauccugagaacccaggagagcgagugcgugugcgugaacggcagcugcuucaccaucaugaccgacggccccagcaacggcgccgccagcuacaagaucuucaagaucgagaagggcaaggugaccaagagcaucgagcugaacgcccccaacuuccacuacgaggagugcagcugcuaccccgacaccggcaccgugaugugcgugugcagagacaacuggcacggcagcaacagacccugggugagcuucaaccagaaccuggacuaccagaucggcuacaucugcagcggcguguucggcgacaaccccagacccaaggacggcaagggcagcugcaaccccgugaccguggacggcgccgacggcgugaagggcuucagcuacaaguacggcaacggcguguggaucggcagaaccaagagcaacagacugagaaagggcuucgagaugaucugggaccccaacggcuggaccgacaccgacagcgacuucagcgugaagcaggacgugguggccaucaccgacuggagcggcuacagcggcagcuucgugcagcaccccgagcugaccggccuggacugcaucagacccugcuucuggguggagcuggugagaggccugcccagagagaacaccaccaucuggaccagcggcagcagcaucagcuucugcggcguggacagcgacaccgccaacuggagcuggcccgacggcgccgagcugcccuucaccaucgacaaguga

SEQ ID NO: 184625 - RNA, 1413 nt, Artificial Sequence; identical to SEQ ID NO: 176090
  derived and/or modified CDS sequence (opt4) from neuraminidase__InfluenzaA__AHL89717

SEQ ID NO: 184626 - RNA, 1413 nt, Artificial Sequence; identical to SEQ ID NO: 176090
  derived and/or modified CDS sequence (opt4) from neuraminidase__InfluenzaA__AHL89729

SEQ ID NO: 184627 - RNA, 1413 nt, Artificial Sequence
  derived and/or modified CDS sequence (opt4) from neuraminidase__InfluenzaA__AHL89753
augaaccccaaccagaagaucaucaccaucggcagcaucagcaucgccaucggcaucaucagccugaugcugcagaucggcaacaucaucagcaucugggccagccacagcauccagaccggcagccagaaccacaccggcaucugcaaccagagaaucaucaccuacgagaacagcaccugggugaaccacaccuacgugagcaucaacaacaccaacgugguggccggcaacgacaagaccagcgugacccuggccggcaacagcagccugugcagcaucagcggcugggccaucuacaccaaggacaacagcaucagaaucggcagcaagggcgacguguucgugaucagagagcccuucaucagcugcagccaccuggagugcagaaccuucuuccugacccagggcgcccugcugaacgacaagcacagcaacggcaccgugaaggacagaagccccuacagagcccugaugagcugcccccugggcgaggcccccagccccuacaacagcaaguucgagagcguggccuggagcgccagcgccugccacgacggcaugggcuggcugaccaucggcaucagcggccccgacaacggcgccguggccgugcugaaguacaacggcaucaucaccgagaccaucaagagcuggaagaagagaauccugagaacccaggagagcgagugcgugugcgugaacggcagcugcuucaccaucaugaccgacggccccagcaacggcgccgccagcuacaagaucuucaagaucgagaagggcaaggugaccaagagcaucgagcugaacgcccccaacuuccacuacgaggagugcagcugcuaccccgacaccggcaccgugaugugcgugugcagagacaacuggcacggcagcaacagacccugggugagcuucaaccagaaccuggacuaccagaucggcuacaucugcagcggcguguucggcgacaaccccagacccaaggacggcaagggcagcugcaaccccgugaccguggacggcgccgacggcgugaagggcuucagcuacaaguacggcaacggcguguggaucggcagaaccaagagcaacagacugagaaagggcuucgagaugaucugggaccccaacggcuggaccgacaccgacagcgacuucagcgugaagcaggacgugguggccaucaccgacuggagcggcuacagcggcagcuucgugcagcaccccgagcugaccggccuggacugcaucagacccugcuucuggguggagcuggugagaggccugcccagagagaacaccaccaucuggaccagcggcagcagcaucagcuucugcggcguggacagcgacaccgccaacuggagcuggcccgacggcgccgagcugcccuucaccaucgacaaguga

SEQ ID NO: 184628 - RNA, 1413 nt, Artificial Sequence; identical to SEQ ID NO: 176090
  derived and/or modified CDS sequence (opt4) from neuraminidase__InfluenzaA__AHL89765

SEQ ID NO: 184629 - RNA, 1413 nt, Artificial Sequence; identical to SEQ ID NO: 176131
  derived and/or modified CDS sequence (opt4) from neuraminidase__InfluenzaA__AHL89777

SEQ ID NO: 184630 - RNA, 1413 nt, Artificial Sequence; identical to SEQ ID NO: 176090
  derived and/or modified CDS sequence (opt4) from neuraminidase__InfluenzaA__AHL89789

SEQ ID NO: 184631 - RNA, 1413 nt, Artificial Sequence
  derived and/or modified CDS sequence (opt4) from neuraminidase__InfluenzaA__AHL89801
augaaccccaaccagaagaucaucaccaucggcagcaucagcaucgccaucggcaucaucagccugaugcugcagaucggcaacaucaucagcaucugggccagccacagcauccagaccggcagccagaaccacaccggcaucugcaaccagagaaucaucaccuacgagaacagcaccugggugaaccacaccuacgugaacaucaacaacaccaacgugguggccggcaaggacaagaccagcguggcccuggccggcaacagcagccugugcagcaucagcggcugggccaucuacaccaaggacaacagcaucagaaucggcagcaagggcgacguguucgugaucagagagcccuucaucagcugcagccaccuggagugcagaaccuucuuccugacccagggcgcccugcugaacgacaagcacagcaacggcaccgugaaggacagaagccccuacagagcccugaugagcugcccccugggcgaggcccccagccccuacaacagcaaguucgagagcguggccuggagcgccagcgccugccacgacggcaugggcuggcugaccaucggcaucagcggccccgacaacggcgccguggccgugcugaaguacaacggcaucaucaccgagaccaucaagagcuggaagaagagaauccugagaacccaggagagcgagugcgugugcgugaacggcagcugcuucaccaucaugaccgacggccccagcaacggcgccgccagcuacaagaucuucaagaucgagaagggcaaggugaccaagagcaucgagcugaacgcccccaacuuccacuacgaggagugcagcugcuaccccgacaccggcaccgugaugugcgugugcagagacaacuggcacggcagcaacagacccugggugagcuucaaccagaaccuggacuaccagaucggcuacaucugcagcggcguguucggcgacaaccccagacccaaggacggcaagggcagcugcaaccccgugaccguggacggcgccgacggcgugaagggcuucagcuacaaguacggcaacggcguguggaucggcagaaccaagagcaacagacugagaaagggcuucgagaugaucugggaccccaacggcuggaccaacaccgacagcgacuucagcgugaagcaggacgugguggccaucaccgacuggagcggcuacagcggcagcuucgugcagcaccccgagcugaccggccuggacugcaucagacccugcuucuggguggagcuggugagaggccugcccagagagaacaccaccaucuggaccagcggcagcagcaucagcuucugcggcguggacagcgacaccgccaacuggagcuggcccgacggcgccgagcugcccuucaccaucgacaaguga

SEQ ID NO: 184632 - RNA, 1413 nt, Artificial Sequence
  derived and/or modified CDS sequence (opt4) from neuraminidase__InfluenzaA__AHL89813
augaaccccaaccagaagaucaucaccaucggcagcaucagcaucgccaucggcaucaucagccugaugcugcagaucggcaacaucaucagcaucugggccagccacagcauccagaccggcagccagaaccacaccggcaucugcaaccagagaaucaucaccuacgagaacagcaccugggugaaccacaccuacgugaacaucaacaacaccaacgugguggccggcaaggacaagaccagcgugacccuggccggcaacagcagccugugcagcaucagcggcugggccaucuacaccaaggacaacagcaucagaaucggcagcaagggcgacguguucgugaucagagagcccuucaucagcugcagccaccuggagugcagaaccuucuuccugacccagggcgcccugcugaacgacaagcacagcaacggcaccgugaaggacagaagccccuacagagcccugaugagcugcccccugggcgaggcccccagccccuacaacagcaaguucgagagcguggccuggagcgccagcgccugccacgacggcaugggcuggcugaccaucggcaucagcggccccgacaacggcgccguggccgugcugaaguacaacggcaucaucaccgagaccaucaagagcuggaagaagagaauccugagaacccaggagagcgagugcgugugcgugaacggcagcugcuucaccaucaugaccgacggccccagcaacggcgccgccagcuacaagaucuucaagaucgagaagggcaaggugaccaagagcaucgagcugaacgcccccaacuuccacuacgaggagugcagcugcuaccccgacaccggcaccgugaugugcgugugcagagacaacuggcacggcagcaacagacccugggugagcuucaaccagaaccuggacuaccaggugggcuacaucugcagcggcguguucggcgacaaccccagacccaaggacggcaagggcagcugcaaccccaugaccgccgacggcgccgacggcgugaagggcuucagcuacaaguacggcaacggcguguggaucggcagaaccaagagcaacaagcugagaaagggcuucgagaugaucugggaccccaacggcuggaccgacaccgacagcgacuucagcgugaagcaggacgugguggccaucaccgacuggagcggcuacagcggcagcuucgugcagcaccccgagcugaccggccuggacugcaucagacccugcuucuggguggagcuggugagaggccugcccagagagaacgccaccaucuggaccagcggcagcagcaucagcuucugcggcguggacagcgacaccgccaacuggagcuggcccgacggcgccgagcugcccuucaccaucgacaaguga

SEQ ID NO: 184633 - RNA, 1413 nt, Artificial Sequence; identical to SEQ ID NO: 176131
  derived and/or modified CDS sequence (opt4) from neuraminidase__InfluenzaA__AHL89825

SEQ ID NO: 184634 - RNA, 1413 nt, Artificial Sequence; identical to SEQ ID NO: 176090
  derived and/or modified CDS sequence (opt4) from neuraminidase__InfluenzaA__AHL89837

SEQ ID NO: 184635 - RNA, 1413 nt, Artificial Sequence
  derived and/or modified CDS sequence (opt4) from neuraminidase__InfluenzaA__AHL89849
augaaccccaaccagaagaucaucaccaucggcagcaucagcaucgccaucggcaucaucagccugaugcugcagaucggcaacaucaucagcaucugggccagccacagcauccagaccggcagccagaaccacaccggcaucugcaaccagagaaucaucaccuacgagaacagcaccugggugaaccacaccuacguguacaucaacaacaccaacgugguggccggcaaggacaagaccagcgugacccuggccggcaacagcagccugugcagcaucagcggcugggccaucuacaccaaggacaacagcaucagaaucggcagcaagggcgacguguucgugaucagagagcccuucaucagcugcagccaccuggagugcagaaccuucuuccugacccagggcgcccugcugaacgacaagcacagcaacggcaccgugaaggacagaagccccuacagagcccugaugagcugcccccugggcgaggcccccagccccuacaacagcaaguucgagagcguggccuggagcgccagcgccugccacgacggcaugggcuggcugaccaucggcaucagcggccccgacaacggcgccguggccgugcugaaguacaacggcaucaucaccgagaccaucaagagcuggaagaagagaauccugagaacccaggagagcgagugcgugugcgugaacggcagcugcuucaccaucaugaccgacggccccagcaacggcgccgccagcuacaagaucuucaagaucgagaagggcauggugaccaagagcaucgagcugaacgcccccaacuuccacuacgaggagugcagcugcuaccccgacaccggcaccgugaugugcgugugcagagacaacuggcacggcagcaacagacccugggugagcuucaaccagaaccuggacuaccagaucggcuacaucugcagcggcguguucggcgacaaccccagacccaaggacggcaagggcagcugcaaccccgugaccguggacggcgccgacggcgugaagggcuucagcuacaaguacggcaacggcguguggaucggcagaaccaagagcaacagacugagaaagggcuucgagaugaucugggaccccaacggcuggaccaacaccgacagcgacuucagcgugaagcaggacgugguggccaucaccgacuggagcggcuacagcggcagcuucgugcagcaccccgagcugaccggccuggacugcaucagacccugcuucuggguggagcuggugagaggccugcccagagagaacaccaccaucuggaccagcggcagcagcaucagcuucugcggcguggacagcgacaccgccaacuggagcuggcccgacggcgccgagcugcccuucaccaucgacaaguga

SEQ ID NO: 184636 - RNA, 1410 nt, Artificial Sequence; identical to SEQ ID NO: 176126
  derived and/or modified CDS sequence (opt4) from neuraminidase__InfluenzaA__AHL89861

SEQ ID NO: 184637 - RNA, 1410 nt, Artificial Sequence
  derived and/or modified CDS sequence (opt4) from neuraminidase__InfluenzaA__AHL89873
augaaccccaaccagaagaucaucaccaucggcagcgugagccugaccaucagcaccaucugcuucuucaugcagaccgccauccugaucaccaccgugacccugcacuucaagcaguacgaguucaacagcccccccaacaaccaggugaugcugugcgagcccaccaucaucgagagaaacaucaccgagaucguguaccugaccaacaccaccaucgagaaggagaucugccccaagcuggccgaguacagaaacuggagcaagccccagugcgacaucaccggcuucgcccccuucagcaaggacaacagcaucagacugagcgccggcggcgacaucugggugaccagagagcccuacgugagcugcgaccccgacaagugcuaccaguucgcccugggccagggcaccacccugaacaacgugcacagcaacgacaccgugagagacagaacccccuacagaacccugcugaugaacgagcugggcgugcccuuccaccugggcaccaagcaggugugcaucgccuggagcagcagcagcugccacgacggcaaggccuggcugcacgugugcaucaccggcgacgacaagaacgccaccgccagcuucaucuacaacggcagacugguggacagcaucgugagcuggagcaaggagauccugagaacccaggagagcgagugcgugugcaucaacggcaccugcaccguggugaugaccgacggcagcgccagcggcaaggccgacaccaagauccuguucaucgaggagggcaagaucgugcacaccagcacccugagcggcagcgcccagcacguggaggagugcagcugcuaccccagauaccccggcgugagaugcgugugcagagacaacuggaagggcagcaacagacccaucguggacaucaacaucaaggaccacagcaucgugagcagcuacgugugcagcggccuggugggcgacacccccagaaagaacgacagcagcagcagcagccacugccuggaccccaacaacgaggagggcggccacggcgugaagggcugggccuucgacgacggcaacgacguguggaugggcagaaccaucagcgagaagagcagacugggcuacgagaccuucaaggugaucgagggcuggagcaaccccaagagcaagcugcagaucaacagacaggugaucguggacggcggcaacagaagcggcuacagcggcaucuucagcguggagggcaagagcugcaucaacagaugcuucuacguggagcugaucagaggcagaaaggaggagaccgaggugcuguggaccagcaacagcaucgugguguucugcggcaccagcggcaccuacggcaccggcagcuggcccgacggcgccgacaucaaccugaugcccaucuga

SEQ ID NO: 184638 - RNA, 1410 nt, Artificial Sequence; identical to SEQ ID NO: 176803
  derived and/or modified CDS sequence (opt4) from neuraminidase__InfluenzaA__AHL89885

SEQ ID NO: 184639 - RNA, 1410 nt, Artificial Sequence
  derived and/or modified CDS sequence (opt4) from neuraminidase__InfluenzaA__AHL89897
augaaccccaaccagaagaucaucaccaucggcagcgugagccugaccaucagcaccaucugcuucuucaugcagaucgccauccugaucaccaccgugacccugcacuucaagcaguacgaguucaacagcccccccaacaaccaggugaugcugugcgagcccaccaucaucgagagaaacaucaccgagaucguguaccugaccaacaccaccaucgagaaggagaucugccccaagcuggccgaguacagaaacuggagcaagccccagugcgacaucaccggcuucgcccccuucagcaaggacaacagcaucagacugagcgccggcggcgacaucugggugaccagagagcccuacgugagcugcgaccccgacaagugcuaccaguucgcccugggccagggcaccacccugaacaacgugcacagcaacgacaccgugagagacagaacccccuacagaacccugcugaugaacgagcugggcgugcccuuccaccugggcaccaagcaggugugcaucgccuggagcagcagcagcugccacgacggcaaggccuggcugcacgugugcaucaccggcgacgacaagaacgccaccgccagcuucaucuacaacggcagacugguggacagcaucgugagcuggagcaaggagauccugagaacccaggagagcgagugcgugugcaucaacggcaccugcaccguggugaugaccgacggcagcgccagcggcaaggccgacaccaagauccuguucaucgaggagggcaagaucgugcacaccagcacccugagcggcagcgcccagcacguggaggagugcagcugcuaccccagauaccccggcgugagaugcgugugcagagacaacuggaagggcagcaacagacccaucguggacaucaacaucaaggaccacagcaucgugagcagcuacgugugcagcggccuggugggcgacacccccagaaagaacgacagcagcagcagcagccacugccuggaccccaacaacgaggagggcggccacggcgugaagggcugggccuucgacgacggcaacgacguguggaugggcagaaccaucagcgagaagagcagacugggcuacgagaccuucaaggugaucgagggcuggagcaaccccaagagcaagcugcagaccaacagacaggugaucguggacagaggcaacagaagcggcuacagcggcaucuucagcguggagggcaagagcugcaucaacagaugcuucuacguggagcugaucagaggcagaaaggaggagaccgaggugcuguggaccagcaacagcaucgugguguucugcggcaccagcggcaccuacggcaccggcagcuggcccgacggcgccgacaucaaccugaugcccaucuga

SEQ ID NO: 184640 - RNA, 1410 nt, Artificial Sequence; identical to SEQ ID NO: 176462
  derived and/or modified CDS sequence (opt4) from neuraminidase__InfluenzaA__AHL89909

SEQ ID NO: 184641 - RNA, 1410 nt, Artificial Sequence; identical to SEQ ID NO: 176101
  derived and/or modified CDS sequence (opt4) from neuraminidase__InfluenzaA__AHL89921

SEQ ID NO: 184642 - RNA, 1410 nt, Artificial Sequence; identical to SEQ ID NO: 176462
  derived and/or modified CDS sequence (opt4) from neuraminidase__InfluenzaA__AHL89933

SEQ ID NO: 184643 - RNA, 1410 nt, Artificial Sequence; identical to SEQ ID NO: 176101
  derived and/or modified CDS sequence (opt4) from neuraminidase__InfluenzaA__AHL89945

SEQ ID NO: 184644 - RNA, 1410 nt, Artificial Sequence
  derived and/or modified CDS sequence (opt4) from neuraminidase__InfluenzaA__AHL89957
augaaccccaaccagaagaucaucaccaucggcagcgugagccugaccaucagcaccaucugcuucuucaugcagaucgccauccugaucaccaccgugacccugcacuucaagcaguacgaguucaacagcccccccaacaaccaggugaugcugugcgagcccaccaucaucgagagaaacaucaccgagaucguguaccugaccaacaccaccaucgagaaggagaucugccccaagcuggccgaguacagaaacuggagcaagccccagugcgacaucaccggcuucgcccccuucagcaaggacaacagcaucagacugagcgccggcggcgacaucugggugaccagagagcccuacgugagcugcgaccccgacaagugcuaccaguucgcccugggccagggcaccacccugaacaacgugcacagcaacgacaccgugagagacagaacccccuacagaacccugcugaugaacgagcugggcgugcccuuccaccugggcaccaagcaggugugcaucgccuggagcagcagcagcugccacgacggcaaggccuggcugcacgugugcaucaccggcgacgacaagaacgccaccgccagcuucaucuacaacggcagacugguggacagcaucgugagcuggagcaaggagauccugagaacccaggagagcgagugcgugugcaucaacggcaccugcaccguggugaugaccgacggcagcgccagcggcaaggccgacaccaagauccuguucaucaaggagggcaagaucgugcacaccagcacccugagcggcagcgcccagcacguggaggagugcagcugcuaccccagauaccccggcgugagaugcgugugcagagacaacuggaagggcagcaacagacccaucguggacaucaacaucaaggaccacagcaucgugagcagcuacgugugcagcggccuggugggcgacacccccagaaagaacgacagcagcagcagcagccacugccuggaccccaacaacgaggagggcggccacggcgugaagggcugggccuucgacgacggcaacgacguguggaugggcagaaccaucagcgagaagagcagacugggcuacgagaccuucaaggugaucgagggcuggagcaaccccaagagcaagcugcagaucaacagacaggugaucguggacagaggcaacagaagcggcuacagcggcaucuucagcguggagggcaagagcugcaucaacagaugcuucuacguggagcugaucagaggcagaaaggaggagaccgaggugcuguggaccagcaacagcaucgugguguucugcggcaccagcggcaccuacggcaccggcagcuggcccgacggcgccgacaucaaccugaugcccaucuga

SEQ ID NO: 184645 - RNA, 1410 nt, Artificial Sequence; identical to SEQ ID NO: 175944
  derived and/or modified CDS sequence (opt4) from neuraminidase__InfluenzaA__AHL89969

SEQ ID NO: 184646 - RNA, 1410 nt, Artificial Sequence; identical to SEQ ID NO: 175944
  derived and/or modified CDS sequence (opt4) from neuraminidase__InfluenzaA__AHL89981

SEQ ID NO: 184647 - RNA, 1410 nt, Artificial Sequence
  derived and/or modified CDS sequence (opt4) from neuraminidase__InfluenzaA__AHL89993
augaaccccaaccagaagaucaucaccaucggcagcgugagccugagcaucagcaccaucugcuucuucaugcagaucgccauccugaucaccaccgugacccugcacuucaagcaguacgaguucaacagcccccccaacaaccaggugaugcugugcgagcccaccaucaucgagagaaacaucaccgagaucguguaccugaccaacaccaccaucgagaaggagaucugccccaagcuggccgaguacagaaacuggagcaagccccagugcgacaucaccggcuucgcccccuucagcaaggacaacagcaucagacugagcgccggcggcgacaucugggugaccagagagcccuacgugagcugcgaccccgacaagugcuaccaguucgcccugggccagggcaccacccugaacaacgugcacagcaacgacaccgugagagacagaacccccuacagaacccugcugaugaacgagcugggcgugcccuuccaccugggcaccaagcaggugugcaucgccuggagcagcagcagcugccacgacggcaaggccuggcugcacgugugcaucaccggcgacgacaagaacgccaccgccagcuucaucuacaacggcagacugguggacagcaucgugagcuggagcaaggagauccugagaacccaggagagcgagugcgugugcaucaacggcaccugcacccuggugaugaccgacggcagcgccagcggcaaggccgacaccaagauccuguucaucgaggagggcaagaucgugcacaccagcacccugagcggcagcgcccagcacguggaggagugcagcugcuaccccagauaccccggcgugagaugcgugugcagagacaacuggaagggcagcaacagacccaucguggacaucaacaucaaggaccacagcaucgugagcagcuacgugugcagcggccuggugggcgacacccccagaaagaacgacagcagcagcagcagccacugccuggaccccaacaacgaggagggcggccacggcgugaagggcugggccuucgacgacggcaacgacguguggaugggcagaaccaucagcgagaagagcagacugggcuacgagaccuucaaggugaucgagggcuggagcaaccccaagagcaagcugcagaucaacagacaggugaucguggacagaggcaacagaagcggcuacagcggcaucuucagcguggagggcaagagcugcaucaacagaugcuucuacguggagcugaucagaggcagaaaggaggagaccgaggugcuguggaccagcaacagcaucgugguguucugcggcaccagcggcaccuacggcaccggcagcuggcccgacggcgccgacaucaaccugaugcccaucuga

SEQ ID NO: 184648 - RNA, 1410 nt, Artificial Sequence
  derived and/or modified CDS sequence (opt4) from neuraminidase__InfluenzaA__AHL90005
augaaccccaaccagaagaucaucaccaucggcagcgugagccugaccaucagcaccaucugcuucuucaugcagaucgccauccugaucaccaccgugacccugcacuucaagcaguacgaguucagcagcccccccaacaaccaggugaugcugugcgagcccaccaucaucaagagaaacaucaccgagaucguguaccugaccaacaccaccaucgagaaggagaucugccccaagcuggccgaguacagaaacuggagcaagccccagugcgacaucaccggcuucgcccccuucagcaaggacaacagcaucagacugagcgccggcggcgacaucugggugaccagagagcccuacgugagcugcgaccccgacaagugcuaccaguucgcccugggccagggcaccacccugaacaacgugcacagcaacgacaccgugcacgacagaacccccuacagaacccugcugaugaacgagcugggcgugcccuuccaccugggcaccaagcaggugugcaucgccuggagcagcagcagcugccacgacggcaaggccuggcugcacgugugcgugaccggcgacgacaagaacgccaccgccagcuucaucuacaacggcagacugguggacagcaucgugagcuggagcaaggagauccugagaacccaggagagcgagugcgugugcaucaacggcaccugcaccguggugaugaccgacggcagcgccagcggcaaggccgacaccaagauccuguucaucgaggagggcaagaucgugcacaccagcacccugagcggcagcgcccagcacguggaggagugcagcugcuaccccagauaccccggcgugagaugcgugugcagagacaacuggaagggcagcaacagacccaucguggacaucaacaucaaggacuacagcaucgugagcagauacgugugcagcggccuggugggcgacacccccagaaagaacgacagcuacagcagcagccacugccuggaccccaacaacgaggagggcggccacggcgugaagggcugggccuucgacgacggcaacgacguguggaugggcagaaccaucagcgagaagagcagaagcggcuacgagaccuucaaggugaucgagggcuggagcaaccccaacagcaagcugcagaucaacagacaggugaucguggacagaggcaacagaagcggcuacagcggcaucuucagcguggagggcaagagcugcaucaacagaugcuucuacguggagcugaucagaggcagaaaggaggagaccgaggugcuguggaccagcaacagcaucgugguguucugcggcaccagcggcaccuacggcaccggcagcuggcccgacggcgccgacaucaaccugaugcccaucuga

SEQ ID NO: 184649 - RNA, 1410 nt, Artificial Sequence; identical to SEQ ID NO: 176150
  derived and/or modified CDS sequence (opt4) from neuraminidase__InfluenzaA__AHL90017

SEQ ID NO: 184650 - RNA, 1410 nt, Artificial Sequence; identical to SEQ ID NO: 176101
  derived and/or modified CDS sequence (opt4) from neuraminidase__InfluenzaA__AHL90029

SEQ ID NO: 184651 - RNA, 1410 nt, Artificial Sequence; identical to SEQ ID NO: 176117
  derived and/or modified CDS sequence (opt4) from neuraminidase__InfluenzaA__AHL90041

SEQ ID NO: 184652 - RNA, 1410 nt, Artificial Sequence; identical to SEQ ID NO: 176117
  derived and/or modified CDS sequence (opt4) from neuraminidase__InfluenzaA__AHL90053

SEQ ID NO: 184653 - RNA, 1410 nt, Artificial Sequence; identical to SEQ ID NO: 182382
  derived and/or modified CDS sequence (opt4) from neuraminidase__InfluenzaA__AHL90065

SEQ ID NO: 184654 - RNA, 1410 nt, Artificial Sequence; identical to SEQ ID NO: 184644
  derived and/or modified CDS sequence (opt4) from neuraminidase__InfluenzaA__AHL90077

SEQ ID NO: 184655 - RNA, 1410 nt, Artificial Sequence; identical to SEQ ID NO: 176126
  derived and/or modified CDS sequence (opt4) from neuraminidase__InfluenzaA__AHL90089

SEQ ID NO: 184656 - RNA, 1410 nt, Artificial Sequence; identical to SEQ ID NO: 176803
  derived and/or modified CDS sequence (opt4) from neuraminidase__InfluenzaA__AHL90101

SEQ ID NO: 184657 - RNA, 1410 nt, Artificial Sequence; identical to SEQ ID NO: 176101
  derived and/or modified CDS sequence (opt4) from neuraminidase__InfluenzaA__AHL90113

SEQ ID NO: 184658 - RNA, 1413 nt, Artificial Sequence; identical to SEQ ID NO: 176692
  derived and/or modified CDS sequence (opt4) from neuraminidase__InfluenzaA__AHL90125

SEQ ID NO: 184659 - RNA, 1413 nt, Artificial Sequence
  derived and/or modified CDS sequence (opt4) from neuraminidase__InfluenzaA__AHL90136
augaaccccaaccagaagaucaucaccaucggcagcaucagcaucgccaucggcaucaucagccugaugcugcagaucggcaacaucaucagcaucugggccagccacagcauccagaccggcagccagaacaacaccggcaucugcaaccagagaaucaucaccuacgagaacagcaccugggugaaccacaccuacgugaacaucaacaacaccaacgugguggccggcgaggacaagaccagcgugacccuggccggcaacagcagccugugcagcaucagcggcugggccaucuacaccaaggacaacagcaucagaaucggcagcaagggcgacguguucgugaucagagagcccuucaucagcugcagccaccuggagugcagaaccuucuuccugacccagggcgcccugcugaacgacaagcacagcaacggcaccgugaaggacagaagccccuacagagcccugaugagcugcccccugggcgaggcccccagccccuacaacagcaaguucgagagcguggccuggagcgccagcgccugccacgacggcaugggcuggcugaccaucggcaucagcggccccgacaacggcgccguggccgugcugaaguacaacggcaucaucaccggcaccaucaagagcuggaagaagcagauccugagaacccaggagagcgagugcgugugcaugaacggcagcugcuucaccaucaugaccgacggccccagcaacaaggccgccagcuacaagaucuucaagaucgagaagggcaaggugaccaagagcaucgagcugaacgcccccaacuucuacuacgaggagugcagcugcuaccccgacagcggcauggugaugugcgugugcagagacaacuggcacggcagcaacagacccugggugagcuucaaccagaaccuggacuaccagaucggcuacaucugcagcggcguguucggcgacaaccccagacccgaggacggcgagggcagcugcaaccccgugaccguggacggcgccaacggcgugaagggcuucagcuacaaguacggcaacggcguguggaucggcagaaccaagagcaacagacugagaaagggcuucgagaugaucugggaccccaacggcuggaccaacaccgacagcgacuucagcgugaagcaggacgugguggccaucaccgacuggagcggcuacagcggcagcuucgugcagcaccccgagcugaccggccuggacugcaucagacccugcuucuggguggagcuggugagaggccugcccagagagaacaccaccaucuggaccagcggcagcagcaucagcuucugcggcgugaacagcgacaccgccaacuggagcuggcccgacggcgccgagcugcccuucaccaucgacaaguga

SEQ ID NO: 184660 - RNA, 1413 nt, Artificial Sequence; identical to SEQ ID NO: 176692
  derived and/or modified CDS sequence (opt4) from neuraminidase__InfluenzaA__AHL90160

SEQ ID NO: 184661 - RNA, 1413 nt, Artificial Sequence
  derived and/or modified CDS sequence (opt4) from neuraminidase__InfluenzaA__AHL90172
augaaccccaaccagaagaucaucaccaucggcagcaucagcaucgccaucggcaucaucagccugaugcugcagaucggcaacaucaucagcaucugggccagccacagcauccagaccggcagccagaacaacaccggcaucugcaaccagagaaucaucaccuacgagaacagcaccugggugaaccacaccuacgugaacaucaacaacaccaacgugguggccggcgaggacaagaccagcgugacccuggccggcaacagcagccugugcagcaucagcggcugggccaucuacaccaaggacaacagcaucagaaucggcagcaagggcgacguguucgugaucagagagcccuucaucagcugcagccaccuggagugcagaaccuucuuccugacccagggcgcccugcugaacgacaagcacagcaacggcaccgugaaggacagaagccccuacagagcccugaugagcugcccccugggcgaggcccccagccccuacaacagcaaguucgagagcguggccuggagcgccagcgccugccacgacggcaugggcuggcugaccaucggcaucagcggccccgacaacggcgccguggccgugcugaaguacaacggcaucaucaccggcaccaucaagagcuggaagaagcagauccugagaacccaggagagcgagugcgugugcaugaacggcagcugcuucaccaucaugaccgacggccccagcaacaaggccgccagcuacaagaucuucaagaucgagaagggcaaggugaccaagagcaucgagcugaacgcccccaacuuccacuacgaggagugcagcugcuaccccgacaccggcaucgugaugugcgugugcagagacaacuggcacggcagcaacagacccugggugagcuucaaccagaaccuggacuaccagaucggcuacaucugcagcggcguguucggcgacaaccccagacccgaggacggcgagggcaacugcaaccccgugaccguggacggcgccaacggcgugaagggcuucagcuacaaguacggcaacggcguguggaucggcagaaccaagagcaacagacugagaaagggcuucgagaugaucugggaccccaacggcuggaccaacaccgacagcgacuucagcgugaagcaggacgugguggccaucaccgacuggagcggcuacagcggcagcuucgugcagcaccccgagcugaccggccuggacugcaucagacccugcuucuggguggagcuggugagaggccugcccagagagaacaccaccaucuggaccagcggcagcagcaucagcuucugcggcgugaacagcgacaccgccaacuggagcuggcccgacggcgccgagcugcccuucaccaucgacaaguga

SEQ ID NO: 184662 - RNA, 1413 nt, Artificial Sequence; identical to SEQ ID NO: 176692
  derived and/or modified CDS sequence (opt4) from neuraminidase__InfluenzaA__AHL90184

SEQ ID NO: 184663 - RNA, 1413 nt, Artificial Sequence; identical to SEQ ID NO: 179990
  derived and/or modified CDS sequence (opt4) from neuraminidase__InfluenzaA__AHL90196

SEQ ID NO: 184664 - RNA, 1413 nt, Artificial Sequence; identical to SEQ ID NO: 176692
  derived and/or modified CDS sequence (opt4) from neuraminidase__InfluenzaA__AHL90220

SEQ ID NO: 184665 - RNA, 1413 nt, Artificial Sequence
  derived and/or modified CDS sequence (opt4) from neuraminidase__InfluenzaA__AHL90232
augaaccccaaccagaagaucaucaccaucggcagcaucagcaucgccaucggcaucaucagccugaugcugcagaucggcaacaucaucagcaucugggccagccacagcauccagaccggcagccagaacaacaccggcaucugcaaccagagaaucaucaccuacgagaacagcaccugggugaaccacaccuacgugaacaucaacaacaccaacgugguggccggcgaggacaagaccagcgugacccuggccggcaacagcagccugugcagcaucagcggcugggccaucuacaccaaggacaacagcaucagaaucggcagcaagggcgacguguucgugaucagagagcccuucaucagcugcagccaccuggagugcagaaccuucuuccugacccagggcgcccugcugaacgacaagcacagcaacggcaccgugaaggacagaagccccuacagagcccugaugagcugcccccugggcgaggcccccagccccuacaacagcaaguucgagagcguggccuggagcgccagcgccugccacgacggcaugggcuggcugaccaucggcaucagcggccccgacaacggcgccguggccgugcugaaguacaacggcaucaucaccggcaccaucaagagcuggaagaagcagauccugagaacccaggagagcgagugcgugugcaugaacggcagcugcuucaccaucaugaccgacggccccagcaacaaggccgccagcuacaagaucuucaagaucgagaagggcaaggugaccaagagcaucgagcugaacgcccccaacuuccacuacgaggagugcagcugcuaccccgacaccggcaucgugaugugcgugugcagagacaacuggcacggcagcaacagacccugggugagcuucaaccagaaccuggacuaccagaucggcuacaucugcagcggcguguucggcgacaaccccagacccgaggacggcgagggcagcugcaaccccgugaccgugaacggcgccaacggcgugaagggcuucagcuacaaguacgacaacggcguguggaucggcagaaccaagagcaacagacugagaaagggcuucgagaugaucugggaccccaacggcuggaccaacaccgacagcgacuucagcgugaagcaggacgugguggccaucaccgacuggagcggcuacagcggcagcuucgugcagcaccccgagcugaccggccuggacugcaucagacccugcuucuggguggagcuggugagaggccugcccagagagaacaccaccaucuggaccagcggcagcagcaucagcuucugcggcgugaacagcgacaccgccaacuggagcuggcccgacggcgccgagcugcccuucaccaucgacaaguga

SEQ ID NO: 184666 - RNA, 1413 nt, Artificial Sequence
  derived and/or modified CDS sequence (opt4) from neuraminidase__InfluenzaA__AHL90244
augaaccccaaccagaagaucaucaccaucggcagcaucagcaucgccaucggcaucaucagccugaugcugcagaucggcaacaucaucagcaucugggccagccacagcauccagaccggcagccagaacaacaccggcaucugcaaccagagaaucaucaccuacgagaacagcaccugggugaaccacaccuacgugaacaucaacaacaccaacgugguggccggcgaggacaagaccagcgugacccuggccggcaacagcagccugugcagcaucagcggcugggccaucuacaccaaggacaacagcaucagaaucggcagcaagggcgacguguucgugaucagagagcccuucaucagcugcagccaccuggagugcagaaccuucuuccugacccagggcgcccugcugaacgacaagcacagcaacggcaccgugaaggacagaagccccuacagagcccugaugagcugcccccugggcgaggcccccagccccuacaacagcaaguucgagagcguggccuggagcgccagcgccugccacgacggcaugggcuggcugaccaucggcaucagcggccccgacaacggcgccguggccgugcugaaguacaacggcaucaucaccggcaccaucaagagcuggaagaagcagauccugagaacccaggagagcgagugcgugugcaugaacggcagcugcuucaccaucaugaccgacggccccagcaacaaggccgccagcuacaagaucuucaagaucgagaagggcaaggugaccaagagcaucgagcugaacgcccccaacuuccacuacgaggagugcagcugcuaccccgacaccggcaucgugaugugcgugugcagagacaacuggcacggcagcaacagacccugggugagcuucaaccagaaccuggacuaccagaucggcuacaucugcagcggcguguucggcgacaaccccagacccgaggacggcgagggcagcugcaaccccaugaccguggacggcgccaacggcgugaagggcuucagcuacaaguacgacaacggcguguggaucggcagaaccaagagcaacagacugagaaagggcuucgagaugaucugggaccccaacggcuggaccaacaccgacagcgacuucagcgugaagcaggacgugguggccaucaccgacuggagcggcuacagcggcagcuucgugcagcaccccgagcugaccggccuggacugcaucagacccugcuucuggguggagcuggugagaggccugcccagagagaacaccaccaucuggaccagcggcagcagcaucagcuucugcggcgugaacagcgacaccgccagcuggagcuggcccgacggcgccgagcugcccuucaccaucgacaaguga

SEQ ID NO: 184667 - RNA, 1413 nt, Artificial Sequence; identical to SEQ ID NO: 177521
  derived and/or modified CDS sequence (opt4) from neuraminidase__InfluenzaA__AHL90256

SEQ ID NO: 184668 - RNA, 1413 nt, Artificial Sequence
  derived and/or modified CDS sequence (opt4) from neuraminidase__InfluenzaA__AHL90268
augaaccccaaccagaagaucaucaccaucggcagcaucagcaucgccaucggcaucaucagccugaugcugcagaucggcaacaucaucagcaucugggccagccacagcauccagaccggcagccagaacaacaccggcaucugcaaccagagaaucaucaccuacgagaacagcaccugggugaaccacaccuacgugaacaucaacaacaccaacgugguggccggcgaggacaagaccagcgugacccuggccggcaacagcagccugugcagcaucagcggcugggccaucuacaccaaggacaacagcaucagaaucggcagcaagggcgacguguucgugaucagagagcccuucaucagcugcagccaccuggagugcagaaccuucuuccugacccagggcgcccugcugaacgacaagcacagcaacggcaccgugaaggacagaagccccuacagagcccugaugagcugcccccugggcgaggcccccagccccuacaacagcaaguucgagagcguggccuggagcgccagcgccugccacgacggcaugggcuggcugaccaucggcaucagcggccccgacaacggcgccguggccgugcugaaguacaacggcaucaucaccggcaccaucaagagcuggaagaagcagauccugagaacccaggagagcgagugcgugugcaugaacggcagcugcuucaccaucaugaccgacggccccagcaacaaggccgccagcuacaagaucuucaagaucgagaagggcaaggugaccaagagcaucgagcugaacgcccccaacuuccacuacgaggagugcagcugcuaccccgacaccagcaucgugaugugcgugugcagagacaacuggcacggcagcaacagacccugggugagcuucaaccagaaccuggacuaccagaucggcuacaucugcagcggcguguucggcgacaaccccagacccgaggacggcgagggcagcugcaaccccgugaccguggacggcgccaacggcgugaagggcuucagcuacaaguacgacaacggcguguggaucggcagaaccaagagcaacagacugagaaagggcuucgagaugaucugggaccccaacggcuggaccaacaccgacagagacuucagcgugaagcaggacgugguggccaucaccgacuggagcggcuacagcggcagcuucgugcagcaccccgagcugaccggccuggacugcaucagacccugcuucuggguggagcuggugagaggccugcccagagagaacaccaccaucuggaccagcggcagcagcaucagcuucugcggcgugaacagcgacaccgccaacuggagcuggcccgacggcgccgagcugcccuucaccaucgacaaguga

SEQ ID NO: 184669 - RNA, 1413 nt, Artificial Sequence; identical to SEQ ID NO: 177521
  derived and/or modified CDS sequence (opt4) from neuraminidase__InfluenzaA__AHL90280

SEQ ID NO: 184670 - RNA, 1413 nt, Artificial Sequence
  derived and/or modified CDS sequence (opt4) from neuraminidase__InfluenzaA__AHL90304
augaaccccaaccagaagaucaucaccaucggcagcaucagcaucgccaucggcaucaucagccugaugcugcagaucggcaacaucaucagcaucugggccagccacagcauccagaccggcagccagaacaacaccgagaucugcaaccagagaaucaucaccuacgagaacagcaccugggugaaccacaccuacgugaacaucaacaacaccaacgugguggccggcgaggacaagaccagcgugacccuggccggcaacagcagccugugcagcaucagcggcugggccaucuacaccaaggacaacagcaucagaaucggcagcaagggcgacguguucgugaucagagagcccuucaucagcugcagccaccuggagugcagaaccuucuuccugacccagggcgcccugcugaacgacaagcacagcaacggcaccgugaaggacagaagccccuacagagcccugaugagcugcccccugggcgaggcccccagccccuacaacagcaaguucgagagcguggccuggagcgccagcgccugccacgacggcaugggcuggcugaccaucggcaucagcggccccgacaacggcgccguggccgugcugaaguacaacggcaucaucaccggcaccaucaagagcuggaagaagcagauccugagaacccaggagagcgagugcgugugcaugaacggcagcugcuucaccaucaugaccgacggccccagcaacaaggccgccagcuacaagaucuucaagaucgagaagggcaaggugaccaagagcaucgagcugaacgcccccaacuuccacuacgaggagugcagcugcuaccccgacaccggcaucgugaugugcgugugcagagacaacuggcacggcagcaacagacccugggugagcuucaaccagaaccuggacuaccagaucggcuacaucugcagcggcguguucggcgacaaccccagacccgaggacggcgagggcagcugcaaccccgugaccguggacggcgccaacggcgugaagggcuucagcuacaaguacgacaacggcguguggaucggcagaaccaagagcaacagacugagaaagggcuucgagaugaucugggaccccaacggcuggaccaacaccgacagcgacuucagcgugaagcaggacgugguggccaucaccgacuggagcggcuacagcggcagcuucgugcagcaccccgagcugaccggccuggacugcaucagacccugcuucuggguggagcuggugagaggccugcccagagagaacaccaccaucuggaccagcggcagcagcaucagcuucugcggcgugaacagcgacaccgccaacuggagcuggcccgacggcgccgagcugcccuucaccaucgacaaguga

SEQ ID NO: 184671 - RNA, 1413 nt, Artificial Sequence; identical to SEQ ID NO: 176692
  derived and/or modified CDS sequence (opt4) from neuraminidase__InfluenzaA__AHL90316

SEQ ID NO: 184672 - RNA, 1413 nt, Artificial Sequence
  derived and/or modified CDS sequence (opt4) from neuraminidase__InfluenzaA__AHL90328
augaaccccaacaagaagaucaucaccaucggcagcaucagcaucgccaucggcaucaucagccugaugcugcagaucggcaacaucaucagcaucugggccagccacagcauccagaccggcagccagaacaacaccggcaucugcaaccagagaaucaucaccuacgagaacagcaccugggugaaccacaccuacgugaacaucaacaacaccaacgugguggccggcgaggacaagaccagcgugacccuggccggcaacagcagccugugcagcaucagcggcugggccaucuacaccaaggacaacagcaucagaaucggcagcaagggcgacguguucgugaucagagagcccuucaucagcugcagccaccuggagugcagaaccuucuuccugacccagggcgcccugcugaacgacaagcacagcaacggcaccgugaaggacagaagccccuacagagcccugaugagcugcccccugggcgaggcccccagccccuacaacagcaaguucgagagcguggccuggagcgccagcgccugccacgacggcaugggcuggcugaccaucggcaucagcggccccgacaacggcgccguggccgugcugaaguacaacggcaucaucaccggcaccaucaagagcuggaagaagcagauccugagaacccaggagagcgagugcgugugcaugaacggcagcugcuucaccaucaugaccgacggccccagcaacaaggccgccagcuacaagaucuucaagaucgagaagggcaaggugaccaagagcaucgagcugaacgcccccaacuuccacuacgaggagugcagcugcuaccccgacaccggcaucgugaugugcgugugcagagacaacuggcacggcagcaacagacccugggugagcuucaaccagaaccuggacuaccagaucggcuacaucugcagcggcguguucggcgacaaccccagacccgaggacggcgagggcagcugcaaccccgugaccguggacggcgccaacggcgugaagggcuucagcuacaaguacgacaacggcguguggaucggcagaaccaagagcaacagacugagaaagggcuucgagaugaucugggaccccaacggcuggaccaacaccgacagcgacuucagcgugaagcaggacgugguggccgugaccgacuggagcggcuacagcggcagcuucgugcagcaccccgagcugaccggccuggacugcaucagacccugcuucuggguggagcuggugagaggccugcccagagagaacaccaccaucuggaccagcggcagcagcaucagcuucugcggcgugaacagcgacaccgccaacuggagcuggcccgacggcgccgagcugcccuucaccaucgacaaguga

SEQ ID NO: 184673 - RNA, 1413 nt, Artificial Sequence; identical to SEQ ID NO: 176692
  derived and/or modified CDS sequence (opt4) from neuraminidase__InfluenzaA__AHL90340

SEQ ID NO: 184674 - RNA, 1413 nt, Artificial Sequence
  derived and/or modified CDS sequence (opt4) from neuraminidase__InfluenzaA__AHL90352
augaaccccaaccagaagaucaugaccaucggcagcaucagcaucgccaucggcaucaucagccugaugcugcagaucggcaacaucaucagcaucugggccagccacagcauccagaccggcagccagaacaacaccggcaucugcaaccagagaaucaucaccuacgagaacagcaccugggugaaccacaccuacgugaacaucaacaacaccaacgugguggccggcgaggacaagaccagcgugacccuggccggcaacagcagccugugcagcaucagcggcugggccaucuacaccaaggacaacagcaucagaaucggcagcaagggcgacguguucgugaucagagagcccuucaucagcugcagccaccuggagugcagaaccuucuuccugacccagggcgcccugcugaacgacaagcacagcaacggcaccgugaaggacagaagccccuacagagcccugaugagcugcccccugggcgaggcccccagccccuacaacagcaaguucgagagcguggccuggagcgccagcgccugccacgacggcaugggcuggcugaccaucggcaucagcggccccgacaacggcgccguggccgugcugaaguacaacggcaucaucaccggcaccaucaagagcuggaagaagcagauccugagaacccaggagagcgagugcgugugcaugaacggcagcugcuucaccaucaugaccgacggccccagcaacaaggccgccagcuacaagaucuucaagaucgagaagggcaaggugaccaagagcaucgagcugaacgcccccaacuuccacuacgaggagugcagcugcuaccccgacaccggcaucgugaugugcgugugcagagacaacuggcacggcagcaacagacccugggugagcuucaaccagaaccuggacuaccagaucggcuacaucugcagcggcguguucggcgacaaccccagacccgaggacggcgagggcagcugcagccccgugaccguggacggcgccaacggcgugaagggcuucagcuacaaguacgacaacggcguguggaucggcagaaccaagagcaacagacugagaaagggcuucgagaugaucugggaccccaacggcuggaccaacaccgacagcgacuucagcgugaagcaggacgugguggccaucaccgacuggagcggcuacagcggcagcuucgugcagcaccccgagcugaccggccuggacugcaucagacccugcuucuggguggagcuggugagaggcaugcccagagagaacaccaccaucuggaccagcggcagcagcaucagcuucugcggcgugaacagcgacaccgccaacuggagcuggcccgacggcgccgagcugcccuucaccaucgacaaguga

SEQ ID NO: 184675 - RNA, 1413 nt, Artificial Sequence; identical to SEQ ID NO: 183521
  derived and/or modified CDS sequence (opt4) from neuraminidase__InfluenzaA__AHL90364

SEQ ID NO: 184676 - RNA, 1413 nt, Artificial Sequence; identical to SEQ ID NO: 177521
  derived and/or modified CDS sequence (opt4) from neuraminidase__InfluenzaA__AHL90376

SEQ ID NO: 184677 - RNA, 1410 nt, Artificial Sequence
  derived and/or modified CDS sequence (opt4) from neuraminidase__InfluenzaA__AHL90388
augaaccccaaccagaagaucaucaccaucggcagcgugagccugaucaucagcaccaucugcuucuucaugcagaucgccauccugaucaccaccgugacccugcacuucaagcaguacgaguucaacagcagccccaacaaccaggugaugcugugcgagcccaccaucaucgagagaaacaucaccgagaucguguaccugaccaacaccaucaucgagaaggagaucugccccaagcuggccgaguacagaaacuggagcaagccccagugcgacaucaccggcuucgcccccuucagcaaggacaacagcaucagacugagcgccggcggcgacaucugggugaccagagagcccuacgugagcugcgaccccgacaagugcuaccaguucgcccugggccagggcaccacccugaacaacgugcacagcaacaacaccgugagagacagaacccccuacagaacccugcugaugaacgagcugggcgugcccuuccaccugggcaccaagcaggugugcaucgccuggagcagcagcagcugccacgacggcaaggccuggcugcacgugugcaucaccggcgacgacaagaacgccaccgccagcuucaucuacaacggcagacugguggacagcaucgugagcuggagcaaggagauccugagaacccaggagagcgagugcgugugcaucaacggcaccugcaccguggugaugaccgacggcagcgccagcggcaaggccgacaccaagauccuguucaucgaggagggcaagaucgugcacaccagcacccugagcggcagcgcccagcacguggaggagugcagcugcuaccccagauaccccggcgugagaugcgugugcagagacaacuggaagggcagcaacagacccaucguggacaucaacaucaaggaccacagcaucgugagcagcuacgugugcagcggccuggugggcgacacccccagaaagaacgacagcagcagcagcagccacugccuggaccccaacaacgaggagggcggccacggcgugaagggcugggccuucgacgacggcaacgacguguggaugggcagaaccaucagcgagaagagcagacugggcuacgagaccuucaaggugaucgagggcuggagcaaccccaagagcaagcugcagaucaacagacaggugaucguggacagaggcaacagaagcggcuacagcggcaucuucagcguggagggcaagagcugcaucaacagaugcuucuacguggagcugaucagaggcagaaaggaggagaccgaggugcuguggaccagcaacagcaucgugguguucugcggcaccagcggcaccuacggcaccggcagcuggcccgacggcgccgacaucaaccugaugcccaucuga

SEQ ID NO: 184678 - RNA, 1410 nt, Artificial Sequence; identical to SEQ ID NO: 176572
  derived and/or modified CDS sequence (opt4) from neuraminidase__InfluenzaA__AHL90400

SEQ ID NO: 184679 - RNA, 1410 nt, Artificial Sequence; identical to SEQ ID NO: 176572
  derived and/or modified CDS sequence (opt4) from neuraminidase__InfluenzaA__AHL90413

SEQ ID NO: 184680 - RNA, 1410 nt, Artificial Sequence
  derived and/or modified CDS sequence (opt4) from neuraminidase__InfluenzaA__AHL90425
augaaccccaaccagaagaucaucaccaucggcagcgugagccugaccaucagcaccaucugcuucuucaugcagaccgccauccugaucaccaccgugacccugcacuucaagcaguacgaguucaacagcccccccaacaaccaggugaugcugugcgagcccaccaucaucgagagaaacaucaccgagaucguguaccugaccaacaccaccaucgagaaggagaucugccccaagcuggccgaguacagaaacuggagcaagccccagugcgacaucaccggcuucgcccccuucagcaaggacaacagcaucagacugagcgccggcggcgacaucugggugaccagagagcccuacgugagcugcgaccccgacaagugcuaccaguucgcccugggccagggcaccacccugaacaacgugcacagcaacgacaccgugcacgacagaacccccuacagaacccugcugaugaacgagcugggcgugcccuuccaccugggcaccaagcaggugugcaucgccuggagcagcagcagcugccacgacggcaaggccuggcugcacgugugcaucaccggcgacgacaagaacgccaccgccagcuucaucuacaacggcagacugguggacagcaucgugagcuggagcaaggagauccugagaacccaggagagcgagugcgugugcaucaacggcaccugcaccguggugaugaccgacggcagcgccagcggcaaggccgacaccaagauccuguucaucgaggagggcaagaucgugcacaccagcacccugagcggcagcgcccagcacguggaggagugcagcugcuaccccagauaccccggcgugagaugcgugugcagagacaacuggaagggcagcaacagacccaucguggacaucaacaucaaggaccacagcaucgugagcagcuacgugugcagcggccuggugggcgacacccccagaaagaacgacagcagcagcagcagccacugccuggaccccaacaacgaggagggcggccacggcgugaagggcugggccuucgacgacggcaacgacguguggaugggcagaaccaucagcgagaagagcagacugggcuacgagaccuucaaggugaucgagggcuggagcaaccccaagagcaagcugcagaucaacagacaggugaucguggacagaggcgacagaagcggcuacagcggcaucuucagcguggagggcaagagcugcaucaacagaugcuucuacguggagcugaucagaggcagaaaggaggagaccgaggugcuguggaccagcaacagcaucgugguguucugcggcaccagcggcaccuacggcaccggcagcuggcccgacggcgccgacaucaaccugaugcccaucuga

SEQ ID NO: 184681 - RNA, 1410 nt, Artificial Sequence; identical to SEQ ID NO: 176659
  derived and/or modified CDS sequence (opt4) from neuraminidase__InfluenzaA__AHL90437

SEQ ID NO: 184682 - RNA, 1410 nt, Artificial Sequence; identical to SEQ ID NO: 176572
  derived and/or modified CDS sequence (opt4) from neuraminidase__InfluenzaA__AHL90449

SEQ ID NO: 184683 - RNA, 1410 nt, Artificial Sequence; identical to SEQ ID NO: 176572
  derived and/or modified CDS sequence (opt4) from neuraminidase__InfluenzaA__AHL90461

SEQ ID NO: 184684 - RNA, 1410 nt, Artificial Sequence; identical to SEQ ID NO: 176572
  derived and/or modified CDS sequence (opt4) from neuraminidase__InfluenzaA__AHL90473

SEQ ID NO: 184685 - RNA, 1410 nt, Artificial Sequence; identical to SEQ ID NO: 176572
  derived and/or modified CDS sequence (opt4) from neuraminidase__InfluenzaA__AHL90485

SEQ ID NO: 184686 - RNA, 1410 nt, Artificial Sequence; identical to SEQ ID NO: 176663
  derived and/or modified CDS sequence (opt4) from neuraminidase__InfluenzaA__AHL90497

SEQ ID NO: 184687 - RNA, 1410 nt, Artificial Sequence; identical to SEQ ID NO: 176663
  derived and/or modified CDS sequence (opt4) from neuraminidase__InfluenzaA__AHL90509

SEQ ID NO: 184688 - RNA, 1410 nt, Artificial Sequence
  derived and/or modified CDS sequence (opt4) from neuraminidase__InfluenzaA__AHL90521
augaaccccaaccagaagaucaucaccaucggcagcgugagccugaccaucagcaccaucugcuucuuccugcagaucgccauccugaucaccaccgugacccugcacuucaagcaguacgaguucaacagcccccccaacaaccaggugaugcugugcgagcccaccaucaucgagagaaacaucaccgagaucguguaccugaccaacaccaccaucgagaaggagaucugccccaagcuggccgaguacagaaacuggagcaagccccagugcgacaucaccggcuucgcccccuucagcaaggacaacagcaucagacugagcgccggcggcgacaucugggugaccagagagcccuacgugagcugcgaccccgacaagugcuaccaguucgcccugggccagggcaccacccugaacaacgugcacagcaacaacaccgugagagacagaacccccuacagaacccugcugaugaacgagcugggcgugcccuuccaccugggcaccaagcaggugugcaucgccuggagcagcagcagcugccacgacggcaaggccuggcugcacgugugcaucaccggcgacgacaagaacgccaccgccagcuucaucuacaacggcagacugguggacagcaucgugagcuggagcaaggagauccugagaacccaggagagcgagugcgugugcaucaacggcaccugcaccguggugaugaccgacggcagcgccagcggcaaggccgacaccaagauccuguucaucgaggagggcaagaucgugcacaccagcacccugagcggcagcgcccagcacguggaggagugcagcugcuaccccagauaccccggcgugagaugcgugugcagagacaacuggaagggcagcaacagacccaucguggacaucaacaucaaggaccacagcaucgugagcagcuacgugugcagcggccuggugggcgacacccccagaaagaacgacagcagcagcagcagccacugccuggaccccaacaacgaggagggcggccacggcgugaagggcugggccuucgacgacggcaacgacguguggaugggcagaaccaucagcgagaagagcagacugggcuacgagaccuucaaggugaucgagggcuggagcaaccccaagagcaagcugcagaucaacagacaggugaucguggacagaggcaacagaagcggcuacagcggcaucuucagcguggagggcaagagcugcaucaacagaugcuucuacguggagcugaucagaggcagaaaggaggagaccgaggugcuguggaccagcaacagcaucgugguguucugcggcaccagcggcaccuacggcaccggcagcuggcccgacggcgccgacaucaaccugaugcccaucuga

SEQ ID NO: 184689 - RNA, 1410 nt, Artificial Sequence
  derived and/or modified CDS sequence (opt4) from neuraminidase__InfluenzaA__AHL90533
augaaccccaaccagaagaucaucaccaucggcagcgugagccugaccaucagcaccaucugcuucuucaugcagaccgccauccugaucaccaccgugacccugcacuucaagcaguacgaguucaacagcccccccaacaaccaggugaugcugugcgagcccaccaucaucgagagaaacaucaccgagaucguguaccugaccaacaccaccaucgagaaggagaucugccccaagcuggccgaguacagaaacuggagcaagccccagugcgacaucaccggcuucgcccccuucagcaaggacaacagcaucagacugagcgccggcggcgacaucugggugaccagagagcccuacgugagcugcgaccccgacaagugcuaccaguucgcccugggccagggcaccacccugaacaacgugcacagcaacgacaccgugagagacagaacccccuacagaacccugcugaugaacgagcugggcgugcccuuccaccugggcaccaagcaggugugcaucgccuggagcagcagcagcugccacgacggcaaggccuggcugcacgugugcaucaccggcgacgacaagaacgccaccgccagcuucaucuacaacggcagacugguggacagcaucgugagcuggagcaaggagauccugagaacccaggagagcgagugcgugugcaucaacggcaccugcaccguggugaugaccgacggcagcgccagcggcaaggccgacaccaagauccuguucaucgaggagggcaagaucgugcacaccagcacccugagcggcagcgcccagcacguggaggagugcagcugcuaccccagauaccccggcgugagaugcgugugcagagacaacuggaagggcagcaacagacccaucguggacaucaacaucaaggaccacagcaucgugagcagcuacgugugcagcggccuggugggcgacacccccagaaagaacgacagcagcagcagcagccacugccuggaccccaacaacgaggagggcggccacggcgugaagggcugggccuucgacgacggcaacgacguguggaugggcagaaccaucagcgagaagagcagacugggcuacgagaccuucaaggugaucgagggcuggagcaaccccaagagcaagcugcagaucaacagacaggugaucguggagagaggcgacagaagcggcuacagcggcaucuucagcguggagggcaagagcugcaucaacagaugcuucuacguggagcugaucagaggcagaaaggaggagaccgaggugcuguggaccagcaacagcaucgugguguucugcggcaccagcggcaccuacggcaccggcagcuggcccgacggcgccgacaucaaccugaugcccaucuga

SEQ ID NO: 184690 - RNA, 1410 nt, Artificial Sequence; identical to SEQ ID NO: 176572
  derived and/or modified CDS sequence (opt4) from neuraminidase__InfluenzaA__AHL90545

SEQ ID NO: 184691 - RNA, 1410 nt, Artificial Sequence; identical to SEQ ID NO: 176659
  derived and/or modified CDS sequence (opt4) from neuraminidase__InfluenzaA__AHL90557

SEQ ID NO: 184692 - RNA, 1410 nt, Artificial Sequence
  derived and/or modified CDS sequence (opt4) from neuraminidase__InfluenzaA__AHL90569
augaaccccaaccagaagaucaucaccaucggcagcgugagccugaccaucagcaccaucugcuucuucaugcagaucgccauccugaucaccaccgugacccugcacuucaagcaguacgaguucaacagcccccccaacaaccaggugaugcugugcgagcccaccaucaucgagagaaacaucaccgagaucguguaccugaccaacaccaccaucgagaaggagaucugccccaagcuggccgaguacagaaacuggagcaagccccagugcgacaucaagggcuucgcccccuucagcaaggacaacagcaucagacugagcgccggcggcgacaucugggugaccagagagcccuacgugagcugcgaccccgacaagugcuaccaguucgcccugggccagggcaccacccugaacaacgugcacagcaacaacaccgugagagacagaacccccuacagaacccugcugaugaacgagcugggcgugcccuuccaccugggcaccaagcaggugugcaucgccuggagcagcagcagcugccacgacggcaaggccuggcugcacgugugcaucaccggcgacgacaagaacgccaccgccagcuucaucuacaacggcagacugguggacagcguggugagcuggagcaaggagauccugagaacccaggagagcgagugcgugugcaucaacggcaccugcaccguggugaugaccgacggcagcgccagcggcaaggccgacaccaagauccuguucaucgaggagggcaagaucgugcacaccagcacccugagcggcagcgcccagcacguggaggagugcagcugcuaccccagauaccccggcgugagaugcgugugcagagacaacuggaagggcagcaacagacccaucguggacaucaacaucaaggaccacagcaucgugagcagcuacgugugcagcggccuggugggcgacacccccagaaagaacgacagcagcagcagcagccacugccuggaccccaacaacgaggagggcggccacggcgugaagggcugggccuucgacgacggcaacgacguguggaugggcagaaccaucagcgagaagagcagacugggcuacgagaccuucaaggugaucgagggcuggagcaaccccaagagcaagcugcagaucaacagacaggugaucguggacagaggcaacagaagcggcuacagcggcaucuucagcguggagggcaagagcugcaucaacagaugcuucuacguggagcugaucagaggcagaaaggaggagaccgaggugcuguggaccagcaacagcaucgugguguucugcggcaccagcggcaccuacggcaccggcagcuggcccgacggcgccgacaucaaccugaugcccaucuga

SEQ ID NO: 184693 - RNA, 1410 nt, Artificial Sequence; identical to SEQ ID NO: 176659
  derived and/or modified CDS sequence (opt4) from neuraminidase__InfluenzaA__AHL90581

SEQ ID NO: 184694 - RNA, 1410 nt, Artificial Sequence; identical to SEQ ID NO: 176663
  derived and/or modified CDS sequence (opt4) from neuraminidase__InfluenzaA__AHL90593

SEQ ID NO: 184695 - RNA, 1410 nt, Artificial Sequence
  derived and/or modified CDS sequence (opt4) from neuraminidase__InfluenzaA__AHL90605
augaaccccaaccagaagaucaucaccaucggcagcgugagccugaccaucagcaccaucugcuucuucaugcagaucgccauccugaucaccaccgugacccugcacuucaagcaguacgaguucaacagcccccccaacaaccaggugaugcugugcgagcccaccaucaucgagagaaacaucaccgagaucguguaccugaccaacaccaccaucgagaaggagaucugccccaagcuggccgaguacagaaacuggagcaagccccagugcgacaucaccggcuucgcccccuucagcaaggacaacagcaucagacugagcgccggcggcgacaucugggugaccagagagcccuacgugagcugcgaccccgacaagugcuaccaguucgcccugggccagggcaccacccugaacaacgugcacagcaacaacaccgugagagacagaacccccuacagaacccugcugaugaacgagcugggcgugcccuuccaccugggcaccaagcaggugugcaucgccuggagcagcagcagcugccacgacggcaaggccuggcugcacgugugcaucaccggcgacgacaagaacgccaccgccagcuucaucuacaacggcagacugguggacagcguggugagcuggagcaaggagauccugagaacccaggagagcgagugcgugugcaucaacggcaccugcaccguggugaugaccgacggcagcgccagcggcaaggccgacaccaagauccuguucaucgaggagggcaagaucgugcacaccagcacccugagcggcagcgcccagcacguggaggagugcagcugcuaccccagauaccccggcgugagaugcgugugcagagacaacuggaagggcagcaacagacccaucguggacaucaacaucaaggaccacagcaucgugagcagcuacgugugcagcggccuggugggcgacacccccagaaagaacgacagcagcagcagcagccacugccuggaccccaacaacgaggagggcggccacggcgugaagggcugggccuucgacgacggcaacgacguguggaugggcagaaccaucagcgagaagagcagacugggcuacgagaccuucaaggugaucgagggcuggagcaaccccaagagcaagcugcagaucaacagacaggugaucguggacagaggcaacagaagcggcuacagcggcaucuucagcguggagggcaagagcugcaucaacagaugcuucuacguggagcugaucagaggcagaaaggaggagaccgaggugcuguggaccagcaacagcaucgugguguucugcggcaccagcggcaccuacggcaccggcagcuggcccgacggcgccaacaucaaccugaugcccaucuga

SEQ ID NO: 184696 - RNA, 1410 nt, Artificial Sequence; identical to SEQ ID NO: 176659
  derived and/or modified CDS sequence (opt4) from neuraminidase__InfluenzaA__AHL90629

SEQ ID NO: 184697 - RNA, 1410 nt, Artificial Sequence; identical to SEQ ID NO: 176659
  derived and/or modified CDS sequence (opt4) from neuraminidase__InfluenzaA__AHL90641

SEQ ID NO: 184698 - RNA, 1410 nt, Artificial Sequence; identical to SEQ ID NO: 176572
  derived and/or modified CDS sequence (opt4) from neuraminidase__InfluenzaA__AHL90653

SEQ ID NO: 184699 - RNA, 1410 nt, Artificial Sequence; identical to SEQ ID NO: 176659
  derived and/or modified CDS sequence (opt4) from neuraminidase__InfluenzaA__AHL90665

SEQ ID NO: 184700 - RNA, 1410 nt, Artificial Sequence
  derived and/or modified CDS sequence (opt4) from neuraminidase__InfluenzaA__AHL90677
augaaccccaaccagaagaucaucaccaucggcagcgugagccugaccaucagcaccaucugcuucuucaugcagaccgccauccugaucaccaccgugacccugcacuucaagcaguacgaguucaacagcccccccaacaaccaggugaugcugugcgagcccaccaucaucgagagaaacaucaccgagaucguguaccugaccaacaccaccaucgagaaggagaucugccccaagcuggccgaguacagaaacuggagcaagccccagugcgacaucaccggcuucgcccccuucagcaaggacaacagcaucagacugagcgccggcggcgacaucugggugaccagagagcccuacgugagcugcgaccccgacaagugcuaccaguucgcccugggccagggcaccacccugaacaacgugcacagcaacaacaccgugagagacagaacccccuacagaacccugcugaugaacgagcugggcgugcccuuccaccugggcaccaagcaggugugcaucgccuggagcagcagcagcugccacgacggcaaggccuggcugcacgugugcaucaccggcgacgacaagaacgccaccgccagcuucaucuacaacggcaagcugguggacagcaucgugagcuggagcaaggagauccugagaacccaggagagcgagugcgugugcaucaacggcaccugcaccguggugaugaccgacggcagcgccagcggcaaggccgacaccaagauccuguucaucgaggagggcaagaucgugcacaccagcacccugagcggcagcgcccagcacguggaggagugcagcugcuaccccagauaccccggcgugagaugcgugugcagagacaacuggaagggcagcaacagacccaucguggacaucaacaucaaggaccacagcaucgugagcagcuacgugugcagcggccuggugggcgacacccccagaaagaacgacagcagcagcagcagccacugccuggaccccaacaacgaggagggcggccacggcgugaagggcugggccuucgacgacggcaacgacguguggaugggcagaaccaucagcgagaagagcagacugggcuacgagaccuucaaggugaucgagggcuggagcaaccccaagagcaagcugcagaucaacagacaggugaucguggacagaggcaacagaagcggcuacagcggcaucuucagcguggagggcaagagcugcaucaacagaugcuucuacguggagcugaucagaggcagaaaggaggagaccgaggugcuguggaccagcaacagcaucgugguguucugcggcaccagcggcaccuacggcaccggcagcuggcccgacggcgccgacaucaaccugaugcccaucuga

SEQ ID NO: 184701 - RNA, 1410 nt, Artificial Sequence; identical to SEQ ID NO: 176659
  derived and/or modified CDS sequence (opt4) from neuraminidase__InfluenzaA__AHL90689

SEQ ID NO: 184702 - RNA, 1410 nt, Artificial Sequence
  derived and/or modified CDS sequence (opt4) from neuraminidase__InfluenzaA__AHL90701
augaaccccaaccagaagaucaucaccaucggcagcgugagccugaccaucagcaccaucugcuucuucaugcagaucgccauccugaucaccaccgugacccugcacuucaagcaguacgaguucaacagcccccccaacaaccaggugaugcugugcgagcccaccaucaucgagagaaacaucaccgagaucguguaccugaccaacaccaccaucgagaaggagaucugccccaagcuggccgaguacagaaacuggagcaagccccagugcgacaucaccggcuucgcccccuucagcaaggacaacagcaucagacugagcgccggcggcggcaucugggugaccagagagcccuacgugagcugcgaccccgacaagugcuaccaguucgcccugggccagggcaccacccugaacaacgugcacagcaacaacaccgugagagacagaacccccuacagaacccugcugaugaacgagcugggcgugcccuuccaccugggcaccaagcaggugugcaucgccuggagcagcagcagcugccacgacggcaaggccuggcugcacgugugcaucaccggcgacgacaagaacgccaccgccagcuucaucuacaacggcagacugguggacagcguggugagcuggagcaaggacauccugagaacccaggagagcgagugcgugugcaucaacggcaccugcaccguggugaugaccgacggcagcgccagcggcaaggccgacaccaagauccuguucaucgaggagggcaagaucgugcacaccagcacccugagcggcagcgcccagcacguggaggagugcagcugcuaccccagauaccccggcgugagaugcgugugcagagacaacuggaagggcagcaacagacccaucguggacaucaacaucaaggaccacagcaucgugagcagcuacgugugcagcggccuggugggcgacacccccagaaagaacgacagcagcagcagcagccacugccuggaccccaacaacgaggagggcggccacggcgugaagggcugggccuucgacgacggcaacgacguguggaugggcagaaccaucagcgagaagagcagacugggcuacgagaccuucaaggugaucgagggcuggagcaaccccaagagcaagcugcagaucaacagacaggugaucguggacagaggcaacagaagcggcuacagcggcaucuucagcguggagggcaagagcugcaucaacagaugcuucuacguggagcugaucagaggcagaaaggaggagaccgaggugcuguggaccagcaacagcaucgugguguucugcggcaccagcggcaccuacggcaccggcagcuggcccgacggcgccgacaucaaccugaugcccaucuga

SEQ ID NO: 184703 - RNA, 1410 nt, Artificial Sequence; identical to SEQ ID NO: 179364
  derived and/or modified CDS sequence (opt4) from neuraminidase__InfluenzaA__AHL90713

SEQ ID NO: 184704 - RNA, 1413 nt, Artificial Sequence; identical to SEQ ID NO: 179997
  derived and/or modified CDS sequence (opt4) from neuraminidase__InfluenzaA__AHL90725

SEQ ID NO: 184705 - RNA, 1413 nt, Artificial Sequence; identical to SEQ ID NO: 178990
  derived and/or modified CDS sequence (opt4) from neuraminidase__InfluenzaA__AHL90749

SEQ ID NO: 184706 - RNA, 1413 nt, Artificial Sequence; identical to SEQ ID NO: 177521
  derived and/or modified CDS sequence (opt4) from neuraminidase__InfluenzaA__AHL90761

SEQ ID NO: 184707 - RNA, 1413 nt, Artificial Sequence
  derived and/or modified CDS sequence (opt4) from neuraminidase__InfluenzaA__AHL90773
augaaccccaaccagaagaucaucaccaucggcagcaucagcaucgccaucggcaucaucagccugaugcugcagaucggcaacaucaucagcaucugggccagccacagcauccagaccggcagccagaacaacaccggcaucugcaaccagagaaucaucaccuacgagaacagcaccugggugaaccacaccuacgugaacaucaacaacaccaacgugguggccggcgaggacaagaccagcaugacccuggccggcaacagcagccugugcagcaucagcggcugggccaucuacaccaaggacaacagcaucagaaucggcagcaagggcgacguguucgugaucagagagcccuucaucagcugcagccaccuggagugcagaaccuucuuccugacccagggcgcccugcugaacgacaagcacagcaacggcaccgugaaggacagaagccccuacagagcccugaugagcugcccccugggcgaggcccccagccccuacaacagcaaguucgagagcguggccuggagcgccagcgccugccacgacggcaugggcuggcugaccaucggcaucagcggccccgacaacggcgccguggccgugcugaaguacaacggcaucaucaccggcaccaucaagagcuggaagaagcagauccugagaacccaggagagcgagugcgugugcaugaacggcagcugcuucaccaucaugaccgacggccccagcaacaaggccgccagcuacaagaucuucaagaucgagaagggcaaggugaccaagagcaucgagcugaacgcccccaacuucuacuacgaggagugcagcugcuaccccgacaccggcaucgugaugugcgugugcagagacaacuggcacggcagcaacagacccugggugagcuucaaccagaaccuggacuaccagaucggcuacaucugcagcggcguguucggcgacaaccccagacccgaggacagagagggcagcugcaaccccgugaccguggacggcgccaacggcgugaagggcuucagcuacaaguacggcaacggcguguggaucggcagaaccaagagcaacagacugagaaagggcuucgagaugaucugggaccccaacggcuggaccaacaccgacagcgacuucagcgugaagcaggacgugguggccaucaccgacuggagcggcuacagcggcagcuucgugcagcaccccgagcugaccggccuggacugcaucagacccugcuucuggguggagcuggugagaggccugcccagagagaacaccaccaucuggaccagcggcagcagcaucagcuucugcggcgugaacagcgacaccgccaacuggagcuggcccgacggcgccgagcugcccuucaccaucgacaaguga

SEQ ID NO: 184708 - RNA, 1413 nt, Artificial Sequence
  derived and/or modified CDS sequence (opt4) from neuraminidase__InfluenzaA__AHL90785
augaaccccaaccagaagaucaucaccaucggcagcaucagcaucgccaucggcaucaucagccugaugcugcagaucggcaacaucaucagcaucugggccagccacagcauccagaccggcagccagaacaacaccggcaucugcaaccagagaaucaucaccuacgagaacagcaccugggugaaccacaccuacgugaacaucaacaacaccaacgugguggccggcgaggacaagaccagcgugacccuggccggcaacagcagccugugcagcaucagcggcugggccaucuacaccaaggacaacagcaucagaaucggcagcaagggcgacguguucgugaucagagagcccuucaucagcugcagccaccuggagugcagaaccuucuuccugacccagggcgcccugcugaacgacaagcacagcaacggcaccgugaaggacagaagccccuacagagcccugaugagcugcccccugggcgaggcccccagccccuacaacagcaaguucgagagcguggccuggagcgccagcgccugccacgacggcaugggcuggcugaccaucggcaucagcggccccgacaacggcgccguggccgugcugaaguacaacggcaucaucaccggcaccaucaagagcuggaagaagcagauccugagaacccaggagagcgagugcgugugcaugaacggcagcugcuucaccaucaugaccgacggccccagcaacaaggccgccagcuacaagaucuucaagaucgagaagggcaaggugaccaagagcaucgagcugaacgcccccaacuucuacuacgaggagugcagcugcuaccccgacaccggcaucgugaugugcgugugcagagacaacuggcacggcagcaacagacccugggugagcuucaaccagaaccuggacuaccagaucggcuacaucugcagcggcguguucggcgacaaccccagacccgaggacggcgagggcagcugcaaccccgugaccgugaacggcgccgacggcgugaagggcuucagcuacaaguacggcaacggcguguggaucggcagaaccaagagcaacagacugagaaagggcuucgagaugaucugggaccccaacggcuggaccaacaccgacagcgacuucagcgugaagcaggacgugguggccaucaccgacuggagcggcuacagcggcagcuucgugcagcaccccgagcugaccggccuggacugcaucagacccugcuucuggguggagcuggugagaggccugcccagagagaacaucaccaucuggaccagcggcagcagcaucagcuucugcggcgugaacagcgacaccgccaacuggagcuggcccgacggcgccgagcugcccuucaccaucgacaaguga

SEQ ID NO: 184709 - RNA, 1413 nt, Artificial Sequence
  derived and/or modified CDS sequence (opt4) from neuraminidase__InfluenzaA__AHL90797
augaaccccaaccagaagaucaucaccaucggcagcaucagcaucgccaucggcaucaucagccugaugcugcagaucggcaacaucaucagcaucugggccagccacagcauccagaccggcagccagaacaacaccggcaucugcaacaagagaaucaucaccuacgagaacagcaccugggugaaccacaccuacgugaacaucaacaacaccaacgugguggccggcgaggacaagaccagcgugacccuggccggcaacagcagccugugcagcaucagcggcugggccaucuacaccaaggacaacagcaucagaaucggcagcaagggcgacguguucgugaucagagagcccuucaucgccugcagccaccuggagugcagaaccuucuuccugacccagggcgcccugcugaacgacaagcacagcaacggcaccgugaaggacagaagccccuacagagcccugaugagcugcccccugggcgaggcccccagccccuacaacagcaaguucgagagcguggccuggagcgccagcgccugccacgacggcaugggcuggcugaccaucggcaucagcggccccgacaacggcgccguggccgugcugaaguacaacggcaucaucaccggcaccaucaagagcuggaagaagcagauccugagaacccaggagagcgagugcgugugcaugaacggcagcugcuucaccaucaugaccgacggccccagcgacaaggccgccagcuacaagaucuucaagaucgagaagggcaaggugaccaagagcaucgagcugaacgcccccaacuuccacuacgaggagugcagcugcuaccccgacaccggcaucgugaugugcgugugcagagacaacuggcacggcagcaacagacccugggugagcuucaaccagaaccuggacuaccagaucggcuacaucugcagcggcguguucggcgacaaccccagacccgaggacggcgagggcagcugcagccccgugaccguggacggcgccaacggcgugaagggcuucagcuacaaguacgacaacggcguguggaucggcagaaccaagagcaacagacugagaaagggcuucgaggugaucugggaccccaacggcuggaccaacaccgacagcgacuucagcgugaagcaggacgugguggccaucaccgacuggagcggcuacagcggcagcuucgugcagcaccccgagcugaccggccuggacugcaucagacccugcuucuggguggagcuggugagaggccugcccagagagaacaccaccaucuggaccagcggcagcagcaucagcuucugcggcgugaacagcgacaccgccaacuggagcuggcccgacggcgccgagcugcccuucaccaucgacaaguga

SEQ ID NO: 184710 - RNA, 1413 nt, Artificial Sequence; identical to SEQ ID NO: 177521
  derived and/or modified CDS sequence (opt4) from neuraminidase__InfluenzaA__AHL90809

SEQ ID NO: 184711 - RNA, 1413 nt, Artificial Sequence; identical to SEQ ID NO: 179997
  derived and/or modified CDS sequence (opt4) from neuraminidase__InfluenzaA__AHL90821

SEQ ID NO: 184712 - RNA, 1413 nt, Artificial Sequence
  derived and/or modified CDS sequence (opt4) from neuraminidase__InfluenzaA__AHL90833
augaaccccaaccagagaaucaucaccaucggcagcaucagcaucgccaucggcaucaucagccugaugcugcagaucggcaacaucaucagcaucugggccagccacagcauccagaccggcagccagaacaacaccggcaucugcaaccagagaaucaucaccuacgagaacagcaccugggugaaccacaccuacgugaacaucaacaacaccaacgugguggccggcgaggacaagaccagcgugacccuggccggcaacagcagccugugcagcaucagcggcugggccaucuacaccaaggacaacagcaucagaaucggcagcaagggcgacguguucgugaucagagagcccuucaucagcugcagccaccuggagugcagaaccuucuuccugacccagggcgcccugcugaacgacaagcacagcaacggcaccgccaaggacagaagccccuacagagcccugaugagcugcccccugggcgaggcccccagccccuacaacagcaaguucgagagcguggccuggagcgccagcgccugccacgacggcaugggcuggcugaccaucggcaucagcggccccgacaacggcgccguggccgugcugaaguacaacggcaucaucaccggcaccaucaagagcuggaagaagcagauccugagaacccaggagagcgagugcgugugcaugaacggcagcugcuucaccaucaugaccgacggccccagcaacaaggccgccagcuacaagaucuucaagaucgagaagggcaaggugaccaagagcaucgagcugaacgcccccaacuucuacuacgaggagugcagcugcuaccccgacaccggcaucgugaugugcgugugcagagacaacuggcacggcagcaacagacccugggugagcuucaaccagaaccuggacuaccagaugggcuacaucugcagcggcguguucggcgacaaccccagacccgaggacggcgagggcagcugcaaccccgugaccguggacggcgccaacggcgugaagggcuucagcuacaaguacggcaacggcguguggaucggcagaaccaagagcaacagacugagaaagggcuucgagaugaucugggaccccaacggcuggaccaacaccgacagcgacuucagcgugaagcaggacgugguggccaucaccgacuggagcggcuacagcggcagcuucgugcagcaccccgagcugaccggccuggacugcaucagacccugcuucuggguggagcuggugagaggccugcccagagagaacaccaccaucuggaccagcggcagcagcaucagcuucugcggcgugaacagcgacaccgccaacuggagcuggcccgacggcgccgagcugcccuucaccaucgacaaguga

SEQ ID NO: 184713 - RNA, 1413 nt, Artificial Sequence; identical to SEQ ID NO: 177521
  derived and/or modified CDS sequence (opt4) from neuraminidase__InfluenzaA__AHL90845

SEQ ID NO: 184714 - RNA, 1413 nt, Artificial Sequence; identical to SEQ ID NO: 178990
  derived and/or modified CDS sequence (opt4) from neuraminidase__InfluenzaA__AHL90857

SEQ ID NO: 184715 - RNA, 1413 nt, Artificial Sequence; identical to SEQ ID NO: 177521
  derived and/or modified CDS sequence (opt4) from neuraminidase__InfluenzaA__AHL90869

SEQ ID NO: 184716 - RNA, 1413 nt, Artificial Sequence
  derived and/or modified CDS sequence (opt4) from neuraminidase__InfluenzaA__AHL90881
augaaccccaaccagaagaucaucaccaucggcagcaucagcaucgccaucggcaucaucagcaccaugcugcagaucggcagcaucaucagcaucugggccagccacagcauccagaccggcagccagaacaacaccggcaucugcaaccagagaaucaucaccuacgagaacagcaccugggugaaccacaccuacgugaacaucaacaacaccaacgugguggccggcgaggacaagaccagcgugacccuggccggcaacagcagccugugcagcaucagcggcugggccaucuacaccaaggacaacagcaucagaaucggcagcaagggcgacguguucgugaucagagagcccuucaucagcugcagccaccuggagugcagaaccuucuuccugacccagggcgcccugcugaacgacaagcacagcaacggcaccgugaaggacagaagccccuacagagcccugaugagcugcccccugggcgaggcccccagccccuacaacagcaaguucgagagcguggccuggagcgccagcgccugccacgacggcaugggcuggcugaccaucggcaucagcggccccgacaacggcgccguggccgugcugaaguacaacggcaucaucaccggcaccaucaagagcuggaagaagcagauccugagaacccaggagagcgagugcgugugcaugaacggcagcugcuucaccaucaugaccgacggccccagcaacaaggccgccagcuacaagaucuucaagaucgagaagggcaaggugaccaagagcaucgagcugaacgcccccaacuucuacuacgaggagugcagcugcuaccccgacaccggcaucgugaugugcgugugcagagacaacuggcacggcagcaacagacccugggugagcuucaaccagaaccuggacuaccagaucggcuacaucugcagcggcguguucggcgacaaccccagacccgaggacggcgagggcagcugcaaccccgugaccguggacggcgccaacggcgugaagggcuucagcuacaaguacggcaacggcguguggaucggcagaaccaagagcaacagacugaucaagggcuucgagaugaucugggaccccaacggcuggaccaacaccgacagcgacuucagcgugaagcaggacgugguggccaucaccgacuggagcggcuacagcggcagcuucgugcagcaccccgagcugaccggccuggacugcaucagacccugcuucuggguggagcuggugagaggccugcccagagagaacaccaccaucuggaccagcggcagcagcaucagcuucugcggcgugaacagcgacaccgccaacuggagcuggcccgacggcgccgagcugcccuucaccaucgacaaguga

SEQ ID NO: 184717 - RNA, 1413 nt, Artificial Sequence; identical to SEQ ID NO: 179997
  derived and/or modified CDS sequence (opt4) from neuraminidase__InfluenzaA__AHL90893

SEQ ID NO: 184718 - RNA, 1413 nt, Artificial Sequence; identical to SEQ ID NO: 178990
  derived and/or modified CDS sequence (opt4) from neuraminidase__InfluenzaA__AHL90905

SEQ ID NO: 184719 - RNA, 1413 nt, Artificial Sequence
  derived and/or modified CDS sequence (opt4) from neuraminidase__InfluenzaA__AHL90917
augaaccccaaccagaagaucaucaccaucggcagcaucagcaucgccaucggcaucaucagccugacccugcagaucggcaacaucaucagcaucugggccagccacagcauccagaccggcagccagaacaacaccggcaucugcaaccagagaaucaucaccuacgagaacagcaccugggugaaccacaccuacgugaacaucaacaacaccaacgugguggccggcgaggacaagaccagcgugacccuggccggcaacagcagccugugcagcaucagcggcugggccaucuacaccaaggacaacagcaucagaaucggcagcaagggcgacguguucgugaucagagagcccuucaucagcugcagccaccuggagugcagaaccuucuuccugacccagggcgcccugcugaacgacaagcacagcaacggcaccgugaaggacagaagccccuacagagcccugaugagcugcccccugggcgaggcccccagccccuacaacagcaaguucgagagcguggccuggagcgccagcgccugccacgacggcaugggcuggcugaccaucggcaucagcggccccgacaacggcgccguggccgugcugaaguacaacggcaucaucaccggcaccaucaagagcuggaagaagcagauccugagaacccaggagagcgagugcgugugcaugaacggcagcugcuucaccaucaugaccgacggccccagcaacaaggccgccagcuacaagaucuucaagaucgagaagggcaaggugaccaagagcaucgagcugaacgcccccaacuucuacuacgaggagugcagcugcuaccccgacaccggcaucgugaugugcgugugcagagacaacuggcacggcagcaacagacccugggugagcuucaaccagaaccuggacuaccagaucggcuacaucugcagcggcguguucggcgacaaccccagacccgaggacggcgagggcagcugcaaccccgugaccguggacggcgccaacggcgugaagggcuucagcuacaaguacggcaacggcguguggaucggcagaaccaagagcaacagacugagaaagggcuucgagaugaucugggaccccaacggcuggaccaacaccgacagcgacuucagcgugaagcaggacgugguggccaucaccgacuggagcggcuacagcggcagcuucgugcagcaccccgagcugaccggccuggacugcaucagacccugcuucuggguggagcuggugagaggccugcccagagagaacaccaccaucuggaccagcggcagcagcaucagcuucugcggcgugaacagcgacaccgccaacuggagcuggcccgacggcgccgagcugcccuucaccaucgacaaguga

SEQ ID NO: 184720 - RNA, 1413 nt, Artificial Sequence
  derived and/or modified CDS sequence (opt4) from neuraminidase__InfluenzaA__AHL90929
augaaccccaaccagaagaucaucaccaucggcagcaucagcaucgccaucggcaucaucagccugaugcugcagaucggcaacaucaucagcaucugggccagccacagcauccagaccggcagccagaacaacaccggcaucugcaaccagagaaucaucaccuacgagaacagcaccugggugaaccacaccuacgugaacaucaacaacaccaacgugguggccggcgaggacaagaccagcaugacccuggccggcaacagcagccugugcagcaucagcggcugggccaucuacaccaaggacaacagcaucagaaucggcagcaagggcgacguguucgugaucagagagcccuucaucagcugcagccaccuggagugcagaaccuucuuccugacccagggcgcccugcugaacgacaagcacagcaacggcaccgugaaggacagaagccccuacagagcccugaugagcugcccccugggcgaggcccccagccccuacaacagcaaguucgagagcguggccuggagcgccagcgccugccacgacggcaugggcuggcugaccaucggcaucagcggccccgacaacggcgccguggccgugcugaaguacaacggcaucaucaccggcaccaucaagagcuggaagaagcagauccugagaacccaggagagcgagugcgugugcaugaacggcagcugcuucaccaucaugaccgacggccccagcaacaaggccgccagcuacaagaucuucaagaucgagaagggcaaggugaccaagagcaucgagcugaacgcccccaacuucuacuacgaggagugcagcugcuaccccgacaccggcaucgugaugugcgugugcagagacaacuggcacggcagcaacagacccugggugagcuucaaccagaaccuggacuaccagaucggcuacaucugcagcggcguguucggcgacaaccccagacccgaggacggcgagggcagcugcaaccccgugaccguggacggcgccaacggcgugaagggcuucagcuacaaguacggcaacggcguguggaucggcagaaccaagagcaacagacugagaaagggcuucgagaugaucugggaccccaacggcuggaccaacaccgacagcgacuucagcgugaagcaggacgugguggccaucaccgacuggagcggcuacagcggcagcuucgugcagcaccccgagcugaccggccuggacugcaucagacccugcuucuggguggagcuggugagaggccugcccagagagaacaccaccaucuggaccagcggcagcagcaucagcuucugcggcgugaacagcgacaccgccaacuggagcuggcccgacggcgccgagcugcccuucaccaucgacaaguga

SEQ ID NO: 184721 - RNA, 1413 nt, Artificial Sequence; identical to SEQ ID NO: 178990
  derived and/or modified CDS sequence (opt4) from neuraminidase__InfluenzaA__AHL90941

SEQ ID NO: 184722 - RNA, 1413 nt, Artificial Sequence; identical to SEQ ID NO: 178990
  derived and/or modified CDS sequence (opt4) from neuraminidase__InfluenzaA__AHL90953

SEQ ID NO: 184723 - RNA, 1413 nt, Artificial Sequence; identical to SEQ ID NO: 178990
  derived and/or modified CDS sequence (opt4) from neuraminidase__InfluenzaA__AHL90965

SEQ ID NO: 184724 - RNA, 1413 nt, Artificial Sequence
  derived and/or modified CDS sequence (opt4) from neuraminidase__InfluenzaA__AHL90977
augaaccccaaccagaagaucaucaccaucggcagcaucagcaucgccaucggcaucaucagccugaugcugcagaucggcaacaucaucagcaucugggccagccacagcauccagaccggcagccagaacaacaccggcaucugcaaccagagaaucaucaccuacgagaacagcaccugggugaaccacaccuacgugaacaucaacaacaccaacgugguggccggcgaggacaagaccagcgugacccuggccggcaacagcagccugugcagcaucagcggcugggccaucuacaccaaggacaacagcaucagaaucggcagcaagggcgacguguucgugaucagagagcccuucaucagcugcagccaccuggagugcagaaccuucuuccugacccagggcgcccugcugaacgacaagcacagcaacggcaccgugaaggacagaagccccuacagagcccugaugagcugcccccugggcgaggcccccagccccuacaacagcaaguucgagagcguggccuggagcgccagcgccugccacgacggcaugggcuggcugaccaucggcaucagcggccccgacaacggcgccguggccgugcugaaguacaacggcaucaucaccggcaccaucaagagcuggaagaagcagauccugagaacccaggagagcgagugcgugugcaugaacggcagcugcuucaccaucaugaccgacggccccagcaacaaggccgccagcuacaagaucuucaagaucgagaagggcaaggugaccaagagcaucgagcugaacgcccccaacuucuacuacgaggagugcagcugcuaccccgacaccggcaucgugaugugcgugugcagagacaacuggcacggcagcaacagacccugggugagcuucaaccagaaccuggacuaccagaucggcuacaucugcagcggcguguucggcgacaaccccagacccgaggacggcgagggcagcugcaaccccgugaccguggacggcgccaacggcgugaagggcuucagcuacaaguacggcaacggcguguggaucggcagaaccaagagcaacagacugagaaagggcuucgagaugaucugggaccccaacggcuggaccaacaccgacagcgacuucagcgugaagcaggacgugguggccaucgccgacuggagcggcuacagcggcagcuucgugcagcaccccgagcugaccggccuggacugcaucagacccugcuucuggguggagcuggugagaggccugcccagagagaacaccaccaucuggaccagcggcagcagcaucagcuucugcggcgugaacagcgacaccgccaacuggagcuggcccgacggcgccgagcugcccuucaccaucgacaaguga

SEQ ID NO: 184725 - RNA, 1413 nt, Artificial Sequence; identical to SEQ ID NO: 180264
  derived and/or modified CDS sequence (opt4) from neuraminidase__InfluenzaA__AHL90989

SEQ ID NO: 184726 - RNA, 1413 nt, Artificial Sequence; identical to SEQ ID NO: 184720
  derived and/or modified CDS sequence (opt4) from neuraminidase__InfluenzaA__AHL91001

SEQ ID NO: 184727 - RNA, 1413 nt, Artificial Sequence
  derived and/or modified CDS sequence (opt4) from neuraminidase__InfluenzaA__AHL91013
augaaccccaaccagaagaucaucaccaucggcagcaucagcaucgccaucggcaucaucagccugaugcugcagaucggcaacaucaucagcaucugggccagccacagcauccagaccggcagccagaacaacaccggcaucugcagccagagaaucaucaccuacgagaacagcaccugggugaaccacaccuacgugaacaucaacaacaccaacgugguggccggcgaggacaagaccagcaugacccuggccggcaacagcagccugugcagcaucagcggcugggccaucuacaccaaggacaacagcaucagaaucggcagcaagggcgacguguucgugaucagagagcccuucaucagcugcagccaccuggagugcagaaccuucuuccugacccagggcgcccugcugaacgacaagcacagcaacggcaccgugaaggacagaagccccuacagagcccugaugagcugcccccugggcgaggcccccagccccuacaacagcaaguucgagagcguggccuggagcgccagcgccugccacgacggcaugggcuggcugaccaucggcaucagcggccccgacaacggcgccguggccgugcugaaguacaacggcaucaucaccggcaccaucagaagcuggaagaagcagauccugagaacccaggagagcgagugcgugugcaugaacggcagcugcuucaccaucaugaccgacggccccagcaacaaggccgccagcuacaagaucuucaagaucgagaagggcaaggugaccaagagcaucgagcugaacgcccccaacuucuacuacgaggagugcagcugcuaccccgacaccggcaucgugaugugcgugugcagagacaacuggcacggcagcaacagacccugggugagcuucaaccagaaccuggacuaccagaucggcuacaucugcagcggcguguucggcgacaaccccagacccgaggacggcgagggcagcugcaaccccgugaccguggacggcgccaacggcgugaagggcuucagcuacaaguacggcaacggcguguggaucggcagaaccaagagcaacagacugagaaagggcuucgagaugaucugggaccccaacggcuggaccaacaccgacagcgacuucagcgugaagcaggacgugguggccaucaccgacuggagcggcuacagcggcagcuucgugcagcaccccgagcugaccggccuggacugcaucagacccugcuucuggguggagcuggugagaggccugcccagagagaacaccaccaucuggaccagcggcagcagcaucagcuucugcggcgugaacagcgacaccgccaacuggagcuggcccgacggcgccgagcugcccuucaccaucgacaaguga

SEQ ID NO: 184728 - RNA, 1413 nt, Artificial Sequence; identical to SEQ ID NO: 184720
  derived and/or modified CDS sequence (opt4) from neuraminidase__InfluenzaA__AHL91025

SEQ ID NO: 184729 - RNA, 1410 nt, Artificial Sequence; identical to SEQ ID NO: 177965
  derived and/or modified CDS sequence (opt4) from neuraminidase__InfluenzaA__AHL91037

SEQ ID NO: 184730 - RNA, 1410 nt, Artificial Sequence; identical to SEQ ID NO: 179578
  derived and/or modified CDS sequence (opt4) from neuraminidase__InfluenzaA__AHL91049

SEQ ID NO: 184731 - RNA, 1410 nt, Artificial Sequence
  derived and/or modified CDS sequence (opt4) from neuraminidase__InfluenzaA__AHL91061
augaaccccaaccagaagaucaucaccaucggcagcgugagccugaccaucagcaccaucugcuucuucaugcagaucgccauccugaucaccaccgugacccugcacuucaagcaguacgaguucaacagcccccccaacaaccaggugaugcugugcgagcccaccaucaucgagagaaacaucaccgagaucguguaccugaccaacaccaccaucgagaaggagaucugccccaagcuggccgaguacagaaacuggagcaagccccagugcgacaucaccggcuucgcccccuucagcaaggacaacagcaucagacugagcgccggcggcgacaucugggugaccagagagcccuacgugagcugcgaccccgacaagugcuaccaguucgcccugggccagggcaccacccugaacaacgugcacagcaacaacaccgugagagacagaacccccuacagaacccugcugaugaacgagcugggcgugcccuuccaccugggcaccaagcaggugugcaucgccuggagcagcagcagcugccacgacggcaaggccuggcugcacgugugcaucaccggcgacgacaagaacgccaccgccagcuucaucuacaacggcagacugguggacagcguggugagcuggagcaaggagauccugagaacccaggagagcgagugcgugugcaucaacggcaccugcaccguggugaugaccgacggcagcgccagcggcaaggccgacaccaagauccuguucaucgaggagggcaagaucgugcacaccagcacccugagcggcagcgcccagcacguggaggagugcagcugcuaccccagauaccccggcgugagaugcgugugcagagacaacuggaagggcagcaacagacccaucguggacaucaacaucaaggaccacagcaucgugagcagcuacgugugcagcggccuggugggcgacacccccagaaagaacgacagcagcagcagcagccacugccugaaccccaacaacgaggagggcggccacggcgugaagggcugggccuucgacgacggcaacgacguguggaugggcagaaccaucagcgagaagagcagacugggcuacgagaccuucaaggugaucgagggcuggagcaaccacaagagcaagcugcagaucaacagacaggugaucguggacagaggcaacagaagcggcuacagcggcaucuucagcguggagggcaagagcugcaucaacagaugcuucuacguggagcugaucagaggcagaaaggaggagaccgaggugcuguggaccagcaacagcaucgugguguucugcggcaccagcggcaccuacggcaccggcagcuggcccgacggcgccgaccugaaccugaugcccaucuga

SEQ ID NO: 184732 - RNA, 1410 nt, Artificial Sequence
  derived and/or modified CDS sequence (opt4) from neuraminidase__InfluenzaA__AHL91073
augaaccccaaccagaagaucaucaccaucggcagcgugagccugaccaucagcaccaucugcuucuucaugcagaucgccauccugaucaccaccgugacccugcacuucaagcaguacgaguucaacagcccccccaacaaccaggugaugcugugcgagcccaccaucaucgagagaaacaucaccgagaucguguaccugaccaacaccaccaucgagaaggagaucugccccaagcuggccgaguacagaaccuggagcaagccccagugcgacaucaccggcuucgcccccuucagcaaggacaacagcaucagacugagcgccggcggcgacaucugggugaccagagagcccuacgugagcugcgaccccgacaagugcuaccaguucgcccugggccagggcaccacccugaacaacgugcacagcaacaacaccgugagagacagaacccccuacagaacccugcugaugaacgagcugggcgugcccuuccaccugggcaccaagcaggugugcaucgccuggagcagcagcagcugccacgacggcaaggccuggcugcacgugugcaucaccggcgacgacaagaacgccaccgccagcuucaucuacaacggcagacugguggacagcguggugagcuggagcaaggagauccugagaacccaggagagcgagugcgugugcaucaacggcaccugcaccguggugaugaccgacggcagcgccagcggcaaggccgacaccaagauccuguucaucgaggagggcaagaucgugcacaccagcacccugagcggcagcgcccagcacguggaggagugcagcugcuaccccagauaccccggcgugagaugcgugugcagagacaacuggaagggcagcaacagacccaucguggacaucaacaucaaggaccacagcaucgugagcagcuacgugugcagcggccuggugggcgacacccccagaaagaacgacagcagcagcggcagccacugccuggaccccaacaacgaggagggcggccacggcgugaagggcugggccuucgacgacggcaacgacguguggaugggcagaaccaucagcgagaagagcagacugggcuacgagaccuucaaggugaucgagggcuggagcaaccacaagagcaagcugcagaucaacagacaggugaucguggacagaggcaacagaagcggcuacagcggcaucuucagcguggagggcaagagcugcaucaacagaugcuucuacguggagcugaucagaggcagaaaggaggagaccgaggugcuguggaccagcaacagcaucgugguguucugcggcaccagcggcaccuacggcaccggcagcuggcccgacggcgccgaccugaaccugaugcccaucuga

SEQ ID NO: 184733 - RNA, 1410 nt, Artificial Sequence
  derived and/or modified CDS sequence (opt4) from neuraminidase__InfluenzaA__AHL91085
augaaccccaaccagaagaucaucaccaucggcagcgugagccugaccaucagcaccaucugcuucuucaugcagaucgccauccugaucaccaccgugacccugcacuucaagcaguacgaguucaacagcccccccaacaaccaggugaugcugugcgagcccaagaucaucgagagaaacaucaccgagaucguguaccugaccaacaccaccaucgagaaggagaucugccccaagcuggccgaguacagaaacuggagcaagccccagugcgacaucaccggcuucgcccccuucagcaaggacaacagcaucagacugagcgccggcggcgacaucugggugaccagagagcccuacgugagcugcgaccccgacaagugcuaccaguucgcccugggccagggcaccacccugaacaacgugcacagcaacaacaccgugagagacagaacccccuacagaacccugcugaugaacgagcugggcgugcccuuccaccugggcaccaagcaggugugcaucgccuggagcagcagcagcugccacgacggcaaggccuggcugcacgugugcaucaccggcgacgacaagaacgccaccgccagcuucaucuacaacggcagacugguggacagcguggugagcuggagcaaggagauccugagaacccaggagagcgagugcgugugcaucaacggcaucugcaccguggugaugaccgacggcagcgccagcggcaaggccgacaccaagauccuguucaucgaggagggcaagaucgugcacaccagcacccugagcggcagcgcccagcacguggaggagugcagcugcuaccccagauaccccggcgugagaugcgugugcagagacaacuggaagggcagcaacagacccaucguggacaucaacaucaaggaccacagcaucgugagcagcuacgugugcagcggccuggugggcgacacccccagaaagaacgacagcagcagcagcagccacugccuggaccccaacaacgaggagggcggccacggcgugaagggcugggccuucgacgacggcaacgacguguggaugggcagaaccaucagcgagaagagcagacugggcuacgagaccuucaaggugaucgagggcuggagcaaccccaagagcaagcugcagaucaacagacaggugaucguggacagaggcaacagaagcggcuacagcggcaucuucagcguggagggcaagagcugcaucaacagaugcuucuacguggagcugaucagaggcagaaaggaggagaccgaggugcuguggaccagcaacagcaucgugguguucugcggcaccagcggcaccuacggcaccggcagcuggcccgacggcgccgacaucaaccugaugcccaucuga

SEQ ID NO: 184734 - RNA, 1410 nt, Artificial Sequence; identical to SEQ ID NO: 176659
  derived and/or modified CDS sequence (opt4) from neuraminidase__InfluenzaA__AHL91097

SEQ ID NO: 184735 - RNA, 1410 nt, Artificial Sequence
  derived and/or modified CDS sequence (opt4) from neuraminidase__InfluenzaA__AHL91109
augaaccccaaccagaagaucaucaccaucggcagcgugagccugaccaucagcaccaucugcuucuucaugcagaucgccauccugaucaccaccgugacccugcacuucaagcaguacgaguucaacagcccccccaacaaccaggugaugcugugcgagcccaccaucaucgagagaaacaucaccgagaucguguaccugaccaacaccaccaucgagaaggagaucugccccaagcuggccgaguacagaaacuggagcaagccccagugcgacaucaccggcuucgcccccuucagcaaggacaacagcaucagacugagcgccggcggcgacaucugggugaccagagagcccuacgugagcugcgaccccgacaagugcuaccaguucgcccugggccagggcaccacccugaacaacgugcacagcaacaacaccgugagagacagaacccccuacagaacccugcugaugaacgagcugggcgugcccuuccaccugggcaccaagcaggugugcaucgccuggagcagcagcagcugccacgacggcaaggccuggcugcacgugugcaucaccggcgacgacaagaacgccaccgccagcuucaucuacaacggcagacugguggacagcguggugagcuggagcaaggagauccugagaacccaggagagcgagugcgugugcaucaacggcaccugcaccguggugaugaccgacggcagcgccagcggcaaggccgacaccaagauccuguucaucgaggagggcaagaucgugcacaccagcacccugagcggcagcgcccagcacguggaggagugcagcugcuaccccagauaccccggcgugagaugcgugugcagagacaacuggaagggcagcaacagacccaucguggacaucaacaucaaggaccacagcaucgugagcagcuacgugugcagcggccuggugggcgacacccccagaaagaacgacagcagcagcagcagccacugccuggaccccaacaacgaggagggcggccacggcgugaagggcugggccuucgacgacggcaacgacguguggaugggcagaaccaucagcgagaagagcagacugggcuacgagaccuucaaggugaucgagggcuggagcaaccacaagagcaagcugcagaucaacagacaggugaucguggacagaggcaacagaagcggcuacagcggcaucuucagcguggagggcaagagcugcaucaacagaugcuucuacguggagcugaucagaggcagaaaggaggagaccgaggugcuguggaccagcaacagcaucgugguguucugcggcaccagcggcaccuacggcaccggcagcuggcccgacggcgccgaccugaacaucaugcccaucuga

SEQ ID NO: 184736 - RNA, 1410 nt, Artificial Sequence; identical to SEQ ID NO: 177965
  derived and/or modified CDS sequence (opt4) from neuraminidase__InfluenzaA__AHL91121

SEQ ID NO: 184737 - RNA, 1410 nt, Artificial Sequence
  derived and/or modified CDS sequence (opt4) from neuraminidase__InfluenzaA__AHL91133
augaaccccaaccagaagaucaucaccaucggcagcgugagccugaccaucagcaccaucugcuucuucaugcagaucgccauccugaucaccaccgugacccugcacuucaagcaguucgaguucaacagcccccccaacaaccaggugaugcugugcgagcccaccaucaucgagagaaacaucaccgagaucguguaccugaccaacaccaccaucgagaaggagaucugccccaagcuggccgaguacagaaacuggagcaagccccagugcgacaucaccggcuucgcccccuucagcaaggacaacagcaucagacugagcgccggcggcgacaucugggugaccagagagcccuacgugagcugcgaccccgacaagugcuaccaguucgcccugggccagggcaccacccugaacaacgugcacagcaacaacaccgugagagacagaacccccuacagaacccugcugaugaacgagcugggcgugcccuuccaccugggcaccaagcaggugugcaucgccuggagcagcagcagcugccacgacggcaaggccuggcugcacgugugcaucaccggcgacgacaagaacgccaccgccagcuucaucuacaacggcagacugguggacagcguggugagcuggagcaaggagauccugagaacccaggagagcgagugcgugugcaucaacggcaccugcaccguggugaugaccgacggcagcgccagcggcaaggccgacaccaagauccuguucaucgaggagggcaagaucgugcacaccagcacccugagcggcagcgcccagcacguggaggagugcagcugcuaccccagauaccccggcgugagaugcgugugcagagacaacuggaagggcagcaacagacccaucguggacaucaacaucaaggaccacagcaucgugagcagcuacgugugcagcggccuggugggcgacacccccagaaagaacgacagcagcagcagcagccacugccuggaccccaacaacgaggagggcggccacggcgugaagggcugggccuucgacgacggcaacgacguguggaugggcagaaccaucagcgagaagagcagacugggcuacgagaccuucaaggugaucgagggcuggagcaaccacaagagcaagcugcagaucaacagacaggugaucguggacagaggcaacagaagcggcuacagcggcaucuucagcguggagggcaagagcugcaucaacagaugcuucuacguggagcugaucagaggcagaaaggaggagaccgaggugcuguggaccagcaacagcaucgugguguucugcggcaccagcggcaccuacggcaccggcagcuggcccgacggcgccgaccugaaccugaugcccaucuga

SEQ ID NO: 184738 - RNA, 1410 nt, Artificial Sequence; identical to SEQ ID NO: 179364
  derived and/or modified CDS sequence (opt4) from neuraminidase__InfluenzaA__AHL91145

SEQ ID NO: 184739 - RNA, 1410 nt, Artificial Sequence; identical to SEQ ID NO: 179364
  derived and/or modified CDS sequence (opt4) from neuraminidase__InfluenzaA__AHL91157

SEQ ID NO: 184740 - RNA, 1410 nt, Artificial Sequence; identical to SEQ ID NO: 174772
  derived and/or modified CDS sequence (opt4) from neuraminidase__InfluenzaA__AHL91169

SEQ ID NO: 184741 - RNA, 1410 nt, Artificial Sequence; identical to SEQ ID NO: 182206
  derived and/or modified CDS sequence (opt4) from neuraminidase__InfluenzaA__AHL94987

SEQ ID NO: 184742 - RNA, 1410 nt, Artificial Sequence; identical to SEQ ID NO: 182206
  derived and/or modified CDS sequence (opt4) from neuraminidase__InfluenzaA__AHL94999

SEQ ID NO: 184743 - RNA, 1410 nt, Artificial Sequence
  derived and/or modified CDS sequence (opt4) from neuraminidase__InfluenzaA__AHL95011
augaaccccaaccagaagaucaucaccaucggcagcgugagccugaccaucagcaccaucugcuucuucaugcagaucgccauccugaucaccaccgugacccugcacuucaagcaguacgaguucaacagcccccccaacaaccaggugaugcugugcgagcccaccaucaucgagagaaacaucaccgagaucguguaccugaccaacaccaccaucgagaaggagaucugccccaagcccgccgaguacagaaacuggagcaagccccagugcgacaucaccggcuucgcccccuucagcaaggacaacagcaucagacugagcgccggcggcgacaucugggugaccagagagcccuacgugagcugcgaccccgacaagugcuaccaguucgcccugggccagggcaccacccugaacaacgugcacagcaacaacaccgugagagacagaacccccuacagaacccugcugaugaacgagcugggcgugcccuuccaccugggcaccaagcaggugugcaucgccuggagcagcagcagcugccacgacggcaaggccuggcugcacgugugcaucaccggcgacgacaagaacgccaccgccagcuucaucuacaacggcagacugguggacagcguggugagcuggagcaaggagauccugagaacccaggagagcgagugcgugugcaucaacggcaccugcaccguggugaugaccgacggcagcgccagcggcaaggccgacaccaagauccuguucaucgaggagggcaagaucgugcacaccagcacccugagcggcagcgcccagcacguggaggagugcagcugcuaccccagauaccccggcgugagaugcgugugcagagacaacuggaagggcagcaacagacccaucguggacaucaacaucaaggaccacagcaucgugagcagauacgugugcagcggccuggugggcgacacccccagaaagaacgacagcagcagcagcagccacugccuggaccccaacaacgaggagggcggccacggcgugaagggcugggccuucgacgacggcaacgacguguggaugggcagaaccaucaacgagaccagcagacugggcuacgagaccuucaaggugaucgagggcugguucaaccccaagagcaagcugcagaucaacagacaggugaucguggacagaggcgacagaagcggcuacagcggcaucuucagcguggagggcaagagcugcaucaacagaugcuucuacguggagcugaucagaggcagaaaggaggagaccgaggugcuguggaccagcaacagcaucgugguguucugcggcaccagcggcaccuacggcaccggcagcuggcccgacggcgccgaccugaaccugaugcccaucuga

SEQ ID NO: 184744 - RNA, 1410 nt, Artificial Sequence; identical to SEQ ID NO: 183963
  derived and/or modified CDS sequence (opt4) from neuraminidase__InfluenzaA__AHL95023

SEQ ID NO: 184745 - RNA, 1410 nt, Artificial Sequence; identical to SEQ ID NO: 182206
  derived and/or modified CDS sequence (opt4) from neuraminidase__InfluenzaA__AHL95035

SEQ ID NO: 184746 - RNA, 1410 nt, Artificial Sequence; identical to SEQ ID NO: 182206
  derived and/or modified CDS sequence (opt4) from neuraminidase__InfluenzaA__AHL95047

SEQ ID NO: 184747 - RNA, 1410 nt, Artificial Sequence; identical to SEQ ID NO: 183954
  derived and/or modified CDS sequence (opt4) from neuraminidase__InfluenzaA__AHL95059

SEQ ID NO: 184748 - RNA, 1410 nt, Artificial Sequence; identical to SEQ ID NO: 182206
  derived and/or modified CDS sequence (opt4) from neuraminidase__InfluenzaA__AHL95071

SEQ ID NO: 184749 - RNA, 1410 nt, Artificial Sequence; identical to SEQ ID NO: 182206
  derived and/or modified CDS sequence (opt4) from neuraminidase__InfluenzaA__AHL95083

SEQ ID NO: 184750 - RNA, 1410 nt, Artificial Sequence; identical to SEQ ID NO: 182206
  derived and/or modified CDS sequence (opt4) from neuraminidase__InfluenzaA__AHL95095

SEQ ID NO: 184751 - RNA, 1410 nt, Artificial Sequence; identical to SEQ ID NO: 182206
  derived and/or modified CDS sequence (opt4) from neuraminidase__InfluenzaA__AHL95107

SEQ ID NO: 184752 - RNA, 1410 nt, Artificial Sequence
  derived and/or modified CDS sequence (opt4) from neuraminidase__InfluenzaA__AHL95119
augaaccccaaccagaagaucaucaccaucggcagcgugagccugaccaucagcaccaucugcuucuucaugcagaucgccauccugaucaccaccgugacccugcacuucaagcaguacgaguucaacagcccccccaacaaccaggugaugcugugcgagcccaccaucaucgagagaaacaucaccgagaucguguaccugaccaacaccaccaucgagaaggagaucugccccaagcccgccgaguacagaaacuggagcaagccccagugcgacaucaccggcuucgcccccuucagcaaggacaacagcaucagacugagcgccggcggcgacaucugggugaccagagagcccuacgugagcugcgaccccgacaagugcuaccaguucgcccugggccagggcaccacccugaacaacgugcacagcaacaacaccgugagagacagaacccccuacagaacccugcugaugaacgagcugggcgugcccuuccaccugggcaccaagcaggugugcaucgccuggagcagcagcagcugccacgacggcaaggccuggcugcacgugugcaucaccggcgacgacaagaacgccaccgccagcuucaucuacaacggcagacugguggacagcguggugagcuggagcaaggagauccugagaacccaggagagcgagugcgugugcaucaacggcaccugcaccguggugaugaccgacggcagcgccagcggcaaggccgacaccaagauccuguucaucgaggagggcaagaucgugcacaccagcacccugagcggcagcgcccagcacguggaggagugcagcugcuaccccagauaccccggcgugagaugcgugugcagagacaacuggaagggcagcaacagacccaucguggacaucaacaucaaggaccacagcaucgugagcagauacgugugcagcggccuggugggcgacacccccagaaagaacgacagccugagcagcagccacugccuggaccccaacaacgaggagggcggccacggcgugaagggcugggccuucgacgacggcaacgacguguggaugggcagaaccaucaacgagaccagcagacugggcuacgagaccuucaaggugaucgagggcuggagcaaccccaagagcaagcugcagaucaacagacaggugaucguggacagaggcgacagaagcggcuacagcggcaucuucagcguggagggcaagagcugcaucaacagaugcuucuacguggagcugaucagaggcagaaaggaggagaccgaggugcuguggaccagcaacagcaucgugguguucugcggcaccagcggcaccuacggcaccggcagcuggcccgacggcgccgaccugaaccugaugcccaucuga

SEQ ID NO: 184753 - RNA, 1410 nt, Artificial Sequence; identical to SEQ ID NO: 183435
  derived and/or modified CDS sequence (opt4) from neuraminidase__InfluenzaA__AHL95131

SEQ ID NO: 184754 - RNA, 1410 nt, Artificial Sequence; identical to SEQ ID NO: 183943
  derived and/or modified CDS sequence (opt4) from neuraminidase__InfluenzaA__AHL95143

SEQ ID NO: 184755 - RNA, 1410 nt, Artificial Sequence
  derived and/or modified CDS sequence (opt4) from neuraminidase__InfluenzaA__AHL95155
augaaccccaaccagaagaucaucaccaucggcagcgugagccugaccaucagcaccaucugcuucuucaugcagaucgccauccugaucaccaccgugacccugcacuucaagcaguacgaguucaacagcccccccaacaaccaggugaugcugugcgagcccaccaucaucgagagaaacaucaccgagaucguguaccugaccaacaccaccaucgagaaggagaucugccccaagcccgccgaguacagaaacuggagcaagccccagugcggcaucaccggcuucgcccccuucagcaaggacaacagcaucagacugagcgccggcggcgacaucugggugaccagagagcccuacgugagcugcgaccccgacaagugcuaccaguucgcccugggccagggcaccacccugaacaacgugcacagcaacaacaccgugagagacagaacccccuacagaacccugcugaugaacgagcugggcgugcccuuccaccugggcaccaagcaggugugcaucgccuggagcagcagcagcugccacgacggcaaggccuggcugcacgugugcaucaccggcgacgacaagaacgccaccgccagcuucaucuacaacggcagacugguggacagcguggugagcuggagcaaggagauccugagaacccaggagagcgagugcgugugcaucaacggcaccugcaccguggugaugaccgacggcagcgccagcggcaaggccgacaccaagauccuguucaucgaggagggcaagaucgugcacaccagcacccugagcggcagcgcccagcacguggaggagugcagcugcuaccccagauaccccggcgugagaugcgugugcagagacaacuggaagggcagcaacagacccaucguggacaucaacaucaaggaccacagcaucgugagcagcuacgugugcagcggccuggugggcgacacccccagaaagaacgacagcagcagcagcagccacugccuggaccccaacaacgaggagggcagccacggcgugaagggcugggccuucgacgacggcaacgacguguggaugggcagaaccaucaacgagaccagcagacugggcuacgagaccuucaaggugaucgagggcuggagcaaccccaagagcaagcugcagaucaacagacaggugaucguggacagaggcgacagaagcggcuacagcggcaucuucagcguggagggcaagagcugcaucaacagaugcuucuacguggagcugaucagaggcagaaaggaggagaccgaggugcuguggaccagcaacagcaucgugguguucugcggcaccagcggcaccuacggcaccggcagcuggcccgacggcgccgaccugaaccugaugcccaucuga

SEQ ID NO: 184756 - RNA, 1410 nt, Artificial Sequence
  derived and/or modified CDS sequence (opt4) from neuraminidase__InfluenzaA__AHL95167
augaaccccaaccagaagaucaucaccaucggcagcgugagccugaccaucagcaccaucugcuucuucaugcagaucgccauccugaucaccaccgugacccugcacuucaagcaguacgaguucaacagcccccccaacaaccaggugaugcugugcgagcccaccaucaucgagagaaacaucaccgagaucguguaccugaccaacaccaccaucgagaaggagaucugccccaagcccgccgaguacagaaacuggagcaagccccagugcgacaucaccggcuucgcccccuucagcaaggacaacagcaucagacugagcgccggcggcgacaucugggugaccagagagcccuacgugagcugcgaccccgacaagugcuaccaguucgcccugggccagggcaccacccugaacaacgugcacagcaacaacaccgugagagacagaacccccuacagaacccugcugaugaacgagcugggcgugcccuuccaccugggcaccaagcaggugugcaucgccuggagcagcagcagcugccacgacggcaaggccuggcugcacgugugcaucaccggcgacgacaagaacgccaccgccagcuucaucuacaacggcagacugguggacagcguggugagcuggagcaaggagauccugagaacccaggagagcgagugcgugugcaucaacggcaccugcaccguggugaugaccgacggcagcgccagcggcaaggccgacaccaagauccuguucaucgaggagggcaagaucgugcacaccagcacccugagcggcagcgcccagcacguggaggagugcagcugcuaccccagauaccccggcgugagaugcgugugcagagacaacuggaagggcagcaacagacccaucguggacaucaacaucaaggaccacagcaucgugagcagauaccugugcagcggccuggugggcgacacccccagaaagaacgacagcagcagcagcagccacugccuggaccccaacaacgaggagggcggccacggcgugaagggcugggccuucgacgacggcaacgacguguggaugggcagaaccaucaacgagaccagcagacugggcuacgagaccuucaaggugaucgagggcuggagcaaccccaagagcaagcugcagaucaacagacaggugaucguggacagaggcgacagaagcggcuacagcggcaucuucagcguggagggcaagagcugcaucaacagaugcuucuacguggagcugaucagaggcagaaaggaggagaccgaggugcuguggaccagcaacagcaucgugguguucugcggcaccagcggcaccuacggcaccggcagcuggcccgacggcgccgaccugaaccugaugcccaucuga

SEQ ID NO: 184757 - RNA, 1410 nt, Artificial Sequence; identical to SEQ ID NO: 182206
  derived and/or modified CDS sequence (opt4) from neuraminidase__InfluenzaA__AHL95179

SEQ ID NO: 184758 - RNA, 1410 nt, Artificial Sequence; identical to SEQ ID NO: 182206
  derived and/or modified CDS sequence (opt4) from neuraminidase__InfluenzaA__AHL95191

SEQ ID NO: 184759 - RNA, 1410 nt, Artificial Sequence; identical to SEQ ID NO: 182206
  derived and/or modified CDS sequence (opt4) from neuraminidase__InfluenzaA__AHL95203

SEQ ID NO: 184760 - RNA, 1410 nt, Artificial Sequence; identical to SEQ ID NO: 182206
  derived and/or modified CDS sequence (opt4) from neuraminidase__InfluenzaA__AHL95215

SEQ ID NO: 184761 - RNA, 1410 nt, Artificial Sequence
  derived and/or modified CDS sequence (opt4) from neuraminidase__InfluenzaA__AHL95227
augaaccccaaccagaagaucaucaccaucggcagcgugagccugaccaucagcaccaucugcuucuucaugcagaucgccauccugaucaccaccgugacccugcacuucaagcaguacgaguucaacagcccccccaacaaccaggugaugcugugcgagcccaccaucaucgagagaaacaucaccgagaucguguaccugaccaacaccaccaucgagaaggagaucugccccaagcccgccgaguacagaaacuggagcaagccccagugcggcaucaccggcuucgcccccuucagcaaggacaacagcaucagacugagcgccggcggcgacaucugggugaccagagagcccuacgugagcugcgaccccgacaagugcuaccaguucgcccugggccagggcaccacccugaacaacaugcacagcaacaacaccgugagagacagaacccccuacagaacccugcugaugaacgagcugggcgugcccuuccaccugggcaccaagcaggugugcaucgccuggagcagcagcagcugccacgacggcaaggccuggcugcacgugugcaucaccggcgacgacaagaacgccaccgccagcuucaucuacaacggcagacugguggacagcguggugagcuggagcaaggagauccugagaacccaggagagcgagugcgugugcaucaacggcaccugcaccguggugaugaccgacggcagcgccagcggcaaggccgacaccaagauccuguucaucgaggagggcaagaucgugcacaccagcacccugagcggcagcgcccagcacguggaggagugcagcugcuaccccagauaccccggcgugagaugcgugugcagagacaacuggaagggcagcaacagacccaucguggacaucaacaucaaggaccacagcaucgugagcagcuacgugugcagcggccuggugggcgacacccccagagagaacgacagcagcagcagcagccacugccuggaccccaacaacgaggagggcggccacggcgugaagggcugggccuucgacgacggcaacgacguguggaugggcagaaccaucaacgagaccagcagacugggcuacgagaccuucaaggugaucgagggcuggagcaaccccaagagcaagcugcagaucaacagacaggugaucguggacagaggcgacagaagcggcuacagcggcaucuucagcguggagggcaagagcugcaucaacagaugcuucuacguggagcugaucagaggcagaaaggaggagaccgaggugcuguggaccagcaacagcaucgugguguucugcggcaccagcggcaccuacggcaccggcagcuggcccgacggcgccgaccugaaccugaugcccaucuga

SEQ ID NO: 184762 - RNA, 1410 nt, Artificial Sequence; identical to SEQ ID NO: 183943
  derived and/or modified CDS sequence (opt4) from neuraminidase__InfluenzaA__AHL95239

SEQ ID NO: 184763 - RNA, 1410 nt, Artificial Sequence
  derived and/or modified CDS sequence (opt4) from neuraminidase__InfluenzaA__AHL95251
augaaccccaaccagaagaucaucaccaucggcagcgugagccugaccaucagcaccaucugcuucuucaugcagaucgccauccugaucaccaccgugacccugcacuucaagcaguacgaguucaacagcccccccaacaaccaggugaugcugugcgagcccaccaucaucgagagaaacaucaccgagaucguguaccugaccaacaccaccaucgagaaggagaucugccccaagcccgccgaguacagaaacuggagcaagccccagugcggcaucaccggcuucgcccccuucagcaaggacaacagcaucagacugagcgccggcggcgacaucugggugaccagagagcccuacgugagcugcgaccccgacaagugcuaccaguucgcccugggccagggcaccacccugaacaacgugcacagcaacaacaccgugagagacagaacccccuacagaacccugcugaugaacgagcugggcgugcccuuccaccugggcaccaagcaggugugcaucgccuggagcagcagcagcugccacgacggcaaggccuggcugcacgugugcaucaccggcgacgacaagaacgccaccgccagcuucaucuacaacggcagacugguggacagcguggugagcuggagcaaggagauccugagaacccaggagagcgagugcgugugcaucaacggcaccugcaccguggugaugaccgacggcagcgccagcggcaaggccgacaccaagauccuguucaucaaggagggcaagaucgugcacaccagcacccugagcggcagcgcccagcacguggaggagugcagcugcuaccccagauaccccggcgugagaugcgugugcagagacaacuggaagggcagcaacagacccaucguggacaucaacaucaaggaccacagcaucgugagcagcuacgugugcagcggccuggugggcgacacccccagaaagaacgacagcagcagcagcagccacugccuggaccccaacaacgaggagggcggccacggcgugaagggcugggccuucgacgacggcaacgacguguggaugggcagaaccaucaacgagaccagcagacugggcuacgagaccuucaaggugaucgagggcuggagcaaccccaagagcaagcugcagaucaacagacaggugaucguggacagaggcgacagaagcggcuacagcggcaucuucagcguggagggcaagagcugcaucaacagaugcuucuacguggagcugaucagaggcagaaaggaggagaccgaggugcuguggaccagcaacagcaucgugguguucugcggcaccagcggcaccuacggcaccggcagcuggcccgacggcgccgaccugaaccugaugcccaucuga

SEQ ID NO: 184764 - RNA, 1410 nt, Artificial Sequence; identical to SEQ ID NO: 182206
  derived and/or modified CDS sequence (opt4) from neuraminidase__InfluenzaA__AHL95263

SEQ ID NO: 184765 - RNA, 1410 nt, Artificial Sequence
  derived and/or modified CDS sequence (opt4) from neuraminidase__InfluenzaA__AHL95275
augaaccccaaccagaagaucaucaccaucggcagcgugagccugaccaucagcaccaucugcuucuucaugcagaucgccauccugaucaccaccgugacccugcacuucaagcaguacgaguucaacagcccccccaacaaccaggugaugcugugcgagcccaccaucaucgagagaaacaucaccgagaucguguaccugaccaacaucaccaucgagaaggagaucugccccaagcccgccgaguacagaaacuggagcaagccccagugcggcaucaccggcuucgcccccuucagcaaggacaacagcaucagacugagcgccggcggcgacaucugggugaccagagagcccuacgugagcugcgaccccgacaagugcuaccaguucgcccugggccagggcaccacccugaacaacgugcacagcaacaacaccgugagagacagaacccccuacagaacccugcugaugaacgagcugggcgugcccuuccaccugggcaccaagcaggugugcaucgccuggagcagcagcagcugccacgacggcaaggccuggcugcacgugugcaucaccggcgacgacaagaacgccaccgccagcuucaucuacaacggcagacugguggacagcguggugagcuggagcaaggagauccugagaacccaggagagcgagugcgugugcaucaacggcaccugcaccguggugaugaccgacggcagcgccagcggcaaggccgacaccaagauccuguucaucgaggagggcaagaucgugcacaccagcacccugagcggcagcgcccagcacguggaggagugcagcugcuaccccagauaccccggcgugagaugcgugugcagagacaacuggaagggcagcaacagacccaucguggacaucaacaucaaggaccacagcaucgugagcagcuacgugugcagcggccuggugggcgacacccccagaaagaacgacagcagcagcagcagccacugccuggaccccaacaacgaggagggcggccacggcgugaagggcugggccuucgacgacggcaacgacguguggaugggcagaaccaucaacgagaccagcagacugggcuacgagaccuucaaggugaucgagggcuggagcaaccccaagagcaagcugcagaucaacagacaggugaucguggacagaggcgacagaagcggcuacagcggcaucuucagcguggagggcaagagcugcaucaacagaugcuucuacguggagcugaucagaggcagaaaggaggagaccgaggugcuguggaccagcaacagcaucgugguguucugcggcaccagcggcaccuacggcaccggcagcuggcccgacggcgccgaccugaaccugaugcccaucuga

SEQ ID NO: 184766 - RNA, 1410 nt, Artificial Sequence; identical to SEQ ID NO: 183449
  derived and/or modified CDS sequence (opt4) from neuraminidase__InfluenzaA__AHL95299

SEQ ID NO: 184767 - RNA, 1410 nt, Artificial Sequence
  derived and/or modified CDS sequence (opt4) from neuraminidase__InfluenzaA__AHL95310
augaaccccaaccagaagaucaucaccaucggcagcgugagccugaccaucagcaccaucugcuucuucaugcagaucgccauccugaucaccaccgugacccugcacuucaagcaguacgaguucaacagcccccccaacaaccaggugaugcugugcgagcccaccaucaucgagagaaacaucaccgagaucguguaccugaccaacaccaccaucgagaaggagaucugccccaagcccgccgaguacagaaacuggagcaagccccagugcgacaucaccggcuucgcccccuucagcaaggacaacagcaucagacugagcgccggcggcgacaucugggugaccagagagcccuacgugagcugcgaccccgacaagugcuaccaguucgcccugggccagggcaccacccugaacaacgugcacagcaacaacaccgugagagacagaacccccuacagaacccugcugaugaacgagcugggcgugcccuuccaccugggcaccaagcaggugugcaucgccuggagcagcagcagcugccacgacggcaaggccuggcugcacgugugcaucaccggcgacgacaagaacgccaccgccagcuucaucuacaacggcagacugguggacagcguggugagcuggagcaaggagauccugagaacccaggagagcgagugcgugugcaucaacggcaccugcaccguggugaugaccgacggcagcgccagcggcaaggccgacaccaagauccuguucaucgaggagggcaagaucgugcacaccagcacccugagcggcagcgcccagcacguggaggagugcagcugcuaccccagauaccccggcgugagaugcgugugcagagacaacuggaagggcagcaacagacccaucguggacaucaacaucaaggaccacagcaucgugagcagauacgugugcagcggccuggugggcgacacccccagaaagaacgacagcagcagcagcagccacugccuggaccccaacaacgaggagggcggccacggcgugaagggcugggccuucgacgacggcaacgacguguggaugggcagaaccaucaacgagaccagcagacugggcuacgagaccuucaaggugaucgagggcuggagcaaccccaagagcaagcugcagaucaacagacaggugaucguggacagaggcgacagaagcggcuacagcggcaucuucagcguggagggcaagagcugcaucaacagaugcuucuacguggagcugaucagaggcagaaaggaggagaccgaggugcuguggaccagcaacagcaucgugguguucugcggcaccagcggcaccuacggcaccggcagcuggcccgacggcgccaaccugaaccugaugcccaucuga

SEQ ID NO: 184768 - RNA, 1410 nt, Artificial Sequence; identical to SEQ ID NO: 183954
  derived and/or modified CDS sequence (opt4) from neuraminidase__InfluenzaA__AHL95322

SEQ ID NO: 184769 - RNA, 1410 nt, Artificial Sequence; identical to SEQ ID NO: 183931
  derived and/or modified CDS sequence (opt4) from neuraminidase__InfluenzaA__AHL95334

SEQ ID NO: 184770 - RNA, 1410 nt, Artificial Sequence; identical to SEQ ID NO: 182206
  derived and/or modified CDS sequence (opt4) from neuraminidase__InfluenzaA__AHL95423

SEQ ID NO: 184771 - RNA, 1410 nt, Artificial Sequence; identical to SEQ ID NO: 183954
  derived and/or modified CDS sequence (opt4) from neuraminidase__InfluenzaA__AHL95435

SEQ ID NO: 184772 - RNA, 1410 nt, Artificial Sequence; identical to SEQ ID NO: 183931
  derived and/or modified CDS sequence (opt4) from neuraminidase__InfluenzaA__AHL95447

SEQ ID NO: 184773 - RNA, 1410 nt, Artificial Sequence
  derived and/or modified CDS sequence (opt4) from neuraminidase__InfluenzaA__AHL95461
augaaccccaaccagaagaucaucaccaucggcagcgugagccugaccaucagcaccaucugcuucuucaugcagaucgccauccugaucaccaccgugacccugcacuucaagcaguacgaguucaaccccccccccaacaaccaggugaugcugugcgagcccaccaucaucgagagaaacaucaccgagaucguguaccugaccaacaccaccaucgagaaggagaucugccccaagcccgccgaguacagaaacuggagcaagccccagugcggcaucaccggcuucgcccccuucagcaaggacaacagcaucagacugagcgccggcggcgacaucugggugaccagagagcccuacgugagcugcggccccgacaagugcuaccaguucgcccugggccagggcaccacccugaacaacaugcacagcaacaacaccgugagagacagaacccccuacagaacccugcugaugaacgagcugggcgugcccuuccaccugggcaccaagcaggugugcaucgccuggagcagcagcagcugccacgacggcaaggccuggcugcacgugugcaucaccggcgacgacaagaacgccaccgccagcuucaucuacaacggcagacugguggacagcguggugagcuggagcaaggagauccugagaacccaggagagcgagugcgugugcaucaacggcaccugcaccguggugaugaccgacggcagcgccagcggcaaggccgacaccaagauccuguucaucgaggagggcaagaucgugcacaccagcacccugagcggcagcgcccagcacguggaggagugcagcugcuaccccagauaccccggcgugagaugcgugugcagagacaacuggaagggcagcaacagacccaucguggacaucaacaucaaggaccacagcaucgugagcagcuacgugugcagcggccuggugggcgacacccccagaaagaacgacagcagcagcagcagccacugccuggaccccaacaacgaggagggcggccacggcgugaagggcugggccuucgacgacggcaacgacguguggaugggcagaaccaucaacgagaccagcagacugggcuacgagaccuucaaggugaucgagggcuggagcaaccccaagagcaagcugcagaucaacagacaggugaucguggacagaggcgacagaagcggcuacagcggcaucuucagcguggagggcaagagcugcaucaacagaugcuucuacguggagcugaucagaggcagaaaggaggagaccgaggugcuguggaccagcaacagcaucgugguguucugcggcaccagcggcaccuacggcaccggcagcuggcccgacggcgccgaccugaaccugaugcccaucuga

SEQ ID NO: 184774 - RNA, 1410 nt, Artificial Sequence; identical to SEQ ID NO: 182982
  derived and/or modified CDS sequence (opt4) from neuraminidase__InfluenzaA__AHL95473

SEQ ID NO: 184775 - RNA, 1410 nt, Artificial Sequence; identical to SEQ ID NO: 182206
  derived and/or modified CDS sequence (opt4) from neuraminidase__InfluenzaA__AHL95485

SEQ ID NO: 184776 - RNA, 1410 nt, Artificial Sequence; identical to SEQ ID NO: 182206
  derived and/or modified CDS sequence (opt4) from neuraminidase__InfluenzaA__AHL95497

SEQ ID NO: 184777 - RNA, 1410 nt, Artificial Sequence
  derived and/or modified CDS sequence (opt4) from neuraminidase__InfluenzaA__AHL95509
augaaccccaaccagaagaucaucaccaucggcagcgugagccugaccaucagcaccaucugcuucuucaugcagaucgccauccugaucaccaccgugacccugcacuucaagcaguacgaguucaacagcccccccaacaaccaggugaugcugugcgagcccaccaucaucgagagaaacaucaccgagaucguguaccugaccaacaccaccaucgagaaggagaucugccccaagcccgccgaguacagaaacuggagcaagccccagugcggcaucaccggcuucgcccccuucagcaaggacaacagcaucagacugagcgccggcggcgacaucugggugaccagagagcccuacgugagcugcgaccccgacaagugcuaccaguucgcccugggccagggcaccacccugaacaacgugcacagcaacaacaccgugagagacagaacccccuacagaacccugcugaugaacgagcugggcgugcccuuccaccugggcaccaagcaggugugcaucgccuggagcagcagcagcugccacgacggcaaggccuggcugcacgugugcaucaccggcgacgacaagaacgccaccgccagcuucaucuacaacggcagacugguggacagcguggugagcuggagcaaggagauccugagaacccaggagagcgagugcgugugcaucaacggcaccugcaccguggugaugaccgacggcagcgccagcggcaaggccgacaccaagauccuguucaucgaggagggcaagaucgugcacaccagcacccugagcggcagcgcccagcacguggaggagugcagcugcuaccccagauaccccggcgugagaugcgugugcagagacaacuggaagggcagcaacagacccaucguggacaucaacaucaagaaccacagcaucgugagcagcuacgugugcagcggccuggugggcgacacccccagaaagaacgacagcagcagcagcagccacugccuggaccccaacaacgaggagggcggccacggcgugaagggcugggccuucgacgacggcaacgacguguggaugggcagaaccaucaacgagaccagcagacugggcuacgagaccuucaaggugaucgagggcuggagcaaccccaagagcaagcugcagaucaacagacaggugaucguggacagaggcgacagaagcggcuacagcggcaucuucagcguggagggcaagagcugcaucaacagaugcuucuacguggagcugaucagaggcagaaaggaggagaccgaggugcuguggaccagcaacagcaucgugguguucugcggcaccagcggcaccuacggcaccggcagcuggcccgacggcgccgaccugaaccugaugcccaucuga

SEQ ID NO: 184778 - RNA, 1410 nt, Artificial Sequence; identical to SEQ ID NO: 182206
  derived and/or modified CDS sequence (opt4) from neuraminidase__InfluenzaA__AHL95521

SEQ ID NO: 184779 - RNA, 1410 nt, Artificial Sequence; identical to SEQ ID NO: 182206
  derived and/or modified CDS sequence (opt4) from neuraminidase__InfluenzaA__AHL95533

SEQ ID NO: 184780 - RNA, 1410 nt, Artificial Sequence; identical to SEQ ID NO: 182206
  derived and/or modified CDS sequence (opt4) from neuraminidase__InfluenzaA__AHL95545

SEQ ID NO: 184781 - RNA, 1410 nt, Artificial Sequence
  derived and/or modified CDS sequence (opt4) from neuraminidase__InfluenzaA__AHL95557
augaaccccaaccagaagaucaucaccaucggcagcgugagccugaccaucagcaccaucugcuucuucauccagaucgccauccugaucaccaccgugacccugcacuucaagcaguacgaguucaacagcccccccaacaaccaggugaugcugugcgagcccaccaucaucgagagaaacaucaccgagaucguguaccugaccaacaccaccaucgagaaggagaucugccccaagcccgccgaguacagaaacuggagcaagccccagugcggcaucaccggcuucgcccccuucagcaaggacaacagcaucagacugagcgccggcggcgacaucugggugaccagagagcccuacgugagcugcgaccccgacaagugcuaccaguucgcccugggccagggcaccacccugaacaacgugcacagcaacaacaccgccagagacagaacccccuacagaacccugcugaugaacgagcugggcgugcccuuccaccugggcaccaagcaggugugcaucgccuggagcagcagcagcugccacgacggcaaggccuggcugcacgugugcaucaccggcgacgacaagaacgccaccgccagcuucaucuacaacggcagacugguggacagcguggugagcuggagcaaggagauccugagaacccaggagagcgagugcgugugcaucaacggcaccugcaccguggugaugaccgacggcagcgccagcggcaaggccgacaccaagauccuguucaucgaggagggcaagaucgugcacaccagcacccugagcggcagcgcccagcacguggaggagugcagcugcuaccccagauaccccggcgugagaugcgugugcagagacaacuggaagggcagcaacagacccaucguggacaucaacaucaaggaccacagcaucgugagcagcuacgugugcagcggccuggugggcgacacccccagaaagaacgacagcagcagcagcagccacugccuggaccccaacaacgaggagggcggccacggcgugaagggcugggccuucgacgacggcaacgacguguggaugggcagaaccaucaacgagaccagcagacugggcuacgagaccuucaaggugaucgagggcuggagcaaccccgagagcaagcugcagaucaacagacaggugaucguggacagaggcgacagaagcggcuacagcggcaucuucagcguggagggcaagagcugcaucaacagaugcuucuacguggagcugaucagaggcagaaaggaggagaccgaggugcuguggaccagcaacagcaucgugguguucugcggcaccagcggcaccuacggcaccggcagcuggcccgacggcgccgaccugaaccugaugcccaucuga

SEQ ID NO: 184782 - RNA, 1410 nt, Artificial Sequence; identical to SEQ ID NO: 183931
  derived and/or modified CDS sequence (opt4) from neuraminidase__InfluenzaA__AHL95569

SEQ ID NO: 184783 - RNA, 1410 nt, Artificial Sequence; identical to SEQ ID NO: 182206
  derived and/or modified CDS sequence (opt4) from neuraminidase__InfluenzaA__AHL95581

SEQ ID NO: 184784 - RNA, 1410 nt, Artificial Sequence
  derived and/or modified CDS sequence (opt4) from neuraminidase__InfluenzaA__AHL95605
augaaccccaaccagaagaucaucaccaucggcagcgugagccugaccaucagcaccaucugcuucuucaugcagaucgccauccugaucaccaccgugacccugcacuucaagcaguacgaguucaacagcccccccaacaaccaggugaugcugugcgagcccaccaucaucgagagaaacaucaccgagaucguguaccugaccaacaccaccaucgagaaggagaucugccccaagcccgccgaguacagaaacuggagcaagccccagugcggcaucaccggcuucgcccccuucagcaaggacaacagcaucagacugagcgccggcggcgacaucugggugaccagagagcccuacgugagcugcgaccccgacaagugcuaccaguucgcccugggccagggcaccacccugaacaacgugcacagcaacaacaccgugagagacagaacccccuacagaacccugcugaugaacgagcugggcgugcccuuccaccugggcaccaagcaggugugcaucgccuggagcagcagcagcugccacgacggcaaggccuggcugcacgugugcaucaccggcgacgacaagaacgccaccgccagcuucaucuacaacggcagacugguggacagcguggugagcuggagcaaggagauccugagaacccaggagagcgagugcgugugcaucaacggcaccugcaccguggugaugaccgacggcagcgccagcggcaaggccgacaccaagauccuguucaucgaggagggcaagaucgugcacaccagcacccugagcggcagcgcccagcacguggaggagugcagcugcuaccccagauaccccggcgugagaugcgugugcagagacaacuggaagggcagcaacagacccaucguggacaucaacaucaaggaccacagcaucgugagcagcuacgugugcagcggccuggugggcgacacccccagaaagaacgacaucagcagcagcagccacugccuggaccccaacaacgaggagggcggccacggcgugaagggcugggccuucgacgacggcaacgacguguggaugggcagaaccaucaacgagaccagcagacugggcuacgagaccuucaaggugaucgagggcuggagcaaccccaagagcaagcugcagaucaacagacaggugaucguggacagaggcgacagaagcggcuacagcggcaucuucagcguggagggcaagagcugcaucaacagaugcuucuacguggagcugaucagaggcagaaaggaggagaccgaggugcuguggaccagcaacagcaucgugguguucugcggcaccagcggcaccuacggcaccggcagcuggcccgacggcgccgaccugaaccugaugcccaucuga

SEQ ID NO: 184785 - RNA, 1410 nt, Artificial Sequence; identical to SEQ ID NO: 182206
  derived and/or modified CDS sequence (opt4) from neuraminidase__InfluenzaA__AHL95617

SEQ ID NO: 184786 - RNA, 1410 nt, Artificial Sequence; identical to SEQ ID NO: 182206
  derived and/or modified CDS sequence (opt4) from neuraminidase__InfluenzaA__AHL95629

SEQ ID NO: 184787 - RNA, 1410 nt, Artificial Sequence; identical to SEQ ID NO: 182206
  derived and/or modified CDS sequence (opt4) from neuraminidase__InfluenzaA__AHL95641

SEQ ID NO: 184788 - RNA, 1410 nt, Artificial Sequence; identical to SEQ ID NO: 182206
  derived and/or modified CDS sequence (opt4) from neuraminidase__InfluenzaA__AHL95653

SEQ ID NO: 184789 - RNA, 1410 nt, Artificial Sequence; identical to SEQ ID NO: 184784
  derived and/or modified CDS sequence (opt4) from neuraminidase__InfluenzaA__AHL95665

SEQ ID NO: 184790 - RNA, 1410 nt, Artificial Sequence; identical to SEQ ID NO: 182206
  derived and/or modified CDS sequence (opt4) from neuraminidase__InfluenzaA__AHL95677

SEQ ID NO: 184791 - RNA, 1410 nt, Artificial Sequence
  derived and/or modified CDS sequence (opt4) from neuraminidase__InfluenzaA__AHL95689
augaaccccaaccagaagaucaucaccaucggcagcgugagccugaccaucagcaccaucugcuucuucaugcagaucgccauccugaucaccaccgugacccugcacuucaagcaguacgaguucgacagcccccccaacaaccaggugaugcugugcgagcccaccaucaucgagagaaacaucaccgagaucguguaccugaccaacaccaccaucgagaaggagaucugccccaagcccgccgaguacagaaacuggagcaagccccagugcggcaucaccggcuucgcccccuucagcaaggacaacagcaucagacugagcgccggcggcgacaucugggugaccagagagcccuacgugagcugcgaccccgacaagugcuaccaguucgcccugggccagggcaccacccugaacaacgugcacagcaacaacaccgugagagacagaacccccuacagaacccugcugaugaacgagcugggcgugcccuuccaccugggcaccaagcaggugugcaucgccuggagcagcagcagcugccacgacggcaaggccuggcugcacgugugcaucaccggcgacgacaagaacgccaccgccagcuucaucuacaacggcagacugguggacagcguggugagcuggagcaaggagauccugagaacccaggagagcgagugcgugugcaucaacggcaccugcaccguggugaugaccgacggcagcgccagcggcaaggccgacaccaagauccuguucaucgaggagggcaagaucgugcacaccagcacccugagcggcagcgcccagcacguggaggagugcagcugcuaccccagauaccccggcgugagaugcgugugcagagacaacuggaagggcagcaacagacccaucguggacaucaacaucaaggaccacagcaucgugagcagcuacgugugcagcggccuggugggcgacacccccagaaagaacgacagcagcagcagcagccacugccuggaccccaacaacgaggagggcggccacggcgugaagggcugggccuucgacgacggcaacgacguguggaugggcagaaccaucaacgagaccagcagacugggcuacgagaccuucaaggugaucgagggcuggagcaaccccaagagcaagcugcagaucaacagacaggugaucguggacagaggcgacagaagcggcuacagcggcaucuucagcguggagggcaagagcugcaucaacagaugcuucuacguggagcugaucagaggcagaaaggaggagaccgaggugcuguggaccagcaacagcaucgugguguucugcggcaccagcggcaccuacggcaccggcagcuggcccgacggcgccaaccugaaccugaugcccaucuga

SEQ ID NO: 184792 - RNA, 1410 nt, Artificial Sequence; identical to SEQ ID NO: 182206
  derived and/or modified CDS sequence (opt4) from neuraminidase__InfluenzaA__AHL95701

SEQ ID NO: 184793 - RNA, 1410 nt, Artificial Sequence; identical to SEQ ID NO: 182206
  derived and/or modified CDS sequence (opt4) from neuraminidase__InfluenzaA__AHL95713

SEQ ID NO: 184794 - RNA, 1410 nt, Artificial Sequence
  derived and/or modified CDS sequence (opt4) from neuraminidase__InfluenzaA__AHL95725
augaaccccaaccagaagaucaucaccaucggcagcgugagccugaccaucagcaccaucugcuucuucaugcagaucgccauccugaucaccaccgugacccugcacuucaagcaguacgaguucgaccccccccccaacaaccaggugaugcugugcgagcccaccaucaucgagagaaacaucaccgagaucguguaccugaccaacaccaccaucgagaaggagaucugccccaagcccgccgaguacagaaacuggagcaagccccagugcggcaucaccggcuucgcccccuucagcaaggacaacagcaucagacugagcgccggcggcgacaucugggugaccagagagcccuacgugagcugcgaccccgacaagugcuaccaguucgcccugggccagggcaccacccugaacaacgugcacagcaacaacaccgugagagacagaacccccuacagaacccugcugaugaacgagcugggcgugcccuuccaccugggcaccaagcaggugugcaucgccuggagcagcagcagcugccacgacggcaaggccuggcugcacgugugcaucaccggcgacgacaagaacgccaccgccagcuucaucuacaacggcagacugguggacagcguggugagcuggagcaaggagauccugagaacccaggagagcgagugcgugugcaucaacggcaccugcaccguggugaugaccgacggcagcgccagcggcaaggccgacaccaagauccuguucaucgaggagggcaagaucgugcacaccagcacccugagcggcagcgcccagcacguggaggagugcagcugcuaccccagauaccccggcgugagaugcgugugcagagacaacuggaagggcagcaacagacccaucguggacaucaacaucaaggaccacagcaucgugagcagcuacgugugcagcggccuggugggcgacacccccagaaagaacgacagcagcagcagcagccacugccuggaccccaacaacgaggagggcggccacggcgugaagggcugggccuucgacgacggcaacgacguguggaugggcagaaccaucaacgagaccagcagacugggcuacgagaccuucaaggugaucgagggcuggagcaaccccaagagcaagcugcagaucaacagacaggugaucguggacagaggcgacagaagcggcuacagcggcaucuucagcguggagggcaagagcugcaucaacagaugcuucuacguggagcugaucagaggcagaaaggaggagaucgaggugcuguggaccagcaacagcaucgugguguucugcggcaccagcggcaccuacggcaccggcagcuggcccgacggcgccgaccugaaccugaugcccaucuga

SEQ ID NO: 184795 - RNA, 1410 nt, Artificial Sequence; identical to SEQ ID NO: 183943
  derived and/or modified CDS sequence (opt4) from neuraminidase__InfluenzaA__AHL95737

SEQ ID NO: 184796 - RNA, 1410 nt, Artificial Sequence
  derived and/or modified CDS sequence (opt4) from neuraminidase__InfluenzaA__AHL95749
augaaccccaaccagaagaucaucaccaucggcagcgugagccugaccaucagcaccaucugcuucuucaugcagaucgccauccugaucaccaccgugacccugcacuucaagcaguacgaguucaacagcccccccaacaaccaggugaugcugugcgagcccaccaucaucgagagaaacaucaccgagaucguguaccugaccaacaccaccaucgagaaggagaucugccccaagcccgccgaguacagaaacuggagcaagccccagugcggcaucaccggcuucgcccccuucagcaaggacaacagcaucagacugagcgccggcggcgacaucugggugaccagagagcccuacgugagcugcgaccccgacaagugcuaccaguucgcccugggccagggcaccacccugaacaacgugcacagcaacaacaccgccagagacagaacccccuacagaacccugcugaugaacgagcugggcgugcccuuccaccugggcaccaagcaggugugcaucgccuggagcagcagcagcugccacgacggcaaggccuggcugcacgugugcaucaccggcgacgacaagaacgccaccgccagcuucaucuacaacggcagacugguggacagcguggugagcuggagcaaggagauccugagaacccaggagagcgagugcgugugcaucaacggcaccugcaccguggugaugaccgacggcagcgccagcggcaaggccgacaccaagauccuguucaucgaggagggcaagaucgugcacaccagcacccugagcggcagcgcccagcacguggaggagugcagcugcuaccccagauaccccggcgugagaugcgugugcagagacaacuggaagggcagcaacagacccaucguggacaucaacaucaaggaccacagcaucgugagcagcuacgugugcagcggccuggugggcgacacccccagaaagaacgacagcagcagcagcagccacugccuggaccccaacaacgaggagggcggccacggcgugaagggcugggccuucgacgacggcaacgacguguggaugggcagaaccaucaacgagaccagcagacugggcuacgagaccuucaaggugaucgagggcuggagcaaccccaagagcaagcugcagaucaacagacaggugaucguggacagaggcgacagaagcggcuacagcggcaucuucagcguggagggcaagagcugcaucaacagaugcuucuacguggagcugaucagaggcagaaaggaggagaccgaggugcuguggaccagcaacagcaucgugguguucugcggcaccagcggcaccuacggcaccggcagcuggcccgacggcgccgaccugaaccugaugcccaucuga

SEQ ID NO: 184797 - RNA, 1410 nt, Artificial Sequence; identical to SEQ ID NO: 182206
  derived and/or modified CDS sequence (opt4) from neuraminidase__InfluenzaA__AHL95761

SEQ ID NO: 184798 - RNA, 1410 nt, Artificial Sequence; identical to SEQ ID NO: 182206
  derived and/or modified CDS sequence (opt4) from neuraminidase__InfluenzaA__AHL95773

SEQ ID NO: 184799 - RNA, 1410 nt, Artificial Sequence
  derived and/or modified CDS sequence (opt4) from neuraminidase__InfluenzaA__AHL95785
augaaccccaaccagaagaucaucaccaucggcagcgugagccugaccaucagcaccaucugcuucuucaugcagaucgccauccugaucaccaccgugacccugcacuucaagcaguacgaguucaacagcccccccaacaaccaggugaugcugugcgagcccaccaucaucgagagaaacaucaccgagaucguguaccugaccaacaccaccaucgagaaggagaucugccccaagcccgccgaguacagaaacuggagcaagccccagugcgacaucaccggcuucgcccccuucagcaaggacaacagcgugagacugagcgccggcggcgacaucugggugaccagagagcccuacgugagcugcgaccccgacaagugcuaccaguucgcccugggccagggcaccacccugaacaacgugcacagcaacaacaccgugagagacagaacccccuacagaacccugcugaugaacgagcugggcgugcccuuccaccugggcaccaagcaggugugcaucgccuggagcagcagcagcugccacgacggcaaggccuggcugcacgugugcaucaccggcgacgacaagaacgccaccgccagcuucaucuacaacggcagacugguggacagcguggugagcuggagcaaggagauccugagaacccaggagagcgagugcgugugcaucaacggcaccugcaccguggugaugaccgacggcagcgccagcggcaaggccgacaccaagauccuguucaucgaggagggcaagaucgugcacaccagcacccugagcggcagcgcccagcacguggaggagugcagcugcuaccccagauaccccggcgugagaugcgugugcagagacaacuggaagggcagcaacagacccaucguggacaucaacaucaaggaccacagcaucgugagcagcuacgugugcagcggccuggugggcgacacccccagaaagaacgacagcagcagcagcagccacugccuggaccccaacaacgaggagggcggccacggcgugaagggcugggccuucgacgacggcaacgacguguggaugggcagaaccaucaacgagaccagcagacugggcuacgagaccuucaaggugaucgagggcuggagcaaccccaagagcaagcugcagaucaacagacaggugaucguggacagaggcgacagaagcggcuacagcggcaucuucagcguggagggcaagagcugcaucaacagaugcuucuacguggagcugaucagaggcagaaaggaggagaccgaggugcuguggaccagcaacagcaucgugguguucugcggcaccagcggcaccuacggcaccggcagcuggcccgacggcgccgaccugaaccugaugcccaucuga

SEQ ID NO: 184800 - RNA, 1410 nt, Artificial Sequence; identical to SEQ ID NO: 183931
  derived and/or modified CDS sequence (opt4) from neuraminidase__InfluenzaA__AHL95797

SEQ ID NO: 184801 - RNA, 1410 nt, Artificial Sequence; identical to SEQ ID NO: 182206
  derived and/or modified CDS sequence (opt4) from neuraminidase__InfluenzaA__AHL95833

SEQ ID NO: 184802 - RNA, 1410 nt, Artificial Sequence; identical to SEQ ID NO: 183931
  derived and/or modified CDS sequence (opt4) from neuraminidase__InfluenzaA__AHL95845

SEQ ID NO: 184803 - RNA, 1410 nt, Artificial Sequence
  derived and/or modified CDS sequence (opt4) from neuraminidase__InfluenzaA__AHL95857
augaaccccaaccagaagaucaucagcaucggcagcgugagccugaccaucagcaccaucugcuucuucaugcagaucgccauccugaucaccaccgugacccugcacuucaagcaguacgaguucaacagcccccccaacaaccaggugaugcugugcgagcccaccaucaucgagagaaacaucaccgagaucguguaccugaccaacaccaccaucgagaaggagaucugccccaagcccgccgaguacagaaacuggagcaagccccagugcggcaucaccggcuucgcccccuucagcaaggacaacagcaucagacugagcgccggcggcgacaucugggugaccagagagcccuacgugagcugcgaccccgacaagugcuaccaguucgcccugggccagggcaccacccugaacaacgugcacagcaacaacaccgugagagacagaacccccuacagaacccugcugaugaacgagcugggcgugcccuuccaccugggcaccaagcaggugugcaucgccuggagcagcagcagcugccacgacggcaaggccuggcugcacgugugcaucaccggcgacgacaagaacgccaccgccagcuucaucuacaacggcagacugguggacagcguggugagcuggagcaaggagauccugagaacccaggagagcgagugcgugugcaucaacggcaccugcaccguggugaugaccgacggcagcgccagcggcaaggccgacaccaagauccuguucaucgaggagggcaagaucgugcacaccagcacccugagcggcagcgcccagcacguggaggagugcagcugcuaccccagauaccccggcgugagaugcgugugcagagacaacuggaagggcagcaacagacccaucguggacaucaacaucaaggaccacagcaucgugagcagcuacgugugcagcggccuggugggcgacacccccagaaagaacgacagcagcagcagcagccacugccuggaccccaacaacgaggagggcggccacggcgugaagggcugggccuucgacgacggcaacgacguguggaugggcagaaccaucaacgagaccagcagacugggcuacgagaccuucaaggugaucgagggcuggagcaaccccaagagcaagcugcagaucaacagacaggugaucguggacagaggcgacagaagcggcuacagcggcaucuucagcguggagggcaagagcugcaucaacagaugcuucuacguggagcugaucagaggcagaaaggaggagaccgaggugcuguggaccagcaacagcaucgugguguucugcggcaccagcggcaccuacggcaccggcagcuggcccgacggcgccgaccugaaccugaugcccaucuga

SEQ ID NO: 184804 - RNA, 1410 nt, Artificial Sequence; identical to SEQ ID NO: 182206
  derived and/or modified CDS sequence (opt4) from neuraminidase__InfluenzaA__AHL95869

SEQ ID NO: 184805 - RNA, 1410 nt, Artificial Sequence
  derived and/or modified CDS sequence (opt4) from neuraminidase__InfluenzaA__AHL95881
augaaccccaaccagaagaucaucaccaucggcagcgugugcaugaccaucggcauggccaaccugauccugcagaucggcaacaucaucagcaucuggaucagccacagcauccaggugggcaaccagagccagaucgagaccugcaaccagagcgugaucaccuacgagaacaacaccugggugaaccagaccuacgugaacaucagcaacaccaaccuggccgccggccagagcguggugagcgugaagcuggccggcaacagcagccugugccccgugagcggcugggccaucuacagcaaggacaacagcgugagaaucggcagcaagggcgacguguucgugaucagagagcccuucaucagcugcagcccccuggagugcagaaccuucuuccugacccagggcgcccugcugaacgacaagcacagcaacggcaccaucaaggacagaagccccuacagaacccugaugagcugccccaucggcgaggugcccagccccuacaacagcagauucgagagcguggccuggagcgccagcgccugccacgacggcaucaacuggcugaccaucggcaucagcggccccgacagcggcgccguggccgugcugaaguacaacggcaucaucaccgacaccaucaagagcuggagaaacaacauccugagaacccaggagagcgagugcgccugcgugaacggcagcugcuucaccaucaugaccgacggccccagcgacggccaggccagcuacaagaucuucagaaucgagaagggcaagaucgugaagagcguggagaugaacgcccccaacuaccacuacgaggagugcagcugcuaccccgacagcagcgagaucaccugcgugugcagagacaacuggcacggcagcaacagacccugggugagcuucaaccagaaccuggaguaccagaucggcuacaucugcagcggcaucuucggcgacaaccccagacccaacgacaagaccggcagcugcggccccgugagcagcaacggcgccaacggcgugaagggcuucagcuucaaguacggcaacggcguguggaucggcagaaccaagagcaucagcagcagaaagggcuucgagaugaucugggaccccaacggcuggaccggcaccgacaacaacuucagcaucaagcaggacaucgugggcaucaacgaguggagcggcuacagcggcagcuucgugcagcaccccgagcugaccggccuggacugcaucagacccugcuucuggguggagcugaucagaggcagacccaaggagaacaccaucuggaccagcggcagcagcaucagcuucugcggcgugaacagcgacaccgugggcuggagcuggcccgacggcgccgagcugcccuucaccaucgacaaguga

SEQ ID NO: 184806 - RNA, 1410 nt, Artificial Sequence
  derived and/or modified CDS sequence (opt4) from neuraminidase__InfluenzaA__AHL95892
augaaccccaaccagaagaucaucaccaucggcagcgugagccugaccaucagcaccaucugcuucuucaugcagaucgccauccugaucaccaccgugacccugcacuucaagcaguacgaguucaacagcccccccaacaaccaggugaugcugugcgagcccaccaucaucgagagaaacaucaccgagaucguguaccugaccaacaccaccaucgagaaggagaucugccccaagcccgccgaguacagaaacuggagcaagccccagugcggcaucaccggcuucgcccccuucagcaaggacaacagcaucagacugagcgccggcggcgacaucugggugaccagagagcccuacgugagcugcgaccccgacaagugcuaccaguucgcccugggccagggcaccacccugaacaacgugcacagcaacaacaccgugagagacagaacccccuacagaacccugcugaugaacgagcugggcgugcccuuccaccugggcaccaagcaggugugcaucgccuggagcagcagcagcugccacgacggcaaggccuggcugcacgugugcaucaccggcgacgacaagaacgccaccgccagcuucaucuacaacggcagacugguggacagcguggugagcuggagcaaggagauccugagaacccaggagagcgagugcgugugcaucaacggcaccugcaccguggugaugaccgacggcagcgccagcggcaaggccgacaccaagauccuguucaucgaggagggcaagaucgugcacaccagcacccugagcggcagcgcccagcacguggaggagugcagcugcuaccccagauaccccggcgugagaugcgugugcagagacaacuggaagggcagcaacagacccaucguggacaucaacaucaaggaccacagcaucgugagcagauacgugugcagcggccuggugggcgacacccccagaaagaacgacagcagcagcagcagccacugccuggaccccaacaacgaggagggcggccacggcgugaagggcugggccuucgacgacggcaacgacguguggaugggcagaaccaucaacgagaccagcagacugggcuacgagaccuucaaggugaucgagggcuggagcaaccccaagagcaagcugcagaucaacagacaggugaucguggacagaggcgacagaagcggcuacagcggcaucuucagcguggagggcaagagcugcaucaacagaugcuucuacguggagcugaucagaggcagaaaggaggagaccgaggugcuguggaccagcaacagcaucgugguguucugcggcaccagcggcaccuacggcaccggcagcuggcccgacggcgccgaccugaaccugaugcccaucuga

SEQ ID NO: 184807 - RNA, 1410 nt, Artificial Sequence; identical to SEQ ID NO: 182206
  derived and/or modified CDS sequence (opt4) from neuraminidase__InfluenzaA__AHL95904

SEQ ID NO: 184808 - RNA, 1410 nt, Artificial Sequence
  derived and/or modified CDS sequence (opt4) from neuraminidase__InfluenzaA__AHL95916
augaaccccaaccagaagaucaucaccaucggcagcgugagccugaccaucagcaccaucugcuucuucaugcagaucgccauccugaucaccaccgugacccugcacuucaagcaguacgagcugaacagcccccccaacaaccaggugaugcugugcgagcccaccaucaucgagagaaacaucaccgagaucguguaccugaccaacaccaccaucgagaaggagaucugccccaagcccgccgaguacagaaacuggagcaagccccagugcggcaucaccggcuucgcccccuucagcaaggacaacagcaucagacugagcgccggcggcgacaucugggugaccagagagcccuacgugagcugcgaccccgacaagugcuaccaguucgcccugggccagggcaccacccugaacaacgugcacagcaacaacaccgugagagacagaacccccuacagaacccugcugaugaacgagcugggcgugcccuuccaccugggcaccaagcaggugugcaucgccuggagcagcagcagcugccacgacggcaaggccuggcugcacgugugcaucaccggcgacgacaagaacgccaccgccagcuucaucuacaacggcagacugguggacagcguggugagcuggagcaaggagauccugagaacccaggagagcgagugcgugugcaucaacggcaccugcaccguggugaugaccgacggcagcgccagcggcaaggccgacaccaagauccuguucaucgaggagggcaagaucgugcacaccagcacccugagcggcagcgcccagcacguggaggagugcagcugcuaccccagauaccccggcgugagaugcgugugcagagacaacuggaagggcagcaacagacccaucguggacaucaacaucaaggaccacagcaucgugagcagcuacgugugcagcggccuggugggcgacacccccagaaagaacgacagcagcagcagcagccacugccuggaccccaacaacgaggagggcggccacggcgugaagggcugggccuucgacgacggcaacgacguguggaugggcagaaccaucaacgagaccagcagacugggcuacgagaccuucaaggugaucgagggcuggagcaaccccaagagcaagcugcagaucaacagacaggugaucguggacagaggcgacagaagcggcuacagcggcaucuucagcguggagggcaagagcugcaucaacagaugcuucuacguggagcugaucagaggcagaaaggaggagaccgaggugcuguggaccagcaacagcaucgugguguucugcggcaccagcggcaccuacggcaccggcagcuggcccgacggcgccgaccugaaccugaugcccaucuga

SEQ ID NO: 184809 - RNA, 1410 nt, Artificial Sequence; identical to SEQ ID NO: 183943
  derived and/or modified CDS sequence (opt4) from neuraminidase__InfluenzaA__AHL95928

SEQ ID NO: 184810 - RNA, 1410 nt, Artificial Sequence; identical to SEQ ID NO: 183931
  derived and/or modified CDS sequence (opt4) from neuraminidase__InfluenzaA__AHL95940

SEQ ID NO: 184811 - RNA, 1410 nt, Artificial Sequence; identical to SEQ ID NO: 182206
  derived and/or modified CDS sequence (opt4) from neuraminidase__InfluenzaA__AHL95952

SEQ ID NO: 184812 - RNA, 1410 nt, Artificial Sequence; identical to SEQ ID NO: 182206
  derived and/or modified CDS sequence (opt4) from neuraminidase__InfluenzaA__AHL95964

SEQ ID NO: 184813 - RNA, 1410 nt, Artificial Sequence; identical to SEQ ID NO: 182206
  derived and/or modified CDS sequence (opt4) from neuraminidase__InfluenzaA__AHL95976

SEQ ID NO: 184814 - RNA, 1410 nt, Artificial Sequence; identical to SEQ ID NO: 182206
  derived and/or modified CDS sequence (opt4) from neuraminidase__InfluenzaA__AHL95988

SEQ ID NO: 184815 - RNA, 1410 nt, Artificial Sequence; identical to SEQ ID NO: 182206
  derived and/or modified CDS sequence (opt4) from neuraminidase__InfluenzaA__AHL96000

SEQ ID NO: 184816 - RNA, 1410 nt, Artificial Sequence
  derived and/or modified CDS sequence (opt4) from neuraminidase__InfluenzaA__AHL96012
augaaccccaaccagaagaucaucaccaucggcagcgugagccugaccaucagcaccaucugcuucuucaugcagaucgccauccugaucaccaccgugacccugcacuucaagcaguacgaguucaacagcccccccaacaaccaggugaugcugugcgagcccaccaucaucgagagaaacaucaccgagaucguguaccugaccaacaccaccaucgagaaggagaucugccccaagcccgccgaguacagaaacuggagcaagccccagugcggcaucaccggcuucgcccccuucagcaaggacaacagcaucagacugagcgccggcggcgacaucugggugaccagagugcccuacgugagcugcgaccccgacaagugcuaccaguucgcccugggccagggcaccacccugaacaacgugcacagcaacaacaccgugagagacagaacccccuacagaacccugcugaugaacgagcugggcgugcccuuccaccugggcaccaagcaggugugcaucgccuggagcagcagcagcugccacgacggcaaggccuggcugcacgugugcaucaccggcgacgacaagaacgccaccgccagcuucaucuacaacggcagacugguggacagcguggugagcuggagcaaggagauccugagaacccaggagagcgagugcgugugcaucaacggcaccugcaccguggugaugaccgacggcagcgccagcggcaaggccgacaccaagauccuguucaucgaggagggcaagaucgugcacaccagcacccugagcggcagcgcccagcacguggaggagugcagcugcuaccccagauaccccggcgugagaugcgugugcagagacaacuggaagggcagcaacagacccaucguggacaucaacaucaaggaccacagcaucgugagcagcuacgugugcagcggccuggugggcgacacccccagaaagaacgacagcagcagcagcagccacugccuggaccccaacaacgaggagggcggccacggcgugaagggcugggccuucgacgacggcaacgacguguggaugggcagaaccaucaacgagaccagcagacugggcuacgagaccuucaaggugaucgagggcuggagcaaccccaagagcaagcugcagaucaacagacaggugaucguggacagaggcgacagaagcggcuacagcggcaucuucagcguggagggcaagagcugcaucaacagaugcuucuacguggagcugaucagaggcagaaaggaggagaccgaggugcuguggaccagcaacagcaucgugguguucugcggcaccagcggcaccuacggcaccggcagcuggcccgacggcgccgaccugaaccugaugcccaucuga

SEQ ID NO: 184817 - RNA, 1410 nt, Artificial Sequence
  derived and/or modified CDS sequence (opt4) from neuraminidase__InfluenzaA__AHL96024
augaaccccaaccagaagaucaucaccaucggcagcgugagccugaccaucagcaccaucugcuucuucaugcagaucgccauccugaucaccaccgugacccugcacuucaagcaguacgaguucaacagcccccccaacaaccaggugaugcugugcgagcccaccaucaucgagagaaacaucaccgagaucguguaccugaccaacaccaccaucgagaaggagaucugccccaagcccgccgaguacagaaacuggagcaagccccagugcggcaucaccggcuucgcccccuucagcaaggacaacagcaucagacugagcgccggcggcgacaucugggugaccagagagcccuacgugagcugcgaccccgacaagugcuaccaguucgcccugggccagggcaccacccugaacaacgugcacagcaacaacaccgugagagacagaacccccuacagaacccugcugaugaacgagcugggcgugcccuuccaccugggcaccaagcaggugugcaucgccuggagcagcagcagcugccacgacggcaaggccuggcugcacgugugcaucaccggcgacgacaagaacgccaccgccagcuucaucuacaacggcagacugguggacagcguggugagcuggagcaaggagaaccugagaacccaggagagcgagugcgugugcaucaacggcaccugcaccguggugaugaccgacggcagcgccagcggcaaggccgacaccaagauccuguucaucgaggagggcaagaucgugcacaccagcacccugagcggcagcgcccagcacguggaggagugcagcugcuaccccagauaccccggcgugagaugcgugugcagagacaacuggaagggcagcaacagacccaucguggacaucaacaucaaggaccacagcaucgugagcagcuacgugugcagcggccuggugggcgacacccccagaaagaacgacagcagcagcagcagccacugccuggaccccaacaacgaggagggcggccacggcgugaagggcugggccuucgacgacggcaacgacguguggaugggcagaaccaucaacgagaccagcagacugggcuacgagaccuucaaggugaucgagggcuggagcaaccccaagagcaagcugcagaucaacagacaggugaucguggacagaggcgacagaagcggcuacagcggcaucuucagcguggagggcaagagcugcaucaacagaugcuucuacguggagcugaucagaggcagaaaggaggagaccgaggugcuguggaccagcaacagcaucgugguguucugcggcaccagcggcaccuacggcaccggcagcuggcccgacggcgccgaccugaaccugaugcccaucuga

SEQ ID NO: 184818 - RNA, 1410 nt, Artificial Sequence; identical to SEQ ID NO: 182206
  derived and/or modified CDS sequence (opt4) from neuraminidase__InfluenzaA__AHL96036

SEQ ID NO: 184819 - RNA, 1410 nt, Artificial Sequence; identical to SEQ ID NO: 183449
  derived and/or modified CDS sequence (opt4) from neuraminidase__InfluenzaA__AHL96048

SEQ ID NO: 184820 - RNA, 1410 nt, Artificial Sequence; identical to SEQ ID NO: 182206
  derived and/or modified CDS sequence (opt4) from neuraminidase__InfluenzaA__AHL96059

SEQ ID NO: 184821 - RNA, 1410 nt, Artificial Sequence; identical to SEQ ID NO: 183943
  derived and/or modified CDS sequence (opt4) from neuraminidase__InfluenzaA__AHL96071

SEQ ID NO: 184822 - RNA, 1410 nt, Artificial Sequence; identical to SEQ ID NO: 184784
  derived and/or modified CDS sequence (opt4) from neuraminidase__InfluenzaA__AHL96083

SEQ ID NO: 184823 - RNA, 1410 nt, Artificial Sequence; identical to SEQ ID NO: 182206
  derived and/or modified CDS sequence (opt4) from neuraminidase__InfluenzaA__AHL96095

SEQ ID NO: 184824 - RNA, 1410 nt, Artificial Sequence
  derived and/or modified CDS sequence (opt4) from neuraminidase__InfluenzaA__AHL96107
augaaccccaaccagaagaucaucaccaucggcagcgugagccugaccaucagcaccaucugcuucuucaugcagaucgccauccugaucaccaccgugacccugcacuucaagcaguacgaguucaacagcccccccaacaaccaggugaugcugugcgagcccaccaucaucgagagaaacaucaccgagaucguguaccugaccaacaccaccaucgagaaggagaucugccccaagcccgccgaguacagaaacuggagcaagccccagugcggcaucaccggcuucgcccccuucagcaaggacaacagcaucagacugagcgccggcggcgacaucugggugaccagagagcccuacgugagcugcgaccccgacaagugcuaccaguucgcccugggccagggcaccacccugaacaacaugcacagcaacaacaccgugagagacagaacccccuacagaacccugcugaugaacgagcugggcgugcccuuccaccugggcaccaagcaggugugcaucgccuggagcagcagcagcugccacgacggcaaggccuggcugcacgugugcaucaccggcgacgacaagaacgccaccgccagcuucaucuacaacggcagacugguggacagcguggugagcuggagcaaggagauccugagaacccaggagagcgagugcgugugcaucaacggcaccugcaccguggugaugaccgacggcagcgccagcggcaaggccgacaccaagauccuguucaucgaggagggcaagaucgugcacaccagcacccugagcggcagcgcccagcacguggaggagugcagcugcuaccccagauaccccggcgugagaugcgugugcagagacaacuggaagggcagcaacagacccaucguggacaucaacaucaaggaccacagcaucgugagcagcuacgugugcagcggccuggugggcgacacccccagaaagaacgacaacagcagcagcagccacugccuggaccccaacaacgaggagggcggccacggcgugaagggcugggccuucgacgacggcaacgacguguggaugggcagaaccaucaacgagaccagcagacugggcuacgagaccuucaaggugaucgagggcuggagcaaccccaagagcaagcugcagaucaacagacaggugaucguggacagaggcgacagaagcggcuacagcggcaucuucagcguggagggcaagagcugcaucaacagaugcuucuacguggagcugaucagaggcagaaaggaggagaccgaggugcuguggaccagcaacagcaucgugguguucugcggcaccagcggcaccuacggcaccggcagcuggcccgacggcgccgaccugaaccugaugcccaucuga

SEQ ID NO: 184825 - RNA, 1410 nt, Artificial Sequence; identical to SEQ ID NO: 182206
  derived and/or modified CDS sequence (opt4) from neuraminidase__InfluenzaA__AHL96119

SEQ ID NO: 184826 - RNA, 1410 nt, Artificial Sequence; identical to SEQ ID NO: 183943
  derived and/or modified CDS sequence (opt4) from neuraminidase__InfluenzaA__AHL96131

SEQ ID NO: 184827 - RNA, 1410 nt, Artificial Sequence; identical to SEQ ID NO: 182206
  derived and/or modified CDS sequence (opt4) from neuraminidase__InfluenzaA__AHL96143

SEQ ID NO: 184828 - RNA, 1410 nt, Artificial Sequence; identical to SEQ ID NO: 182206
  derived and/or modified CDS sequence (opt4) from neuraminidase__InfluenzaA__AHL96167

SEQ ID NO: 184829 - RNA, 1410 nt, Artificial Sequence; identical to SEQ ID NO: 182206
  derived and/or modified CDS sequence (opt4) from neuraminidase__InfluenzaA__AHL96179

SEQ ID NO: 184830 - RNA, 1410 nt, Artificial Sequence
  derived and/or modified CDS sequence (opt4) from neuraminidase__InfluenzaA__AHL96191
augaaccccaaccagaagaucaucaccaucggcagcgugagccugaccaucagcaccaucugcuucuucaugcagaucgccauccugaucaccaccgugacccugcacuucaagcaguacgaguucgacagcccccccaacaaccaggugaugcugugcgagcccaccaucaucgagagaaacaucaccgagaucguguaccugaccaacaccaccaucgagaaggagaucugccccaagcccgccgaguacagaaacuggagcaagccccagugcggcaucaccggcuucgcccccuucagcaaggacaacagcaucagacugagcgccggcggcgacaucugggugaccagagagcccuacgugagcugcgaccccgacaagugcuaccaguucgcccugggccagggcaccacccugaacaacaugcacagcaacaacaccgugagagacagaacccccuacagaacccugcugaugaacgagcugggcgugcccuuccaccugggcaccaagcaggugugcaucgccuggagcagcagcagcugccacgacggcaaggccuggcugcacgugugcaucaccggcgacgacaagaacgccaccgccagcuucaucuacaacggcagacugguggacagcguggugagcuggagcaaggagauccugagaacccaggagagcgagugcgugugcaucaacggcaccugcaccguggugaugaccgacggcagcgccagcggcaaggccgacaccaagauccuguucaucgaggagggcaagaucgugcacaccagcacccugagcggcagcgcccagcacguggaggagugcagcugcuaccccagauaccccggcgugagaugcgugugcagagacaacuggaagggcagcaacagacccaucguggacaucaacaucaaggaccacagcaucgugagcagcuacgugugcagcggccuggugggcgacacccccagaaagaacgacagcagcagcagcagccacugccuggaccccaacaacgaggagggcggccacggcgugaagggcugggccuucgacgacggcaacgacguguggaugggcagaaccaucaacgagaccagcagacugggcuacgagaccuucaaggugaucgagggcuggagcaaccccaagagcaagcugcagaucaacagacaggugaucguggacagaggcgacagaagcggcuacagcggcaucuucagcguggagggcaagagcugcaucaacagaugcuucuacguggagcugaucagaggcagaaaggaggagaccgaggugcuguggaccagcaacagcaucgugguguucugcggcaccagcggcaccuacggcaccggcagcuggcccgacggcgccgaccugaaccugaugcccaucuga

SEQ ID NO: 184831 - RNA, 1410 nt, Artificial Sequence; identical to SEQ ID NO: 183931
  derived and/or modified CDS sequence (opt4) from neuraminidase__InfluenzaA__AHL96203

SEQ ID NO: 184832 - RNA, 1410 nt, Artificial Sequence; identical to SEQ ID NO: 183943
  derived and/or modified CDS sequence (opt4) from neuraminidase__InfluenzaA__AHL96215

SEQ ID NO: 184833 - RNA, 1410 nt, Artificial Sequence; identical to SEQ ID NO: 182206
  derived and/or modified CDS sequence (opt4) from neuraminidase__InfluenzaA__AHL96227

SEQ ID NO: 184834 - RNA, 1410 nt, Artificial Sequence; identical to SEQ ID NO: 182206
  derived and/or modified CDS sequence (opt4) from neuraminidase__InfluenzaA__AHL96239

SEQ ID NO: 184835 - RNA, 1410 nt, Artificial Sequence; identical to SEQ ID NO: 182206
  derived and/or modified CDS sequence (opt4) from neuraminidase__InfluenzaA__AHL96251

SEQ ID NO: 184836 - RNA, 1410 nt, Artificial Sequence; identical to SEQ ID NO: 182206
  derived and/or modified CDS sequence (opt4) from neuraminidase__InfluenzaA__AHL96263

SEQ ID NO: 184837 - RNA, 1410 nt, Artificial Sequence; identical to SEQ ID NO: 183987
  derived and/or modified CDS sequence (opt4) from neuraminidase__InfluenzaA__AHL96277

SEQ ID NO: 184838 - RNA, 1410 nt, Artificial Sequence
  derived and/or modified CDS sequence (opt4) from neuraminidase__InfluenzaA__AHL96308
augaaccccaaccagaagaucaucaccaucggcagcgugagccugaccaucagcaccaucugcuucuucaugcagaucgccauccugaucaccaccgugacccugcacuucaagcaguacgaguucaacuucccccccaacaaccaggugaugcugugcgagcccaccaucaucgagagaaacaucaccgagaucguguaccugaccaacaccaccaucgagaaggagaucugccccaagcccgccgaguacagaaacuggagcaagccccagugcggcaucaccggcuucgcccccuucagcaaggacaacagcaucagacugagcgccggcggcgacaucugggugaccagagagcccuacgugagcugcgaccccgacaagugcuaccaguucgcccugggccagggcaccacccugaacaacgugcacagcaacaacaccgugagagacagaacccccuacagaacccugcugaugagcgagcugggcgugcccuuccaccugggcaccaagcaggugugcaucgccuggagcagcagcagcugccacgacggcaaggccuggcugcacgugugcaucaccggcgacgacaagaacgccaccgccagcuucaucuacaacggcagacugguggacagcguggugagcuggagcaaggagauccugagaacccaggagagcgagugcgugugcaucaacggcaccugcaccguggugaugaccgacggcagcgccagcggcaaggccgacaccaagauccuguucaucgaggagggcaagaucgugcacaccagcacccugagcggcagcgcccagcacguggaggagugcagcugcuaccccagauaccccggcgugagaugcgugugcagagacaacuggaagggcagcaacagacccaucguggacaucaacaucaaggaccacagcaucgugagcagcuacgugugcagcggccuggugggcgacacccccagaaagaacgacagcagcagcagcagccacugccuggaccccaacaacgaggagggcggccacggcgugaagggcugggccuucgacgacggcaacgacguguggaugggcagaaccaucaacgagaccagcagacugggcuacgagaccuucaaggugaucgagggcuggagcaaccccaagagcaagcugcagaucaacagacaggugaucguggacagaggcgacagaagcggcuacagcggcaucuucagcguggagggcaagagcugcaucaacagaugcuucuacguggagcugaucagaggcagaaaggaggagaccgaggugcuguggaccagcaacagcaucgugguguucugcggcaccagcggcaccuacggcaccggcagcuggcccgacggcgccgaccugaaccugaugcccaucuga

SEQ ID NO: 184839 - RNA, 1410 nt, Artificial Sequence; identical to SEQ ID NO: 183435
  derived and/or modified CDS sequence (opt4) from neuraminidase__InfluenzaA__AHL96321

SEQ ID NO: 184840 - RNA, 1410 nt, Artificial Sequence; identical to SEQ ID NO: 182206
  derived and/or modified CDS sequence (opt4) from neuraminidase__InfluenzaA__AHL96333

SEQ ID NO: 184841 - RNA, 1410 nt, Artificial Sequence
  derived and/or modified CDS sequence (opt4) from neuraminidase__InfluenzaA__AHL96345
augaaccccaaccagaagaucaucaccaucggcagcgugagccugaccaucagcaccaucugcuucuucaugcagaucgccauccugaucaccaccgugacccugcacuucaagcaguacgaguucaacagcccccccaacaaccaggugaugcugugcgagcccaccaucaucgagagaaacaucaccgagaucguguaccugaccaacaccaccaucgagaaggagaucugccccaagcccgccgaguacagaaacuggagcaagccccagugcggcaucaccggcuucgcccccuucagcaaggacaacagcaucagacugagcgccggcggcgacaucugggugaccagagagcccuacgugagcugcgaccccgacaagugcuaccaguucgcccugggccagggcaccacccugaacaacgugcacagcaacaacaccgugagagacagaacccccuacagaacccugcugaugaacgagcugggcgugcccuuccaccugggcaccaagcaggugugcaucgccuggagcagcagcagcugccacgacggcaaggccuggcugcacgugugcaucaccggcgacgacaagaacgccaccgccagcuucaucuacaacggcagacugguggacagcguggugagcuggagcaaggagauccugagaacccaggagagcgagugcgugugcaucaacggcaccugcaccguggugaugaccgacggcagcgccagcggcaaggccgacaccaagauccuguucaucgaggagggcaagaucgugcacaccagcacccugagcggcagcgcccagcacguggaggagugcagcugcuaccccagauaccccggcgugagaugcgugugcagagacaacuggaagggcagcaacagacccaucguggacaucaacaucaaggaccacagcaucgugagcagcuacgugugcagcggccuggugggcgacacccccagaaagaacgacaacagcagcagcagccacugccuggaccccaacaacgaggagggcggccacggcgugaagggcugggccuucgacgacggcaacgacguguggaugggcagaaccaucaacgagaccagcagacugggcuacgagaccuucaaggugaucgagggcuggagcaaccccaagagcaagcugcagaucaacagacaggugaucguggacagaggcgacagaagcggcuacagcggcaucuucagcguggagggcaagagcugcaucaacagaugcuucuacguggagcugaucagaggcagaaaggaggagaccgaggugcuguggaccagcaacagcaucgugguguucugcggcaccagcggcaccuacggcaccggcagcuggcccgacggcgccgaccugaaccugaugcccaucuga

SEQ ID NO: 184842 - RNA, 1410 nt, Artificial Sequence; identical to SEQ ID NO: 183931
  derived and/or modified CDS sequence (opt4) from neuraminidase__InfluenzaA__AHL96357

SEQ ID NO: 184843 - RNA, 1410 nt, Artificial Sequence; identical to SEQ ID NO: 182206
  derived and/or modified CDS sequence (opt4) from neuraminidase__InfluenzaA__AHL96369

SEQ ID NO: 184844 - RNA, 1410 nt, Artificial Sequence; identical to SEQ ID NO: 182206
  derived and/or modified CDS sequence (opt4) from neuraminidase__InfluenzaA__AHL96381

SEQ ID NO: 184845 - RNA, 1410 nt, Artificial Sequence; identical to SEQ ID NO: 183943
  derived and/or modified CDS sequence (opt4) from neuraminidase__InfluenzaA__AHL96393

SEQ ID NO: 184846 - RNA, 1410 nt, Artificial Sequence
  derived and/or modified CDS sequence (opt4) from neuraminidase__InfluenzaA__AHL96405
augaaccccaaccagaagaucaucaccaucggcagcgugagccugaccaucagcaccaucugcuucuucaugcagaucgccauccugaucaccaccgugacccugcacuucaagcaguacgaguucaacagcccccccaacaaccaggugaugcugugcgagcccaccaucaucgagagaaacaucaccgagaucguguaccugaccaacaccaccaucgagaaggagaucugccccaagcccgccgaguacagaaacuggagcaagccccagugcggcaucaccggcuucgcccccuucagcaaggacaacagcaucagacugagcgccggcggcgacaucugggugaccagagagcccuacgugagcugcgaccccgacaagugcuaccaguucgcccugggccagggcaccacccugaacaacgugcacagcaacaacaccgugagagacagaacccccuacagaacccugcugaugaacgagcugggcgugcccuuccaccugggcaccaagcaggugugcaucgccuggagcagcagcagcugccacgacggcaaggccuggcugcacgugugcaucaccggcgacgacaagaacgccaccgccagcuucaucuacaacggcagacugguggacagcguggugagcuggagcaaggagauccugagaacccaggagagcgagugcgugugcaucaacggcaccugcaccguggugaugaccgacggcagcgccagcggcaaggccgacaccaagauccuguucaucgaggagggcaagaucgugcacaccagcacccugagcggcagcgcccagcacguggaggagugcagcugcuaccccagauaccccggcgugagaugcgugugcagagacaacuggaagggcagcaacagacccaucguggacaucaacaucaaggaccacagcaucgugagcagcuacgugugcagcggccuggugggcgacacccccagaaagaacgacagcagcagcagcagccacugccugggccccaacaacgaggagggcggccacggcgugaagggcugggccuucgacgacggcaacgacguguggaugggcagaaccaucaacgagaccagcagacugggcuacgagaccuucaaggugaucgagggcuggagcaaccccaagagcaagcugcagaucaacagacaggugaucguggacagaggcgacagaagcggcuacagcggcaucuucagcguggagggcaagagcugcaucaacagaugcuucuacguggagcugaucagaggcagaaaggaggagaccgaggugcuguggaccagcaacagcaucgugguguucugcggcaccagcggcaccuacggcaccggcagcuggcccgacggcgccgaccugaaccugaugcccaucuga

SEQ ID NO: 184847 - RNA, 1410 nt, Artificial Sequence; identical to SEQ ID NO: 182206
  derived and/or modified CDS sequence (opt4) from neuraminidase__InfluenzaA__AHL96417

SEQ ID NO: 184848 - RNA, 1410 nt, Artificial Sequence; identical to SEQ ID NO: 182206
  derived and/or modified CDS sequence (opt4) from neuraminidase__InfluenzaA__AHL96429

SEQ ID NO: 184849 - RNA, 1410 nt, Artificial Sequence
  derived and/or modified CDS sequence (opt4) from neuraminidase__InfluenzaA__AHL96441
augaaccccaaccagaagaucaucaccaucggcagcgugagccugaccaucagcaccaucugcuucuucaugcagaucgccauccugaucaccaccgugacccugcacuucaagcacuacgaguucaacagcccccccaacaaccaggugaugcugugcgagcccaccaucaucgagagaaacaucaccgagaucguguaccugaccaacaccaccaucgagaaggagaucugccccaagcccgccgaguacagaaacuggagcaagccccagugcgacaucaccggcuucgcccccuucagcaaggacaacagcaucagacugagcgccggcggcgacaucugggugaccagagagcccuacgugagcugcgaccccgacaagugcuaccaguucgcccugggccagggcaccacccugaacaacgugcacagcaacaacaccgugagagacagaacccccuacagaacccugcugaugaacgagcugggcgugcccuuccaccugggcaccaagcaggugugcaucgccuggagcagcagcagcugccacgacggcaaggccuggcugcacgugugcaucaccggcgacgacaagaacgccaccgccagcuucaucuacaacggcagacugguggacagcguggugagcuggagcaaggagauccugagaacccaggagagcgagugcgugugcaucaacggcaccugcaccguggugaugaccgacggcagcgccagcggcaaggccgacaccaagauccuguucaucgaggagggcaagaucgugcacaccagcacccugagcggcagcgcccagcacguggaggagugcagcugcuaccccagauaccccggcgugagaugcgugugcagagacaacuggaagggcagcaacagacccaucguggacaucaacaucaaggaccacagcaucgugagcagauacgugugcagcggccuggugggcgacacccccagaaagaacgacagcagcagcagcagccacugccugaaccccaacaacgaggagggcggccacggcgugaagggcugggccuucgacgacggcaacgacguguggaugggcagaaccaucaacgagaccagcagacugggcuacgagaccuucaaggugaucgagggcuggagcaaccccaagagcaagcugcagaucaacagacagaucaucguggacagaggcgacagaagcggcuacagcggcaucuucagcguggagggcaagagcugcaucaacagaugcuucuacguggagcugaucagaggcagaaaggaggagaccgaggugcuguggaccagcaacagcaucgugguguucugcggcaccagcggcaccuacggcaccggcagcuggcccgacggcgccgaccugaaccugaugcccaucuga

SEQ ID NO: 184850 - RNA, 1410 nt, Artificial Sequence; identical to SEQ ID NO: 182206
  derived and/or modified CDS sequence (opt4) from neuraminidase__InfluenzaA__AHL96453

SEQ ID NO: 184851 - RNA, 1410 nt, Artificial Sequence; identical to SEQ ID NO: 182206
  derived and/or modified CDS sequence (opt4) from neuraminidase__InfluenzaA__AHL96465

SEQ ID NO: 184852 - RNA, 1410 nt, Artificial Sequence
  derived and/or modified CDS sequence (opt4) from neuraminidase__InfluenzaA__AHL96477
augaaccccaaccagaagaucaucaccaucggcagcgugugcaugaccaucggcauggccaaccugauccugcagaucggcaacaucaucagcaucuggaucagccacagcauccaggugggcaaccagagccagaucgagaccugcaaccagagcgugaucaccuacgagaacaacaccugggugaaccagaccuacgugaacaucagcaacaccaacuucgccgccggccagagcguggugagcgugaagcuggccggcaacagcagccugugccccgugagcggcugggccaucuacagcaaggacaacagcgugagaaucggcagcaagggcgacguguucgugaucagagagcccuucaucagcugcagcccccuggagugcagaaccuucuuccugacccagggcgcccugcugaacgacaagcacagcaacggcaccaucaaggacagaagccccuacagaacccugaugagcugccccaucggcgaggugcccagccccuacaacagcagauucgagagcguggccuggagcgccagcgccugccacgacggcaucaacuggcugaccaucggcaucagcggccccgacagcggcgccguggccgugcugaaguacaacggcaucaucaccgacaccaucaagagcuggagaaacaacauccugagaacccaggagagcgagugcgccugcgugaacggcagcugcuucaccaucaugaccgacggccccagcgacggccaggccagcuacaagaucuucagaaucgagaagggcaagaucgugaagagcguggagaugaacgcccccaacuaccacuacgaggagugcagcugcuaccccgacagcagcgagaucaccugcgugugcagagacaacuggcacggcagcaacagacccugggugagcuucaaccagaaccuggaguaccagaucggcuacaucugcagcggcaucuucggcgacaaccccagacccaacgacaagaccggcagcugcggccccgugagcagcaacggcgccaacggcgugaagggcuucagcuucaaguacggcaacggcguguggaucggcagaaccaagagcaucagcagcagaaagggcuucgagaugaucugggaccccaacggcuggaccggcaccgacaacaacuucagcaucaagcaggacaucgugggcaucaacgaguggagcggcuacagcggcagcuucgugcagcaccccgagcugaccggccuggacugcaucagacccugcuucuggguggagcugaucagaggcagacccaaggagaacaccaucuggaccagcggcagcagcaucagcuucugcggcgugaacagcgacaccgugggcuggagcuggcccgacggcgccgagcugcccuucaccaucgacaaguga

SEQ ID NO: 184853 - RNA, 1410 nt, Artificial Sequence; identical to SEQ ID NO: 183943
  derived and/or modified CDS sequence (opt4) from neuraminidase__InfluenzaA__AHL96488

SEQ ID NO: 184854 - RNA, 1410 nt, Artificial Sequence; identical to SEQ ID NO: 182206
  derived and/or modified CDS sequence (opt4) from neuraminidase__InfluenzaA__AHL96500

SEQ ID NO: 184855 - RNA, 1410 nt, Artificial Sequence; identical to SEQ ID NO: 182206
  derived and/or modified CDS sequence (opt4) from neuraminidase__InfluenzaA__AHL96512

SEQ ID NO: 184856 - RNA, 1410 nt, Artificial Sequence; identical to SEQ ID NO: 183435
  derived and/or modified CDS sequence (opt4) from neuraminidase__InfluenzaA__AHL96524

SEQ ID NO: 184857 - RNA, 1410 nt, Artificial Sequence
  derived and/or modified CDS sequence (opt4) from neuraminidase__InfluenzaA__AHL96536
augaaccccaaccagaagaucaucaccaucggcagcgugagccugaccaucagcaccaucugcuucuucacccagaucgccauccugaucaccaccgugacccugcacuucaagcaguacgaguucaacagcccccccaacaaccaggugaugcugugcgagcccaccaucaucgagagaaacaucaccgagaucguguaccugaccaacaccaccaucgagaaggagaucugccccaagcccgccgaguacagaaacuggagcaagccccagugcggcaucaccggcuucgcccccuucagcaaggacaacagcaucagacugagcgccggcggcgacaucugggugaccagagagcccuacgugagcugcgaccccgacaagugcuaccaguucgcccugggccagggcaccaccaucaacaacgugcacagcaacaacaccgugagagacagaacccccuacagaacccugcugaugaacgagcugggcgugcccuuccaccugggcaccaagcaggugugcaucgccuggagcagcagcagcugccacgacggcaaggccuggcugcacgugugcaucaccggcgacgacaagaacgccaccgccagcuucaucuacaacggcagacugguggacagcguggugagcuggagcaaggagauccugagaacccaggagagcgagugcgugugcaucaacggcaccugcaccguggugaugaccgacggcagcgccagcggcaaggccgacaccaagauccuguucaucgaggagggcaagaucgugcacaccagcacccugagcggcagcgcccagcacguggaggagugcagcugcuaccccagauaccccggcgugagaugcgugugcagagacaacuggaagggcagcaacagacccaucguggacaucaacaucaaggaccacagcaucgugagcagcuacgugugcagcggccuggugggcgacacccccagaaagaacgacagcagcagcagcagccacugccuggaccccaacaacgaggagggcggccacggcgugaagggcugggccuucgacgacggcaacgacguguggaugggcagaaccaucaacgagaccagcagacugggcuacgagaccuucaaggugaucgagggcuggagcaaccccaagagcaagcugcagaucaacagacaggugaucguggacagaggcgacagaagcggcuacagcggcaucuucagcguggagggcaagagcugcaucaacagaugcuucuacguggagcugaucagaggcagaaaggaggagaccgaggugcuguggaccagcaacagcaucgugguguucugcggcaccagcggcaccuacggcaccggcagcuggcccgacggcgccgaccugaaccugaugcccaucuga

SEQ ID NO: 184858 - RNA, 1410 nt, Artificial Sequence; identical to SEQ ID NO: 183943
  derived and/or modified CDS sequence (opt4) from neuraminidase__InfluenzaA__AHL96548

SEQ ID NO: 184859 - RNA, 1410 nt, Artificial Sequence
  derived and/or modified CDS sequence (opt4) from neuraminidase__InfluenzaA__AHL96560
augaaccccaaccagaagaucaucaccaucggcagcgugagccugaccaucagcaccaucugcuucuucaugcagaucgccauccugaucaccaccgugacccugcacuucaagcaguacgaguucaacagcccccccaacaaccaggugaugcugugcgagcccaccaucaucgagagaaacaucaccgagaucguguaccugaccaacaccaccaucgagaaggagaucugccccaagcccgccgaguacagaaacuggagcaagccccagugcggcaucaccggcuucgcccccuucagcaaggacaacagcaucagacugagcgccggcggcgacaucugggugaccagagagcccuacgugagcugcgaccccgacaagugcuaccaguucgcccugggccagggcaccacccugaacaacgugcacagcaacaacaccgugagagacagaacccccuacagaacccugcugaugaacgagcugggcgugcccuuccaccugggcaccaagcaggugugcaucgccuggagcagcagcagcugccacgacggcaaggccuggcugcacgugugcaucaccggcgacgacaagaacgccaccgccagcuucaucuacaacggcagacugguggacagcguggugagcuggagcaaggagauccugagaacccaggagagcgagugcgugugcaucaacggcaccugcaccguggugaugaccgacggcaacgccagcggcaaggccgacaccaagauccuguucaucgaggagggcaagaucgugcacaccagcacccugagcggcagcgcccagcacguggaggagugcagcugcuaccccagauaccccggcgugagaugcgugugcagagacaacuggaagggcagcaacagacccaucguggacaucaacaucaaggaccacagcaucgugagcagcuacgugugcagcggccuggugggcgacacccccagaaagaacgacagcagcagcagcagccacugccuggaccccaacaacgaggagggcggccacggcgugaagggcugggccuucgacgacggcaacgacguguggaugggcagaaccaucaacgagaccagcagacugggcuacgagaccuucaaggugaucgagggcuggagcaaccccaagagcaagcugcagaucaacagacaggugaucguggacagaggcgacagaagcggcuacagcggcaucuucagcguggagggcaagagcugcaucaacagaugcuucuacguggagcugaucagaggcagaaaggaggagaccgaggugcuguggaccagcaacagcaucgugguguucugcggcaccagcggcaccuacggcaccggcagcuggcccgacggcgccgaccugaaccugaugcccaucuga

SEQ ID NO: 184860 - RNA, 1410 nt, Artificial Sequence; identical to SEQ ID NO: 183417
  derived and/or modified CDS sequence (opt4) from neuraminidase__InfluenzaA__AHL96572

SEQ ID NO: 184861 - RNA, 1410 nt, Artificial Sequence; identical to SEQ ID NO: 184852
  derived and/or modified CDS sequence (opt4) from neuraminidase__InfluenzaA__AHL96584

SEQ ID NO: 184862 - RNA, 1410 nt, Artificial Sequence
  derived and/or modified CDS sequence (opt4) from neuraminidase__InfluenzaA__AHL96595
augaaccccaaccagaagaucaucaccaucggcagcgugagccugaccaucagcaccaucugcuucuucaugcagaucgccauccugaucaccaccgugacccugcacuucaagcaguacgaguucaacagcccccccaacaaccaggugaugcugugcgagcccaccaucaucgagagaaacaucaccgagaucguguaccugaccaacaccaccaucgagaaggagaucugccccaagcccgccgaguacagaaacuggagcaagccccagugcggcaucaccggcuucgcccccuucagcaaggacaacagcaucagacugagcgccggcggcgacaucugggugaccagagagcccuacgugagcugcgaccccgacaagugcuaccaguucgcccugggccagggcaccacccugaacaacgugcacagcaacaacaccgugagagacagaacccccuacagaacccugcugaugaacgagcugggcgugcccuuccaccugggcaccaagcaggugugcaucgccuggagcagcagcagcugccacgacggcaaggccuggcugcacgugugcaucaccggcgacgacaagaacgccaccgccagcuucaucuacaacggcagacugguggacagcguggugagcuggagcaaggagauccugagaacccaggagagcgagugcgugugcaucaacggcaccugcaccguggugaugaccgacggcagcgccagcggcaaggccgacaccaagauccuguucaucgaggagggcaagaucgugcacaccagcacccugagcggcagcgcccagcacguggaggagugcagcugcuaccccagauaccccggcgugagaugcgugugcagagacaacuggaagggcagcaacagacccaucguggacaucaacaucaaggaccacagcaucgugagcagcuacgugugcagcggccuggugggcgacacccccagaaagaacgacagcagcagcagcagccacugccuggaccccaacaacgaggagggcggccacggcgugaagggcugggccuucgacgacggcaacgacguguggaugggcagaaccaucaacgagaccagcagacugggcuacgagaccuucaaggugaucgagggcuggagcaaccccaagagcaagcugcagaucaacagacaggugaucguggacagaggcgacagaagcggcuacagcggcaucuucagcguggagagcaagagcugcaucaacagaugcuucuacguggagcugaucagaggcagaaaggaggagaccgaggugcuguggaccagcaacagcaucgugguguucugcggcaccagcggcaccuacggcaccggcagcuggcccgacggcgccgaccugaaccugaugcccaucuga

SEQ ID NO: 184863 - RNA, 1410 nt, Artificial Sequence; identical to SEQ ID NO: 182206
  derived and/or modified CDS sequence (opt4) from neuraminidase__InfluenzaA__AHL96607

SEQ ID NO: 184864 - RNA, 1410 nt, Artificial Sequence
  derived and/or modified CDS sequence (opt4) from neuraminidase__InfluenzaA__AHL96631
augaaccccaaccagaagaucaucaccaucggcagcgugagccugaccaucagcaccaucugcuucuucaugcagaucgccauccugaucaccaccgugacccugcacuucaagcaguacgaguucaacagccugcccaacaaccaggugaugcugugcgagcccaccaucaucgagagaaacaucaccgagaucguguaccugaccaacaccaccaucgagaaggagaucugccccaagcccgccgaguacagaaacuggagcaagccccagugcggcaucaccggcuucgcccccuucagcaaggacaacagcaucagacugagcgccggcggcgacaucugggugaccagagagcccuacgugagcugcgaccccgacaagugcuaccaguucgcccugggccagggcaccacccugaacaacaugcacagcaacaacaccgugagagacagaacccccuacagaacccugcugaugaacgagcugggcgugcccuuccaccugggcaccaagcaggugugcaucgccuggagcagcagcagcugccacgacggcaaggccuggcugcacgugugcaucaccggcgacgacaagaacgccaccgccagcuucaucuacaacggcagacugguggacagcguggugagcuggagcaaggagauccugagaacccaggagagcgagugcgugugcaucaacggcaccugcaccguggugaugaccgacggcagcgccagcggcaaggccgacaccaagauccuguucaucgaggagggcaagaucgugcacaccagcacccugagcggcagcgcccagcacguggaggagugcagcugcuaccccagauaccccggcgugagaugcgugugcagagacaacuggaagggcagcaacagacccaucguggacaucaacaucaaggaccacagcaucgugagcagcuacgugugcagcggccuggugggcgacacccccagaaagaacgacagcagcagcagcagccacugccuggaccccaacaacgaggagggcggccacggcgugaagggcugggccuucgacgacggcaacgacguguggaugggcagaaccaucaacgagaccagcagacugggcuacgagaccuucaaggugaucgagggcuggagcaaccccaagagcaagcugcagaucaacagacaggugaucguggacagaggcgacagaagcggcuacagcggcaucuucagcguggagggcaagagcugcaucaacagaugcuucuacguggagcugaucagaggcagaaaggaggagaccgaggugcuguggaccagcaacagcaucgugguguucugcggcaccagcggcaccuacggcaccggcagcuggcccgacggcgccgaccugaaccugaugcccaucuga

SEQ ID NO: 184865 - RNA, 1410 nt, Artificial Sequence; identical to SEQ ID NO: 183943
  derived and/or modified CDS sequence (opt4) from neuraminidase__InfluenzaA__AHL96643

SEQ ID NO: 184866 - RNA, 1410 nt, Artificial Sequence; identical to SEQ ID NO: 182206
  derived and/or modified CDS sequence (opt4) from neuraminidase__InfluenzaA__AHL96655

SEQ ID NO: 184867 - RNA, 1410 nt, Artificial Sequence; identical to SEQ ID NO: 182206
  derived and/or modified CDS sequence (opt4) from neuraminidase__InfluenzaA__AHL96667

SEQ ID NO: 184868 - RNA, 1410 nt, Artificial Sequence; identical to SEQ ID NO: 182206
  derived and/or modified CDS sequence (opt4) from neuraminidase__InfluenzaA__AHL96679

SEQ ID NO: 184869 - RNA, 1410 nt, Artificial Sequence; identical to SEQ ID NO: 182206
  derived and/or modified CDS sequence (opt4) from neuraminidase__InfluenzaA__AHL96691

SEQ ID NO: 184870 - RNA, 1410 nt, Artificial Sequence; identical to SEQ ID NO: 182206
  derived and/or modified CDS sequence (opt4) from neuraminidase__InfluenzaA__AHL96703

SEQ ID NO: 184871 - RNA, 1410 nt, Artificial Sequence; identical to SEQ ID NO: 183931
  derived and/or modified CDS sequence (opt4) from neuraminidase__InfluenzaA__AHL96763

SEQ ID NO: 184872 - RNA, 1410 nt, Artificial Sequence; identical to SEQ ID NO: 184784
  derived and/or modified CDS sequence (opt4) from neuraminidase__InfluenzaA__AHL96787

SEQ ID NO: 184873 - RNA, 1410 nt, Artificial Sequence
  derived and/or modified CDS sequence (opt4) from neuraminidase__InfluenzaA__AHL96799
augaaccccaaccagaagaucaucaccaucggcagcgugagccugaccaucagcaccaucugcuucuucaugcagaucgccauccugaucaccaccgugacccugcacuucaagcaguacgaguucaacagcccccccaacaaccaggugaugcugugcgagcccaccaucaucgagagaaacaucaccgagaucguguaccugaccaacaccaccaucgagaaggagaucugccccaagcccgccgaguacagaaacuggagcaagccccagugcggcaucaccggcuucgcccccuucagcaaggacaacagcaucagacugagcgccggcggcgacaucugggugaccagagagcccuacgugagcugcgaccccgacaagugcuaccaguucgcccugggccagggcaccacccugaacaacgugcacagcaacaacaccgugagagacagaacccccuacagaacccugcugaugaacgagcugggcgugcccuuccaccugggcaccaagcaggugugcaucgccuggagcagcagcagcugccacgacggcaaggccuggcugcacgugugcaucaccggcgacgacaagaacgccaccgccagcuucaucuacaacggcagacugguggacagcguggugagcuggagcaaggagauccugagaacccaggagagcgagugcgugugcaucaacggcaccugcaccguggugaugaccgacggcagcgccagcggcaaggccgacaccaagauccuguucaucgaggagggcaagaucgugcacaccagcacccugagcggcagcgcccagcacguggaggagugcagcugcuaccccagauaccccggcgugagaugcgugugcagagacaacuggaagggcagcaacagacccaucguggacaucaacaucaaggaccacagcaucgugagcagcuacgugugcagcggccuggugggcgacacccccagaaagaacgacagcagcagcagcagccacugccuggaccccaacaacgaggagggcggccacggcgugaagggcugggccuucgacgacggcaacgacguguggaugggcagaaccaucaacgagaccagcagacugggcuacgagaccuucaaggugaucgagggcuggagcaaccccaagagcaagcugcagaucaacagacaggugaucguggacagaggcgacagaagcggcuacagcggcaucuucagcguggagggcaagagcugcaucaacagaugcuucuacguggagcugaucagaggcagaaaggacgagaccgaggugcuguggaccagcaacagcaucgugguguucugcggcaccagcggcaccuacggcaccggcagcuggcccgacggcgccgaccugaaccugaugcccaucuga

SEQ ID NO: 184874 - RNA, 1410 nt, Artificial Sequence; identical to SEQ ID NO: 183943
  derived and/or modified CDS sequence (opt4) from neuraminidase__InfluenzaA__AHL96811

SEQ ID NO: 184875 - RNA, 1410 nt, Artificial Sequence; identical to SEQ ID NO: 183943
  derived and/or modified CDS sequence (opt4) from neuraminidase__InfluenzaA__AHL96823

SEQ ID NO: 184876 - RNA, 1410 nt, Artificial Sequence; identical to SEQ ID NO: 182206
  derived and/or modified CDS sequence (opt4) from neuraminidase__InfluenzaA__AHL96847

SEQ ID NO: 184877 - RNA, 1410 nt, Artificial Sequence
  derived and/or modified CDS sequence (opt4) from neuraminidase__InfluenzaA__AHL96859
augaaccccaaccagaagaucaucaccaucggcagcgugagccugaccaucagcaccaucugcuucuucaugcagaucgccauccugaucaccaccgugacccugcacuucaagcaguacgaguucaacagcccccccaacaaccagaugaugcugugcgagcccaccaucaucgagagaaacaucaccgagaucguguaccugaccaacaccaccaucgagaaggagaucugccccaagcccgccgaguacagaaacuggagcaagccccagugcggcaucaccggcuucgcccccuucagcaaggacaacagcaucagacugagcgccggcggcgacaucugggugaccagagagcccuacgugagcugcgaccccgacaagugcuaccaguucgcccugggccagggcaccacccugaacaacgugcacagcaacaacaccgugagagacagaacccccuacagaacccugcugaugaacgagcugggcgugcccuuccaccugggcaccaagcaggugugcaucgccuggagcagcagcagcugccacgacggcaaggccuggcugcacgugugcaucaccggcgacgacaagaacgccaccgccagcuucaucuacaacggcagacugguggacagcguggugagcuggagcaaggagauccugagaacccaggagagcgagugcgugugcaucaacggcaccugcaccguggugaugaccgacggcagcgccagcggcaaggccgacaccaagauccuguucaucgaggagggcaagaucgugcacaccagcacccugagcggcagcgcccagcacguggaggagugcagcugcuaccccagauaccccggcgugagaugcgugugcagagacaacuggaagggcagcaacagacccaucguggacaucaacaucaaggaccacagcaucgugagcagcuacgugugcagcggccuggugggcgacacccccagaaagaacgacagcagcagcagcagccacugccuggaccccaacaacgaggagggcggccacggcgugaagggcugggccuucgacgacggcaacgacguguggaugggcagaaccaucaacgagaccagcagacugggcuacgagaccuucaaggugaucgagggcuggagcaaccccaagagcaagcugcagaucaacagacaggugaucguggacagaggcgacagaagcggcuacagcggcaucuucagcguggagggcaagagcugcaucaacagaugcuucuacguggagcugaucagaggcagaaaggaggagaccgaggugcuguggaccagcaacagcaucgugguguucugcggcaccagcggcaccuacggcaccggcagcuggcccgacggcgccgaccugaaccugaugcccaucuga

SEQ ID NO: 184878 - RNA, 1410 nt, Artificial Sequence
  derived and/or modified CDS sequence (opt4) from neuraminidase__InfluenzaA__AHL96871
augaaccccaaccagaagaucaucaccaucggcagcgugagccugaccaucagcaccaucugcuucuucaugcagaucgccauccugaucaccaccgugacccugcacuucaagcaguacgaguucaacagcccccccaacaaccaggugaugcugugcgagcccaccaucguggagagaaacaucaccgagaucguguaccugaccaacaccaccaucgagaaggagaucugccccaagcccgccgaguacagaaacuggagcaagccccagugcggcaucaccggcuucgcccccuucagcaaggacaacagcaucagacugagcgccggcggcgacaucugggugaccagagagcccuacgugagcugcgaccccgacaagugcuaccaguucgcccugggccagggcaccacccugaacaacgugcacagcaacaacaccgugagagacagaacccccuacagaacccugcugaugaacgagcugggcgugcccuuccaccugggcaccaagcaggugugcaucgccuggagcagcagcagcugccacgacggcaaggccuggcugcacgugugcaucaccggcgacgacaagaacgccaccgccagcuucaucuacaacggcagacugguggacagcguggugagcuggagcaaggaggugcugagaacccaggagagcgagugcgugugcaucaacggcaccugcgccguggugaugaccgacggcagcgccagcggcaaggccgacaccaagauccuguucaucgaggagggcaagaucgugcacaccagcacccugagcggcagcgcccagcacguggaggagugcagcugcuaccccagauaccccggcgugagaugcgugugcagagacaacuggaagggcagcaacagacccaucguggacaucaacaucaaggaccacagcaucgugagcagcuacgugugcagcggccuggugggcgacacccccagaaagaacgacagaagcagcagcagccacugccuggaccccaacaacgaggagggcggccacggcgugaagggcugggccuucgacgacggcaacgacguguggaugggcagaaccaucaacgagaccagcagacugggcuacgagaccuucaaggugaucgagggcuggagcaaccccaagagcaagcugcagaucaacagacaggugaucguggacagaggcgacagaagcggcuacagcggcaucuucagcguggagggcaagagcugcaucaacagaugcuucuacguggagcugaucagaggcagaaaggaggagaccgaggugcuguggaccagcaacagcaucgugguguucugcggcaccagcggcaccuacggcaccggcagcuggcccgacggcgccgaccugaaccugaugcccaucuga

SEQ ID NO: 184879 - RNA, 1410 nt, Artificial Sequence
  derived and/or modified CDS sequence (opt4) from neuraminidase__InfluenzaA__AHL96883
augaaccccaaccagaagaucaucaccaucggcagcgugagccugaccaucagcaccaucugcuucuucaugcagaucgccauccugaucaccaccgugacccugcacuucaagcaguacgaguucaacagcccccccaacaaccaggugaugcugugcgagcccaccaucaucgagagaaacaucaccgagaucguguaccugaccaacaccaccaucgagaaggagaucugccccaagagcgccgaguacagaaacuggagcaagccccagugcggcaucaccggcuucgcccccuucagcaaggacaacagcaucagacugagcgccggcggcgacaucugggugaccagagagcccuacgugagcugcgaccccgacaagugcuaccaguucgcccugggccagggcaccacccugaacaacaugcacagcaacaacaccgugagagacagaacccccuacagaacccugcugaugaacgagcugggcgugcccuuccaccugggcaccaagcaggugugcaucgccuggagcagcagcagcugccacgacggcaaggccuggcugcacgugugcaucaccggcgacgacaagaacgccaccgccagcuucaucuacaacggcagacugguggacagcguggugagcuggagcaaggagauccugagaacccaggagagcgagugcgugugcaucaacggcaccugcaccguggugaugaccgacggcagcgccagcggcaaggccgacaccaagauccuguucaucgaggagggcaagaucgugcacaccagcacccugagcggcagcgcccagcacguggaggagugcagcugcuaccccagauaccccggcgugagaugcgugugcagagacaacuggaagggcagcaacagacccaucguggacaucaacaucaaggaccacagcaucgugagcagcuacgugugcagcggccuggugggcgacacccccagaaagaacgacagcagcagcagcagccacugccuggaccccaacaacgaggagggcggccacggcgugaagggcugggccuucgacgacggcaacgacguguggaugggcagaaccaucaacgagaccagcagacugggcuacgagaccuucaaggugaucgagggcuggagcaaccccaagagcaagcugcagaucaacagacaggugaucguggacagaggcgacagaagcggcuacagcggcaucuucagcguggagggcaagagcugcaucaacagaugcuucuacguggagcugaucagaggcagaaaggaggagaccgaggugcuguggaccagcaacagcaucgugguguucugcggcaccagcggcaccuacggcaccggcagcuggcccgacggcgccgaccugaaccugaugcccaucuga

SEQ ID NO: 184880 - RNA, 1410 nt, Artificial Sequence; identical to SEQ ID NO: 183931
  derived and/or modified CDS sequence (opt4) from neuraminidase__InfluenzaA__AHL96895

SEQ ID NO: 184881 - RNA, 1410 nt, Artificial Sequence
  derived and/or modified CDS sequence (opt4) from neuraminidase__InfluenzaA__AHL96907
augaaccccaaccagaagaucaucaccaucggcagcgugagccugaccaucagcaccaucugcuucuucaugcagaucgccauccugaucaccaccgugacccugcacuucaagcaguacgaguucaacagcccccccaacaaccaggugaugcugugcgagcccaccaucguggagagaaacaucaccgagaucguguaccugaccaacaccaccaucgagaaggagaucugccccaagcccgccgaguacagaaacuggagcaagccccagugcggcaucaccggcuucgcccccuucagcaaggacaacagcaucagacugagcgccggcggcgacaucugggugaccagagagcccuacgugagcugcgaccccgacaagugcuaccaguucgcccugggccagggcaccacccugaacaacgugcacagcaacaacaccgugagagacagaacccccuacagaacccugcugaugaacgagcugggcgugcccuuccaccugggcaccaagcaggugugcaucgccuggagcagcagcagcugccacgacggcaaggccuggcugcacgugugcaucaccggcgacgacaagaacgccaccgccagcuucaucuacaacggcagacugguggacagcguggugagcuggagcaaggaggugcugagaacccaggagagcgagugcgugugcaucaacggcaccugcgccguggugaugaccgacggcagcgccagcggcaaggccgacaccaagauccuguucaucgaggagggcaagaucgugcacaccagcacccugagcggcagcgcccagcacguggaggagugcagcugcuaccccagauaccccggcgugagaugcgugugcagagacaacuggaagggcagcaacagacccaucguggacaucaacaucaaggaccacagcaucgugagcagcuacgugugcagcggccuggugggcgacacccccagaaagaacgacagcagcagcagcagccacugccuggaccccaacaacgaggagggcggccacggcgugaagggcugggccuucgacgacggcaacgacguguggaugggcagaaccaucaacgagaccagcagacugggcuacgagaccuucaaggugaucgagggcuggagcaaccccaagagcaagcugcagaucaacagacaggugaucguggacagaggcgacagaagcggcuacagcggcaucuucagcguggagggcaagagcugcaucaacagaugcuucuacguggagcugaucagaggcagaaaggaggagaccgaggugcuguggaccagcaacagcaucgugguguucugcggcaccagcggcaccuacggcaccggcagcuggcccgacggcgccgaccugaaccugaugcccaucuga

SEQ ID NO: 184882 - RNA, 1410 nt, Artificial Sequence; identical to SEQ ID NO: 183943
  derived and/or modified CDS sequence (opt4) from neuraminidase__InfluenzaA__AHL96919

SEQ ID NO: 184883 - RNA, 1410 nt, Artificial Sequence; identical to SEQ ID NO: 183943
  derived and/or modified CDS sequence (opt4) from neuraminidase__InfluenzaA__AHL96931

SEQ ID NO: 184884 - RNA, 1410 nt, Artificial Sequence; identical to SEQ ID NO: 183943
  derived and/or modified CDS sequence (opt4) from neuraminidase__InfluenzaA__AHL96943

SEQ ID NO: 184885 - RNA, 1410 nt, Artificial Sequence
  derived and/or modified CDS sequence (opt4) from neuraminidase__InfluenzaA__AHL96955
augaaccccaaccagaagaucaucaccaucggcagcgugagccugaccaucagcaccaucugcuucuucaugcagaucgccauccugaucaccaccgugacccugcacuucaagcaguacgaguucaacagccccagcaacaaccaggugaugcugugcgagcccaccaucaucgagagaaacaucaccgagaucguguaccugaccaacaccaccaucgagaaggagaucugccccaagcccgccgaguacagaaacuggagcaagccccagugcggcaucaccggcuucgcccccuucagcaaggacaacagcaucagacugagcgccggcggcaacaucugggugaccagagagcccuacgugagcugcgaccccgacaagugcuaccaguucgcccugggccagggcaccacccugaacaacgugcacagcaacaacaccgugagagacagaacccccuacagaacccugcugaugaacgagcugggcgugcccuuccaccugggcaccaagcaggugugcaucgccuggagcagcagcagcugccacgacggcaaggccuggcugcacgugugcaucaccggcgacgacaagaacgccaccgccagcuucaucuacaacggcagacugguggacagcguggugagcuggagcaaggagauccugagaacccaggagagcgagugcgugugcaucaacggcaccugcaccguggugaugaccgacggcagcgccagcggcaaggccgacaccaagauccuguucaucgaggagggcaagaucgugcacaccagcacccugagcggcagcgcccagcacguggaggagugcagcugcuaccccagauaccccggcgugagaugcgugugcagagacaacuggaagggcagcaacagacccaucguggacaucaacaucaaggaccacagcaucgugagcagcuacgugugcagcggccuggugggcgacacccccagaaagaacgacagcagcagcagcagccacugccuggaccccaacaacgaggagggcggccacggcgugaagggcugggccuucgacgacggcaacgacguguggaugggcagaaccaucaacgagaccagcagacugggcuacgagaccuucaaggugaucgagggcuggagcaaccccaagagcaagcugcagaucaacagacaggugaucguggacagaggcgacagaagcggcuacagcggcaucuucagcguggagggcaagagcugcaucaacagaugcuucuacguggagcugaucagaggcagaaaggaggagaccgaggugcuguggaccagcaacagcaucgugguguucugcggcaccagcggcaccuacggcaccggcagcuggcccgacggcgccgaccugaaccugaugcccaucuga

SEQ ID NO: 184886 - RNA, 1410 nt, Artificial Sequence; identical to SEQ ID NO: 184784
  derived and/or modified CDS sequence (opt4) from neuraminidase__InfluenzaA__AHL96967

SEQ ID NO: 184887 - RNA, 1410 nt, Artificial Sequence
  derived and/or modified CDS sequence (opt4) from neuraminidase__InfluenzaA__AHL96979
augaaccccaaccagaagaucaucaccaucggcagcgugagccugaccaucagcaccaucugcuucuucaugcagaucgccauccugaucaccaccgugacccugcacuucaagcaguacgaguucaacagcccccccaacaaccaggugaugcugugcgagcccaccaucaucgagagaaacaucaccgagaucguguaccugaccaacaccaccaucgagaaggagaucugccccaagcccgccgaguacagaaacuggagcaagccccagugcgacaucaccggcuucgcccccuucagcaaggacaacagcaucagacugagcgccggcggcgacaucugggugaccagagagcccuacgugagcugcgaccccgacaagugcuaccaguucgcccugggccagggcaccacccugaacaacaugcacagcaacaacaccgugagagacagaacccccuacagaacccugcugaugaacgagcugggcgugcccuuccaccugggcaccaagcaggugugcaucgccuggagcagcagcagcugccacgacggcaaggccuggcugcacgugugcaucaccggcgacgacaagaacgccaccgccagcuucaucuacaacggcagacugguggacagcguggugagcuggagcaaggagauccugagaacccaggagagcgagugcgugugcaucaacggcaccugcaccguggugaugaccgacggcagcgccagcggcaaggccgacaccaagauccuguucaucgaggagggcaagaucgugcacaccagcacccugagcggcagcgcccagcacguggaggagugcagcugcuaccccagauaccccggcgugagaugcgugugcagagacaacuggaagggcagcaacagacccaucguggacaucaacaucaaggaccacagcaucgugagcagcuacgugugcagcggccuggugggcgacacccccagaaagaacgacagcagcagcagcagccacugccuggaccccaacaacgaggagggcggccacggcgugaagggcugggccuucgacgacggcaacgacguguggaugggcagaaccaucaacgagaccagcagacugggcuacgagaccuucaaggugaucgagggcuggagcaaccccaagagcaagcugcagaucaacagacaggugaucguggacagaggcgacagaagcggcuacagcggcaucuucagcguggagggcaagagcugcaucaacagaugcuucuacguggagcugaucagaggcagaaaggaggagaccgaggugcuguggaccagcaacagcaucgugguguucugcggcaccagcggcaccuacggcaccggcagcuggcccgacggcgccgaccugaacaucaugcccaucuga

SEQ ID NO: 184888 - RNA, 1410 nt, Artificial Sequence; identical to SEQ ID NO: 183943
  derived and/or modified CDS sequence (opt4) from neuraminidase__InfluenzaA__AHL96991

SEQ ID NO: 184889 - RNA, 1410 nt, Artificial Sequence; identical to SEQ ID NO: 182206
  derived and/or modified CDS sequence (opt4) from neuraminidase__InfluenzaA__AHL97003

SEQ ID NO: 184890 - RNA, 1410 nt, Artificial Sequence
  derived and/or modified CDS sequence (opt4) from neuraminidase__InfluenzaA__AHL97015
augaaccccaaccagaagaucaucaccaucggcagcgugagccugaccaucagcaccaucugcuucuucaugcagaucgccauccugaucaccaccgugacccugcacuucaagcaguacgaguucaacagcccccccaacaaccaggugaugcugugcgagcccaccaucaucgagagaaacaucaccgagaucguguaccugaccaacaccaccaucgagaaggagaucugccccaagcccgccgaguacagaaacuggagcaagccccagugcggcaucaccggcuucgcccccuucagcaaggacaacagcaucagacugagcgccggcggcgacaucugggugaccagagagcccuacgugagcugcgaccccgacaagugcuaccaguucgcccugggccagggcaccacccugaacaacgugcacagcaacaacaccgugagagacagaacccccuacagaacccugcugaugaacgagcugggcgugcccuuccaccugggcaccaagcaggugugcaucgccuggagcagcagcagcugccacgacggcaaggccuggcugcacgugugcaucaccggcgacgacaagaacgccaccgccagcuucaucuacaacggcagacugguggacagcguggugagcuggagcaaggagauccugagaacccaggagagcgagugcgugugcaucaacggcaccugcaccguggugaugaccgacggcagcgccagcggcaaggccgacaccaagauccuguucaucgaggagggcaagaucgugcacaccagcacccugagcggcagcgcccagcacguggaggagugcagcugcuaccccagauaccccggcgugagaugcgugugcagagacaacuggaagggcagcaacagacccaucguggacaucaacaucaaggaccacagcaucgugagcagcuacgugugcagcggccuggugggcgacacccccagaaagaacgacagcagcagcagcagccacugccuggaccccaacaacgaggagggcggccacggcgugaagggcugggccuucgacgacggcaacgacguguggaugggcagaaccaucaacgagaccagcagacugggcuacgagaccuucaaggugaucgagggcuggagcaaccccaagagcaagcugcagaucaacagacagaucaucguggacagaggcgacagaagcggcuacagcggcaucuucagcguggagggcaagagcugcaucaacagaugcuucuacguggagcugaucagaggcagaaaggaggagaccgaggugcuguggaccagcaacagcaucgugguguucugcggcaccagcggcaccuacggcaccggcagcuggcccgacggcgccgaccugaaccugaugcccaucuga

SEQ ID NO: 184891 - RNA, 1410 nt, Artificial Sequence; identical to SEQ ID NO: 182206
  derived and/or modified CDS sequence (opt4) from neuraminidase__InfluenzaA__AHL97027

SEQ ID NO: 184892 - RNA, 1410 nt, Artificial Sequence
  derived and/or modified CDS sequence (opt4) from neuraminidase__InfluenzaA__AHL97039
augaaccccaaccagaagaucaucaccaucggcagcgugagccugaccaucagcaccaucugcuucuucaugcagaucgccauccugaucaccaccgugacccugcacuucaagcaguacgaguucaacagcccccccaacaaccaggugaugcugugcgagcccaccaucaucgagagaaacaucaccgagaucguguaccugaccaacaccaccaucgagaaggagaucugccccaagcccgccgaguacagaaacuggagcaagccccagugcggcaucaccggcuucgcccccuucagcaaggacaacagcaucagacugagcgccggcggcgacaucugggugaccagagagcccuacgugagcugcgaccccgacaagugcuaccaguucgcccugggccagggcaccacccugaacaacgugcacagcaacaacaccgugagagacagaacccccuacagaacccugcugaugaacgagcugggcgugcccuuccaccugggcaccaagcaggugugcaucgccuggagcagcagcagcugccacgacggcaaggccuggcugcacgugugcaucaccggcgacgacaagaacgccaccgccagcuucaucuacaacggcagacugguggacagcguggugagcuggagcaaggagauccugagaacccaggagagcgagugcgugugcaucaacggcaccugcaccguggugaugaccgacggcaacgccagcggcaaggccgacaccaagauccuguucaucgaggagggcaagaucgugcacaccagcacccugagcggcagcgcccagcacguggaggagugcagcugcuaccccagauaccccggcgugagaugcgugugcagagacaacuggaagggcagcaacagacccaucguggacaucaacaucaaggacuacagcaucgugagcagcuacgugugcagcggccuggugggcgacacccccagaaagaacgacagcagcagcagcagccacugccuggaccccaacaacgaggagggcggccacggcgugaagggcugggccuucgacgacggcaacgacguguggaugggcagaaccaucaacgagaccagcagacugggcuacgagaccuucaaggugaucgagggcuggagcaaccccaagagcaagcugcagaucaacagacaggugaucguggacagaggcgacagaagcggcuacagcggcaucuucagcguggagggcaagagcugcaucaacagaugcuucuacguggagcugaucagaggcagaaaggaggagaccgaggugcuguggaccagcaacagcaucgugguguucugcggcaccagcggcaccuacggcaccggcagcuggcccgacggcgccgaccugaaccugaugcccaucuga

SEQ ID NO: 184893 - RNA, 1410 nt, Artificial Sequence; identical to SEQ ID NO: 182206
  derived and/or modified CDS sequence (opt4) from neuraminidase__InfluenzaA__AHL97051

SEQ ID NO: 184894 - RNA, 1410 nt, Artificial Sequence
  derived and/or modified CDS sequence (opt4) from neuraminidase__InfluenzaA__AHL97063
augaaccccaaccagaagaucaucaccaucggcagcgugagccugaccaucagcaccaucugcuucuucaugcagaucgccauccugaucaccaccgugacccugcacuucaagcaguacgaguucaacagcccccccaacaaccaggugaugcugugcgagcccaccaucaucgagagaaacaucaccgagaucguguaccugaccaacaccaccaucgagaaggagaucugccccaagcccgccgaguacagaaacuggagcaagccccagugcggcaucaccggcuucgcccccuucagcaaggacaacagcaucagacugagcgccggcggcgacaucugggugaccagagagcccuacgugagcugcgaccccgacaagugcuaccaguucgcccugggccagggcaccacccugaacaacgugcacagcaacaacaccgugagagacagaacccccuacagaacccugcugaugaacgagcugggcgugcccuuccaccugggcaccaagcaggugugcaucgccuggagcagcagcagcugccacgacggcaaggccuggcugcacgugugcaucaccggcgacgacaagaacgccaccgccagcuucaucuacaacggcagacugguggacagcguggugagcuggagcaaggagauccugagaacccaggagagcgagugcgugugcaucaacggcaccugcaccguggugaugaccgacggcagcgccagcggcaaggccgacaccaagauccuguucaucgaggagggcaagaucgugcacaccagcacccugagcggcagcgcccagcacguggaggagugcagcugcuaccccagauaccccggcgugagaugcgugugcagagacaacuggaagggcagcaacagacccaucguggacaucaacaucaaggaccacagcaucgugagcagcuacgugugcagcggccuggugggcgacacccccagaaagaacgacagcagcagcagcagccacugccugggccccaacaacgaggagggcggccacggcgugaagggcugggccuucgacgacggcaacgacguguggaugggcagaaccaucaacgagaccagcagacugggcuacgagaccuucaaggugaucgacggcuggagcaaccccaagagcaagcugcagaucaacagacaggugaucguggacagaggcgacagaagcggcuacagcggcaucuucagcguggagggcaagagcugcaucaacagaugcuucuacguggagcugaucagaggcagaaaggaggagaccgaggugcuguggaccagcaacagcaucgugguguucugcggcaccagcggcaccuacggcaccggcagcuggcccgacggcgccgaccugaaccugaugcccaucuga

SEQ ID NO: 184895 - RNA, 1410 nt, Artificial Sequence; identical to SEQ ID NO: 182206
  derived and/or modified CDS sequence (opt4) from neuraminidase__InfluenzaA__AHL97075

SEQ ID NO: 184896 - RNA, 1410 nt, Artificial Sequence; identical to SEQ ID NO: 183931
  derived and/or modified CDS sequence (opt4) from neuraminidase__InfluenzaA__AHL97087

SEQ ID NO: 184897 - RNA, 1410 nt, Artificial Sequence; identical to SEQ ID NO: 183435
  derived and/or modified CDS sequence (opt4) from neuraminidase__InfluenzaA__AHL97099

SEQ ID NO: 184898 - RNA, 1410 nt, Artificial Sequence; identical to SEQ ID NO: 182206
  derived and/or modified CDS sequence (opt4) from neuraminidase__InfluenzaA__AHL97111

SEQ ID NO: 184899 - RNA, 1410 nt, Artificial Sequence
  derived and/or modified CDS sequence (opt4) from neuraminidase__InfluenzaA__AHL97123
augaaccccaaccagaagaucaucaccaucggcagcgugagccugaccaucagcaccaucugcuucuucaugcagaucgccauccugaucaccaccgugacccugcacuucaagcaguacgaguucgacagcccccccaacaaccaggugaugcugugcgagcccaccaucaucgagagaaacaucaccgagaucguguaccugaccaacaccaccaucgagaaggagaucugccccaagcccgccgaguacagaaacuggagcaagccccagugcggcaucaccggcuucgcccccuucagcaaggacaacagcaucagacugagcgccggcggcgacaucugggugaccagagagcccuacgugagcugcgaccccgacaagugcuaccaguucgcccugggccagggcaccacccugaacaacgugcacagcaacaacaccgugagagacagaacccccuacagaacccugcugaugaacgagcugggcgugcccuuccaccugggcaccaagcaggugugcaucgccuggagcagcagcagcugccacgacggcaaggccuggcugcacgugugcaucaccggcgacgacaagaacgccaccgccagcuucaucuacaacggcagacugguggacagcguggugagcuggagcaaggagauccugagaacccaggagagcgagugcgugugcaucaacggcaccugcaccguggugaugaccgacggcagcgccagcggcaaggccgacaccaagauccuguucaucgaggagggcaagaucgugcacaccagcacccugagcggcagcgcccagcacguggaggagugcagcugcuaccccagauaccccggcgugagaugcgugugcagagacaacuggaagggcagcaacagacccaucguggacaucaacaucaaggaccacagcaucgugagcagcuacgugugcagcggccuggugggcgacacccccagaagaaacgacagcagcagcagcagccacugccuggaccccaacaacgaggagggcggccacggcgugaagggcugggccuucgacgacggcaacgacguguggaugggcagaaccaucaacgagaccagcagacugggcuacgagaccuucaaggugaucgagggcuggagcaaccccaagagcaagcugcagaucaacagacaggugaucguggacagaggcgacagaagcggcuacagcggcaucuucagcguggagggcaagagcugcaucaacagaugcuucuacguggagcugaucagaggcagaaaggaggagaccgaggugcuguggaccagcaacagcaucgugguguucugcggcaccagcggcaccuacggcaccggcagcuggcccgacggcgccgaccugaaccugaugcccaucuga

SEQ ID NO: 184900 - RNA, 1410 nt, Artificial Sequence; identical to SEQ ID NO: 183963
  derived and/or modified CDS sequence (opt4) from neuraminidase__InfluenzaA__AHL97135

SEQ ID NO: 184901 - RNA, 1410 nt, Artificial Sequence
  derived and/or modified CDS sequence (opt4) from neuraminidase__InfluenzaA__AHL97147
augaaccccaaccagaagaucaucaccaucggcagcgugagccugaccaucagcaccaucugcuucuucaugcagaucgccauccugaucaccaccgugacccugcacuucaagcaguacgaguucaacagcccccccaacaaccaggugaugcugugcgagcccaccaucaucgagagaaacaucaccgagaucguguaccugaccaacaccaccaucgagaaggagaucugccccaagcccgccgaguacagaaacuggagcaagccccagugcggcaucaccggcuucgcccccuucagcaaggacaacagcaucagacugagcgccggcggcgacaucugggugaccagagagcccuacgugagcugcgaccccgacaagugcuaccaguucgcccugggccagggcaccacccugaacaacgugcacagcaacaacaccgugagagacagaacccccuacagaacccugcugaugaacgagcugggcgugcccuuccaccugggcaccaagcaggugugcaucgccuggagcagcagcagcugccacgacggcaaggccuggcugcacgugugcaucaccggcgacgacaagaacgccaccgccagcuucaucuacaacggcagacugguggacagcguggugagcuggagcaaggagauccugagaacccaggagagcgagugcgugugcaucaacggcaccugcaccguggugaugaccgacggcagcgccagcggcaaggccgacaccaagauccuguucaucgaggagggcaagaucgugcacaccagcacccugagcggcagcgcccagcacguggaggagugcagcugcuaccccagauaccccggcgugagaugcgugugcagagacaacuggagaggcagcaacagacccaucguggacaucaacaucaaggaccacagcaucgugagcagcuacgugugcagcggccuggugggcgacacccccagaaagaacgacagcagcagcagcagccacugccuggaccccaacaacgaggagggcggccacggcgugaagggcugggccuucgacgacggcaacgacguguggaugggcagaaccaucaacgagaccagcagacugggcuacgagaccuucaaggugaucgagggcuggagcaaccccaagagcaagcugcagaucaacagacaggugaucguggacagaggcgacagaagcggcuacagcggcaucuucagcguggagggcaagagcugcaucaacagaugcuucuacguggagcugaucagaggcagaaaggaggagaccgaggugcuguggaccagcaacagcaucgugguguucugcggcaccagcggcaccuacggcaccggcagcuggcccgacggcgccgaccugaaccugaugcccaucuga

SEQ ID NO: 184902 - RNA, 1410 nt, Artificial Sequence; identical to SEQ ID NO: 182206
  derived and/or modified CDS sequence (opt4) from neuraminidase__InfluenzaA__AHL97159

SEQ ID NO: 184903 - RNA, 1410 nt, Artificial Sequence; identical to SEQ ID NO: 182206
  derived and/or modified CDS sequence (opt4) from neuraminidase__InfluenzaA__AHL97171

SEQ ID NO: 184904 - RNA, 1410 nt, Artificial Sequence; identical to SEQ ID NO: 182206
  derived and/or modified CDS sequence (opt4) from neuraminidase__InfluenzaA__AHL97183

SEQ ID NO: 184905 - RNA, 1410 nt, Artificial Sequence; identical to SEQ ID NO: 182206
  derived and/or modified CDS sequence (opt4) from neuraminidase__InfluenzaA__AHL97195

SEQ ID NO: 184906 - RNA, 1410 nt, Artificial Sequence; identical to SEQ ID NO: 182206
  derived and/or modified CDS sequence (opt4) from neuraminidase__InfluenzaA__AHL97207

SEQ ID NO: 184907 - RNA, 1410 nt, Artificial Sequence; identical to SEQ ID NO: 182206
  derived and/or modified CDS sequence (opt4) from neuraminidase__InfluenzaA__AHL97219

SEQ ID NO: 184908 - RNA, 1410 nt, Artificial Sequence
  derived and/or modified CDS sequence (opt4) from neuraminidase__InfluenzaA__AHL97231
augaaccccaaccagaagaucaucaccaucggcagcgugagccugaccaucagcaccaucugcuucuucaugcagaucgccauccugaucaccaccgugacccugcacuucaagcaguacgacuucaacagcccccccaacaaccaggugaugcugugcgagcccaccaucaucgagagaaacaucaccgagaucguguaccugaccaacaccaccaucgagaaggagaucugccccaagcccgccgaguacagaaacuggagcaagccccagugcggcaucaccggcuucgcccccuucagcaaggacaacagcaucagacugagcgccggcggcgacaucugggugaccagagagcccuacgugagcugcgaccccgacaagugcuaccaguucgcccugggccagggcaccacccugaacaacgugcacagcaacaacaccgugagagacagaacccccuacagaacccugcugaugaacgagcugggcgugcccuuccaccugggcaccaagcaggugugcaucgccuggagcagcagcagcugccacgacggcaaggccuggcugcacgugugcaucaccggcgacgacaagaacgccaccgccagcuucaucuacaacggcagacugguggacagcguggugagcuggagcaaggagauccugagaacccaggagagcgagugcgugugcaucaacggcaccugcaccguggugaugaccgacggcagcgccagcggcaaggccgacaccaagauccuguucaucgaggagggcaagaucgugcacaccagcacccugagcggcagcgcccagcacguggaggagugcagcugcuaccccagauaccccggcgugagaugcgugugcagagacaacuggaagggcagcaacagacccaucguggacaucaacaucaaggaccacagcgugaucagcagcuacgugugcagcggccuggugggcgacacccccagaaagaacgacagcagcagcagcagccacugccuggaccccaacaacgaggagggcggccacggcgugaagggcugggccuucgacgacggcaacgacguguggaugggcagaaccaucaacgagaccagcagacugggcuacgagaccuucaaggugaucggcggcuggagcaaccccaagagcaagcugcagaucaacagacaggugaucguggacagaggcgacagaagcggcuacagcggcaucuucagcguggagggcaagagcugcaucaacagaugcuucuacguggagcugaucagaggcagaaaggaggagaccgaggugcuguggaccagcaacagcaucgugguguucugcggcaccagcggcaccuacggcaccggcagcuggcccgacggcgccgaccugaaccugaugcccaucuga

SEQ ID NO: 184909 - RNA, 1410 nt, Artificial Sequence
  derived and/or modified CDS sequence (opt4) from neuraminidase__InfluenzaA__AHL97243
augaaccccaaccagaagaucaucaccaucggcagcgugagccugaccaucagcaccaucugcuucuucaugcagaucgccauccugaucaccaccgugacccugaacuucaagcaguacgaguucaacagcccccccaacaaccaggugaugcugugcgagcccaccaucaucgagagaaacaucaccgagaucguguaccugaccaacaccaccaucgagaaggagaucugccccaagcccgccgaguacagaaacuggagcaagccccagugcggcaucaccggcuucgcccccuucagcaaggacaacagcaucagacugagcgccggcggcgacaucugggugaccagagagcccuacgugagcugcgaccccgacaagugcuaccaguucgcccugggccagggcaccacccugaacaacgugcacagcaacaacaccgugagagacagaacccccuacagaacccugcugaugaacgagcugggcgugcccuuccaccugggcaccaagcaggugugcaucgccuggagcagcagcagcugccacgacggcaaggccuggcugcacgugugcaucaccggcgacgacaagaacgccaccgccagcuucaucuacaacggcagacugguggacagcguggugagcuggagcaaggagauccugagaacccaggagagcgagugcgugugcaucaacggcaccugcaccguggugaugaccgacggcagcgccagcggcaaggccgacaccaagauccuguucaucgaggagggcaagaucgugcacaccagcacccugagcggcagcgcccagcacguggaggagugcagcugcuaccccagauaccccggcgugagaugcgugugcagagacaacuggaagggcagcaacagacccaucguggacaucaacaucaaggaccacagcaucgugagcagcuacgugugcagcggccuggugggcgacacccccagaaagaacgacagcagcagcagcagccacugccuggaccccaacaacgaggagggcggccacggcgugaagggcugggccuucgacgacggcaacgacguguggaugggcagaaccaucaacgagaccagcagacugggcuacgagaccuucaaggugaucgagggcuggagcaaccccaagagcaagcugcagaucaacagacaggugaucguggacagaggcgacagaagcggcuacagcggcaucuucagcguggagggcaagagcugcaucaacagaugcuucuacguggagcugaucagaggcagaaaggaggagaccgaggugcuguggaccagcaacagcaucgugguguucugcggcaccagcggcaccuacggcaccggcagcuggcccgacggcgccgaccugaaccugaugcccaucuga

SEQ ID NO: 184910 - RNA, 1410 nt, Artificial Sequence; identical to SEQ ID NO: 183435
  derived and/or modified CDS sequence (opt4) from neuraminidase__InfluenzaA__AHL97255

SEQ ID NO: 184911 - RNA, 1410 nt, Artificial Sequence
  derived and/or modified CDS sequence (opt4) from neuraminidase__InfluenzaA__AHL97267
augaaccccaaccagaagaucaucaccaucggcagcgugagccugaccaucagcaccaucugcuucuucaugcagaucgccauccugaucaccaccgugacccugcacuucaagcaguacgaguucaacagcccccccaacaaccaggugaugcugugcgagcccaccaucaucgagagaaacaucaccgagaucguguaccugaccaacaccaccaucgagaaggagaucugccccaagcccgccgaguacagaaacuggagcaagccccagugcggcaucaccggcuucgcccccuucagcaaggacaacagcaucagacugagcgccggcggcgacaucugggugaccagagagcccuacgugagcugcgaccccgacaagugcuaccaguucgcccugggccagggcaccacccugaacaacgugcacagcaacaacaccgccagagacagaacccccuacagaacccugcugaugaacgagcugggcgugcccuuccaccugggcaccaagcaggugugcaucgccuggagcagcagcagcugccacgacggcaaggccuggcugcacgugugcaucaccggcgacgacaagaacgccaccgccagcuucaucuacaacggcagacugguggacagcguggugagcuggagcaaggagauccugagaacccaggagagcgagugcgugugcaucaacggcaccugcaccguggugaugaccgacggcagcgccagcggcaaggccgacaccaagauccuguucaucgaggagggcaagaucgugcacaccagcacccugagcggcagcgcccagcacguggaggagugcagcugcuaccccagauaccccggcgugagaugcgugugcagagacaacuggaagggcagcaacagacccaucguggacaucaacaucaaggaccacagcaucgugagcagcuacgugugcagcggccuggugggcgacacccccagaaagaacgacagcuucagcagcagccacugccuggaccccaacaacgaggagggcggccacggcgugaagggcugggccuucgacgacggcaacgacguguggaugggcagaaccaucaacgagaccagcagacugggcuacgagaccuucaaggugaucgagggcuggagcaaccccaagagcaagcugcagaucaacagacaggugaucguggacagaggcgacagaagcggcuacagcggcaucuucagcguggagggcaagagcugcaucaacagaugcuucuacguggagcugaucagaggcagaaaggaggagaccgaggugcuguggaccagcaacagcaucgugguguucugcggcaccagcggcaccuacggcaccggcagcuggcccgacggcgccgaccugaaccugaugcccaucuga

SEQ ID NO: 184912 - RNA, 1410 nt, Artificial Sequence; identical to SEQ ID NO: 182206
  derived and/or modified CDS sequence (opt4) from neuraminidase__InfluenzaA__AHL97279

SEQ ID NO: 184913 - RNA, 1410 nt, Artificial Sequence; identical to SEQ ID NO: 184796
  derived and/or modified CDS sequence (opt4) from neuraminidase__InfluenzaA__AHL97291

SEQ ID NO: 184914 - RNA, 1410 nt, Artificial Sequence; identical to SEQ ID NO: 184784
  derived and/or modified CDS sequence (opt4) from neuraminidase__InfluenzaA__AHL97303

SEQ ID NO: 184915 - RNA, 1410 nt, Artificial Sequence
  derived and/or modified CDS sequence (opt4) from neuraminidase__InfluenzaA__AHL97339
augaaccccaaccagaagaucaucaccaucggcagcgugagccugaccaucagcaccaucugcuucuucaugcagaucgccauccugaucaccaccgugacccugcacuucaagcaguacgaguucgacagcccccccaacaaccaggugaugcugugcgagcccaccaucaucgagagaaacaucaccgagaucguguaccugaccaacaccaccaucgagaaggagaucugccccaagcccgccgaguacagaaacuggagcaagccccagugcggcaucaccggcuucgcccccuucagcaaggacaacagcaucagacugagcgccggcggcgacaucugggugaccagagagcccuacgugagcugcgaccccgacaagugcuaccaguucgcccugggccagggcaccacccugaacaacgugcacagcaacaacaccgugagagacagaaccagcuacagaacccugcugaugaacgagcugggcgugcccuuccaccugggcaccaagcaggugugcaucgccuggagcagcagcagcugccacgacggcaaggccuggcugcacgugugcaucaccggcgacgacaagaacgccaccgccagcuucaucuacaacggcagacugguggacagcguggugagcuggagcaaggagauccugagaacccaggagagcgagugcgugugcaucaacggcaccugcaccguggugaugaccgacggcagcgccagcggcagagccgacaccaagauccuguucaucgaggagggcaagaucgugcacaccagcacccugagcggcagcgcccagcacguggaggagugcagcugcuaccccagauaccccggcgugagaugcgugugcagagacaacuggaagggcagcaacagacccaucguggacaucaacaucaaggaccacagcaucgugagcagcuacgugugcagcggccuggugggcgacacccccagaaagaacgacagcagcagcagcagccacugccuggaccccaacaacgaggagggcggccacggcgugaagggcugggccuucgacgacggcaacgacguguggaugggcagaaccaucaacgagaccagcagacugggcuacgagaccuucaaggugaucgagggcuggagcaaccccaagagcaagcugcagaucaacagacaggugaucguggacagaggcgacagaagcggcuacagcggcaucuucagcguggagggcaagagcugcaucaacagaugcuucuacguggagcugaucagaggcagaaaggaggagaccgaggugcuguggaccagcaacagcaucgugguguucugcggcaccagcggcaccuacggcaccggcagcuggcccgacggcgccgaccugaaccugaugcccaucuga

SEQ ID NO: 184916 - RNA, 1410 nt, Artificial Sequence; identical to SEQ ID NO: 183931
  derived and/or modified CDS sequence (opt4) from neuraminidase__InfluenzaA__AHL97351

SEQ ID NO: 184917 - RNA, 1410 nt, Artificial Sequence; identical to SEQ ID NO: 184796
  derived and/or modified CDS sequence (opt4) from neuraminidase__InfluenzaA__AHL97363

SEQ ID NO: 184918 - RNA, 1410 nt, Artificial Sequence; identical to SEQ ID NO: 182206
  derived and/or modified CDS sequence (opt4) from neuraminidase__InfluenzaA__AHL97387

SEQ ID NO: 184919 - RNA, 1410 nt, Artificial Sequence
  derived and/or modified CDS sequence (opt4) from neuraminidase__InfluenzaA__AHL97399
augaaccccaaccagaagaucaucaccaucggcagcgugagccugaccaucagcaccaucugcuucuucaugcagaucgccauccugaucaccaccgugacccugcacuucaagcaguacgaguucaacagcccccccaacaaccaggugaugcugugcgagcccaccaucaucgagagaaacaucaccgagaucauguaccugaccaacaccaccaucgagaaggagaucugccccaagcccgccgaguacagaaacuggagcaagccccagugcggcaucaccggcuucgcccccuucagcaaggacaacagcaucagacugagcgccggcggcgacaucugggugaccagagagcccuacgugagcugcgaccccgacaagugcuaccaguucgcccugggccagggcaccacccugaacaacaugcacagcaacaacaccgugagagacagaacccccuacagaacccugcugaugaacgagcugggcgugcccuuccaccugggcaccaagcaggugugcaucgccuggagcagcagcagcugccacgacggcaaggccuggcugcacgugugcaucaccggcgacgacaagaacgccaccgccagcuucaucuacaacggcagacugguggacagcguggugagcuggagcaaggagauccugagaacccaggagagcgagugcgugugcaucaacggcaccugcaccguggugaugaccgacggcagcgccagcggcaaggccgacaccaagauccuguucaucgaggagggcaagaucgugcacaccagcacccugagcggcagcgcccagcacguggaggagugcagcugcuaccccagauaccccggcgugagaugcgugugcagagacaacuggaagggcagcaacagacccaucguggacaucaacaucaaggaccacagcaucgugagcagcuacgugugcagcggccuggugggcgacacccccagaaagaacgacagcagcagcagcagccacugccuggaccccaacaacgaggagggcggccacggcgugaagggcugggccuucgacgacggcaacgacguguggaugggcagaaccaucaacgagaccagcagacugggcuacgagaccuucaaggugaucgagggcuggagcaaccccaagagcaagcugcagaucaacagacaggugaucguggacagaggcgacagaagcggcuacagcggcaucuucagcguggagggcagaagcugcaucaacagaugcuucuacguggagcugaucagaggcagaaaggaggagaccgaggugcuguggaccagcaacagcaucgugguguucugcggcaccagcggcaccuacggcaccggcagcuggcccgacggcgccgaccugaaccugaugcccaucuga

SEQ ID NO: 184920 - RNA, 1410 nt, Artificial Sequence; identical to SEQ ID NO: 183435
  derived and/or modified CDS sequence (opt4) from neuraminidase__InfluenzaA__AHL97411

SEQ ID NO: 184921 - RNA, 1410 nt, Artificial Sequence
  derived and/or modified CDS sequence (opt4) from neuraminidase__InfluenzaA__AHL97423
augaaccccaaccagaagaucaucaccaucggcagcgugagccugaccaucagcaccaucugcuucuucaugcagaucgccauccugaucaccaccgugacccugcacuucaagcaguacgaguucaacagcccccccaacaaccaggugaugcugugcgagcccaccaucaucgagagaaacaucaccgagaucguguaccugaccaacaccaccaucgagaaggagaucugccccaagcccgccgaguacagaaacuggagcaagccccagugcggcaucaccggcuucgcccccuucagcaaggacaacagcaucagacugagcgccggcggcgacaucugggugaccagagagcccuacgugagcugcgaccccgacaagugcuaccaguucgcccugggccagggcaccacccugaacaacgugcacagcaacaacaccgugagagacagaacccccuacagaacccugcugaugaacgagcugggcgugcccuuccaccugggcaccaagcaggugugcaucgccuggagcagcagcagcugccacgacggcaaggccuggcugcacgugugcaucaccggcgacgacaagaacgccaccgccagcuucaucuacaacggcagacugguggacagcguggugagcuggagcaaggagauccugagaacccaggagagcgagugcgugugcaucaacggcaccugcaccguggugaugaccgacggcagcgccagcggcaaggccgacaccaagauccuguucaucgaggagggcaagaucgugcacaccagcacccugagcggcagcgcccagcacguggaggagugcagcugcuaccccagauaccccggcgugagaugcgugugcagagacaacuggaagggcagcaacagacccaucguggacaucaacaucaaggaccacagcaucgugagcagcuacgugugcagcggccuggugggcgacacccccagaaagaacgacagcagcagcagcagccacugccuggaccccaacaacgaggagggcggccacggcgugaagggcugggccuucgacgacggcaacgacauguggaugggcagaaccaucaacgagaccagcagacugggcuacgagaccuucaaggugaucgagggcuggagcaaccccaagagcaagcugcagaucaacagacaggugaucguggacagaggcgacagaagcggcuacagcggcaucuucagcguggagggcaagagcugcaucaacagaugcuucuacguggagcugaucagaggcagaaaggaggagaccgaggugcuguggaccagcaacagcaucgugguguucugcggcaccagcggcaccuacggcaccggcagcuggcccgacggcgccgaccugaaccugaugcccaucuga

SEQ ID NO: 184922 - RNA, 1410 nt, Artificial Sequence
  derived and/or modified CDS sequence (opt4) from neuraminidase__InfluenzaA__AHL97447
augaaccccaaccagaagaucaucaccaucggcagcgugagccugaccaucagcaccaucugcuucuucaugcagaucgccauccugaucaccaccgugacccugcacuucaagcaguacgaguucaacagcccccccaacaaccaggugaugcugugcgagcccaccaucaucgagagaaacaucaccgagaucguguaccugaccaacaccaccaucgagaaggagaucugccccaagcccgccgaguacagaaacuggagcaagccccagugcggcaucaccggcuucgcccccuucagcaaggacaacagcaucagacugagcgccggcggcgacaucugggugaccagagagcccuacgugagcugcgaccccgacaagugcuaccaguucgcccugggccagggcaccacccugaacaacgugcacagcaacaacaccgugagagacagaacccccuacagaacccugcugaugaacgagcugggcgugcccuuccaccugggcaccaagcaggugugcaucgccuggagcagcagcagcugccacgacggcaaggccuggcugcacgugugcaucaccggcgacgacaagaacgccaccgccagcuucaucuacaacggcagacugguggacagcguggugagcuggagcaaggagauccugagaacccaggagagcgagugcgugugcaucaacggcaccugcaccguggugaugaccgacggcagcgccagcggcaaggccgacaccaagauccuguucaucgaggagggcaagaucgugcacaccagcacccugagcggcagcgcccagcacguggaggagugcagcugcuaccccagauaccccggcgugagaugcgugugcagagacaacuggaagggcagcaacagacccaucguggacaucaacaucaaggaccacagcaucgugagcagcuacgugugcagcggccuggugggcgacacccccagaaagaacgacagcuucagcagcagccacugccuggaccccaacaacgaggagggcggccacggcgugaagggcugggccuucgacgacggcaacgacguguggaugggcagaaccaucaacgagaccagcagacugggcuacgagaccuucaaggugaucgagggcuggagcaaccccaagagcaagcugcagaucaacagacaggugaucguggacagaggcgacagaagcggcuacagcggcaucuucagcguggagggcaagagcugcaucaacagaugcuucuacguggagcugaucagaggcagaaaggaggagaccgaggugcuguggaccagcaacagcaucgugguguucugcggcaccagcggcaccuacggcaccggcagcuggcccgacggcgccgaccugaaccugaugcccaucuga

SEQ ID NO: 184923 - RNA, 1410 nt, Artificial Sequence; identical to SEQ ID NO: 182206
  derived and/or modified CDS sequence (opt4) from neuraminidase__InfluenzaA__AHL97459

SEQ ID NO: 184924 - RNA, 1410 nt, Artificial Sequence; identical to SEQ ID NO: 184796
  derived and/or modified CDS sequence (opt4) from neuraminidase__InfluenzaA__AHL97471

SEQ ID NO: 184925 - RNA, 1410 nt, Artificial Sequence; identical to SEQ ID NO: 183931
  derived and/or modified CDS sequence (opt4) from neuraminidase__InfluenzaA__AHL97483

SEQ ID NO: 184926 - RNA, 1410 nt, Artificial Sequence; identical to SEQ ID NO: 182206
  derived and/or modified CDS sequence (opt4) from neuraminidase__InfluenzaA__AHL97496

SEQ ID NO: 184927 - RNA, 1410 nt, Artificial Sequence; identical to SEQ ID NO: 182206
  derived and/or modified CDS sequence (opt4) from neuraminidase__InfluenzaA__AHL97508

SEQ ID NO: 184928 - RNA, 1410 nt, Artificial Sequence
  derived and/or modified CDS sequence (opt4) from neuraminidase__InfluenzaA__AHL97520
augaaccccaaccagaagaucaucaccaucggcagcgugagccugaccaucagcaccaucugcuucuucaugcagaucgccauccugaucaccaccgugacccugcacuucaagcaguacgaguucaacagcccccccaacaaccaggugaugcugugcgagcccaccaucaucgagagaaacaucaccgagaucguguaccugaccaacaccaccaucgagaaggagaccugccccaagcccgccgaguacagaaacuggagcaagccccagugcggcaucaccggcuucgcccccuucagcaaggacaacagcaucagacugagcgccggcggcgacaucugggugaccagagagcccuacgugagcugcggccccgacaagugcuaccaguucgcccugggccagggcaccacccugaacaacaugcacagcaacaacaccgugagagacagaacccccuacagaacccugcugaugaacgagcugggcgugcccuuccaccugggcaccaagcaggugugcaucgccuggagcagcagcagcugccacgacggcaaggccuggcugcacgugugcaucaccggcgacgacaagaacgccaccgccagcuucaucuacaacggcagacugguggacagcguggugagcuggagcaaggagauccugagaacccaggagagcgagugcgugugcaucaacggcaccugcaccguggugaugaccgacggcagcgccagcggcaaggccgacaccaagauccuguucaucgaggagggcaagaucgugcacaccagcacccugagcggcagcgcccagcacguggaggagugcagcugcuaccccagauaccccggcgugagaugcgugugcagagacaacuggaagggcagcaacagacccaucguggacaucaacaucaaggaccacagcaucgugagcagcuacgugugcagcggccuggugggcgacacccccagaaagaacgacagcagcagcagcagccacugccuggaccccaacaacgaggagggcggccacggcgugaagggcugggccuucgacgacggcaacgacguguggaugggcagaaccaucaacgagaccagcagacugggcuacgagaccuucaaggugaucgagggcuggagcaaccccaagagcaagcugcagaucaacagacaggugaucguggacagaggcgacagaagcggcuacagcggcaucuucagcguggagggcaagagcugcaucaacagaugcuucuacguggagcugaucagaggcagaaaggaggagaccgaggugcuguggaccagcaacagcaucgugguguucugcggcaccagcggcaccuacggcaccggcagcuggcccgacggcgccgaccugaaccugaugcccaucuga

SEQ ID NO: 184929 - RNA, 1410 nt, Artificial Sequence; identical to SEQ ID NO: 182206
  derived and/or modified CDS sequence (opt4) from neuraminidase__InfluenzaA__AHL97532

SEQ ID NO: 184930 - RNA, 1410 nt, Artificial Sequence; identical to SEQ ID NO: 182206
  derived and/or modified CDS sequence (opt4) from neuraminidase__InfluenzaA__AHL97544

SEQ ID NO: 184931 - RNA, 1410 nt, Artificial Sequence; identical to SEQ ID NO: 183931
  derived and/or modified CDS sequence (opt4) from neuraminidase__InfluenzaA__AHL97556

SEQ ID NO: 184932 - RNA, 1410 nt, Artificial Sequence
  derived and/or modified CDS sequence (opt4) from neuraminidase__InfluenzaA__AHL97568
augaaccccaaccagaagaucaucaccaucggcagcgugagccugaccaucagcgccaucugcuucuucaugcagaucgccauccugaucaccaccgugacccugagauucaagcaguacgaguucaacagcccccccaacaaccaggugaugcugugcgagcccaccaucaucgagagaaacaucaccgagaucguguaccugaccaacaccaccaucgagaaggagaucugccccaagcccgccgaguacagaaacuggagcaagccccagugcgacaucaccggcuucgcccccuucagcaaggacaacagcaucagacugagcgccggcggcgacaucugggugaccagagagcccuacgugagcugcgaccccgacaagugcuaccaguucgcccugggccagggcaccacccugaccaacgugcacagcaacaacaccgugagagacagaacccccuacagaacccugcugaugaacgagcugggcgugcccuuccaccugggcaccaagcaggugugcaucgccuggagcagcagcagcugccacgacggcaaggccuggcugcacgugugcaucaccggcgacgacaagaacgccaccgccagcuucaucuacaacggcagacugguggacagcguggugagcuggagcaaggagauccugagaacccaggagagcgagugcgugugcaucaacggcaccugcaccguggugaugaccgacggcagcgccagcggcaaggccgacaccaagauccuguucaucgaggagggcaagaucgugcacaccagcacccugagcggcagcgcccagcacguggaggagugcagcugcuaccccagauaccccggcgugagaugcgugugcagagacaacuggaagggcagcaacagacccaucguggacaucaacaucaaggaccacagcaucgugagcagauacgugugcagcggccuggugggcgacacccccagaaagaacgacagcagcagcagcagccacugccuggaccccaacaacgaggagggcggccacggcgugaagggcugggccuucgacgacggcaacgacguguggaugggcagaaccaucaacgagaccagcagacugggcuacgagaccuucaaggugaucgagggcuggagcaaccccaagagcaagcugcagaucaacagacaggugaucguggacagaggcgacagaagcggcuacagcggcaucuucagcguggagggcaagagcugcaucaacagaugcuucuacguggagcugaucagaggcagaaaggaggagaccgaggugcuguggaccagcaacagcaucgugguguucugcggcaccagcggcaccuacggcaccggcagcuggcccgacggcgccgaccugaaccugaugcccaucuga

SEQ ID NO: 184933 - RNA, 1410 nt, Artificial Sequence; identical to SEQ ID NO: 184846
  derived and/or modified CDS sequence (opt4) from neuraminidase__InfluenzaA__AHL97580

SEQ ID NO: 184934 - RNA, 1410 nt, Artificial Sequence
  derived and/or modified CDS sequence (opt4) from neuraminidase__InfluenzaA__AHL97592
augaaccccaaccagaagaucaucaccaucggcagcgugagccugaccaucagcaccaucugcuucuucaugcagaucgccauccugaucaccaccgugacccugcacuucaagcaguacgaguucaacagcccccccaacaaccaggugaugcugugcgagcccaccaucaucgagagaaacaucaccgagaucguguaccugaccaacaccaccaucgagaaggagaucugccccaagcccgccgaguacagaaacuggagcaagccccagugcggcaucaccggcuucgcccccuucagcaaggacaacagcgugagacugagcgccggcggcgacaucugggugaccagagagcccuacgugagcugcgaccccgacaagugcuaccaguucgcccugggccagggcaccacccugaacaacgugcacagcaacaacaccgugagagacagaacccccuacagaacccugcugaugaacgagcugggcgugcccuuccaccugggcaccaagcaggugugcaucgccuggagcagcagcagcugccacgacggcaaggccuggcugcacgugugcaucaccggcgacgacaagaacgccaccgccagcuucaucuacaacggcagacugguggacagcguggugagcuggagcaaggagauccugagaacccaggagagcgagugcgugugcaucaacggcaccugcaccguggugaugaccgacggcagcgccagcggcaaggccgacaccaagauccuguucaucgaggagggcaagaucgugcacaccagcacccugagcggcagcgcccagcacguggaggagugcagcugcuaccccagauaccccggcgugagaugcgugugcagagacaacuggaagggcagcaacagacccaucguggacaucaacaucaaggaccacagcaucgugagcagcuacgugugcagcggccuggugggcgacacccccagaaagaacgacagcagcagcagcagccacugccugggccccaacaacgaggagggcggccacggcgugaagggcugggccuucgacgacggcaacgacguguggaugggcagaaccaucaacgagaccagcagaagcggcuacgagaccuucaaggugaucgagggcuggagcaaccccaagagcaagcugcagaucaacagacaggugaucguggacagaggcgacagaagcggcuacagcggcaucuucagcguggagggcaagagcugcaucaacagaugcuucuacguggagcugaucagaggcagaaaggaggagaccgaggugcuguggaccagcaacagcaucgugguguucugcggcaccagcggcaccuacggcaccggcagcuggcccgacggcgccgaccugaaccugaugcccaucuga

SEQ ID NO: 184935 - RNA, 1410 nt, Artificial Sequence; identical to SEQ ID NO: 182206
  derived and/or modified CDS sequence (opt4) from neuraminidase__InfluenzaA__AHL97604

SEQ ID NO: 184936 - RNA, 1410 nt, Artificial Sequence
  derived and/or modified CDS sequence (opt4) from neuraminidase__InfluenzaA__AHL97616
augaaccccaaccagaagaucaucaccaucggcagcgugagccugaccaucagcaccaucugcuucuucaugcagaucgccauccugaucaccaccgugacccugcacuucaagcaguacgaguucaacagcccccccaacaaccaggugaugcugugcgagcccaccaucaucgagagaaacaucaccgagaucguguaccugaccaacaccaccaucgagaaggagaucugccccaagcccgccgaguacagaaacuggagcaagccccagugcggcaucaccggcuucgcccccuucagcaaggacaacagcaucagacugagcgccggcggcgacaucugggugaccagagagcccuacgugagcugcgaccccgacaagugcuaccaguucgcccugggccagggcaccacccugaacaacaugcacagcaacaacaccgugagagacagaacccccuacagaacccugcugaugaacgagcugggcgugcccuuccaccugggcaccaagcaggugugcaucgccuggagcagcagcagcugccacgacggcaaggccuggcugcacgugugcaucaccggcgacgacaagaacgccaccgccagcuucaucuacaacggcagacugguggacagcguggugagcuggagcaaggaggugcugagaacccaggagagcgagugcgugugcaucaacggcaccugcaccguggugaugaccgacggcagcgccagcggcaaggccgacaccaagauccuguucaucgaggagggcaagaucgugcacaccagcacccugagcggcagcgcccagcacguggaggagugcagcugcuaccccagauaccccggcgugagaugcgugugcagagacaacuggaagggcagcaacagacccaucguggacaucaacaucaaggaccacagcaucgugagcagcuacgugugcagcggccuggugggcgacacccccagaaagaacgacagcagcagcagcagccacugccuggaccccaacaacgaggagggcggccacggcgugaagggcugggccuucgacgacggcaacgacguguggaugggcagaaccaucaacgagaccagcagacugggcuacgagaccuucaaggugaucgagggcuggagcaaccccaagagcaagcugcagaucaacagacaggugaucguggacagaggcgacagaagcggcuacagcggcaucuucagcguggagggcaagagcugcaucaacagaugcuucuacguggagcugaucagaggcagaaaggaggagaccgaggugcuguggaccagcaacagcaucgugguguucugcggcaccagcggcaccuacggcaccggcagcuggcccgacggcgccgaccugaaccugaugcccaucuga

SEQ ID NO: 184937 - RNA, 1410 nt, Artificial Sequence; identical to SEQ ID NO: 184796
  derived and/or modified CDS sequence (opt4) from neuraminidase__InfluenzaA__AHL97628

SEQ ID NO: 184938 - RNA, 1410 nt, Artificial Sequence; identical to SEQ ID NO: 182206
  derived and/or modified CDS sequence (opt4) from neuraminidase__InfluenzaA__AHL97640

SEQ ID NO: 184939 - RNA, 1410 nt, Artificial Sequence; identical to SEQ ID NO: 183954
  derived and/or modified CDS sequence (opt4) from neuraminidase__InfluenzaA__AHL97652

SEQ ID NO: 184940 - RNA, 1410 nt, Artificial Sequence; identical to SEQ ID NO: 183954
  derived and/or modified CDS sequence (opt4) from neuraminidase__InfluenzaA__AHL97664

SEQ ID NO: 184941 - RNA, 1410 nt, Artificial Sequence; identical to SEQ ID NO: 183435
  derived and/or modified CDS sequence (opt4) from neuraminidase__InfluenzaA__AHL97676

SEQ ID NO: 184942 - RNA, 1410 nt, Artificial Sequence; identical to SEQ ID NO: 182206
  derived and/or modified CDS sequence (opt4) from neuraminidase__InfluenzaA__AHL97688

SEQ ID NO: 184943 - RNA, 1410 nt, Artificial Sequence; identical to SEQ ID NO: 183931
  derived and/or modified CDS sequence (opt4) from neuraminidase__InfluenzaA__AHL97700

SEQ ID NO: 184944 - RNA, 1410 nt, Artificial Sequence
  derived and/or modified CDS sequence (opt4) from neuraminidase__InfluenzaA__AHL97712
augaaccccaaccagaagaucaucaccaucggcagcgugagccugaccaucagcaccaucugcuucuucaugcagaucgccauccugaucaccaccgugacccugcacuucaagcaguacgaguucaacagcccccccaacaaccaggugaugcugugcgagcccaccaucaucgagagaaacaucaccgagaucguguaccugaccaacaccaccaucgagaaggagaucugccccaagcccgccgaguacagaaacuggagcaagccccagugcggcaucaccggcuucgcccccuucagcaaggacaacagcaucagacugagcgccggcggcgacaucugggugaccagagagcccuacgugagcugcgaccccgacaagugcuaccaguucgcccugggccagggcaccacccugaacaacgugcacagcaacaacaccgugagagacagaacccccuacagaacccugcugaugaacgagcugggcgugcccuuccaccugggcaccaagcaggugugcaucgccuggagcagcagcagcugccacgacggcaaggccuggcugcacgugugcaucaccggcgacgacaagaacgccaccgccagcuucaucuacaacggcagacugguggacagcguggugagcuggagcaaggagauccugagaacccaggagagcgagugcgugugcaucaacggcaccugcaccguggugaugaccgacggcagcgccagcggcaaggccgacaccaagauccuguucaucgaggagggcaagaucgugcacaccagcacccugagcggcagcgcccagcacguggaggagugcagcugcuaccccagauaccccggcgugagaugcgugugcagagacaacuggaagggcagcaacagacccaucguggacaucaacaucaaggaccacagcaucgugagcagcuacgugugcagcggccuggugggcgacacccccagaaagaacgacagcaccagcagcagccacugccuggaccccaacaacgaggagggcggccacggcgugaagggcugggccuucgacgacggcaacgacguguggaugggcagaaccaucaacgagaccagcagacugggcuacgagaccuucaaggugaucgagggcuggagcaaccccaagagcaagcugcagaucaacagacaggugaucguggacagaggcgacagaagcggcuacagcggcaucuucagcguggagggcaagagcugcaucaacagaugcuucuacguggagcugaucagaggcagaaaggaggagaccgaggugcuguggaccagcaacagcaucgugguguucugcggcaccagcggcaccuacggcaccggcagcuggcccgacggcgccgaccugaaccugaugcccaucuga

SEQ ID NO: 184945 - RNA, 1410 nt, Artificial Sequence; identical to SEQ ID NO: 183931
  derived and/or modified CDS sequence (opt4) from neuraminidase__InfluenzaA__AHL97724

SEQ ID NO: 184946 - RNA, 1410 nt, Artificial Sequence; identical to SEQ ID NO: 182206
  derived and/or modified CDS sequence (opt4) from neuraminidase__InfluenzaA__AHL97736

SEQ ID NO: 184947 - RNA, 1410 nt, Artificial Sequence
  derived and/or modified CDS sequence (opt4) from neuraminidase__InfluenzaA__AHL97760
augaaccccaaccagaagaucaucaccaucggcagcgugagccugaccaucagcaccaucugcuucuucaugcagaucgccauccugaucaccaccgugacccugcacuucaagcaguacgaguucaacagcccccccaacaaccaggugaugcugugcgagcccaccaucaucgagagaaacaucaccgagaucguguaccugaccaacaccaccaucgagaaggagaucugccccaagcccgccgaguacagaaacuggagcaagccccagugcggcaucaccggcuucgcccccuucagcaaggacaacagcaucagacugagcgccggcggcgacaucugggugaccagagagcccuacgugagcugcgaccccgacaagugcuaccaguucgcccugggccagggcaccacccugaacaacgugcacagcaacaacaccgugagagacagaacccccuacagaacccugcugaugaacgagcugggcgugcccuuccaccugggcaccaagcaggugugcaucgccuggagcagcagcagcugccacgacggcaaggccuggcugcacgugugcaucaccggcgacgacgagaacgccaccgccagcuucaucuacaacggcagacugguggacagcguggugagcuggagcaaggagauccugagaacccaggagagcgagugcgugugcaucaacggcaccugcaccguggugaugaccgacggcagcgccagcggcaaggccgacaccaagauccuguucaucgaggagggcaagaucgugcacaccagcacccugagcggcagcgcccagcacguggaggagugcagcugcuaccccagauaccccggcgugagaugcgugugcagagacaacuggaagggcagcaacagacccaucguggacaucaacaucaaggaccacagcaucgugagcagcuacgugugcagcggccuggugggcgacacccccagaaagaacgacagcagcagcagcagccacugccuggaccccaacaacgaggagggcggccacggcgugaagggcugggccuucgacgacggcaacgacguguggaugggcagaaccaucaacgagaccagcagacugggcuacgagaccuucaaggugaucgagggcuggagcaaccccaagagcaagcugcagaucaacagacaggugaucguggacagaggcgacagaagcggcuacagcggcaucuucagcguggagggcaagagcugcaucaacagaugcuucuacguggagcugaucagaggcagaaaggaggagaccgaggugcuguggaccagcaacagcaucgugguguucugcggcaccagcggcaccuacggcaccggcagcuggcccgacggcgccgaccugaaccugaugcccaucuga

SEQ ID NO: 184948 - RNA, 1410 nt, Artificial Sequence
  derived and/or modified CDS sequence (opt4) from neuraminidase__InfluenzaA__AHL97772
augaaccccaaccagaagaucaucaccaucggcagcgugagccugaccaucagcaccaucugcuucuucaugcagaucgccauccugaucaccaccgugacccugcacuucaagcaguacgaguucaacagcccccccaacaaccaggugaugcugugcgagcccaccaucaucgagagaaacaucaccgagaucguguaccugaccaacaccaccaucgagaaggagaucugccccaagcccgccgaguacagaaacuggagcaagccccagugcggcaucaccggcuucgcccccuucagcaaggacaacagcaucagacugagcgccggcggcgacaucugggugaccagagagcccuacgugagcugcgaccccgacaagugcuaccaguucgcccugggccagggcaccacccugaacaacgugcacagcaacaacaccgugagagacagaacccccuacagaacccugcugaugaacgagcugggcgugcccuuccaccugggcaccaagcaggugugcaucgccuggagcagcagcagcugccacgacggcaaggccuggcugcacgugugcaucaccggcgacgacaagaacgccaccgccagcuucaucuacaacggcagacugguggacagcguggugagcuggagcaaggagauccugagaacccaggagagcgagugcgugugcaucaacggcaccugcaccguggugaugaccgacggcagcgccagcggcaaggccgacaccaagauccuguucaucgaggagggcaagaucgugcacaccagcacccugagcggcagcgcccagcacguggaggagugcagcugcuaccccagauaccccggcgugagaugcgugugcagagacaacuggaagggcagcaacagacccaucguggacaucaacaucaaggaccacagcaucgugagcagcuacgugugcagcggccuggugggcgacacccccagaaagaacgacagcagcagcagcagccacugccuggaccccaacaacgaggagggcggccacggcgugaagggcugggccuucgacgacggcaacgacguguggaugggcagaaccaucaacgagaccagcagacugggcuacgagaccuucaaggugaucgagggcuggagcaaccccaagagcaagcugcagaucaacagacaggugaucguggacagaggcgacagaagcggcuacagcggcaucuucagcguggagggcaagagcugcaucaacagaugcuucuacguggagcugaucagaggcagaaaggaggagaccgaggugcuguggaccagcaacagcguggugguguucugcggcaccagcggcaccuacggcaccggcagcuggcccgacggcgccgaccugaaccugaugcccaucuga

SEQ ID NO: 184949 - RNA, 1410 nt, Artificial Sequence; identical to SEQ ID NO: 183435
  derived and/or modified CDS sequence (opt4) from neuraminidase__InfluenzaA__AHL97784

SEQ ID NO: 184950 - RNA, 1410 nt, Artificial Sequence; identical to SEQ ID NO: 182206
  derived and/or modified CDS sequence (opt4) from neuraminidase__InfluenzaA__AHL97796

SEQ ID NO: 184951 - RNA, 1410 nt, Artificial Sequence; identical to SEQ ID NO: 182206
  derived and/or modified CDS sequence (opt4) from neuraminidase__InfluenzaA__AHL97808

SEQ ID NO: 184952 - RNA, 1410 nt, Artificial Sequence; identical to SEQ ID NO: 182206
  derived and/or modified CDS sequence (opt4) from neuraminidase__InfluenzaA__AHL97820

SEQ ID NO: 184953 - RNA, 1410 nt, Artificial Sequence
  derived and/or modified CDS sequence (opt4) from neuraminidase__InfluenzaA__AHL97832
augaaccccaaccagaagaucaucaccaucggcagcgugagccugaccaucagcaccaucugcuucuucaugcagaucgccauccugaucaccaccgugacccugcacuucaagcaguacgaguucgacagcccccccaacaaccaggugaugcugugcgagcccaccaucaucgagagaaacaucaccgagaucguguaccugaccaacaccaccaucgagaaggagaucugccccaagcccgccgaguacagaagcuggagcaagccccagugcggcaucaccggcuucgcccccuucagcaaggacaacagcaucagacugagcgccggcggcgacaucugggugaccagagagcccuacgugagcugcgaccccgacaagugcuaccaguucgcccugggccagggcaccacccugaacaacgugcacagcaacaacaccgugagagacagaacccccuacagaacccugcugaugaacgagcugggcgugcccuuccaccugggcaccaagcaggugugcaucgccuggagcagcagcagcugccacgacggcaaggccuggcugcacgugugcaucaccggcgacgacaagaacgccaccgccagcuucaucuacaacggcagacugguggacagcguggugagcuggagcaaggagauccugagaacccaggagagcgagugcgugugcaucaacggcaccugcaccguggugaugaccgacggcagcgccagcggcaaggccgacaccaagauccuguucaucgaggagggcaagaucgugcacaccagcacccugagcggcagcgcccagcacguggaggagugcagcugcuaccccagauaccccggcgugagaugcgugugcagagacaacuggaagggcagcaacagacccaucguggacaucaacaucaaggaccacagcaucgugagcagcuacgugugcagcggccuggugggcgacacccccagaaagaacgacagcagcagcagcagccacugccuggaccccaacaacgaggagggcggccacggcgugaagggcugggccuucgacgacggcaacgacguguggaugggcagaaccaucaacgagaccagcagacugggcuacgagaccuucaaggugaucgagggcuggagcaaccccaagagcaagcugcagaucaacagacaggugaucguggacagaggcgacagaagcggcuacagcggcaucuucagcguggagggcaagagcugcaucaacagaugcuucuacguggagcugaucagaggcagaaaggaggagaccgaggugcuguggaccagcaacagcaucgugguguucugcggcaccagcggcaccuacggcaccggcagcuggcccgacggcgccgaccugaaccugaugcccaucuga

SEQ ID NO: 184954 - RNA, 1410 nt, Artificial Sequence; identical to SEQ ID NO: 182206
  derived and/or modified CDS sequence (opt4) from neuraminidase__InfluenzaA__AHL97844

SEQ ID NO: 184955 - RNA, 1410 nt, Artificial Sequence; identical to SEQ ID NO: 184947
  derived and/or modified CDS sequence (opt4) from neuraminidase__InfluenzaA__AHL97856

SEQ ID NO: 184956 - RNA, 1410 nt, Artificial Sequence; identical to SEQ ID NO: 182206
  derived and/or modified CDS sequence (opt4) from neuraminidase__InfluenzaA__AHL97868

SEQ ID NO: 184957 - RNA, 1410 nt, Artificial Sequence; identical to SEQ ID NO: 183931
  derived and/or modified CDS sequence (opt4) from neuraminidase__InfluenzaA__AHL97880

SEQ ID NO: 184958 - RNA, 1410 nt, Artificial Sequence; identical to SEQ ID NO: 182206
  derived and/or modified CDS sequence (opt4) from neuraminidase__InfluenzaA__AHL97892

SEQ ID NO: 184959 - RNA, 1410 nt, Artificial Sequence; identical to SEQ ID NO: 182206
  derived and/or modified CDS sequence (opt4) from neuraminidase__InfluenzaA__AHL97904

SEQ ID NO: 184960 - RNA, 1410 nt, Artificial Sequence; identical to SEQ ID NO: 183943
  derived and/or modified CDS sequence (opt4) from neuraminidase__InfluenzaA__AHL97916

SEQ ID NO: 184961 - RNA, 1410 nt, Artificial Sequence; identical to SEQ ID NO: 182206
  derived and/or modified CDS sequence (opt4) from neuraminidase__InfluenzaA__AHL97928

SEQ ID NO: 184962 - RNA, 1410 nt, Artificial Sequence; identical to SEQ ID NO: 184922
  derived and/or modified CDS sequence (opt4) from neuraminidase__InfluenzaA__AHL97952

SEQ ID NO: 184963 - RNA, 1410 nt, Artificial Sequence; identical to SEQ ID NO: 182206
  derived and/or modified CDS sequence (opt4) from neuraminidase__InfluenzaA__AHL97964

SEQ ID NO: 184964 - RNA, 1410 nt, Artificial Sequence; identical to SEQ ID NO: 182206
  derived and/or modified CDS sequence (opt4) from neuraminidase__InfluenzaA__AHL97976

SEQ ID NO: 184965 - RNA, 1410 nt, Artificial Sequence; identical to SEQ ID NO: 182206
  derived and/or modified CDS sequence (opt4) from neuraminidase__InfluenzaA__AHL97988

SEQ ID NO: 184966 - RNA, 1410 nt, Artificial Sequence
  derived and/or modified CDS sequence (opt4) from neuraminidase__InfluenzaA__AHL98000
augaaccccaaccagaagaucaucaccaucggcagcgugagccugaccaucagcaccaucugcuucuucaugcagaucgccauccugaucaccaccgugacccugcacuucaagcaguacgaguucaacagcccccccaacaaccaggugaugcugugcgagcccaccaucaucgagagaaacaucaccgagaucguguaccugaccaacaccaccaucgagaaggagaucugccccaagcccgccgaguacagaaacuggagcaagccccagugcggcaucaccggcuucgcccccuucagcaaggacaacagcaucagacugagcgccggcggcgacaucugggugaccagagagcccuacgugagcugcgaccccgacaagugcuaccaguucgcccugggccagggcaccacccugaacaacgugcacagcaacaacaccgugagagacagaacccccuacagaacccugcugaugaacgagcugggcgugcccuuccaccugggcaccaagcaggugugcaucgccuggagcagcagcagcugccacgacggcaaggccuggcugcacgugugcaucaccggcgacgacaagaacgccaccgccagcuucaucuacaacggcagacugguggacagcguggugagcuggagcaaggagauccugagaacccacgagagcgagugcgugugcaucaacggcaccugcaccguggugaugaccgacggcagcgccagcggcaaggccgacaccaagauccuguucaucgaggagggcaagaucgugcacaccagcacccugagcggcagcgcccagcacguggaggagugcagcugcuaccccagauaccccggcgugagaugcgugugcagagacaacuggaagggcagcaacagacccaucguggacaucaacaucaaggaccacagcaucgugagcagcuacgugugcagcggccuggugggcgacacccccagaaagaaggacagcagcagcagcagccacugccuggaccccaacaacgaggagggcggccacggcgugaagggcugggccuucgacgacggcaacgacguguggaugggcagaaccaucaacgagaccagcagacugggcuacgagaccuucaaggugaucgagggcuggagcaaccccaagagcaagcugcagaucaacagacaggugaucguggacagaggcgacagaagcggcuacagcggcaucuucagcguggagggcaagagcugcaucaacagaugcuucuacguggagcugaucagaggcagaaaggaggagaccgaggugcuguggaccagcaacagcaucgugguguucugcggcaccagcggcaccuacggcaccggcagcuggcccgacggcgccgaccugaaccugaugcccaucuga

SEQ ID NO: 184967 - RNA, 1410 nt, Artificial Sequence
  derived and/or modified CDS sequence (opt4) from neuraminidase__InfluenzaA__AHL98012
augaaccccaaccagaagaucaucaccaucggcagcgugagccugaccaucagcaccaucugcuucuucaugcagaucgccauccugaucaccaccgugacccugcacuucaagcaguacgaguucaacagcccccccaacaaccaggugaugcugugcgagcccaccaucaucgagagaaacaucaccgagaucguguaccugaccaacaccaccaucgagaaggagaucugccccaagcccgccgaguacagaaacuggagcaagccccagugcggcaucaccggcuucgcccccuucagcaaggacaacagcaucagacugagcgccggcggcgacaucugggugaccagagagcccuacgugagcugcgaccccgacaagugcuaccaguucgcccugggccagggcaccacccugaacaacgugcacagcaacaacaccgugagagacagaacccccuacagaacccugcugaugaacgagcugggcgugcccuuccaccugggcaccaagcaggugugcaucgccuggagcagcagcagcugccacgacggcaaggccuggcugcacgugugcaucaccggcgacgacaagaacgccaccgccagcuucaucuacaacggcagacugguggacagcguggugagcuggagcaaggaggugcugagaacccaggagagcgagugcgugugcaucaacggcaccugcaccguggugaugaccgacggcagcgccagcggcaaggccgacaccaagauccuguucaucgaggagggcaagaucgugcacaccagcacccugagcggcagcgcccagcacguggaggagugcagcugcuaccccagauaccccggcgugagaugcgugugcagagacaacuggaagggcagcaacagacccaucguggacaucaacaucaaggaccacagcaucgugagcagcuacgugugcagcggccuggugggcgacacccccagaaagaacgacagcagcagcagcagccacugccuggaccccaacaacgaggagggcgaccacggcgugaagggcugggccuucgacgacggcaacgacguguggaugggcagaaccaucaacgagaccagcagacugggcuacgagaccuucaaggugaucgagggcuggagcaaccccaagagcaagcugcagaucaacagacaggugaucguggacagaggcgacagaagcggcuacagcggcaucuucagcguggagggcaagagcugcaucaacagaugcuucuacguggagcugaucagaggcagaaaggaggagaccgaggugcuguggaccagcaacagcaucgugguguucugcggcaccagcggcaccuacggcaccggcagcuggcccgacggcgccgaccugaaccugaugcccaucuga

SEQ ID NO: 184968 - RNA, 1410 nt, Artificial Sequence; identical to SEQ ID NO: 183943
  derived and/or modified CDS sequence (opt4) from neuraminidase__InfluenzaA__AHL98048

SEQ ID NO: 184969 - RNA, 1410 nt, Artificial Sequence; identical to SEQ ID NO: 183943
  derived and/or modified CDS sequence (opt4) from neuraminidase__InfluenzaA__AHL98060

SEQ ID NO: 184970 - RNA, 1410 nt, Artificial Sequence; identical to SEQ ID NO: 183943
  derived and/or modified CDS sequence (opt4) from neuraminidase__InfluenzaA__AHL98072

SEQ ID NO: 184971 - RNA, 1410 nt, Artificial Sequence; identical to SEQ ID NO: 182206
  derived and/or modified CDS sequence (opt4) from neuraminidase__InfluenzaA__AHL98084

SEQ ID NO: 184972 - RNA, 1410 nt, Artificial Sequence; identical to SEQ ID NO: 183943
  derived and/or modified CDS sequence (opt4) from neuraminidase__InfluenzaA__AHL98096

SEQ ID NO: 184973 - RNA, 1410 nt, Artificial Sequence; identical to SEQ ID NO: 182206
  derived and/or modified CDS sequence (opt4) from neuraminidase__InfluenzaA__AHL98119

SEQ ID NO: 184974 - RNA, 1410 nt, Artificial Sequence; identical to SEQ ID NO: 182206
  derived and/or modified CDS sequence (opt4) from neuraminidase__InfluenzaA__AHL98131

SEQ ID NO: 184975 - RNA, 1410 nt, Artificial Sequence; identical to SEQ ID NO: 182206
  derived and/or modified CDS sequence (opt4) from neuraminidase__InfluenzaA__AHL98143

SEQ ID NO: 184976 - RNA, 1410 nt, Artificial Sequence
  derived and/or modified CDS sequence (opt4) from neuraminidase__InfluenzaA__AHL98155
augaaccccaaccagaagaucaucaccaucggcagcgugagccugaccaucagcaccaucugcuucuucaugcagaucgccauccugaucaccaccgugacccugcacuucaagcaguacgaguucaacagcccccccaacaaccaggugaugcugugcgagcccaccaucaucgagagaaacaucaccgagaucguguaccugaccaacaccaccaucgagaaggagaucugccccaagcccgccgaguacagaaacuggagcaagccccagugcggcaucaccggcuucgcccccuucagcaaggacaacagcaucagacugagcgccggcggcgacaucugggugaccagagagcccuacgugagcugcgaccccgacaagugcuaccaguucgcccugggccagggcaccacccugaacaacgugcacagcaacaacaccgugagagacagaacccccuacagaacccugcugaugaacgagcugggcgugcccuuccaccugggcaccaagcaggugugcaucgccuggagcagcagcagcugccacgacggcaaggccuggcugcacgugugcaucaccggcgacgacaagaacgccaccgccagcuucaucuacaacggcagacugguggacagcguggugagcuggagcaaggagauccugagaacccaggagagcgagugcgugugcaucaacggcaccugcaccguggugaugaccgacggcagcgccagcggcaaggccgacaccaagauccuguucaucgaggagggcaagaucgugcacaccagcacccugagcggcagcgcccagcacguggaggagugcagcugcuaccccagauaccccggcgugagaugcgugugcagagacaacuggaagggcagcaacagacccaucguggacaucaacaucaaggaccacagcaucgugagcagcuacgugugcagcggccuggugggcgacacccccagaaagaacgacagcagcagcagcagccacugccuggaccccaacaacgaggagggcggccacggcgugaagggcugggccuucgacgacggcaacgacguguggaugggcagaaccaucaacgagaccagcagacugggcuacgagaccuucaaggugaucgagggcuggagcaacagcaagagcaagcugcagaucaacagacaggugaucguggacagaggcgacagaagcggcuacagcggcaucuucagcguggagggcaagagcugcaucaacagaugcuucuacguggagcugaucagaggcagaaaggaggagaccgaggugcuguggaccagcaacagcaucgugguguucugcggcaccagcggcaccuacggcaccggcagcuggcccgacggcgccgaccugaaccugaugcccaucuga

SEQ ID NO: 184977 - RNA, 1410 nt, Artificial Sequence; identical to SEQ ID NO: 182206
  derived and/or modified CDS sequence (opt4) from neuraminidase__InfluenzaA__AHL98167

SEQ ID NO: 184978 - RNA, 1410 nt, Artificial Sequence; identical to SEQ ID NO: 182206
  derived and/or modified CDS sequence (opt4) from neuraminidase__InfluenzaA__AHL98179

SEQ ID NO: 184979 - RNA, 1410 nt, Artificial Sequence; identical to SEQ ID NO: 182206
  derived and/or modified CDS sequence (opt4) from neuraminidase__InfluenzaA__AHL98191

SEQ ID NO: 184980 - RNA, 1410 nt, Artificial Sequence; identical to SEQ ID NO: 183943
  derived and/or modified CDS sequence (opt4) from neuraminidase__InfluenzaA__AHL98215

SEQ ID NO: 184981 - RNA, 1410 nt, Artificial Sequence
  derived and/or modified CDS sequence (opt4) from neuraminidase__InfluenzaA__AHL98227
augaaccccaaccagaagaucaucaccaucggcagcgugagccugaccaucagcaccaucugcuucuucaugcagaucgccauccugaucaccaccgugacccugcacuucaagcaguacgaguucaacagcccccccaacaaccaggugaugcugugcgagcccaccaucaucgagagaaacaucaccgacaucguguaccugaccaacaccaccaucgagaaggagaucugccccaagcccgccgaguacagaaacuggagcaagccccagugcggcaucaccggcuucgcccccuucagcaaggacaacagcaucagacugagcgccggcggcgacaucugggugaccagagagcccuacgugagcugcgaccccgacaagugcuaccaguucgcccugggccagggcaccacccugaacaacaugcacagcaacaacaccgugagagacagaacccccuacagaacccugcugaugaacgagcugggcgugcccuuccaccugggcaccaagcaggugugcaucgccuggagcagcagcagcugccacgacggcaaggccuggcugcacgugugcaucaccggcgacgacaagaacgccaccgccagcuucaucuacaacggcagacugguggacagcguggugagcuggagcaaggagauccugagaacccaggagagcgagugcgugugcaucaacggcaccugcaccguggugaugaccgacggcagcgccagcggcaaggccgacaccaagauccuguucaucgaggagggcaagaucgugcacaccagcacccugagcggcagcgcccagcacguggaggagugcagcugcuaccccagauaccccggcgugagaugcgugugcagagacaacuggaagggcagcaacagacccaucguggacaucaacaucaaggaccacagcaucgugagcagcuacgugugcagcggccuggugggcgacacccccagaaagaacgacagcagcagcagcagccacugccuggaccccaacaacgaggagggcggccacggcgugaagggcugggccuucgacgacggcaacgacguguggaugggcagaaccaucaacgagaccagcagacugggcuacgagaccuucaaggugaucgagggcuggagcaaccccaagagcaagcugcagaucaacagacaggugaucguggacagaggcgacagaagcggcuacagcggcaucuucagcguggagggcaagagcugcaucaacagaugcuucuacguggagcugaucagaggcagaaaggaggagaccgaggugcuguggaccagcaacagcaucgugguguucugcggcaccagcggcaccuacggcaccggcagcuggcccgacggcgccgaccugaaccugaugcccaucuga

SEQ ID NO: 184982 - RNA, 1410 nt, Artificial Sequence; identical to SEQ ID NO: 182206
  derived and/or modified CDS sequence (opt4) from neuraminidase__InfluenzaA__AHL98239

SEQ ID NO: 184983 - RNA, 1410 nt, Artificial Sequence; identical to SEQ ID NO: 182206
  derived and/or modified CDS sequence (opt4) from neuraminidase__InfluenzaA__AHL98251

SEQ ID NO: 184984 - RNA, 1410 nt, Artificial Sequence; identical to SEQ ID NO: 183954
  derived and/or modified CDS sequence (opt4) from neuraminidase__InfluenzaA__AHL98263

SEQ ID NO: 184985 - RNA, 1410 nt, Artificial Sequence; identical to SEQ ID NO: 182206
  derived and/or modified CDS sequence (opt4) from neuraminidase__InfluenzaA__AHL98275

SEQ ID NO: 184986 - RNA, 1410 nt, Artificial Sequence; identical to SEQ ID NO: 184852
  derived and/or modified CDS sequence (opt4) from neuraminidase__InfluenzaA__AHL98287

SEQ ID NO: 184987 - RNA, 1410 nt, Artificial Sequence
  derived and/or modified CDS sequence (opt4) from neuraminidase__InfluenzaA__AHL98298
augaaccccaaccagaagaucaucaccaucggcagcgugagccugaccaucagcaccaucugcuucuucaugcagaucgccauccugaucaccaccgugacccugcacuucaagcaguacgaguucaacagcccccccaacaaccaggugaugcugugcgagcccaccaucaucggcagaaacaucaccgagaucguguaccugaccaacaccaccaucgagaaggagaucugccccaagcccgccgaguacagaaacuggagcaagccccagugcggcaucaccggcuucgcccccuucagcaaggacaacagcaucagacugagcgccggcggcgacaucugggugaccagagagcccuacgugagcugcgaccccgacaagugcuaccaguucgcccugggccagggcaccacccugaacaacgugcacagcaacaacaccgugagagacagaacccccuacagaacccugcugaugaacgagcugggcgugcccuuccaccugggcaccaagcaggugugcaucgccuggagcagcagcagcugccacgacggcaaggccuggcugcacgugugcaucaccggcgacgacaagaacgccaccgccagcuucaucuacaacggcagacugguggacagcguggugagcuggagcaaggagauccugagaacccaggagagcgagugcgugugcaucaacggcaccugcaccguggugaugaccgacggcagcgccagcggcaaggccgacaccaagauccuguucaucgaggagggcaagaucgugcacaccagcacccugagcggcagcgcccagcacguggaggagugcagcugcuaccccagauaccccggcgugagaugcgugugcagagacaacuggaagggcagcaacagacccaucguggacaucaacaucaaggaccacagcaucgugagcagcuacgugugcagcggccuggugggcgacacccccagaaagaacgacagcagcagcagcagccacugccuggaccccaacaacgaggagggcggccacggcgugaagggcugggccuucgacgacggcaacgacguguggaugggcagaaccaucaacgagaccagcagacugggcuacgagaccuucaaggugaucgagggcuggagcaaccccaagagcaagcugcagaucaacagacaggugaucguggacagaggcgacagaagcggcuacagcggcaucuucagcguggagggcaagagcugcaucaacagaugcuucuacguggagcugaucagaggcagaaaggaggagaccgaggugcuguggaccagcaacagcaucgugguguucugcggcaccagcggcaccuacggcaccggcagcuggcccgacggcgccgaccugaaccugaugcccaucuga

SEQ ID NO: 184988 - RNA, 1410 nt, Artificial Sequence; identical to SEQ ID NO: 182206
  derived and/or modified CDS sequence (opt4) from neuraminidase__InfluenzaA__AHL98310

SEQ ID NO: 184989 - RNA, 1410 nt, Artificial Sequence; identical to SEQ ID NO: 182206
  derived and/or modified CDS sequence (opt4) from neuraminidase__InfluenzaA__AHL98322

SEQ ID NO: 184990 - RNA, 1410 nt, Artificial Sequence
  derived and/or modified CDS sequence (opt4) from neuraminidase__InfluenzaA__AHL98334
augaaccccaaccagaagaucaucaccaucggcagcgugagccugaccaucagcaccaucugcuucuucaugcagaucgccauccugaucaccaccgugacccugcacuucaagcaguacgaguucaacagcccccccaacaaccaggugaugcugugcgagcccaccaucaucgagagaaacaucaccgaggugguguaccugaccaacaccaccaucgagaaggagaucugccccaagcccgccgaguacagaaacuggagcaagccccagugcggcaucaccggcuucgcccccuucagcaaggacaacagcaucagacugagcgccggcggcgacaucugggugaccagagagcccuacgugagcugcgaccccgacaagugcuaccaguucgcccugggccagggcaccacccugaacaacgugcacagcaacaacaccgugagagacagaacccccuacagaacccugcugaugaacgagcugggcgugcccuuccaccugggcaccaagcaggugugcaucgccuggagcagcagcagcugccacgacggcaaggccuggcugcacgugugcaucaccggcgacgacaagaacgccaccgccagcuucaucuacaacggcagacugguggacagcguggugagcuggagcaaggagauccugagaacccaggagagcgagugcgugugcaucaacggcaccugcaccguggugaugaccgacggcagcgccagcggcaaggccgacaccaagauccuguucaucgaggagggcaagaucgugcacaccagcacccugagcggcagcgcccagcacguggaggagugcagcugcuaccccagauaccccggcgugagaugcgugugcagagacaacuggaagggcagcaacagacccaucguggacaucaacaucaaggaccacagcaucgugagcagcuacgugugcagcggccuggugggcgacacccccagaaagaacgacagcagcagcagcagccacugccuggaccccaacaacgaggagggcggccacggcgugaagggcugggccuucgacgacggcaacgacguguggaugggcagaaccaucaacgagaccagcagacugggcuacgagaccuucaaggugaucgagggcuggagcaaccccaagagcaagcugcagaucaacagacaggugaucguggacagaggcgacagaagcggcuacagcggcaucuucagcguggagggcaagagcugcaucaacagaugcuucuacguggagcugaucagaggcagaaaggaggagaccgaggugcuguggaccagcaacagcaucgugguguucugcggcaccagcggcaccuacggcaccggcagcuggcccgacggcgccgaccugaaccugaugcccaucuga

SEQ ID NO: 184991 - RNA, 1410 nt, Artificial Sequence
  derived and/or modified CDS sequence (opt4) from neuraminidase__InfluenzaA__AHL98346
augaaccccaaccagaagaucaucaccaucggcagcgugagccugaccaucagcaccaucugcuucuucaugcagaucgccauccugaucaccaccgugacccugcacuucaagcaguacgaguucgacagcccccccaacaaccaggugaugcugugcgagcccaccaucaucgagagaaacaucaccgagaucguguaccugaccaacaccaccaucgagaaggagaucugccccaagcccgccgaguacagaaacuggagcaagccccagugcggcaucaccggcuucgcccccuucagcaaggacaacagcaucagacugagcgccggcggcgacaucugggugaccagagagcccuacgugagcugcgaccccgacaagugcuaccaguucgcccugggccagggcaccacccugaacaacgugcacagcaacaacaccgugagagacagaacccccuacagaacccugcugaugaacgagcugggcgugcccuuccaccugggcaccaagcaggugugcaucgccuggagcagcagcagcugccacgacggcaaggccuggcugcacgugugcaucaccggcgacgacaagaacgccaccgccagcuucaucuacaacggcagacugguggacagcguggugagcuggagcaaggagauccugagaacccaggagagcgagugcgugugcaucaacggcaccugcaccguggugaugaccgacggcagcgccagcggcaaggccgacaccaagauccuguucaucgaggagggcaagaucgugcacaccagcacccugagcggcagcgcccagcacguggaggagugcagcugcuaccccagauaccccggcgugagaugcgugugcagagacaacuggaagggcagcaacagacccaucguggacaucaacaucaaggaccacagcaucgugagcagcuacgugugcagcggccuggugggcgacacccccagaaagaacgacagcagcagcagcagccacugccuggaccccaacaacgaggagggcggccacggcgugaagggcugggccuucgacgacggcaacgacguguggaugggcagaaccaucaacgagaccagcagacugggcuacgagaccuucaaggugaucgagggcuggagcaaccccaagagcaagcugcagaucaacagacaggugaucguggacagaggcgacagaagcggcuacagcggcaucuucagcguggagggcaagagcugcaucaacagaugcuucuacguggagcugaucagaggcagaaaggaggagaacgaggugcuguggaccagcaacagcaucgugguguucugcggcaccagcggcaccuacggcaccggcagcuggcccgacggcgccgaccugaaccugaugcccaucuga

SEQ ID NO: 184992 - RNA, 1410 nt, Artificial Sequence; identical to SEQ ID NO: 182206
  derived and/or modified CDS sequence (opt4) from neuraminidase__InfluenzaA__AHL98357

SEQ ID NO: 184993 - RNA, 1410 nt, Artificial Sequence; identical to SEQ ID NO: 183954
  derived and/or modified CDS sequence (opt4) from neuraminidase__InfluenzaA__AHL98369

SEQ ID NO: 184994 - RNA, 1410 nt, Artificial Sequence
  derived and/or modified CDS sequence (opt4) from neuraminidase__InfluenzaA__AHL98381
augaaccccaaccagaagaucaucaccaucggcagcgugagccugaccaucagcaccaucugcuucuucaugcagaucgccauccugaucaccaccgugacccugcacuucaagcaguacgaguucaacagcccccccaacaaccaggugaugcugugcgagcccaccaucaucgagagaaacaucaccgagaucguguaccugaccaacaccaccaucgagaaggagaucugccccaagcccgccgaguacagaaacuggagcaagccccagugcggcaucaccggcuucgcccccuucagcaaggacaacagcaucagacugagcgccggcggcgacaucugggugaccagagagcccuacgugagcugcggccccgacaagugcuaccaguucgcccugggccagggcaccacccugaacaacaugcacagcaacaacaccgugagagacagaacccccuacagaacccugcugaugagcgagcugggcgugcccuuccaccugggcaccaagcaggugugcaucgccuggagcagcagcagcugccacgacggcaaggccuggcugcacgugugcaucaccggcgacgacaagaacgccaccgccagcuucaucuacaacggcagacugguggacagcguggugagcuggagcaaggagauccugagaacccaggagagcgagugcgugugcaucaacggcaccugcaccguggugaugaccgacggcagcgccagcggcaaggccgacaccaagauccuguucaucgaggagggcaagaucgugcacaccagcacccugagcggcagcgcccagcacguggaggagugcagcugcuaccccagauaccccggcgugagaugcgugugcagagacaacuggaagggcagcaacagacccaucguggacaucaacaucaaggaccacagcaccgugagcagcuacgugugcagcggccuggugggcgacacccccagaaagaacgacagcagcagcagcagccacugccuggaccccaacaacgaggagggcggccacggcgugaagggcugggccuucgacgacggcaacgacguguggaugggcagaaccaucaacgagaccagcagacugggcuacgagaccuucaaggugaucgagggcuggagcaaccccaagagcaagcugcagaucaacagacaggugaucguggacagaggcgacagaagcggcuacagcggcaucuucagcguggagggcaagagcugcaucaacagaugcuucuacguggagcugaucagaggcagaaaggaggagaccgaggugcuguggaccagcaacagcaucgugguguucugcggcaccagcggcaccuacggcaccggcagcuggcccgacggcgccgaccugaaccugaugcccaucuga

SEQ ID NO: 184995 - RNA, 1410 nt, Artificial Sequence
  derived and/or modified CDS sequence (opt4) from neuraminidase__InfluenzaA__AHL98393
augaaccccaaccagaagaucaucaccaucggcagcgugagccugaccaucagcaccaucugcuucuucaugcagaucgccauccugaucaccaccgugacccugcacuucaagcaguacgaguucaacagcccccccaacaaccagaugaugcugugcgagcccaccaucaucgagagaaacaucaccgagaucguguaccugaccaacaccaccaucgagaaggagaucugccccaagcccgccgaguacagaaacuggagcaagccccagugcggcaucaccggcuucgcccccuucagcaaggacaacagcaucagacugagcgccggcggcgacaucugggugaccagagagcccuacgugagcugcggccccgacaagugcuaccaguucgcccugggccagggcaccacccugaacaacaugcacagcaacaacaccgugagagacagaacccccuacagaacccugcugaugaacgagcugggcgugcccuuccaccugggcaccaagcaggugugcaucgccuggagcagcagcagcugccacgacggcaaggccuggcugcacgugugcaucaccggcgacgacaagaacgccaccgccagcuucaucuacaacggcagacugguggacagcguggugagcuggagcaaggagauccugagaacccaggagagcgagugcgugugcaucaacggcaccugcaccguggugaugaccgacggcagcgccagcggcaaggccgacaccaagauccuguucaucgaggagggcaagaucgugcacaccagcacccugagcggcagcgaccagcacaucgaggagugcagcugcuaccccagauaccccggcgugagaugcgugugcagagacaacuggaagggcagcaacagacccaucguggacaucaacaucaaggaccacagcaucgugagcagcuacgugugcagcggccuggugggcgacacccccagaaagaacgacagcagcagcagcagccacugccuggaccccaacaacgaggagggcggccacggcgugaagggcugggccuucgacgacggcaacgacguguggaugggcagaaccaucaacgagaccagcagacugggcuacgagaccuucaaggugaucgagggcuggagcaaccccaagagcaagcugcagaucaacagacaggugaucguggacagaggcgacagaagcggcuacagcggcaucuucagcguggagggcaagagcugcaucaacagaugcuucuacguggagcugaucagaggcagaaaggaggagaccgaggugcuguggaccagcaacagcaucgugguguucugcggcaccagcggcaccuacggcaccggcagcuggcccgacggcgccgaccugaaccugaugcccaucuga

SEQ ID NO: 184996 - RNA, 1410 nt, Artificial Sequence; identical to SEQ ID NO: 182206
  derived and/or modified CDS sequence (opt4) from neuraminidase__InfluenzaA__AHL98405

SEQ ID NO: 184997 - RNA, 1410 nt, Artificial Sequence; identical to SEQ ID NO: 182206
  derived and/or modified CDS sequence (opt4) from neuraminidase__InfluenzaA__AHL98417

SEQ ID NO: 184998 - RNA, 1410 nt, Artificial Sequence; identical to SEQ ID NO: 182206
  derived and/or modified CDS sequence (opt4) from neuraminidase__InfluenzaA__AHL98429

SEQ ID NO: 184999 - RNA, 1410 nt, Artificial Sequence
  derived and/or modified CDS sequence (opt4) from neuraminidase__InfluenzaA__AHL98452
augaaccccacccagaagaucaucaccaucggcagcgugugcaugaccaucggcauggccaaccugauccugcagaucggcaacaucaucagcaucuggaucagccacagcauccagcugggcaaccagagccagaucgagaccugcaaccagagcgugaucaccuacgagaacaacaccugggugaaccagaccuacgugaacaucagcaacaccaacuucgccgccggccagagcguggugagcgugaagcuggccggcaacagcagccugugccccgugagcggcugggccaucuacagcaaggacaacagcgugagaaucggcagcaagggcgacguguucgugaucagagagcccuucaucagcugcagcccccuggagugcagaaccuucuuccugacccagggcgcccugcugaacgacaagcacagcaacggcaccaucaaggacagaagccccuacagaacccugaugagcugccccaucggcgaggugcccagccccuacaacagcagauucgagagcguggccuggagcgccagcgccugccacgacggcaucaacuggcugaccaucggcaucagcggccccgacagcggcgccguggccgugcugaaguacaacggcaucaucaccgacaccaucaagagcuggaagaacaacauccugagaacccaggagagcgagugcgccugcgugaacggcagcugcuucaccaucaugaccgacggccccagcgacggccaggccagcuacaagaucuucagaaucgagaagggcaagaucgugaagagcguggagaugaacgcccccaacuaccacuacgaggagugcagcugcuaccccgacagcagcgagaucaccugcgugugcagagacaacuggcacggcagcaacagacccugggugagcuucaaccagaaccuggaguaccagaucggcuacaucugcagcggcguguucggcgacaaccccagacccaacgacaagaccggcagcugcggccccgugagcagcaacggcgccaacggcgugaagggcuucagcuucaaguacggcaacggcguguggaucggcagaaccaagagcaucagcagcagaaagggcuucgagaugaucugggaccccaacggcuggaccggcaccgacaacaacuucagcaucaagcaggacaucgugggcaucaacgaguggagcggcuacagcggcagcuucgugcagcaccccgagcugaccggccuggacugcaucagacccugcuucuggguggagcugaucagaggcagacccaaggagaacaccaucuggaccagcggcagcagcaucagcuucugcggcgugaacagcgacaccgugggcuggagcuggcccgacggcgccgagcugcccuucaccaucgacaaguga

SEQ ID NO: 185000 - RNA, 1410 nt, Artificial Sequence
  derived and/or modified CDS sequence (opt4) from neuraminidase__InfluenzaA__AHL98474
augaaccccaaccagaagaucaucaccaucggcagcgugugcaugaccaucggcauggccaaccugauccugcagaucggcaacaucaucagcaucuggaucagccacagcauccagcugggcaaccagagccagaucgagaccugcaaccagagcgugaucaccuacgagaacaacaccugggugaaccagaccuacgugaacaucagcaacaccaacuucgccgccggccagagcguggugagcgugaagcuggccggcaacagcagccugugccccgugagcggcugggccaucuacagcaaggacaacagcgugagaaucggcagcaagggcgacguguucgugaucagagagcccuucaucagcugcagcccccuggagugcagaaccuucuuccugacccagggcgcccugcugaacgacaagcacagcaacggcaccaucaaggacagaagccccuacagaacccugaugagcugccccaucggcgaggugcccagccccuacaacagcagauucgagagcguggccuggagcgccagcgccugccacgacggcaucaacuggcugaccaucggcaucagcggccccaacagcggcgccguggccgugcugaaguacaacggcaucaucaccgacaccaucaagagcuggagaaacaacauccugagaacccaggagagcgagugcgccugcgugaacggcagcugcuucaccaucaugaccgacggccccagcgacggccaggccagcuacaagaucuucagaaucgagaagggcaagaucgugaagagcguggagaugaacgcccccaacuaccacuacgaggagugcagcugcuaccccgacagcagcgagaucaccugcgugugcagagacaacuggcacggcagcaacagacccugggugagcuucaaccagaaccuggaguaccagaucggcuacaucugcagcggcguguucggcgacaaccccagacccaacgacaagaccggcagcugcggccccgugagcagcaacggcgccaacggcgugaagggcuucagcuucaaguacggcaacggcguguggaucggcagaaccaagagcaucagcagcagaaagggcuucgagaugaucugggaccccaacggcuggaccggcaccgacaacaacuucagcaucaagcaggacaucgugggcaucaacgaguggagcggcuacagcggcagcuucgugcagcaccccgagcugaccggccuggacugcaucagacccugcuucuggguggagcugaucagaggcagacccaaggagaacaccaucuggaccagcggcagcagcaucagcuucugcggcgugaacagcgacaccgugggcuggagcuggcccgacggcgccgagcugcccuucaccaucgacaaguga

SEQ ID NO: 185001 - RNA, 1410 nt, Artificial Sequence
  derived and/or modified CDS sequence (opt4) from neuraminidase__InfluenzaA__AHL98485
augaaccccaaccagaagaucaucaccaucggcagcgugagccugaccaucagcaccaucugcuucuucaugcagaucgccauccugaucaccaccgugacccugcacuucaagcaguacgaguucaacagcccccccaacaaccaggugaugcugugcgagcccaccaucaucgagagaaacaucaccgagaucguguaccugaccaacaccaccaucgagaaggagaucugccccaagcccgccgaguacagaaacuggagcaagccccagugcggcaucaccggcuucgcccccuucagcaaggacaacagcaucagacugagcgccggcggcgacaucugggugaccagagagcccuacgugagcugcgaccccgacaagugcuaccaguucgcccugggccagggcaccacccugaacaacgugcacagcaacaacaccgugagagacagaacccccuacagaacccugcugaugaacgagcugggcgugcccuuccaccugggcaccaagcaggugugcaucgccuggagcagcagcagcugccacgacggcaaggccuggcugcacgugugcaucaccggcgacgacaagaacgccaccgccagcuucaucuacaacggcagacugguggacagcguggugagcuggagcaaggagauccugagaacccaggagagcgagugcgugugcaucaacggcaccugcaccguggugaugaccgacggcagcgccagcggcaaggccgacaccaagauccuguucaucgaggagggcaagaucgugcacaccagcauccugagcggcagcgcccagcacguggaggagugcagcugcuaccccagauaccccggcgugagaugcgugugcagagacaacuggaagggcagcaacagacccaucguggacaucaacaucaaggaccacagcaucgugagcagcuacgugugcagcggccuggugggcgacacccccagaaagaacgacagcagcagcagcagccacugccuggaccccaacaacgaggagggcggccacggcgugaagggcugggccuucgacgacggcaacgacguguggaugggcagaaccaucaacgagaccagcagacugggcuacgagaccuucaaggugaucgagggcuggagcaaccccaagagcaagcugcagaucaacagacaggugaucguggacagaggcgacagaagcggcuacagcggcaucuucagcguggagggcaagagcugcaucaacagaugcuucuacguggagcugaucagaggcagaaaggaggagaccgaggugcuguggaccagcaacagcaucgugguguucugcggcaccagcggcaccuacggcaccggcagcuggcccgacggcgccgaccugaaccugaugcccaucuga

SEQ ID NO: 185002 - RNA, 1410 nt, Artificial Sequence; identical to SEQ ID NO: 183435
  derived and/or modified CDS sequence (opt4) from neuraminidase__InfluenzaA__AHL98497

SEQ ID NO: 185003 - RNA, 1410 nt, Artificial Sequence; identical to SEQ ID NO: 182206
  derived and/or modified CDS sequence (opt4) from neuraminidase__InfluenzaA__AHL98509

SEQ ID NO: 185004 - RNA, 1410 nt, Artificial Sequence; identical to SEQ ID NO: 182206
  derived and/or modified CDS sequence (opt4) from neuraminidase__InfluenzaA__AHL98521

SEQ ID NO: 185005 - RNA, 1410 nt, Artificial Sequence; identical to SEQ ID NO: 183435
  derived and/or modified CDS sequence (opt4) from neuraminidase__InfluenzaA__AHL98533

SEQ ID NO: 185006 - RNA, 1410 nt, Artificial Sequence; identical to SEQ ID NO: 182206
  derived and/or modified CDS sequence (opt4) from neuraminidase__InfluenzaA__AHL98545

SEQ ID NO: 185007 - RNA, 1410 nt, Artificial Sequence; identical to SEQ ID NO: 182206
  derived and/or modified CDS sequence (opt4) from neuraminidase__InfluenzaA__AHL98557

SEQ ID NO: 185008 - RNA, 1410 nt, Artificial Sequence; identical to SEQ ID NO: 182206
  derived and/or modified CDS sequence (opt4) from neuraminidase__InfluenzaA__AHL98569

SEQ ID NO: 185009 - RNA, 1410 nt, Artificial Sequence
  derived and/or modified CDS sequence (opt4) from neuraminidase__InfluenzaA__AHL98581
augaaccccaaccagaagaucaucaccaucggcagcgugagccugaccaucagcaccaucugcuucuucaugcagaucgccauccugaucaccaccgugacccugcacuucaagcaguacgaguucaacagcccccccaacaaccaggugaugcugugcgagcccaccaucaucgagagaaacaucaccgagaucguguaccugaccaacaccaccaucgagaaggagaucugccccaagcccgccgaguacagaaacuggagcaagccccagugcggcaucaccggcuucgcccccuucagcaaggacaacagcaucagacugagcgccggcggcaacaucugggugaccagagagcccuacgugagcugcgaccccgacaagugcuaccaguucgcccugggccagggcaccacccugaacaacgugcacagcaacaacaccgugagagacagaacccccuacagaacccugcugaugaacgagcugggcgugcccuuccaccugggcaccaagcaggugugcaucgccuggagcagcagcagcugccacgacggcaaggccuggcugcacgugugcaucaccggcgacgacaagaacgccaccgccagcuucaucuacaacggcagacugguggacagcguggugagcuggagcaaggagauccugagaacccaggagagcgagugcgugugcaucaacggcaccugcaccguggugaugaccgacggcagcgccagcggcaaggccgacaccaagauccuguucaucgaggagggcaagaucgugcacaccagcacccugagcggcagcgcccagcacguggaggagugcagcugcuaccccagauaccccggcgugagaugcgugugcagagacaacuggaagggcagcaacagacccaucguggacaucaacaucaaggaccacagcaucgugagcagcuacgugugcagcggccuggugggcgacacccccagaaagaacgacagcagcagcagcagccacugccuggaccccaacaacgaggagggcggccacggcgugaagggcugggccuucgacgacggcaacgacguguggaugggcagaaccaucaacgagaccagcagacugggcuacgagaccuucaaggugaucgagggcuggagcaaccccaagagcaagcugcagaucaacagacaggugaucguggacagaggcgacagaagcggcuacagcggcaucuucagcguggagggcaagagcugcaucaacagaugcuucuacguggagcugaucagaggcagaaaggaggagaccgaggugcuguggaccagcaacagcaucgugguguucugcggcaccagcggcaccuacggcaccggcagcuggcccgacggcgccgaccugaaccugaugcccaucuga

SEQ ID NO: 185010 - RNA, 1410 nt, Artificial Sequence; identical to SEQ ID NO: 182206
  derived and/or modified CDS sequence (opt4) from neuraminidase__InfluenzaA__AHL98593

SEQ ID NO: 185011 - RNA, 1410 nt, Artificial Sequence; identical to SEQ ID NO: 183943
  derived and/or modified CDS sequence (opt4) from neuraminidase__InfluenzaA__AHL98605

SEQ ID NO: 185012 - RNA, 1410 nt, Artificial Sequence; identical to SEQ ID NO: 183435
  derived and/or modified CDS sequence (opt4) from neuraminidase__InfluenzaA__AHL98617

SEQ ID NO: 185013 - RNA, 1410 nt, Artificial Sequence; identical to SEQ ID NO: 183435
  derived and/or modified CDS sequence (opt4) from neuraminidase__InfluenzaA__AHL98629

SEQ ID NO: 185014 - RNA, 1410 nt, Artificial Sequence; identical to SEQ ID NO: 182206
  derived and/or modified CDS sequence (opt4) from neuraminidase__InfluenzaA__AHL98641

SEQ ID NO: 185015 - RNA, 1410 nt, Artificial Sequence; identical to SEQ ID NO: 184784
  derived and/or modified CDS sequence (opt4) from neuraminidase__InfluenzaA__AHL98653

SEQ ID NO: 185016 - RNA, 1410 nt, Artificial Sequence; identical to SEQ ID NO: 182206
  derived and/or modified CDS sequence (opt4) from neuraminidase__InfluenzaA__AHL98665

SEQ ID NO: 185017 - RNA, 1410 nt, Artificial Sequence
  derived and/or modified CDS sequence (opt4) from neuraminidase__InfluenzaA__AHL98677
augaaccccaaccagaagaucaucaccaucggcagcgugagccugaccaucagcaccaucugcuucuucaugcagaucgccauccugaucaccaccgugacccugcacuucaagcaguacgaguucaacagcccccccaacaaccaggugaugcugugcgagcccaccaucaucgagagaaacaucaccgagaucguguaccugaccaacaccaccaucgagaaggagaucugccccaagcccgccgaguacagaaacuggagcaagccccagugcggcaucaccggcuucgcccccuucagcaaggacaacagcaucagacugagcgccggcggcgacaucugggugaccagagagcccuacgugagcugcgaccccgacaagugcuaccaguucgcccugggccagggcaccacccugaacaacgugcacagcaacaacaccgugagagacagaaccccccacagaacccugcugaugaacgagcugggcgugcccuuccaccugggcaccaagcaggugugcaucgccuggagcagcagcagcugccacgacggcaaggccuggcugcacgugugcaucaccggcgacgacaagaacgccaccgccagcuucaucuacaacggcagacugguggacagcguggugagcuggagcaaggagauccugagaacccaggagagcgagugcgugugcaucaacggcaccugcaccguggugaugaccgacggcagcgccagcggcaaggccgacaccaagauccuguucaucgaggagggcaagaucgugcacaccagcacccugagcggcaacgcccagcacguggaggagugcagcugcuaccccagauaccccggcgugagaugcgugugcagagacaacuggaagggcagcaacagacccaucguggacaucaacaucaaggaccacagcaucgugagcagcuacgugugcagcggccuggugggcgacacccccagaaagaacgacagcagcagcagcagccacugccuggaccccaacaacgaggagggcggccacggcgugaagggcugggccuucgacgacggcaacgacguguggaugggcagaaccaucaacgagaccagcagacugggcuacgagaccuucaaggugaucgagggcuggagcaaccccaagagcaagcugcagaucaacagacaggugaucguggacagaggcgacagaagcggcuacagcggcaucuucagcguggagggcaagagcugcaucaacagaugcuucuacguggagcugaucagaggcagaaaggaggagaccgaggugcuguggaccagcaacagcaucgugguguucugcggcaccagcggcaccuacggcaccggcagcuggcccgacggcgccgaccugaaccugaugcccaucuga

SEQ ID NO: 185018 - RNA, 1410 nt, Artificial Sequence; identical to SEQ ID NO: 183954
  derived and/or modified CDS sequence (opt4) from neuraminidase__InfluenzaA__AHL98689

SEQ ID NO: 185019 - RNA, 1410 nt, Artificial Sequence
  derived and/or modified CDS sequence (opt4) from neuraminidase__InfluenzaA__AHL98702
augaaccccaaccagaagaucaucaccaucggcagcgugagccugaccaucagcaccaucugcuucuucaugcagaucgccauccugaucaccaccgugacccugcacuucaagcaguacgaguucgacagcccccccaacaaccaggugaugcugugcgagcccaccaucaucgagagaaacaucaccgagaucguguaccugaccaacaccaccaucgagaaggagaucugccccaagcccgccgaguacagaaacuggagcaagccccagugcggcaucaccggcuucgcccccuucagcaaggacaacagcaucagacugagcgccggcggcgacaucugggugaccagagagcccuacgugagcugcgaccccgacaagugcuaccaguucgcccugggccagggcaccacccugaacaacggccacagcaacaacaccgugagagacagaacccccuacagaacccugcugaugaacgagcugggcgugcccuuccaccugggcaccaagcaggugugcaucgccuggagcagcagcagcugccacgacggcaaggccuggcugcacgugugcaucaccggcgacgacaagaacgccaccgccagcuucaucuacaacggcagacugguggacagcguggugagcuggagcaaggagauccugagaacccaggagagcgagugcgugugcaucaacggcaccugcaccguggugaugaccgacggcagcgccagcggcaaggccgacaccaagauccuguucaucgaggagggcaagaucgugcacaccagcacccugagcggcagcgcccagcacguggaggagugcagcugcuaccccagauaccccggcgugagaugcgugugcagagacaacuggaagggcagcaacagacccaucguggacaucaacaucaaggaccacagcaucgugagcagcuacgugugcagcggccuggugggcgacacccccagaaagaacgacagcagcagcagcagccacugccuggaccccaacaacgaggagggcggccacggcgugaagggcugggccuucgacgacggcaacgacguguggaugggcagaaccaucaacgagaccagcagacugggcuacgagaccuucaaggugaucgagggcuggagcaaccccaagagcaagcugcagaucaacagacaggugaucguggacagaggcgacagaagcggcuacagcggcaucuucagcguggagggcaagagcugcaucaacagaugcuucuacguggagcugaucagaggcagaaaggaggagaccgaggugcuguggaccagcaacagcaucgugguguucugcggcaccagcggcaccuacggcaccggcagcuggcccgacggcgccgaccugaaccugaugcccaucuga

SEQ ID NO: 185020 - RNA, 1410 nt, Artificial Sequence; identical to SEQ ID NO: 183449
  derived and/or modified CDS sequence (opt4) from neuraminidase__InfluenzaA__AHL98714

SEQ ID NO: 185021 - RNA, 1410 nt, Artificial Sequence
  derived and/or modified CDS sequence (opt4) from neuraminidase__InfluenzaA__AHL98725
augaaccccaaccagaagaucaucaccaucggcagcgugagccugaccaucagcaccaucugcuucuucaugcagaucgccauccugaucaccaccgugacccugcacuucaagcaguacgaguucaacagcccccccaacaaccaggugaugcugugcgagcccaccaucaucgagagaaacaucaccgagaucguguaccugaccaacaccaccaucgagaaggagaucugccccaagcccgccgaguacagaaacuggagcaagccccagugcggcaucaccggcuucgcccccuucagcaaggacaacagcaucagacugagcgccggcggcggcaucugggugaccagagagcccuacgugagcugcgaccccgacaagugcuaccaguucgcccugggccagggcaccacccugaacaacgugcacagcaacaacaccgugagagacagaacccccuacagaacccugcugaugaacgagcugggcgugcccuuccaccugggcaccaagcaggugugcaucgccuggagcagcagcagcugccacgacggcaaggccuggcugcacgugugcaucaccggcgacgacaagaacgccaccgccagcuucaucuacaacggcagacugguggacagcguggugagcuggagcaaggagauccugagaacccaggagagcgagugcgugugcaucaacggcaccugcaccguggugaugaccgacggcaacgccagcggcaaggccgacaccaagauccuguucaucgaggagggcaagaucgugcacaccagcacccugagcggcagcgcccagcacguggaggagugcagcugcuaccccagauaccccggcgugagaugcgugugcagagacaacuggaagggcagcaacagacccaucguggacaucaacaucaaggaccacagcaucgugagcagcuacgugugcagcggccuggugggcgacacccccagaaagaacgacagcagcagcagcagccacugccuggaccccaacaacgaggagggcggccacggcgugaagggcugggccuucgacgacgagaacgacguguggaugggcagaaccaucaacgagaccagcagacugggcuacgagaccuucaaggugaucgagggcuggagcaaccccaagagcaagcugcagaucaacagacaggugaucguggacagaggcaacagaagcggcuacagcggcaucuucagcguggagggcaagagcugcaucaacagaugcuucuacguggagcugaucagaggcagaaaggaggagaccgaggugcuguggaccagcaacagcaucgugguguucugcggcaccagcggcaccuacggcaccggcagcuggcccgacggcgccgaccugaaccugaugcccaucuga

SEQ ID NO: 185022 - RNA, 1410 nt, Artificial Sequence; identical to SEQ ID NO: 183943
  derived and/or modified CDS sequence (opt4) from neuraminidase__InfluenzaA__AHL98737

SEQ ID NO: 185023 - RNA, 1410 nt, Artificial Sequence; identical to SEQ ID NO: 183931
  derived and/or modified CDS sequence (opt4) from neuraminidase__InfluenzaA__AHL98749

SEQ ID NO: 185024 - RNA, 1410 nt, Artificial Sequence; identical to SEQ ID NO: 183943
  derived and/or modified CDS sequence (opt4) from neuraminidase__InfluenzaA__AHL98761

SEQ ID NO: 185025 - RNA, 1410 nt, Artificial Sequence
  derived and/or modified CDS sequence (opt4) from neuraminidase__InfluenzaA__AHL98773
augaaccccaaccagaagaucaucaccaucggcagcgugagccugaccaucagcaccaucugcuucuucaugcagaucgccauccugaucaccaccgugacccugcacuucaagcaguacgaguucaacagcccccccaacaaccaggugaugcugugcgagcccaccaucaucgagagaaacaucaccgagaucguguaccugaccaacaccaccaucgagaaggagaucugccccaagcccgccgaguacagaaacuggagcaagccccagugcggcaucaccggcuucgcccccuucagcaaggacaacagcaucagacugagcgccggcggcaacaucugggugaccagagagcccuacgugagcugcgaccccgacaagugcuaccaguucgcccugggccagggcaccacccugaacaacgugcacagcaacaacaccgccagagacagaacccccuacagaacccugcugaugaacgagcugggcgugcccuuccaccugggcaccaagcaggugugcaucgccuggagcagcagcagcugccacgacggcaaggccuggcugcacgugugcaucaccggcgacgacaagaacgccaccgccagcuucaucuacaacggcagacugguggacagcguggugagcuggagcaaggagauccugagaacccaggagagcgagugcgugugcaucaacggcaccugcaccguggugaugaccgacggcagcgccagcggcaaggccgacaccaagauccuguucaucgaggagggcaagaucgugcacaccagcacccugagcggcagcgcccagcacguggaggagugcagcugcuaccccagauaccccggcgugagaugcgugugcagagacaacuggaagggcagcaacagacccaucguggacaucaacaucaaggaccacagcaucgugagcagcuacgugugcagcggccuggugggcgacacccccagaaagaacgacagcagcagcagcagccacugccuggaccccaacaacgaggagggcggccacggcgugaagggcugggccuucgacgacggcaacgacguguggaugggcagaaccaucaacgagaccagcagacugggcuacgagaccuucaaggugaucgagggcuggagcaaccccaagagcaagcugcagaucaacagacaggugaucguggacagaggcgacagaagcggcuacagcggcaucuucagcguggagggcaagagcugcaucaacagaugcuucuacguggagcugaucagaggcagaaaggaggagaccgaggugcuguggaccagcaacagcaucgugguguucugcggcaccagcggcaccuacggcaccggcagcuggcccgacggcgccgaccugaaccugaugcccaucuga

SEQ ID NO: 185026 - RNA, 1410 nt, Artificial Sequence; identical to SEQ ID NO: 183963
  derived and/or modified CDS sequence (opt4) from neuraminidase__InfluenzaA__AHL98785

SEQ ID NO: 185027 - RNA, 1410 nt, Artificial Sequence
  derived and/or modified CDS sequence (opt4) from neuraminidase__InfluenzaA__AHL98797
augaaccccaaccagaagaucaucaccaucggcagcgugagccugaccaucagcaccaucugcuucuucacccagaucgccauccugaucaccaccgugacccugcacuucaagcaguacgaguucaacagcccccccaacaaccaggugaugcugugcgagcccaccaucaucgagagaaacaucaccgagaucguguaccugaccaacaccaccaucgagaaggagaucugccccaagcccgccgaguacagaaacuggagcaagccccagugcggcaucaccggcuucgcccccuucagcaaggacaacagcaucagacugagcgccggcggcgacaucugggugaccagagagcccuacgugagcugcgaccccgacaagugcuaccaguucgcccugggccagggcaccacccugaacaacgugcacagcaacaacaccgugagagacagaacccccuacagaacccugcugaugaacgagcugggcgugcccuuccaccugggcaccaagcaggugugcaucgccuggagcagcagcagcugccacgacggcaaggccuggcugcacgugugcaucaccggcgacgacaagaacgccaccgccagcuucaucuacaacggcagacugguggacagcguggugagcuggagcaaggagauccugagaacccaggagagcgagugcgugugcaucaacggcaccugcaccguggugaugaccgacggcagcgccagcggcaaggccgacaccaagauccuguucaucgaggagggcaagaucgugcacaccagcacccugagcggcagcgcccagcacguggaggagugcagcugcuaccccagauaccccggcgugagaugcgugugcagagacaacuggaagggcagcaacagacccaucguggacaucaacaucaaggaccacagcaucgugagcagcuacgugugcagcggccuggugggcgacacccccagaaagaacgacagcagcagcagcagccacugccuggaccccaacaacgaggagggcggccacggcgugaagggcugggccuucgacgacggcaacgacguguggaugggcagaaccaucaacgagaccagcagaagcggcuacgagaccuucaaggugaucgagggcuggagcaaccccaagagcaagcugcagaucaacagacaggugaucguggacagaggcgacagaagcggcuacagcggcaucuucagcguggagggcaagagcugcaucaacagaugcuucuacguggagcugaucagaggcagaaaggaggagaccgaggugcuguggaccagcaacagcaucgugguguucugcggcaccagcggcaccuacggcaccggcagcuggcccgacggcgccgaccugaaccugaugcccaucuga

SEQ ID NO: 185028 - RNA, 1410 nt, Artificial Sequence; identical to SEQ ID NO: 182206
  derived and/or modified CDS sequence (opt4) from neuraminidase__InfluenzaA__AHL98809

SEQ ID NO: 185029 - RNA, 1410 nt, Artificial Sequence
  derived and/or modified CDS sequence (opt4) from neuraminidase__InfluenzaA__AHL98821
augaaccccaaccagaagaucaucaccaucggcagcgugagccugaccaucagcaccaucugcuucuucaugcagaucgccauccugaucaccaccgugacccugcacuucaagcaguacgaguucaacagcccccccaacaaccaggugaugcugugcgagcccaccaucaucgagagaaacaucaccgagaucguguaccugaccaacaccaccaucgagaaggagaucugccccaagcccgccgaguacagaaacuggagcaagccccagugcggcaucaccggcuucgcccccuucagcaaggacaacagcaucagacugagcgccggcggcgacaucugggugaccagagagcccuacgugagcugcgaccccgacagaugcuaccaguucgcccugggccagggcaccacccugaacaacaugcacagcaacaacaccgugagagacagaacccccuacagaacccugcugaugaacgagcugggcgugcccuuccaccugggcaccaagcaggugugcaucgccuggagcagcagcagcugccacgacggcaaggccuggcugcacgugugcaucaccggcgacgacaagaacgccaccgccagcuucaucuacaacggcagacugguggacagcguggugagcuggagcaaggagauccugagaacccaggagagcgagugcgugugcaucaacggcaccugcaccguggugaugaccgacggcagcgccagcggcaaggccgacaccaagauccuguucaucgaggagggcaagaucgugcacaccagcacccugagcggcagcgcccagcacguggaggagugcagcugcuaccccagauaccccggcgugagaugcgugugcagagacaacuggaagggcagcaacagacccaucguggacaucaacaucaaggaccacagcaucgugagcagcuacgugugcagcggccuggugggcgacacccccagaaagaacgacagcagcagcagcagccacugccuggaccccaacaacgaggagggcggccacggcgugaagggcugggccuucgacgacggcaacgacguguggaugggcagaaccaucaacgagaccagcagacugggcuacgagaccuucaaggugaucgagggcuggagcaaccccaagagcaagcugcagaucaacagacaggugaucguggacagaggcgacagaagcggcuacagcggcaucuucagcguggagggcaagagcugcaucaacagaugcuucuacguggagcugaucagaggcagaaaggaggagaccgaggugcuguggaccagcaacagcaucgugguguucugcggcaccagcggcaccuacggcaccggcagcuggcccgacggcgccgaccugaaccugaugcccaucuga

SEQ ID NO: 185030 - RNA, 1410 nt, Artificial Sequence; identical to SEQ ID NO: 182206
  derived and/or modified CDS sequence (opt4) from neuraminidase__InfluenzaA__AHL98833

SEQ ID NO: 185031 - RNA, 1410 nt, Artificial Sequence
  derived and/or modified CDS sequence (opt4) from neuraminidase__InfluenzaA__AHL98845
augaaccccaaccagaagaucaucaccaucggcagcgugagccugaccaucagcaccaucugcuucuucaugcagaucgccauccugaucaccaccgugacccugcacuucaagcaguacgaguucaacagcccccccaacaaccaggugaugcugugcgagcccaccaucaucgagagaaacaucaccgagaucguguaccugaucaacaccaccaucgagaaggagaucugccccaagcccgccgaguacagaaacuggagcaagccccagugcggcaucaccggcuucgcccccuucagcaaggacaacagcaucagacugagcgccggcggcgacaucugggugaccagagagcccuacgugagcugcggccccgacaagugcuaccaguucgcccugggccagggcaccacccugaacaacaugcacagcaacaacaccgugagagacagaacccccuacagaacccugcugaugaacgagcugggcgugcccuuccaccugggcaccaagcaggugugcaucgccuggagcagcagcagcugccacgacggcaaggccuggcugcacgugugcaucaccggcgacgacaagaacgccaccgccagcuucaucuacaacggcagacugguggacagcguggugagcuggagcaaggagauccugagaacccaggagagcgagugcgugugcaucaacggcaccugcaccguggugaugaccgacggcagcgccagcggcaaggccgacaccaagauccuguucaucgaggagggcaagaucgugcacaccagcacccugagcggcagcgcccagcacguggaggagugcagcugcuaccccagauaccccggcgugagaugcgugugcagagacaacuggaagggcagcaacagacccaucguggacaucaacaucaaggaccacagcaucgugagcagcuacgugugcagcggccuggugggcgacacccccagaaagaacgacagcagcagcagcagccacugccuggaccccaacaacgaggagggcggccacggcgugaagggcugggccuucgacgacggcaacgacguguggaugggcagaaccaucaacgagaccagcagacugggcuacgagaccuucaaggugaucgagggcuggagcaaccccaagagcaagcugcagaucaacagacaggugaucguggacagaggcgacagaagcggcuacagcggcaucuucagcguggagggcaagagcugcaucaacagaugcuucuacguggagcugaucagaggcagaaaggaggagaccgaggugcuguggaccagcaacagcaucgugguguucugcggcaccagcggcaccuacggcaccggcagcuggcccgacggcgccgaccugaaccugaugcccaucuga

SEQ ID NO: 185032 - RNA, 1410 nt, Artificial Sequence; identical to SEQ ID NO: 183943
  derived and/or modified CDS sequence (opt4) from neuraminidase__InfluenzaA__AHL98857

SEQ ID NO: 185033 - RNA, 1410 nt, Artificial Sequence; identical to SEQ ID NO: 183943
  derived and/or modified CDS sequence (opt4) from neuraminidase__InfluenzaA__AHL98869

SEQ ID NO: 185034 - RNA, 1410 nt, Artificial Sequence; identical to SEQ ID NO: 182206
  derived and/or modified CDS sequence (opt4) from neuraminidase__InfluenzaA__AHL98881

SEQ ID NO: 185035 - RNA, 1410 nt, Artificial Sequence
  derived and/or modified CDS sequence (opt4) from neuraminidase__InfluenzaA__AHL98893
augaaccccaaccagaagaucaucaccaucggcagcgugagccugaccaucagcaccaucugcuucuucaugcagaucgccauccugaucaccaccgugacccugcacuucaagcaguacgaguucgacagcccccccaacaaccaggugaugcugugcgagcccaccaucaucgagagaaacaucaccgagaucguguaccugaccaacaccaccaucgagaaggagaucugccccaagcccgccgaguacagaaacuggagcaagccccagugcggcaucaccggcuucgcccccuucagcaaggacaacagcaucagacugagcgccggcggcgacaucugggugaccagagagcccuacgugagcugcgaccccgacaagugcuaccaguucgcccugggccagggcaccacccugaacaacgugcacagcaacaacaccgugagagacagaacccccuacagaacccugcugaugaacgagcugggcgugcccuuccaccugggcaccaagcaggugugcaucgccuggagcagcagcagcugccacgacggcaaggccuggcugcacgugugcaucaccggcgacgacaagaacgccaccgccagcuucaucuacaacggcagacugguggacagcguggugagcuggagcaaggagauccugagaacccaggagagcgagugcgugugcaucaacggcaccugcaccguggugaugaccgacggcagcgccagcggcaaggccgacaccaagauccuguucaucgaggagggcaagaucgugcacaccagcacccugagcggcagcgcccagcacguggaggagugcagcugcuaccccagauaccccggcgugagaugcgugugcagagacaacuggaagggcagcaacagacccaucguggacaucaacaucaaggaccacagcaucgugagcagcuacgugugcagcggccuggugggcgacacccccagaaagaacgacagcagcagcagcagccacugccuggaccccaacaacgaggagggcggccacggcgugaagggcugggccuucgacgacggcaacgacguguggaugggcagaaccaucaacgagaccagcagacugggcuacgagaccuucaagguguucgagggcuggagcaaccccaagagcaagcugcagaucaacagacaggugaucguggacagaggcgacagaagcggcuacagcggcaucuucagcguggagggcaagagcugcaucaacagaugcuucuacguggagcugaucagaggcagaaaggaggagaccgaggugcuguggaccagcaacagcaucgugguguucugcggcaccagcggcaccuacggcaccggcagcuggcccgacggcgccgaccugaaccugaugcccaucuga

SEQ ID NO: 185036 - RNA, 1410 nt, Artificial Sequence; identical to SEQ ID NO: 183931
  derived and/or modified CDS sequence (opt4) from neuraminidase__InfluenzaA__AHL98905

SEQ ID NO: 185037 - RNA, 1410 nt, Artificial Sequence; identical to SEQ ID NO: 182206
  derived and/or modified CDS sequence (opt4) from neuraminidase__InfluenzaA__AHL98916

SEQ ID NO: 185038 - RNA, 1410 nt, Artificial Sequence; identical to SEQ ID NO: 183954
  derived and/or modified CDS sequence (opt4) from neuraminidase__InfluenzaA__AHL98928

SEQ ID NO: 185039 - RNA, 1410 nt, Artificial Sequence; identical to SEQ ID NO: 182206
  derived and/or modified CDS sequence (opt4) from neuraminidase__InfluenzaA__AHL98940

SEQ ID NO: 185040 - RNA, 1410 nt, Artificial Sequence; identical to SEQ ID NO: 182206
  derived and/or modified CDS sequence (opt4) from neuraminidase__InfluenzaA__AHL98952

SEQ ID NO: 185041 - RNA, 1410 nt, Artificial Sequence; identical to SEQ ID NO: 183931
  derived and/or modified CDS sequence (opt4) from neuraminidase__InfluenzaA__AHL98964

SEQ ID NO: 185042 - RNA, 1410 nt, Artificial Sequence
  derived and/or modified CDS sequence (opt4) from neuraminidase__InfluenzaA__AHL98976
augaaccccaaccagaagaucaucaccaucggcagcgugagccugaccaucagcaccaucugcuucuucaugcagaucgccauccugaucaccaccgugacccugcacuucaagcaguacgaguucaacagcccccccaacaaccaggugaugcugugcgagcccaccaucguggagagaaacaucaccgagaucguguaccugaccaacaccaccaucgagaaggagaucugccccaagcccgccgaguacagaaacuggagcaagccccagugcggcaucaccggcuucgcccccuucagcaaggacaacagcaucagacugagcgccggcggcgacaucugggugaccagagagcccuacgugagcugcgaccccgacaagugcuaccaguucgcccugggccagggcaccacccugaacaacgugcacagcaacaacaccgugagagacagaacccccuacagaacccugcugaugaacgagcugggcgugcccuuccaccugggcaccaagcaggugugcaucgccuggagcagcagcagcugccacgacggcaaggccuggcugcacgugugcaucaccggcgacgacaagaacgccaccgccagcuucaucuacaacggcagacugguggacagcguggccagcuggagcaaggaggugcugagaacccaggagagcgagugcgugugcaucaacggcaccugcgccguggugaugaccgacggcagcgccagcggcaaggccgacaccaagauccuguucaucgaggagggcaagaucgugcacaccagcacccugagcggcagcgcccagcacguggaggagugcagcugcuaccccagauaccccggcgugagaugcgugugcagagacaacuggaagggcagcaacagacccaucguggacaucaacaucaaggaccacagcaucgugagcagcuacgugugcagcggccuggugggcgacacccccagaaagaacgacagcagcagcagcagccacugccuggaccccaacaacgaggagggcggccacggcgugaagggcugggccuucgacgacggcaacgacguguggaugggcagaaccaucaacgagaccagcagacugggcuacgagaccuucaaggugaucgagggcuggagcaaccccaagagcaagcugcagaucaacagacaggugaucguggacagaggcgacagaagcggcuacagcggcaucuucagcguggagggcaagagcugcaucaacagaugcuucuacguggagcugaucagaggcagaaaggaggagaccgaggugcuguggaccagcaacagcaucgugguguucugcggcaccagcggcaccuacggcaccggcagcuggcccgacggcgccgaccugaaccugaugcccaucuga

SEQ ID NO: 185043 - RNA, 1410 nt, Artificial Sequence; identical to SEQ ID NO: 183931
  derived and/or modified CDS sequence (opt4) from neuraminidase__InfluenzaA__AHL98988

SEQ ID NO: 185044 - RNA, 1410 nt, Artificial Sequence; identical to SEQ ID NO: 182206
  derived and/or modified CDS sequence (opt4) from neuraminidase__InfluenzaA__AHL99000

SEQ ID NO: 185045 - RNA, 1410 nt, Artificial Sequence; identical to SEQ ID NO: 182206
  derived and/or modified CDS sequence (opt4) from neuraminidase__InfluenzaA__AHL99012

SEQ ID NO: 185046 - RNA, 1410 nt, Artificial Sequence
  derived and/or modified CDS sequence (opt4) from neuraminidase__InfluenzaA__AHL99024
augaaccccaaccagaagaucaucaccaucggcagcgugagccugaccaucagcaccaucugcuucuucaugcagaucgccauccugaucaccaccgugacccugcacuucaagcaguacgaguucaacagcccccccaacaaccaggugaugcugugcgagcccaccaucaucgagagaaacaucaccgagaucguguaccugaccaacaccaccaucgagaaggagaucugccccaagcccgccgaguacagaaacuggagcaagccccagugcggcaucaccggcuucgcccccuucagcaaggacaacagcaucagacugagcgccggcggcgacaucugggugaccagagagcccuacgugagcugcgaccccgacaagugcuaccaguucgcccugggccagggcaccacccugaacaacgugcacagcaacaacaccgugagagacagaacccccuacagaacccugcugaugaacgagcugggcgugcccuuccaccugggcaccaagcaggugugcaucgccuggagcagcagcagcugccacgacggcaaggccuggcugcacgugugcaucaccggcgacgacaagaacgccaccgccagcuucaucuacaacggcagacugguggacagcguggugagcuggagcaaggagauccugagaacccaggagagcgagugcgugugcaucaacggcaccugcaccguggugaugaccgacggcagcgccagcggcaaggccgacaccaagauccuguucaucgaggagggcaagaucgugcacaccagcacccugagcggcagcgcccagcacguggaggagugcagcugcuaccccagauaccccggcgugagaugcaucugcagagacaacuggaagggcagcaacagacccaucguggacaucaacaucaaggaccacagcaucgugagcagcuacgugugcagcggccuggugggcgacacccccagaaagaacgacagcagcagcagcagccacugccuggaccccaacaacgaggagggcggccacggcgugaagggcugggccuucgacgacggcaacgacguguggaugggcagaaccaucaacgagaccagcagacugggcuacgagaccuucaaggugaucgagggcuggagcaaccccaagagcaagcugcagaucaacagacaggugaucguggacagaggcgacagaagcggcuacagcggcaucuucagcguggagggcaagagcugcaucaacagaugcuucuacguggagcugaucagaggcagaaaggaggagaccgaggugcuguggaccagcaacagcaucgugguguucugcggcaccagcggcaccuacggcaccggcagcuggcccgacggcgccgaccugaaccugaugcccaucuga

SEQ ID NO: 185047 - RNA, 1410 nt, Artificial Sequence; identical to SEQ ID NO: 183424
  derived and/or modified CDS sequence (opt4) from neuraminidase__InfluenzaA__AHL99036

SEQ ID NO: 185048 - RNA, 1410 nt, Artificial Sequence; identical to SEQ ID NO: 184846
  derived and/or modified CDS sequence (opt4) from neuraminidase__InfluenzaA__AHL99048

SEQ ID NO: 185049 - RNA, 1410 nt, Artificial Sequence; identical to SEQ ID NO: 182206
  derived and/or modified CDS sequence (opt4) from neuraminidase__InfluenzaA__AHL99060

SEQ ID NO: 185050 - RNA, 1410 nt, Artificial Sequence
  derived and/or modified CDS sequence (opt4) from neuraminidase__InfluenzaA__AHL99072
augaaccccaaccagaagaucaucaccaucggcagcgugagccugaccaucagcaccaucugcuucuucaugcagaucgccauccugaucaccaccgugacccugcacuucaagcaguacgaguucaacagcccccccaacaaccaggugaugcugugcgagcccaccaucaucgagagaaacaucaccgagaucguguaccugaccaacaccaccaucgagaaggagaucugccccaagcccgccgaguacagaaacuggagcaagccccagugcggcaucaccggcuucgcccccuucagcaaggacaacagcaucagacugagcgccggcggcgacaucugggugaccagagagcccuacgugagcugcgaccccgacaagugcuaccaguucgcccugggccagggcaccacccugaacaacgugcacagcaacaacaccgugagagacagaacccccuacagaacccugcugaugaacgagcugggcgugcccuuccaccugggcaccaagcaggugugcaucgccuggagcagcagcagcugccacgacggcaaggccuggcugcacgugugcaucaccggcgacgacaagaacgccaccgccagcuucaucuacaacggcagacugguggacagcguggugagcuggagcaaggagauccugagaacccaggagagcgagugcgugugcaucaacggcaccugcaccguggugaugaccgacggcagcgccagcggcaaggccgacaccaagauccuguucaucgaggagggcaagaucgugcacaccagcacccugagcggcagcgcccagcacguggaggagugcagcugcuaccccagauaccccggcgugagaugcgugugcagagacaacuggaagggcagcaacagacccaucguggacaucaacaugaaggaccacagcaucgugagcagcuacgugugcagcggccuggugggcgacacccccagaaagaacgacagcagcagcagcagccacugccuggaccccaacaacgaggagggcggccacggcgugaagggcugggccuucgacgacggcaacgacguguggaugggcagaaccaucaacgagaccagcagacugggcuacgagaccuucaaggugaucgagggcuggagcaaccccaagagcaagcugcagaucaacagacaggugaucguggacagaggcgacagaagcggcuacagcggcaucuucagcguggagggcaagagcugcaucaacagaugcuucuacguggagcugaucagaggcagaaaggaggagaccgaggugcuguggaccagcaacagcaucgugguguucugcggcaccagcggcaccuacggcaccggcagcuggcccgacggcgccgaccugaaccugaugcccaucuga

SEQ ID NO: 185051 - RNA, 1410 nt, Artificial Sequence
  derived and/or modified CDS sequence (opt4) from neuraminidase__InfluenzaA__AHL99084
augaaccccaaccagaagaucaucaccaucggcagcgugagccugaccaucagcaccaucugcuucuucaugcagaucgccauccugaucaccaccgugacccugcacuucaagcaguacgaguucaacagcccccccaacaaccaggugaugcugugcgagcccaccaucaucgagagaaacaucaccgagaucguguaccugaccaacaccaccaucgagaaggagaucugccccaagcccgccgaguacagaaacuggagcaagccccagugcggcaucaccggcuucgcccccuucagcaaggacaacagcaucagacugagcgccggcggcgacaucugggugaccagagagcccuacgugagcugcgaccccgacagaugcuaccaguucgcccugggccagggcaccacccugaacaacaugcacagcaacaacaccgugagagacagaacccccuacagaacccugcugaugaacgagcugggcgugcccuuccaccugggcaccaagcaggugugcaucgccuggagcagcagcagcugccacgacggcaaggccuggcugcacgugugcaucaccggcgacgacaagaacgccaccgccagcuucaucuacaacggcagacugguggacagcguggugagcuggagcaaggagauccugagaacccaggagagcgagugcgugugcaucaacggcaccugcaccguggugaugaccgacggcagcgccagcggcaaggccgacaccaagauccuguucaucgaggagggcaagaucgugcacaccagcacccugagcggcagcgcccagcacguggaggagugcagcugcuaccccagauaccccggcgugagaugcgugugcagagacaacuggaagggcagcaacagacccaucguggacaucaacaucaaggaccacaacaucgugagcagcuacgugugcagcggccuggugggcgacacccccagaaagaacgacagcagcagcagcagccacugccuggaccccaacaacgaggagggcggccacggcgugaagggcugggccuucgacgacggcaacgacguguggaugggcagaaccaucaacgagaccagcagacugggcuacgagaccuucaaggugaucgagggcuggagcaaccccaagagcaagcugcagaucaacagacaggugaucguggacagaggcgacagaagcggcuacagcggcaucuucagcguggagggcaagagcugcaucaacagaugcuucuacguggagcugaucagaggcagaaaggaggagaccgaggugcuguggaccagcaacagcaucgugguguucugcggcaccagcggcaccuacggcaccggcagcuggcccgacggcgccgaccugaaccugaugcccaucuga

SEQ ID NO: 185052 - RNA, 1410 nt, Artificial Sequence; identical to SEQ ID NO: 182206
  derived and/or modified CDS sequence (opt4) from neuraminidase__InfluenzaA__AHL99096

SEQ ID NO: 185053 - RNA, 1410 nt, Artificial Sequence; identical to SEQ ID NO: 182206
  derived and/or modified CDS sequence (opt4) from neuraminidase__InfluenzaA__AHL99108

SEQ ID NO: 185054 - RNA, 1410 nt, Artificial Sequence; identical to SEQ ID NO: 182206
  derived and/or modified CDS sequence (opt4) from neuraminidase__InfluenzaA__AHL99120

SEQ ID NO: 185055 - RNA, 1410 nt, Artificial Sequence; identical to SEQ ID NO: 182206
  derived and/or modified CDS sequence (opt4) from neuraminidase__InfluenzaA__AHL99132

SEQ ID NO: 185056 - RNA, 1410 nt, Artificial Sequence
  derived and/or modified CDS sequence (opt4) from neuraminidase__InfluenzaA__AHL99144
augaaccccaaccagaagaucaucaccaucggcagcgugagccugaccaucagcaccaucugcuucuucaugcagaucgccauccugaucaccaccgugacccugcacuucaagcaguacgaguucaacagcccccccaacaaccaggugaugcugugcgagcccaccaucaucgagagaaacaucaccgagaucguguaccugaccaacaccaccaucgagaaggagaucugccccaagcccgccgaguacagaaacuggagcaagccccagugcggcaucaccggcuucgcccccuucagcaaggacaacagcaucagacugagcgccggcggcgacaucugggugaccagagagcccuacgugagcugcgaccccgacaagugcuaccaguucgcccugggccagggcaccacccugaacaacgugcacagcaacaacaccgugagagacagaacccccuacagaacccugcugaugaacgagcugggcgugcccuuccaccugggcaccaagcaggugugcaucgccuggagcagcagcagcugccacgacggcaaggccuggcugcacgugugcaucaccggcgacgacaagaacgccaccgccagcuucaucuacaacggcagacugguggacagcguggugagcuggagcaaggagauccugagaacccaggagagcgagugcgugugcaucaacggcaccugcaccguggugaugaccgacggcagcgccagcggcaaggccgacaccaagauccuguucaucgaggagggcagaaucgugcacaccagcacccugagcggcagcgcccagcacguggaggagugcagcugcuaccccagauaccccggcgugagaugcgugugcagagacaacuggaagggcagcaacagacccaucguggacaucaacaucaaggaccacagcaucgugagcagcuacgugugcagcggccuggugggcgacacccccagaaagaacgacagcagcagcagcagccacugccuggaccccaacaacgaggagggcggccacggcgugaagggcugggccuucgacgacggcaacgacguguggaugggcagaaccaucaacgagaccagcagacugggcuacgagaccuucaaggugaucgagggcuggagcaaccccaagagcaagcugcagaucaacagacaggugaucguggacagaggcgacagaagcggcuacagcggcaucuucagcguggagggcaagagcugcaucaacagaugcuucuacguggagcugaucagaggcagaaaggaggagaccgaggugcuguggaccagcaacagcaucgugguguucugcggcaccagcggcaccuacggcaccggcagcuggcccgacggcgccgaccugaaccugaugcccaucuga

SEQ ID NO: 185057 - RNA, 1410 nt, Artificial Sequence; identical to SEQ ID NO: 182206
  derived and/or modified CDS sequence (opt4) from neuraminidase__InfluenzaA__AHL99156

SEQ ID NO: 185058 - RNA, 1410 nt, Artificial Sequence
  derived and/or modified CDS sequence (opt4) from neuraminidase__InfluenzaA__AHL99168
augaaccccaaccagaagaucaucaccaucggcagcgugagccugaccaucagcaccaucugcuucuucaugcagaucgccauccugaucaccaccgugacccugcacuucaagcaguacgaguucaacagcccccccaacaaccaggugaugcugugcgagcccaccaucaucgagagaaacaccaccgagaucguguaccugaccaacaccaccaucgagaaggagaucugccccaagcccgccgaguacagaaacuggagcaagccccagugcggcaucaccggcuucgcccccuucagcaaggacaacagcaucagacugagcgccggcggcgacaucugggugaccagagagcccuacgugagcugcgaccccgacaagugcuaccaguucgcccugggccagggcaccacccugaacaacgugcacagcaacaacaccgugagagacagaacccccuacagaacccugcugaugaacgagcugggcgugcccuuccaccugggcaccaagcaggugugcaucgccuggagcagcagcagcugccacgacggcaaggccuggcugcacgugugcaucaccggcgacgacaagaacgccaccgccagcuucaucuacaacggcagacugguggacagcguggugagcuggagcaaggagauccugagaacccaggagagcgagugcgugugcaucaacggcaccugcaccguggugaugaccgacggcagcgccagcggcaaggccgacaccaagauccuguucaucgaggagggcaagaucgugcacaccagcacccugagcggcagcgcccagcacguggaggagugcagcugcuaccccagauaccccggcgugagaugcgugugcagagacaacuggaagggcagcaacagacccaucguggacaucaacaucaaggaccacagcaucgugagcagcuacgugugcagcggccuggugggcgacacccccagaaagaacgacagcagcagcagcagccacugccuggaccccaacaacgaggagggcggccacggcgugaagggcugggccuucgacgacggcaacgacguguggaugggcagaaccaucaacgagaccagcagacugggcuacgagaccuucaaggugaucgagggcuggagcaaccccaagagcaagcugcagaucaacagacaggugaucguggacagaggcgacagaagcggcuacagcggcaucuucagcguggagggcaagagcugcaucaacagaugcuucuacguggagcugaucagaggcagaaaggaggagaccgaggugcuguggaccagcaacagcaucgugguguucugcggcaccagcggcaccuacggcaccggcagcuggcccgacggcgccgaccugaaccugaugcccaucuga

SEQ ID NO: 185059 - RNA, 1410 nt, Artificial Sequence; identical to SEQ ID NO: 182206
  derived and/or modified CDS sequence (opt4) from neuraminidase__InfluenzaA__AHL99180

SEQ ID NO: 185060 - RNA, 1410 nt, Artificial Sequence; identical to SEQ ID NO: 183070
  derived and/or modified CDS sequence (opt4) from neuraminidase__InfluenzaA__AHL99204

SEQ ID NO: 185061 - RNA, 1410 nt, Artificial Sequence
  derived and/or modified CDS sequence (opt4) from neuraminidase__InfluenzaA__AHL99216
augaaccccaaccagaagaucaucaccaucggcagcgugagccugaccaucagcaccaucugcuucuucaugcagaucgccauccugaucaccaccgugacccugcacuucaagcaguacgaguucaacagcccccccaacaaccaggugaugcugugcgagcccaccaucaucgagagaaacaucaccgagaucguguaccugaccaacaccaccguggagaaggagaucugccccaagcccgccgaguacagaaacuggagcaagccccagugcggcaucaccggcuucgcccccuucagcaaggacaacagcaucagacugagcgccggcggcgacaucugggugaccagagagcccuacgugagcugcgaccccgacaagugcuaccaguucgcccugggccagggcaccacccugaacaacgugcacagcaacaacaccgugagagacagaacccccuacagaacccugcugaugaacgagcugggcgugcccuuccaccugggcaccaagcaggugugcaucgccuggagcagcagcagcugccacgacggcaaggccuggcugcacgugugcaucaccggcgacgacaagaacgccaccgccagcuucaucuacaacggcagacugguggacagcguggugagcuggagcaaggagauccugagaacccaggagagcgagugcgugugcaucaacggcaccugcaccguggugaugaccgacggcagcgccagcggcaaggccgacaccaagauccuguucaucgaggagggcaagaucgugcacaccagcacccugagcggcagcgcccagcacguggaggagugcagcugcuaccccagauaccccggcgugagaugcgugugcagagacaacuggaagggcagcaacagacccaucaucgacaucaacaucaaggaccacagcaucgugagcagcuacgugugcagcggccuggugggcgacacccccagaaagaacgacagcagcagcagcagccacugccuggaccccaacaacgaggagggcggccacggcgugaagggcugggccuucgacgacggcaacgacguguggaugggcagaaccaucaacgagaccagcagacugggcuacgagaccuucaaggugaucgagggcuggagcaaccccaagagcaagcugcagaucaacagacaggugaucguggacagaggcgacagaagcggcuacagcggcaucuucagcguggagggcaagagcugcaucaacagaugcuucuacguggagcugaucagaggcagaaagaaggagaccgaggugcuguggaccagcaacagcaucgugguguucugcggcaccagcggcaccuacggcaccggcagcuggcccgacggcgccgaccugaaccugaugcccaucuga

SEQ ID NO: 185062 - RNA, 1410 nt, Artificial Sequence; identical to SEQ ID NO: 182206
  derived and/or modified CDS sequence (opt4) from neuraminidase__InfluenzaA__AHL99228

SEQ ID NO: 185063 - RNA, 1410 nt, Artificial Sequence; identical to SEQ ID NO: 182206
  derived and/or modified CDS sequence (opt4) from neuraminidase__InfluenzaA__AHL99240

SEQ ID NO: 185064 - RNA, 1410 nt, Artificial Sequence; identical to SEQ ID NO: 182206
  derived and/or modified CDS sequence (opt4) from neuraminidase__InfluenzaA__AHL99252

SEQ ID NO: 185065 - RNA, 1410 nt, Artificial Sequence; identical to SEQ ID NO: 182206
  derived and/or modified CDS sequence (opt4) from neuraminidase__InfluenzaA__AHL99264

SEQ ID NO: 185066 - RNA, 1410 nt, Artificial Sequence; identical to SEQ ID NO: 182206
  derived and/or modified CDS sequence (opt4) from neuraminidase__InfluenzaA__AHL99276

SEQ ID NO: 185067 - RNA, 1410 nt, Artificial Sequence; identical to SEQ ID NO: 183943
  derived and/or modified CDS sequence (opt4) from neuraminidase__InfluenzaA__AHL99288

SEQ ID NO: 185068 - RNA, 1410 nt, Artificial Sequence; identical to SEQ ID NO: 184846
  derived and/or modified CDS sequence (opt4) from neuraminidase__InfluenzaA__AHL99300

SEQ ID NO: 185069 - RNA, 1410 nt, Artificial Sequence; identical to SEQ ID NO: 182206
  derived and/or modified CDS sequence (opt4) from neuraminidase__InfluenzaA__AHL99312

SEQ ID NO: 185070 - RNA, 1410 nt, Artificial Sequence
  derived and/or modified CDS sequence (opt4) from neuraminidase__InfluenzaA__AHL99324
augaaccccaaccagaagaucaucaccaucggcagcgugagccugaccaucagcaccaucugcuucuucaugcagaucgccauccugaucaccaccgugacccugcacuucaagcaguacgaguucaacagcccccccaacaaccaggugauccugugcgagcccaccaucaucgagagaaacaucaccgagaucguguaccugaccaacaccaccaucgagaaggagaucugccccaagcccgccgaguacagaaacuggagcaagccccagugcggcaucaccggcuucgcccccuucagcaaggacaacagcaucagacugagcgccggcggcgacaucugggugaccagagagcccuacgugagcugcgaccccgacaagugcuaccaguucgcccugggccagggcaccacccugaacaacgugcacagcaacaacaccgugagagacagaacccccuacagaacccugcugaugaacgagcugggcgugcccuuccaccugggcaccaagcaggugugcaucgccuggagcagcagcagcugccacgacggcaaggccuggcugcacgugugcaucaccggcgacgacaagaacgccaccgccagcuucaucuacaacggcaagcugguggacagcguggugagcuggagcaaggagauccugagaacccaggagagcgagugcgugugcaucaacggcaccugcaccguggugaugaccgacggcagcgccagcggcaaggccgacaccaagauccuguucaucgaggagggcaagaucgugcacaccagcacccugagcggcagcgcccagcacguggaggagugcagcugcuaccccagauaccccggcgugagaugcgugugcagagacaacuggaagggcagcaacagacccaucguggacaucaacaucaaggaccacagcaucgugagcagcuacgugugcagcggccuggugggcgacacccccagaaagaacgacagcagcagcagcagccacugccuggaccccaacaacgaggagggcggccacggcgugaagggcugggccuucgacgacggcaacgacguguggaugggcagaaccaucaacgagaccagcagacugggcuacgagaccuucaaggugaucgagggcuggagcaaccccaagagcaagcugcagaucaacagacaggugaucguggacagaggcgacagaagcggcuacagcggcaucuucagcguggagggcaagagcugcaucaacagaugcuucuacguggagcugaucagaggcagaaaggaggagaccgaggugcuguggaccagcaacagcaucgugguguucugcggcaccagcggcaccuacggcaccggcagcuggcccgacggcgccgaccugaaccugaugcccaucuga

SEQ ID NO: 185071 - RNA, 1410 nt, Artificial Sequence; identical to SEQ ID NO: 183449
  derived and/or modified CDS sequence (opt4) from neuraminidase__InfluenzaA__AHL99348

SEQ ID NO: 185072 - RNA, 1410 nt, Artificial Sequence; identical to SEQ ID NO: 183449
  derived and/or modified CDS sequence (opt4) from neuraminidase__InfluenzaA__AHL99359

SEQ ID NO: 185073 - RNA, 1410 nt, Artificial Sequence
  derived and/or modified CDS sequence (opt4) from neuraminidase__InfluenzaA__AHL99370
augaaccccaaccagaagaucaucaccaucggcagcgugagccugaccaucaccaccaucugcuucuucaugcagaucgccauccugaucaccaccgugacccugcacuucaagcaguacgaguucaacagcccccccaacaaccagaugaugcugugcgagcccaccaucaucgagagaaacaucaccgagaucguguaccugaccaacaccaccaucgagaaggagaucugccccaagcccgccgaguacagaaacuggagcaagccccagugcggcaucaccggcuucgcccccuucagcaaggacaacagcaucagacugagcgccggcggcgacaucugggugaccagagagcccuacgugagcugcgaccccgacaagugcuaccaguucgcccugggccagggcaccacccugaacaacgugcacagcaacaacaccgugagagacagaacccccuacagaacccugcugaugaacgagcugggcgugcccuuccaccugggcaccaagcaggugugcaucgccuggagcagcagcagcugccacgacggcaaggccuggcugcacgugugcaucaccggcgacgacaagaacgccaccgccagcuucaucuacaacggcagacugguggacagcguggugagcuggagcaaggagauccugagaacccaggagagcgagugcgugugcaucaacggcaccugcaccguggugaugaccgacggcagcgccagcggcaaggccgacaccaagauccuguucaucgaggagggcaagaucgugcacaccagcacccugagcggcagcgcccagcacguggaggagugcagcugcuaccccagauaccccggcgugagaugcgugugcagagacaacuggaagggcagcaacagacccaucguggacaucaacaucaaggaccacagcaucgugagcagcuacgugugcagcggccuggugggcgacacccccagaaagaacgacagcagcagcagcagccacugccuggaccccaacaacgaggagggcggccacggcgugaagggcugggccuucgacgacggcaacgacguguggaugggcagaaccaucaacgagaccagcagacugggcuacgagaccuucaaggugaucgagggcuggagcaaccccaagagcaagcugcagaucaacagacaggugaucguggacagaggcgacagaagcggcuacagcggcaucuucagcguggagggcaagagcugcaucaacagaugcuucuacguggagcugaucagaggcagaaaggaggagaccgaggugcuguggaccagcaacagcaucgugguguucugcggcaccagcggcaccuacggcaccggcagcuggcccgacggcgccgaccugaaccugaugcccaucuga

SEQ ID NO: 185074 - RNA, 1410 nt, Artificial Sequence; identical to SEQ ID NO: 182206
  derived and/or modified CDS sequence (opt4) from neuraminidase__InfluenzaA__AHL99393

SEQ ID NO: 185075 - RNA, 1410 nt, Artificial Sequence; identical to SEQ ID NO: 182206
  derived and/or modified CDS sequence (opt4) from neuraminidase__InfluenzaA__AHL99417

SEQ ID NO: 185076 - RNA, 1410 nt, Artificial Sequence; identical to SEQ ID NO: 182206
  derived and/or modified CDS sequence (opt4) from neuraminidase__InfluenzaA__AHL99429

SEQ ID NO: 185077 - RNA, 1410 nt, Artificial Sequence; identical to SEQ ID NO: 182206
  derived and/or modified CDS sequence (opt4) from neuraminidase__InfluenzaA__AHL99441

SEQ ID NO: 185078 - RNA, 1410 nt, Artificial Sequence; identical to SEQ ID NO: 182206
  derived and/or modified CDS sequence (opt4) from neuraminidase__InfluenzaA__AHL99453

SEQ ID NO: 185079 - RNA, 1410 nt, Artificial Sequence; identical to SEQ ID NO: 182206
  derived and/or modified CDS sequence (opt4) from neuraminidase__InfluenzaA__AHL99477

SEQ ID NO: 185080 - RNA, 1410 nt, Artificial Sequence; identical to SEQ ID NO: 184846
  derived and/or modified CDS sequence (opt4) from neuraminidase__InfluenzaA__AHL99489

SEQ ID NO: 185081 - RNA, 1410 nt, Artificial Sequence
  derived and/or modified CDS sequence (opt4) from neuraminidase__InfluenzaA__AHL99501
augaaccccaaccagaagaucaucaccaucggcagcgugagccugaccaucagcaccaucugcuucuucaugcagaucgccauccugaucaccaccgugacccugcacuucaagcaguacgaguucaacagcccccccaacaaccaggugaugcugugcgagcccaccaucaucgagagaaacaucaccgagaucguguaccugaccaacaccaccaucgagaaggagaucugccccaagcccgccgaguacagaaacuggagcaagccccagugcggcaucaccggcuucgcccccuucagcaaggacaacagcaucagacugagcgccggcggcgacaucugggugaccagagagcccuacgugagcugcgaccccgacaagugcuaccaguucgcccugggccagggcaccacccugaacaacgugcacagcaacaacaccgugagagacagaacccccuacagaacccugcugaugaacgagcugggcgugcccuuccaccugggcaccaagcaggugugcaucgccuggagcagcagcagcugccacgacggcaaggccuggcugcacgugugcaucaccggcgacgacaagaacgccaccgccagcuucaucuacaacggcagacugguggacagcguggugagcuggagcaaggagauccugagaacccaggagagcgagugcgugugcaucaacggcaccugcaccguggugaugaccgacggcagcgccagcggcaaggccgacaccaagauccuguucaucgaggagggcaagaucgugcacaccagcacccugagcggcagcgcccagcacguggaggagugcagcugcuaccccagauaccccggcgugagaugcgugugcagagacaacuggaagggcagcaacagacccaucguggacaucaacaucaaggaccacagcaccgugagcagcuacgugugcagcggccuggugggcgacacccccagaaagaacgacagcagcagcagcagccacugccuggaccccaacaacgaggagggcggccacggcgugaagggcugggccuucgacgacggcaacgacguguggaugggcagaaccaucaacgagaccagcagacugggcuacgagaccuucaaggugaucgagggcuggagcaaccccaagagcaagcugcagaucaacagacaggugaucguggacagaggcgacagaagcggcuacagcggcaucuucagcguggagggcaagagcugcaucaacagaugcuucuacguggagcugaucagaggcagaaaggaggagaccgaggugcuguggaccagcaacagcaucgugguguucugcggcaccagcggcaccuacggcaccggcagcuggcccgacggcgccgaccugaaccugaugcccaucuga

SEQ ID NO: 185082 - RNA, 1410 nt, Artificial Sequence; identical to SEQ ID NO: 182206
  derived and/or modified CDS sequence (opt4) from neuraminidase__InfluenzaA__AHL99525

SEQ ID NO: 185083 - RNA, 1410 nt, Artificial Sequence
  derived and/or modified CDS sequence (opt4) from neuraminidase__InfluenzaA__AHL99537
augaaccccaaccagaagaucaucaccaucggcagcgugagccugaccaucagcaccaucugcuucuucaugcagaucgccauccugaucaccaccgugacccugcacuucaagcaguacgaguucaacagcccccccaacaaccaggugaugcugugcgagcccaccaucaucgagagaaacaucaccgagaucguguaccugaccaacaccaccaucgagaaggagaucugccccaagcccgccgaguacagaaacuggagcaagccccagugcggcaucaccggcuucgcccccuucagcaaggacaacagcaucagacugagcgccggcggcgacaucugggugaccagagagcccuacgugagcugcgaccccgacaagugcuaccaguucgcccugggccagggcaccacccugaacaacgugcacagcaacaacaccgugagagacagaaccagcuacagaacccugcugaugaacgagcugggcgugcccuuccaccugggcaccaagcaggugugcaucgccuggagcagcagcagcugccacgacggcaaggccuggcugcacgugugcaucaccggcgacgacaagaacgccaccgccagcuucaucuacaacggcagacugguggacagcguggugagcuggagcaaggagauccugagaacccaggagagcgagugcgugugcaucaacggcaccugcaccguggugaugaccgacggcagcgccagcggcaaggccgacaccaagauccuguucaucgaggagggcaagaucgugcacaccagcacccugagcggcagcgcccagcacguggaggagugcagcugcuaccccagauaccccggcgugagaugcgugugcagagacaacuggaagggcagcaacagacccaucguggacaucaacaucaaggaccacagcaucgugagcagcuacgugugcagcggccuggugggcgacacccccagaaagaacgacagcagcagcagcagccacugccuggaccccaacaacgaggagggcggccacggcgugaagggcugggccuucgacgacggcaacgacguguggaugggcagaaccaucaacgagaccagcagacugggcuacgagaccuucaaggugaucgagggcuggagcaaccccaagagcaagcugcagaucaacagacaggugaucguggacagaggcgacagaagcggcuacagcggcaucuucagcguggagggcaagagcugcaucaacagaugcuucuacguggagcugaucagaggcagaaaggaggagaccgaggugcuguggaccagcaacagcaucgugguguucugcggcaccagcggcaccuacggcaccggcagcuggcccgacggcgccgaccugaaccugaugcccaucuga

SEQ ID NO: 185084 - RNA, 1410 nt, Artificial Sequence; identical to SEQ ID NO: 183943
  derived and/or modified CDS sequence (opt4) from neuraminidase__InfluenzaA__AHL99549

SEQ ID NO: 185085 - RNA, 1410 nt, Artificial Sequence; identical to SEQ ID NO: 182206
  derived and/or modified CDS sequence (opt4) from neuraminidase__InfluenzaA__AHL99561

SEQ ID NO: 185086 - RNA, 1410 nt, Artificial Sequence
  derived and/or modified CDS sequence (opt4) from neuraminidase__InfluenzaA__AHL99573
augaaccccaaccagaagaucaucaccaucggcagcgugagccugaccaucagcaccaucugcuucuucaugcagaucgccauccugaucaccaccgugacccugcacuucaagcaguacgaguucaacagcccccccaacaaccaggugaugcugugcgagcccaccaucaucgagagaaacaucaccgagaucguguaccugaccaacaccaccggcgagaaggagaucugccccaagcccgccgaguacagaaacuggagcaagccccagugcggcaucaccggcuucgcccccuucagcaaggacaacagcaucagacugagcgccggcggcgacaucugggugaccagagagcccuacgugagcugcgaccccgacaagugcuaccaguucgcccugggccagggcaccacccugaacaacgugcacagcaacaacaccgugagagacagaacccccuacagaacccugcugaugaacgagcugggcgugcccuuccaccugggcaccaagcaggugugcaucgccuggagcagcagcagcugccacgacggcaaggccuggcugcacgugugcaucaccggcgacgacaagaacgccaccgccagcuucaucuacaacggcagacugguggacagcguggugagcuggagcaaggagauccugagaacccaggagagcgagugcgugugcaucaacggcaccugcaccguggugaugaccgacggcagcgccagcggcaaggccgacaccaagauccuguucaucgaggagggcaagaucgugcacaccagcacccugagcggcagcgcccagcacguggaggagugcagcugcuaccccagauaccccggcgugagaugcgugugcagagacaacuggaagggcagcaacagacccaucaucgacaucaacaucaaggaccacagcaucgugagcagcuacgugugcagcggccuggugggcgacacccccagaaagaacgacagcagcagcagcagccacugccuggaccccaacaacgaggagggcggccacggcgugaagggcugggccuucgacgacggcaacgacguguggaugggcagaaccaucaacgagaccagcagacugggcuacgagaccuucaaggugaucgagggcuggagcaaccccaagagcaagcugcagaucaacagacaggugaucguggacaagggcgacagaagcggcuacagcggcaucuucagcguggagggcaagagcugcaucaacagaugcuucuacguggagcugaucagaggcagaaaggaggagaccgaggugcuguggaccagcaacagcaucgugguguucugcggcaccagcggcaccuacggcaccggcagcuggcccgacggcgccgaccugaaccugaugcccaucuga

SEQ ID NO: 185087 - RNA, 1410 nt, Artificial Sequence
  derived and/or modified CDS sequence (opt4) from neuraminidase__InfluenzaA__AHL99585
augaaccccaaccagaagaucaucaccaucggcagcgugagccugaccaucagcaccaucugcuucuucaugcagaucgccauccugaucaccaccgugacccugcacuucaagcaguacgaguucaacagcccccccaacaaccaggugaugcugugcgagcccaccaucaucgagagaaacaucaccgagaucguguaccugaccaacaccaccaucgagaaggagaucugccccaagcccgccgaguacagaaacuggagcaagccccagugcggcaucaccggcuucgcccccuucagcaaggacaacagcaucagacugagcgccggcggcgacaucugggugaccagagagcccuacgugagcugcgaccccgacaagugcuaccaguucgcccugggccagggcaccacccugaacaacgugcacagcaacaacaccgccagagacagaacccccuacagaacccugcugaugaacgagcugggcgugcccuuccaccugggcaccaagcaggugugcaucgccuggagcagcagcagcugccacgacggcaaggccuggcugcacgugugcaucaccggcgacgacaagaacgccaccgccagcuucaucuacaacggcagacugguggacagcguggugagcuggagcaaggagauccugagaacccaggagagcgagugcgugugcaucaacggcaccugcaccguggugaugaccgacggcagcgccagcggcaaggccgacaccaagauccuguucaucgaggagggcaagaucgugcacaccagcacccugagcggcagcgcccagcacguggaggagugcagcugcuaccccagauaccccggcgugagaugcgugugcagagacaacuggaagggcagcaacagacccaucguggacaucaacaucaaggaccacagcaucgugagcagcuacgugugcagcggccuggugggcgacacccccagaaagaacgacagcagcagcagcagccacugccugaaccccaacaacgaggagggcggccacggcgugaagggcugggccuucgacgacggcaacgacguguggaugggcagaaccaucaacgagaccagcagacugggcuacgagaccuucaaggugaucgagggcuggagcaaccccaagagcaagcugcagaucaacagacaggugaucguggacagaggcgacagaagcggcuacagcggcaucuucagcguggagggcaagagcugcaucaacagaugcuucuacguggagcugaucagaggcagaaaggaggagaccgaggugcuguggaccagcaacagcaucgugguguucugcggcaccagcggcaccuacggcaccggcagcuggcccgacggcgccgaccugaaccugaugcccaucuga

SEQ ID NO: 185088 - RNA, 1410 nt, Artificial Sequence
  derived and/or modified CDS sequence (opt4) from neuraminidase__InfluenzaA__AHL99597
augaaccccaaccagaagaucaucaccaucggcagcgugugcaugaccaucggcauggccaaccugauccugcagaucggcaacaucaucagcaucuggaucagccacagcauccaggugggcaaccagagccagaucgagaccugcaaccagagcgugaucaccuacgagaacaacaccugggugaaccagaccuacgugaacaucagcaacaccaacuucgccgugggccagagcguggugagcgugaagcuggccggcaacagcagccugugccccgugagcggcugggccaucuacagcaaggacaacagcgugagaaucggcagcaagggcgacguguucgugaucagagagcccuucaucagcugcagcccccuggagugcagaaccuucuuccugacccagggcgcccugcugaacgacaagcacagcaacggcaccaucaaggacagaagccccuacagaacccugaugagcugccccaucggcgaggugcccagccccuacaacagcagauucgagagcguggccuggagcgccagcgccugccacgacggcaucaacuggcugaccaucggcaucagcggccccgacagcggcgccguggccgugcugaaguacaacggcaucaucaccgacaccaucaagagcuggagaaacgacauccugagaacccaggagagcgagugcgccugcgugaacggcagcugcuucaccaucaugaccgacggccccagcgacggccaggccagcuacaagaucuucagaaucgagaagggcaagaucgugaagagcguggagaugaacgcccccaacuaccacuacgaggagugcagcugcuaccccgacagcagcgagaucaccugcgugugcagagacaacuggcacggcagcaacagacccugggugagcuucaaccagaaccuggaguaccagaucggcuacaucugcagcggcaucuucggcgacaaccccagacccaacgacaagaccggcagcugcggccccgugagcagcaacggcgccaacggcgugaagggcuucagcuucaaguacggcaacggcguguggaucggcagaaccaagagcaucagcagcagaaagggcuucgagaugaucugggaccccaacggcuggaccggcaccgacaacaacuucagcaucaagcaggacaucgugggcaucaacgaguggagcggcuacagcggcagcuucgugcagcaccccgagcugaccggccuggacugcaucagacccugcuucuggguggagcugaucagaggcagacccaaggagaacaccaucuggaccagcggcagcagcaucagcuucugcggcgugaacagcgacaccgugggcuggagcuggcccgacggcgccgagcugcccuucaccaucgacaaguga

SEQ ID NO: 185089 - RNA, 1410 nt, Artificial Sequence
  derived and/or modified CDS sequence (opt4) from neuraminidase__InfluenzaA__AHL99608
augaaccccaaccagaagaucaucaccaucggcagcgugagccugaccaucagcaccaucugcguguucaugcagaucgccauccugaucaccaccgugacccugcacuucaagcaguacgaguucaacagcccccccaacaaccaggugaugcugugcgagcccaccaucaucgagagaaacaucaccgagaucguguaccugaccaacaccaccaucgagaaggagaucugccccaagcccgccgaguacagaaacuggagcaagccccagugcggcaucaccggcuucgcccccuucagcaaggacaacagcaucagacugagcgccggcggcgacaucugggugaccagagagcccuacgugagcugcgaccccgacaagugcuaccaguucgcccugggccagggcaccacccugaacaacgugcacagcaacaacaccgugagagacagaacccccuacagaacccugcugaugaacgagcugggcgugcccuuccaccugggcaccaagcaggugugcaucgccuggagcagcagcagcugccacgacggcaaggccuggcugcacgugugcaucaccggcgacgacaagaacgccaccgccagcuucaucuacaacggcagacugguggacagcguggugagcuggagcaaggagauccugagaacccaggagagcgagugcgugugcaucaacggcaccugcaccguggugaugaccgacggcagcgccagcggcaaggccgacaccaagauccuguucaucgaggagggcaagaucgugcacaccagcacccugagcggcagcgcccagcacguggaggagugcagcugcuaccccagauaccccggcgugagaugcgugugcagagacaacuggaagggcagcaacagacccaucguggacaucaacaucaaggaccacagcaucgugagcagcuacgugugcagcggccuggugggcgacacccccagaaagaacgacagcagcagcagcagccacugccuggaccccaacaacgaggagggcggccacggcgugaagggcugggccuucgacgacggcaacgacguguggaugggcagaaccaucaacgagaccagcagacugggcuacgagaccuucaaggugaucgagggcuggagcaaccccaagagcaagcugcagaucaacagacaggugaucguggacagaggcgacagaagcggcuacagcggcaucuucagcguggagggcaagagcugcaucaacagaugcuucuacguggagcugaucagaggcagaaaggaggagaccgaggugcuguggaccagcaacagcaucgugguguucugcggcaccagcggcaccuacggcaccggcagcuggcccgacggcgccgaccugaaccugaugcccaucuga

SEQ ID NO: 185090 - RNA, 1410 nt, Artificial Sequence
  derived and/or modified CDS sequence (opt4) from neuraminidase__InfluenzaA__AHL99620
augaaccccaaccagaagaucaucaccaucggcagcgugagccugaccaucagcaccaucugcuucuucaugcagaucgccauccugaucaccaccgugacccugcacuucaagcaguacgaguucaacagcccccccaacaaccaggugaugcugugcgagcccaccaucaucgagagaaacaucaccgagaucguguaccugaccaacaccaccaucgagaaggagaucugccccaagcccgccgaguacagaaacuggagcaagccccagugcggcaucaccggcuucgcccccuucagcaaggacaacagcaucagacugagcgccggcggcgacaucugggugaccagagagcccuacgugagcugcgaccccgacaagugcuaccaguucgcccugggccagggcaccacccugaacaacgugcacagcaacaacaccgugagagacagaacccccuacagaacccugcugaugaacgagcugggcgugcccuuccaccugggcaccaagcaggugugcaucgccuggagcagcagcagcugccacgacggcaaggccuggcugcacgugugcaucaccggcgacgacaagaacgccaccgccagcuucaucuacaacggcaagcugguggacagcguggugagcuggagcaaggagauccugagaacccaggagagcgagugcgugugcaucaacggcaccugcaccguggugaugaccgacggcagcgccagcggcaaggccgacaccaagauccuguucaucgaggagggcaagaucgugcacaccagcacccugagcggcagcgcccagcacguggaggagugcagcugcuaccccagauaccccggcgugagaugcgugugcagagacaacuggaagggcagcaacagacccaucguggacaucaacaucaaggaccacagcaucgugagcagcuacgugugcagcggccuggugggcgacacccccagaaagaacgacagcagcagcagcagccacugccuggaccccaacaacgaggagggcggccacggcgugaagggcugggccuucgacgacggcaacgacguguggaugggcagaaccaucaacgagaccagcagacugggcuacgagaccuucaaggugaucgagggcuggagcaaccccaagagcaagcugcagaucaacagacaggugaucguggacagaggcgacagaagcggcuacagcggcaucuucagcguggagggcaagagcugcaucaacagaugcuucuacguggagcugaucagaggcagaaaggaggagaccgaggugcuguggaccagcaacagcaucgugguguucugcggcaccagcggcaccuacggcaccggcagcuggcccgacggcgccgaccugaaccugaugcccaucuga

SEQ ID NO: 185091 - RNA, 1410 nt, Artificial Sequence
  derived and/or modified CDS sequence (opt4) from neuraminidase__InfluenzaA__AHL99632
augaaccccaaccagaagaucaucaccaucggcagcgugagccugaccaucagcaccaucugcuucuucaugcagaucgccauccugaucaccaccgugacccugcacuucaagcaguacgaguucaacagcccccccaacaaccaggugaugcugugcgagcccaccaccaucgagagaaacaucaccgagaucguguaccugaccaacaccaccaucgagaaggagaucugccccaagcccgccgaguacagaaacuggagcaagccccagugcggcaucaccggcuucgcccccuucagcaaggacaacagcaucagacugagcgccggcggcgacaucugggugaccagagagcccuacgugagcugcgaccccgacaagugcuaccaguucgcccugggccagggcaccacccugaacaacgugcacagcaacaacaccgugagagacagaacccccuacagaacccugcugaugaacgagcugggcgugcccuuccaccugggcaccaagcaggugugcaucgccuggagcagcagcagcugccacgacggcaaggccuggcugcacgugugcaucaccggcgacgacaagaacgccaccgccagcuucaucuacaacggcagacugguggacagcguggugagcuggagcaaggagauccugagaacccaggagagcgagugcgugugcaucaacggcaccugcaccguggugaugaccgacggcagcgccagcggcaaggccgacaccaagauccuguucaucgaggagggcaagaucgugcacaccagcacccugagcggcagcgcccagcacguggaggagugcagcugcuaccccagauaccccggcgugagaugcgugugcagagacaacuggaagggcagcaacagacccaucguggacaucaacaucaaggaccacagcaucgugagcagcuacgugugcagcggccuggugggcgacacccccagaaagaacgacagcagcagcagcagccacugccuggaccccaacaacgaggagggcggccacggcgugaagggcugggccuucgacgacggcaacgacguguggaugggcagaaccaucaacgagaccagcagacugggcuacgagaccuucaaggugaucgagggcuggagcaaccccaagagcaagcugcagaucaacagacaggugaucguggacagaggcgacagaagcggcuacagcggcaucuucagcguggagggcaagagcugcaucaacagaugcuucuacguggagcugaucagaggcagaaaggaggagaccgaggugcuguggaccagcaacagcaucgugguguucugcggcaccagcggcaccuacggcaccggcagcuggcccgacggcgccgaccugaaccugaugcccaucuga

SEQ ID NO: 185092 - RNA, 1410 nt, Artificial Sequence; identical to SEQ ID NO: 184881
  derived and/or modified CDS sequence (opt4) from neuraminidase__InfluenzaA__AHL99644

SEQ ID NO: 185093 - RNA, 1410 nt, Artificial Sequence
  derived and/or modified CDS sequence (opt4) from neuraminidase__InfluenzaA__AHL99668
augaaccccaaccagaagaucaucaccaucggcagcgugagccugaccaucagcaccaucugcuucuucaugcagaucgccauccugaucaccaccgugacccugcacuucaagcaguacgaguucaacagcccccccaacaaccaggugaugcugugcgagcccaccaucaucgagagaaacaucaccgagaucguguaccugaccaacaccaccguggagaaggagaucugccccaagcccgccgaguacagaaacuggagcaagccccagugcggcaucaccggcuucgcccccuucagcaaggacaacagcaucagacugagcgccggcggcgacaucugggugaccagagagcccuacgugagcugcgaccccgacaagugcuaccaguucgcccugggccagggcaccacccugaacaacgugcacagcaacaacaccgugagagacagaacccccuacagaacccugcugaugaacgagcugggcgugcccuuccaccugggcaccaagcaggugugcaucgccuggagcagcagcagcugccacgacggcaaggccuggcugcacgugugcaucaccggcgacgacaagaacgccaccgccagcuucaucuacaacggcagacugguggacagcguggugagcuggagcaaggagauccugagaacccaggagagcgagugcgugugcaucaacggcaccugcaccguggugaugaccgacggcagcgccagcggcaaggccgacaccaagauccuguucaucgaggagggcaagaucgugcacaccagcacccugagcggcagcgcccagcacguggaggagugcagcugcuaccccagauaccccggcgugagaugcgugugcagagacaacuggaagggcagcaacagacccaucaucgacaucaacaucaaggaccacagcaucgugagcagcuacgugugcagcggccuggugggcgacacccccagaaagaacgacagcagcagcagcagccacugccuggaccccaacaacgaggagggcggccacggcgugaagggcugggccuucgacgacggcaacgacguguggaugggcagaaccaucaacgagaccagcagacugggcuacgagaccuucaaggugaucgagggcuggagcaaccccaagagcaagcugcagaucaacagacaggugaucguggacagaggcgacagaagcggcuacagcggcaucuucagcguggagggcaagagcugcaucaacagaugcuucuacguggagcugaucagaggcagaaaggaggagaccgaggugcuguggaccagcaacagcaucgugguguucugcggcaccagcggcaccuacggcaccggcagcuggcccgacggcgccgaccugaaccugaugcccaucuga

SEQ ID NO: 185094 - RNA, 1410 nt, Artificial Sequence; identical to SEQ ID NO: 182206
  derived and/or modified CDS sequence (opt4) from neuraminidase__InfluenzaA__AHL99680

SEQ ID NO: 185095 - RNA, 1410 nt, Artificial Sequence
  derived and/or modified CDS sequence (opt4) from neuraminidase__InfluenzaA__AHL99692
augaaccccaaccagaagaucaucaccaucggcagcgugagccugaccaucagcaccaccugcuucuucaugcagaucgccauccugaucaccaccgugacccugcacuucaagcaguacgaguucaacagcccccccaacaaccaggugaugcugugcgagcccaccaucaucgagagaaacaucaccgagaucguguaccugaccaacaccaccaucgagaaggagaucugccccaagcccgccgaguacagaaacuggagcaagccccagugcggcaucaccggcuucgcccccuucagcaaggacaacagcaucagacugagcgccggcggcgacaucugggugaccagagagcccuacgugagcugcgaccccgacaagugcuaccaguucgcccugggccagggcaccacccugaacaacgugcacagcaacaacaccgugagagacagaacccccuacagaacccugcugaugaacgagcugggcgugcccuuccaccugggcaccaagcaggugugcaucgccuggagcagcagcagcugccacgacggcaaggccuggcugcacgugugcaucaccggcgacgacaagaacgccaccgccagcuucaucuacaacggcagacugguggacagcguggugagcuggagcaaggagauccugagaacccaggagagcgagugcgugugcaucaacggcaccugcaccguggugaugaccgacggcagcgccagcggcaaggccgacaccaagauccuguucaucgaggagggcaagaucgugcacaccagcacccugagcggcagcgcccagcacguggaggagugcagcugcuaccccagauaccccggcgugagaugcgugugcagagacaacuggaagggcagcaacagacccaucguggacaucaacaucaaggaccacagcaucgugagcagcuacgugugcagcggccuggugggcgacacccccagaaagaacgacagcagcagcagcagccacugccuggaccccaacaacgaggagggcggccacggcgugaagggcugggccuucgacgacggcaacgacguguggaugggcagaaccaucaacgagaccagcagacugggcuacgagaccuucaaggugaucgagggcuggagcaaccccaagagcaagcugcagaucaacagacaggugaucguggacagaggcgacagaagcggcuacagcggcaucuucagcguggagggcaagagcugcaucaacagaugcuucuacguggagcugaucagaggcagaaaggaggagaccgaggugcuguggaccagcaacagcaucgugguguucugcggcaccagcggcaccuacggcaccggcagcuggcccgacggcgccgaccugaaccugaugcccaucuga

SEQ ID NO: 185096 - RNA, 1410 nt, Artificial Sequence; identical to SEQ ID NO: 182206
  derived and/or modified CDS sequence (opt4) from neuraminidase__InfluenzaA__AHL99704

SEQ ID NO: 185097 - RNA, 1410 nt, Artificial Sequence; identical to SEQ ID NO: 182206
  derived and/or modified CDS sequence (opt4) from neuraminidase__InfluenzaA__AHL99716

SEQ ID NO: 185098 - RNA, 1410 nt, Artificial Sequence; identical to SEQ ID NO: 185088
  derived and/or modified CDS sequence (opt4) from neuraminidase__InfluenzaA__AHL99740

SEQ ID NO: 185099 - RNA, 1410 nt, Artificial Sequence
  derived and/or modified CDS sequence (opt4) from neuraminidase__InfluenzaA__AHL99751
augaaccccaaccagaagaucaucaccaucggcagcgugagccugaccaucagcaccaucugcuucuucaugcagaucgccauccugaucaccaccgugacccugcacuucaagcaguacgaguucaacagcccccccaacaaccaggugaugcugugcgagcccaccaucaucgagagaaacaucaccgagaucguguaccugaccaacaccaccguggagaaggagaucugccccaagcccgccgaguacagaaacuggagcaagccccagugcggcaucaccggcuucgcccccuucagcaaggacaacagcaucagacugagcgccggcggcgacaucugggugaccagagagcccuacgugagcugcgaccccgacaagugcuaccaguucgcccugggccagggcaccacccugaacaacgugcacagcaacaacaccgccagagacagaacccccuacagaacccugcugaugaacgagcugggcgugcccuuccaccugggcaccaagcaggugugcaucgccuggagcagcagcagcugccacgacggcaaggccuggcugcacgugugcaucaccggcgacgacaagaacgccaccgccagcuucaucuacaacggcagacugguggacagcguggugagcuggagcaaggagauccugagaacccaggagagcgagugcgugugcaucaacggcaccugcaccguggugaugaccgacggcagcgccagcggcaaggccgacaccaagauccuguucaucgaggagggcaagaucgugcacaccagcacccugagcggcagcgcccagcacguggaggagugcagcugcuaccccagauaccccggcgugagaugcgugugcagagacaacuggaagggcagcaacagacccaucguggacaucaacaucaaggaccacagcaucgugagcagcuacgugugcagcggccuggugggcgacacccccagaaagaacgacagcagcagcagcagccacugccugaaccccaacaacgaggagggcggccacggcgugaagggcugggccuucgacgacggcaacgacguguggaugggcagaaccaucaacgagaccagcagacugggcuacgagaccuucaaggugaucgagggcuggagcaaccccaagagcaagcugcagaucaacagacaggugaucguggacagaggcgacagaagcggcuacagcggcaucuucagcguggagggcaagagcugcaucaacagaugcuucuacguggagcugaucagaggcagaaaggaggagaccgaggugcuguggaccagcaacagcaucgugguguucugcggcaccagcggcaccuacggcaccggcagcuggcccgacggcgccgaccugaaccugaugcccaucuga

SEQ ID NO: 185100 - RNA, 1410 nt, Artificial Sequence
  derived and/or modified CDS sequence (opt4) from neuraminidase__InfluenzaA__AHL99763
augaaccccaaccagaagaucaucaccaucggcagcgugagccugaccaucagcaccaucugcuucuucaugcagaucgccauccugaucaccaccgugacccugcacuucaagcaguacgaguucaacagcccccccaacaaccaggugaugcugugcgagcccaccaucaucgagagaaacaucaccgagaucguguaccugaccaacaccaccaucgagaaggagaucugccccaagcccgccgaguacagaaacuggagcaagccccagugcggcaucaccggcuucgcccccuucagcaaggacaacagcaucagacugagcgccggcggcgacaucugggugaccagagagcccuacgugagcugcgaccccgacaagugcuaccaguucgcccugggccagggcaccacccugaacaacgugcacagcaacaacaccgugagagacagaacccccuacagaacccugcugaugaacgagcugggcgugcccuuccaccugggcaccaagcaggugugcaucgccuggagcagcagcagcugccacgacggcaaggccuggcugcacgugugcaucaccggcgacgacaagaacgccaccgccagcuucaucuacaacggcagacugguggacagcguggugagcuggagcaaggagauccugagaacccaggagagcgagugcgugugcaucaacggcaccugcaccguggugaugaccgacggcagcgccagcggcaaggccgacaccaagauccuguucaucgaggagggcaagaucgugcacaccagcacccugagcggcagcgcccagcacguggaggagugcagcugcuaccccagauaccccggcgugagaugcgugugcagagacaacuggaagggcagcaacagacccaucguggacaucaacaucaaggaccacagcaucgugagcagcuacgugugcagcggccuggugggcgacacccccagaaagaacgacagcagcagcagcagccacugccuggaccccaacaacgaggagggcggccacggcgugaagggcugggccuucgacgacggcaacgacguguggaugggcagaaccaucaacgagaccagcagacugggcuacgagaccuucaaggugaucgagggcuggagcaaccccaagagcaagcugcagaugaacagacaggugaucguggacagaggcgacagaagcggcuacagcggcaucuucagcguggagggcaagagcugcaucaacagaugcuucuacguggagcugaucagaggcagaaaggaggagaccgaggugcuguggaccagcaacagcaucgugguguucugcggcaccagcggcaccuacggcaccggcagcuggcccgacggcgccgaccugaaccugaugcccaucuga

SEQ ID NO: 185101 - RNA, 1410 nt, Artificial Sequence; identical to SEQ ID NO: 182206
  derived and/or modified CDS sequence (opt4) from neuraminidase__InfluenzaA__AHL99775

SEQ ID NO: 185102 - RNA, 1410 nt, Artificial Sequence
  derived and/or modified CDS sequence (opt4) from neuraminidase__InfluenzaA__AHL99787
augaaccccaaccagaagaucaucaccaucggcagcgugagccugaccaucagcaccaucugcuucuucaugcagaucgccauccugaucaccaccgugacccugcacuucaagcaguacgaguucaacagcccccccaacaaccaggugaugcugugcgagcccaccaucaucgagagaaacaucaccgagaucguguaccugaccaacaccaccaucgagaaggagaucugccccaagcccgccgaguacagaaacuggagcaagccccagugcggcaucaccggcuucgcccccuucagcaaggacaacagcaucagacugagcgccggcggcgacaucugggugaccagagagcccuacgugagcugcgaccccgacaagugcuaccaguucgcccugggccagggcaccacccugaacaacgugcacagcaacaacaccgugagagacagaacccccuacagaacccugcugaugaacgagcugggcgugcccuuccaccugggcaccaagcaggugugcaucgccuggagcagcagcagcugccacgacggcaaggccuggcugcacgugugcaucaccggcgacgacaagaacgccaccgccagcuucaucuacaacggcagacugguggacagcguggugagcuggagcaaggagauccugagaacccaggagagcgagugcgugugcaucaacggcaccugcaccguggugaugaccgacggcagcgccagcggcaaggccgacaccaagauccuguucaucgaggagggcaagaucgugcacaccagcacccugagcggcagcgcccagcacguggaggagugcagcugcuaccccagauaccccggcgugagaugcgugugcagagacaacuggaagggcagcaacagacccaucguggacaucaacaucaaggaccacagcaucgugagcagcuacgugugcagcggccuggugggcgacacccccagaaagaacgacagcagcagcagcagccacugccuggaccccaacaacgaggagggcggccacggcgugaagggcugggccuucgacgacggcaacgacguguggaugggcagaaccaucaacgagaccagcagacugggcuacgagaccuucaaggugaucgagggcuggagcaaccccgagagcaagcugcagaucaacagacaggugaucguggacagaggcgacagaagcggcuacagcggcaucuucagcguggagggcaagagcugcaucaacagaugcuucuacguggagcugaucagaggcagaaaggaggagaccgaggugcuguggaccagcaacagcaucgugguguucugcggcaccagcggcaccuacggcaccggcagcuggcccgacggcgccgaccugaaccugaugcccaucuga

SEQ ID NO: 185103 - RNA, 1410 nt, Artificial Sequence
  derived and/or modified CDS sequence (opt4) from neuraminidase__InfluenzaA__AHL99799
augaaccccaaccagaagaucaucaccaucggcagcgugagccugaccaucagcaccaucugcuucuucaugcagaucgccauccugaucaccaccgugacccugcacuucaagcaguacgaguucaacagcccccccaacaaccaggugaugcugugcgagcccaccaucaucgagagaaacaucaccgagaucguguaccugaccaacaccaccaucgagaaggagaucugccccaagcccgccgaguacagaaacuggagcaagccccagugcggcaucaccggcuucgcccccuucagcaaggacaacagcaucagacugagcgccggcggcgacaucugggugaccagagagcccuacgugagcugcgaccccgacaagugcuaccaguucgcccugggccagggcaccacccugaacaacgugcacagcaacaacaccgugagagacagaacccccuacagaacccugcugaugaacgagcugggcgugcccuuccaccugggcaccaagcaggugugcaucgccuggagcagcagcagcugccacgacggcaaggccuggcugcacgugugcaucaccggcgacgacaagaacgccaccgccagcuucaucuacaacggcagacugguggacagcguggugagcuggagcaaggagauccugagaacccaggagagcgagugcgugugcaucaacggcaccugcaccguggugaugaccgacggcagcgccagcggcaaggccgacaccaagauccuguucaucgaggagggcaagaucgugcacaccagcacccugagcggcagcgcccagcacguggaggagugcagcugcuaccccagauaccccggcgugagaugcaucugcagagacaacuggaagggcagcaacagacccaucguggacaucaacaucaaggaccacagcaucgugagcagcuacgugugcagcggccuggugggcgacacccccagaaagaacgacagcagcagcagcagccacugccugggccccaacaacgaggagggcggccacggcgugaagggcugggccuucgacgacggcaacgacguguggaugggcagaaccaucaacgagaccagcagacugggcuacgagaccuucaaggugaucgagggcuggagcaaccccaagagcaagcugcagaucaacagacaggugaucguggacagaggcgacagaagcggcuacagcggcaucuucagcguggagggcaagagcugcaucaacagaugcuucuacguggagcugaucagaggcagaaaggaggagaccgaggugcuguggaccagcaacagcaucgugguguucugcggcaccagcggcaccuacggcaccggcagcuggcccgacggcgccgaccugaaccugaugcccaucuga

SEQ ID NO: 185104 - RNA, 1410 nt, Artificial Sequence; identical to SEQ ID NO: 182206
  derived and/or modified CDS sequence (opt4) from neuraminidase__InfluenzaA__AHL99811

SEQ ID NO: 185105 - RNA, 1410 nt, Artificial Sequence
  derived and/or modified CDS sequence (opt4) from neuraminidase__InfluenzaA__AHL99823
augaaccccaaccagaagaucaucaccaucggcagcgugagccugaccaucagcaccaucugcuucuucaugcagaucgccauccugaucaccaccgugacccugcacuucaagcaguacgaguucaacagcccccccaacaaccaggugaugcugugcgagcccaccaucaucgagagaaacaucaccgagaucguguaccugaccaacaccaccaucgagaaggagaucugccccaagcccgccgaguacagaaacuggagcaagccccagugcggcaucaccggcuucgcccccuucagcaaggacaacagcaucagacugagcgccggcggcgacaucugggugaccagagagcccuacgugagcugcgaccccgacaagugcuaccaguucgcccugggccagggcaccacccugaacaacgugcacagcaacaacaccgugagagacagaacccccuacagaacccugcugaugaacgagcugggcgugcccuuccaccugggcaccaagcaggugugcaucgccuggagcagcagcagcugccacgacggcaaggccuggcugcacgugugcaucaccggcgacgacaagaacgccaccgccagcuucaucuacaacggcagacugguggacagcguggugagcuggagcaaggagauccugagaacccaggagagcgagugcgugugcaucaacggcaccugcgccguggugaugaccgacggcagcgccagcggcaaggccgacaccaagauccuguucaucgaggagggcaagaucgugcacaccagcacccugagcggcagcgcccagcacguggaggagugcagcugcuaccccagauaccccggcgugagaugcgugugcagagacaacuggaagggcagcaacagacccaucguggacaucaacaucaaggaccacagcaucgugagcagcuacgugugcagcggccuggugggcgacacccccagaaagaacgacagcagcagcagcagccacugccuggaccccaacaacgaggagggcggccacggcgugaagggcugggccuucgacgacggcaacgacguguggaugggcagaaccaucaacgagaccagcagacugggcuacgagaccuucaaggugaucgagggcuggagcaaccccaagagcaagcugcagaucaacagacaggugaucguggacagaggcgacagaagcggcuacagcggcaucuucagcguggagggcaagagcugcaucaacagaugcuucuacguggagcugaucagaggcagaaaggaggagaccgaggugcuguggaccagcaacagcaucgugguguucugcggcaccagcggcaccuacggcaccggcagcuggcccgacggcgccgaccugaaccugaugcccaucuga

SEQ ID NO: 185106 - RNA, 1410 nt, Artificial Sequence
  derived and/or modified CDS sequence (opt4) from neuraminidase__InfluenzaA__AHL99835
augaaccccaaccagaagaucaucaccaucggcagcgugagccugaccaucagcaccaucugcuucuucaugcagaucgccauccugaucaccaccgugacccugcacuucaagcaguacgaguucaacagcccccccaacaaccaggugaugcugugcgagcccaccaucaucgagagaaacaucaccgagaucguguaccugaccaacaccaccaucgagaaggagaucugccccaagcccgccgaguacagaaacuggagcaagccccagugcggcaucaccggcuucgcccccuucagcaaggacaacagcaucagacugagcgccggcggcgacaucugggugaccagagagcccuacgugagcugcgcccccgacaagugcuaccaguucgcccugggccagggcaccacccugaacaacgugcacagcaacaacaccgugagagacagaacccccuacagaacccugcugaugaacgagcugggcgugcccuuccaccugggcaccaagcaggugugcaucgccuggagcagcagcagcugccacgacggcaaggccuggcugcacgugugcaucaccggcgacgacaagaacgccaccgccagcuucaucuacaacggcagacugguggacagcguggugagcuggagcaaggagauccugagaacccaggagagcgagugcgugugcaucaacggcaccugcaccguggugaugaccgacggcagcgccagcggcaaggccgacaccaagauccuguucaucgaggagggcaagaucgugcacaccagcacccugagcggcagcgcccagcacguggaggagugcagcugcuaccccagauaccccggcgugagaugcgugugcagagacaacuggaagggcagcaacagacccaucguggacaucaacaucaaggaccacagcaucgugagcagcuacgugugcagcggccuggugggcgacacccccagaaagaacgacagcagcagcagcagccacugccuggaccccaacaacgaggagggcggccacggcgugaagggcugggccuucgacgacggcaacgacguguggaugggcagaaccaucaacgagaccagcagacugggcuacgagaccuucaaggugaucgagggcuggagcaaccccaagagcaagcugcugaucaacagacaggugaucguggacagaggcgacagaagcggcuacagcggcaucuucagcguggagggcaagagcugcaucaacagaugcuucuacguggagcugaucagaggcagaaaggaggagaccgaggugcuguggaccagcaacagcaucgugguguucugcggcaccagcggcaccuacggcaccggcagcuggcccgacggcgccgaccugaaccugaugcccaucuga

SEQ ID NO: 185107 - RNA, 1410 nt, Artificial Sequence; identical to SEQ ID NO: 182206
  derived and/or modified CDS sequence (opt4) from neuraminidase__InfluenzaA__AHL99847

SEQ ID NO: 185108 - RNA, 1410 nt, Artificial Sequence; identical to SEQ ID NO: 183435
  derived and/or modified CDS sequence (opt4) from neuraminidase__InfluenzaA__AHL99859

SEQ ID NO: 185109 - RNA, 1410 nt, Artificial Sequence
  derived and/or modified CDS sequence (opt4) from neuraminidase__InfluenzaA__AHL99871
augaaccccaaccagaagaucaucaccaucggcagcgugagccugaccaucagcaccaucugcuucuucaugcagaucgccauccugaccaccaccgugacccugcacuucaagcaguacgaguucaacagcccccccaacaaccaggugaugcugugcgagcccaccaucaucgagagaaacaucaccgagaucguguaccugaccaacaccaccaucgagaaggagaucugccccaagcccgccgaguacagaaacuggagcaagccccagugcgacaucaccggcuucgcccccuucagcaaggacaacagcaucagacugagcgccggcggcgacaucugggugaccagagagcccuacgugagcugcgaccccgacaagugcuaccaguucgcccugggccagggcaccacccugaacaacgugcacagcaacaacaccgugagagacagaacccccuacagaacccugcugaugaacgagcugggcgugcccuuccaccugggcaccaagcaggugugcaucgccuggagcagcagcagcugccacgacggcaaggccuggcugcacgugugcaucaccggcgacgacaagaacgccaccgccagcuucaucuacaacggcagacugguggacagcguggugagcuggagcaaggagauccugagaacccaggagagcgagugcgugugcaucaacggcaccugcaccguggugaugaccgacggcagcgccagcggcaaggccgacaccaagauccuguucaucgaggagggcagaaucgugcacaccagcacccugagcggcagcgcccagcacguggaggagugcagcugcuaccccagauaccccggcgugagaugcgugugcagagacaacuggaagggcagcaacagacccaucguggacaucaacaucaaggaccacagcaucgugagcagauacgugugcagcggccuggugggcgacacccccagaaagaacgacagcagcagcagcagccacugccuggaccccaacaacgaggagggcggccacggcgugaagggcugggccuucgacgacggcaacgacguguggaugggcagaaccaucaacgagaccagcagacugggcuacgagaccuucaaggugaucgagggcuggagcaaccccaagagcaagcugcagaucaacagacaggugaucguggacagaggcgacagaagcggcuacagcggcaucuucagcguggagggcaagagcugcaucaacagaugcuucuacguggagcugaucagaggcagaaaggaggagaccgaggugcuguggaccagcaacagcaucgugguguucugcggcaccagcggcaccuacggcaccggcagcuggcccgacggcgccgaccugaaccugaugcccaucuga

SEQ ID NO: 185110 - RNA, 1410 nt, Artificial Sequence; identical to SEQ ID NO: 182206
  derived and/or modified CDS sequence (opt4) from neuraminidase__InfluenzaA__AHL99883

SEQ ID NO: 185111 - RNA, 1410 nt, Artificial Sequence; identical to SEQ ID NO: 185087
  derived and/or modified CDS sequence (opt4) from neuraminidase__InfluenzaA__AHL99895

SEQ ID NO: 185112 - RNA, 1410 nt, Artificial Sequence; identical to SEQ ID NO: 182206
  derived and/or modified CDS sequence (opt4) from neuraminidase__InfluenzaA__AHL99907

SEQ ID NO: 185113 - RNA, 1410 nt, Artificial Sequence; identical to SEQ ID NO: 182206
  derived and/or modified CDS sequence (opt4) from neuraminidase__InfluenzaA__AHL99919

SEQ ID NO: 185114 - RNA, 1410 nt, Artificial Sequence
  derived and/or modified CDS sequence (opt4) from neuraminidase__InfluenzaA__AHL99943
augaaccccaaccagaagaucaucaccaucggcagcgugagccugaccaucagcaccaucugcuucuucaugcagaucgccauccugaucaccaccgugacccugcacuucaagcagcacgaguucaacagcccccccaacaaccaggugaugcugugcgagcccaccaucaucgagagaaacaucaccgagaucguguaccugaccaacaccaccaucgagaaggagaucugccccaagcccgccgaguacagaaacuggagcaagccccagugcggcaucaccggcuucgcccccuucagcaaggacaacagcaucagacugagcgccggcggcgacaucugggugaccagagagcccuacgugagcugcgaccccgacaagugcuaccaguucgcccugggccagggcaccacccugaacaacgugcacagcaacaacaccgugagagacagaacccccuacagaacccugcugaugaacgagcugggcgugcccuuccaccugggcaccaagcaggugugcaucgccuggagcagcagcagcugccacgacggcaaggccuggcugcacgugugcaucaccggcgacgacaagaacgccaccgccagcuucaucuacaacggcagacugguggacagcguggugagcuggagcaaggagauccugagaacccaggagagcgagugcgugugcaucaacggcaccugcaccguggugaugaccgacggcagcgccagcggcaaggccgacaccaagauccuguucaucgaggagggcaagaucgugcacaccagcacccugagcggcagcgcccagcacguggaggagugcagcugcuaccccagauaccccggcgugagaugcgugugcagagacaacuggaagggcagcaacagacccaucguggacaucaacaucaaggaccacagcaucgugagcagcuacgugugcagcggccuggugggcgacacccccagaaagaacgacagcagcagcagcagccacugccuggaccccaacaacgaggagggcggccacggcgugaagggcugggccuucgacgacggcaacgacguguggaugggcagaaccaucaacgagaccagcagacugggcuacgagaccuucaaggugaucgagggcuggagcaaccccaagagcaagcugcagaucaacagacaggugaucguggacagaggcgacagaagcggcuacagcggcaucuucagcguggagggcaagagcugcaucaacagaugcuucuacguggagcugaucagaggcagaaaggaggagaccgaggugcuguggaccagcaacagcaucgugguguucugcggcaccagcggcaccuacggcaccggcagcuggcccgacggcgccgaccugaaccugaugcccaucuga

SEQ ID NO: 185115 - RNA, 1410 nt, Artificial Sequence; identical to SEQ ID NO: 182206
  derived and/or modified CDS sequence (opt4) from neuraminidase__InfluenzaA__AHL99955

SEQ ID NO: 185116 - RNA, 1410 nt, Artificial Sequence
  derived and/or modified CDS sequence (opt4) from neuraminidase__InfluenzaA__AHL99967
augaaccccaaccagaagaucaucaccaucggcagcgugagccugaccaucagcaccaucugcuucuucaugcagaucgccauccugaucaccaccgugacccugcacuucaagcaguacgaguucaacagcccccccaacaaccaggugaugcugugcgagcccaccaucaucgagagaaacaucaccgagaucguguaccugaccaacaccaccaucgagaaggagaucugccccaagcccgccgaguacagaaacuggagcaagccccagugcggcaucaccggcuucgcccccuucagcaaggacaacagcaucagacugagcgccggcggcgacaucugggugaccagagagcccuacgugagcugcgaccccgacaagugcuaccaguucgcccugggccagggcaccacccugaacaacgugcacagcaacaacaccgugcacgacagaacccccuacagaacccugcugaugaacgagcugggcgugcccuuccaccugggcaccaagcaggugugcaucgccuggagcagcagcagcugccacgacggcaaggccuggcugcacgugugcaucaccggcgacgacaagaacgccaccgccagcuucaucuacaacggcagacugguggacagcguggugagcuggagcaaggagauccugagaacccaggagagcgagugcgugugcaucaacggcaccugcaccguggugaugaccgacggcagcgccagcggcaaggccgacaccaagauccuguucaucgaggagggcaagaucgugcacaccagcacccugagcggcagcgcccagcacguggaggagugcagcugcuaccccagauaccccggcgugagaugcgugugcagagacaacuggaagggcagcaacagacccaucguggacaucaacaugaaggaccacagcaucgugagcagcuacgugugcagcggccuggugggcgacacccccagaaagaacgacagcagcagcagcagccacugccuggaccccaacaacgaggagggcggccacggcgugaagggcugggccuucgacgacggcaacgacguguggaugggcagaaccaucaacgagaccagcagacugggcuacgagaccuucaaggugaucgagggcuggagcaaccccaagagcaagcugcagaucaacagacaggugaucguggacagaggcgacagaagcggcuacagcggcaucuucagcguggagggcaagagcugcaucaacagaugcuucuacguggagcugaucagaggcagaaaggaggagaccgaggugcuguggaccagcaacagcaucgugguguucugcggcaccagcggcaccuacggcaccggcagcuggcccgacggcgccgaccugaaccugaugcccaucuga

SEQ ID NO: 185117 - RNA, 1410 nt, Artificial Sequence
  derived and/or modified CDS sequence (opt4) from neuraminidase__InfluenzaA__AHL99979
augaaccccaaccagaagaucaucaccaucggcagcgugagccugaccaucagcaccaucugcuucuucaugcagaucgccauccugaucaccaccguggcccugcacuucaagcagcacgaguucaacagcccccccaacaaccaggugaugcugugcgagcccaccaucaucgagagaaacaucaccgagaucguguaccugaccaacaccaccaucgagaaggagaucugccccaagcccgccgaguacagaaacuggagcaagccccagugcggcaucaccggcuucgcccccuucagcaaggacaacagcaucagacugagcgccggcggcgacaucugggugaccagagagcccuacgugagcugcgaccccgacaagugcuaccaguucgcccugggccagggcaccacccugaacaacgugcacagcaacaacaccgugagagacagaacccccuacagaacccugcugaugaacgagcugggcgugcccuuccaccugggcaccaagcaggugugcaucgccuggagcagcagcagcugccacgacggcaaggccuggcugcacgugugcaucaccggcgacgacaagaacgccaccgccagcuucaucuacaacggcagacugguggacagcguggugagcuggagcaaggagauccugagaacccaggagagcgagugcgugugcaucaacggcaccugcaccguggugaugaccgacggcagcgccagcggcaaggccgacaccaagauccuguucaucgaggagggcaagaucgugcacaccagcacccugagcggcagcgcccagcacguggaggagugcagcugcuaccccagauaccccggcgugagaugcgugugcagagacaacuggaagggcagcaacagacccaucguggacaucaacaucaaggaccacagcaucgugagcagcuacgugugcagcggccuggugggcgacacccccagaaagaacgacagcagcagcagcagccacugccuggaccccaacaacgaggagggcggccacggcgugaagggcugggccuucgacgacggcaacgacguguggaugggcagaaccaucaacgagaccagcagacugggcuacgagaccuucaaggugaucgagggcuggagcaaccccaagagcaagcugcagaucaacagacaggugaucguggacagaggcgacagaagcggcuacagcggcaucuucagcguggagggcaagagcugcaucaacagaugcuucuacguggagcugaucagaggcagaaaggaggagaccgaggugcuguggaccagcaacagcaucgugguguucugcggcaccagcggcaccuacggcaccggcagcuggcccgacggcgccgaccugaaccugaugcccaucuga

SEQ ID NO: 185118 - RNA, 1410 nt, Artificial Sequence; identical to SEQ ID NO: 185114
  derived and/or modified CDS sequence (opt4) from neuraminidase__InfluenzaA__AHL99991

SEQ ID NO: 185119 - RNA, 1410 nt, Artificial Sequence; identical to SEQ ID NO: 182206
  derived and/or modified CDS sequence (opt4) from neuraminidase__InfluenzaA__AHM00004

SEQ ID NO: 185120 - RNA, 1410 nt, Artificial Sequence; identical to SEQ ID NO: 182206
  derived and/or modified CDS sequence (opt4) from neuraminidase__InfluenzaA__AHM00016

SEQ ID NO: 185121 - RNA, 1410 nt, Artificial Sequence; identical to SEQ ID NO: 182206
  derived and/or modified CDS sequence (opt4) from neuraminidase__InfluenzaA__AHM00028

SEQ ID NO: 185122 - RNA, 1410 nt, Artificial Sequence; identical to SEQ ID NO: 185114
  derived and/or modified CDS sequence (opt4) from neuraminidase__InfluenzaA__AHM00040

SEQ ID NO: 185123 - RNA, 1410 nt, Artificial Sequence; identical to SEQ ID NO: 182206
  derived and/or modified CDS sequence (opt4) from neuraminidase__InfluenzaA__AHM00052

SEQ ID NO: 185124 - RNA, 1410 nt, Artificial Sequence; identical to SEQ ID NO: 183070
  derived and/or modified CDS sequence (opt4) from neuraminidase__InfluenzaA__AHM00064

SEQ ID NO: 185125 - RNA, 1410 nt, Artificial Sequence; identical to SEQ ID NO: 182206
  derived and/or modified CDS sequence (opt4) from neuraminidase__InfluenzaA__AHM00076

SEQ ID NO: 185126 - RNA, 1410 nt, Artificial Sequence; identical to SEQ ID NO: 182206
  derived and/or modified CDS sequence (opt4) from neuraminidase__InfluenzaA__AHM00088

SEQ ID NO: 185127 - RNA, 1410 nt, Artificial Sequence
  derived and/or modified CDS sequence (opt4) from neuraminidase__InfluenzaA__AHM00100
augaaccccaaccagaagaucaucaccaucggcagcaucugcaugaccaucggcauggccaaccugauccugcagaucggcaacaucaucagcaucuggaucagccacagcauccagcugggcaaccagagccagaucgagaccugcaaccagagcgugaucaccuacgagaacaacaccugggugaaccagaccuacgugaacaucagcaacaccaacuucgccgccggccagagcguggugagcgugaagcuggccggcaacagcagccugugccccgugagcggcugggccaucuacagcaaggacaacagcaucagaaucggcagcaagggcgacguguucgugaucagagagcccuucaucagcugcagcccccuggagugcagaaccuucuuccugacccagggcgcccugcugaacgacaagcacagcaacggcaccaucaaggacagaagccccuacagaacccugaugagcugccccaucggcgaggugcccagccccuacaacagcagauucgagagcguggccuggagcgccagcgccugccacgacggcaucaacuggcugaccaucggcaucagcggccccgacaacggcgccguggccgugcugaaguacaacggcgugaucaccgacaccaucaagagcuggagaaacaacauccugagaacccaggagagcgagugcgccugcgugaacggcagcugcuucaccaucaugaccgacggccccagcgacggccaggccagcuacaagaucuucagaaucgagaagggcaagaucgugaagagcguggagaugaacgcccccaacuaccacuacgaggagugcagcugcuaccccgacagcagcgagaucaccugcgugugcagagacaacuggcacggcagcaacagacccugggugagcuucaaccagaaccuggaguaccagaucggcuacaucugcagcggcaucuucggcgacaaccccagacccaacgacaagaccggcagcugcggccccgugagcagcaacggcgccaacggcgugaagggcuucagcuucaaguacggcaacggcguguggaucggcagaaccaagagcaucagcagcagaaagggcuucgagaugaucugggaccccaacggcuggaccggcaccgacaacaacuucagcaccaagcaggacaucgugggcaucaacgaguggagcggcuacagcggcagcuucgugcagcaccccgagcugaccggccuggacugcaucagacccugcuucuggguggagcugaucagaggcagacccaaggagaacaccaucuggaccagcggcagcagcaucagcuucugcggcgugaacagcgacaccgugggcuggagcuggcccgacggcgccgagcugcccuucaccaucgacaacuga

SEQ ID NO: 185128 - RNA, 1410 nt, Artificial Sequence; identical to SEQ ID NO: 185050
  derived and/or modified CDS sequence (opt4) from neuraminidase__InfluenzaA__AHM00111

SEQ ID NO: 185129 - RNA, 1410 nt, Artificial Sequence; identical to SEQ ID NO: 185114
  derived and/or modified CDS sequence (opt4) from neuraminidase__InfluenzaA__AHM00123

SEQ ID NO: 185130 - RNA, 1410 nt, Artificial Sequence; identical to SEQ ID NO: 183435
  derived and/or modified CDS sequence (opt4) from neuraminidase__InfluenzaA__AHM00135

SEQ ID NO: 185131 - RNA, 1410 nt, Artificial Sequence; identical to SEQ ID NO: 183943
  derived and/or modified CDS sequence (opt4) from neuraminidase__InfluenzaA__AHM00147

SEQ ID NO: 185132 - RNA, 1410 nt, Artificial Sequence; identical to SEQ ID NO: 185114
  derived and/or modified CDS sequence (opt4) from neuraminidase__InfluenzaA__AHM00159

SEQ ID NO: 185133 - RNA, 1410 nt, Artificial Sequence; identical to SEQ ID NO: 182206
  derived and/or modified CDS sequence (opt4) from neuraminidase__InfluenzaA__AHM00171

SEQ ID NO: 185134 - RNA, 1410 nt, Artificial Sequence; identical to SEQ ID NO: 182206
  derived and/or modified CDS sequence (opt4) from neuraminidase__InfluenzaA__AHM00183

SEQ ID NO: 185135 - RNA, 1410 nt, Artificial Sequence
  derived and/or modified CDS sequence (opt4) from neuraminidase__InfluenzaA__AHM00195
augaaccccaaccagaagaucaucaccaucggcagcgugagccugaccaucagcaccaucugcuucuucaugcagaucgccauccugaucaccaccgugacccugcacuucaagcaguacgaguucaacagcccccccaacaaccaggugaugcugugcgagcccaccaucaucgagagaaacaucaccgagaucguguaccugaccaacaccaccaucgagaaggagaucugccccaagcccgccgaguacagaaacuggagcaagccccagugcgacaucaccggcuucgcccccuucagcaaggacaacagcaucagacugagcgccggcggcgacaucugggugaccagagagcccuacgugagcugcgaccccgacaagugcuaccaguucgcccugggccagggcaccacccugaacaacgugcacagcaacaacaccgugagagacagaacccccuacagaacccugcugaugaacgagcugggcgugcccuuccaccugggcaccaagcaggugugcaucgccuggagcagcagcagcugccacgacggcaaggccuggcugcacgugugcaucaccggcgacgacaagaacgccaccgccagcuucaucuacaacggcagacugguggacagcguggugagcuggagcaaggagauccugagaacccaggagagcgagugcgugugcaucaacggcaccugcaccguggugaugaccgacggcagcgccagcggcaaggccgacaccaaggugcuguucaucgaggagggcaagaucgugcacaccagcacccugagcggcagcgcccagcacguggaggagugcagcugcuaccccagauaccccggcgugagaugcgugugcagagacaacuggaagggcagcaacagacccaucguggacaucaacaucaaggaccacagcaucgugagcagauacgugugcagcggccuggugggcgacacccccagaaagaacgacagcagcagcagcagccacugccuggaccccaacaacgaggagggcggccacggcgugaagggcugggccuucgacgacggcaacgacguguggaugggcagaaccaucaacgagaccagcagacugggcuacgagaccuucaaggugaucgagggcuggagcaaccccaagagcaagcugcagaucaacagacaggugaucguggacagaggcgacagaagcggcuacagcggcaucuucagcguggagggcaagagcugcaucaacagaugcuucuacguggagcugaucagaggcagaaaggaggagaccgaggugcuguggaccagcaacagcaucgugguguucugcggcaccagcggcaccuacggcaccggcagcuggcccgacggcgccgaccugaaccugaugcccaucuga

SEQ ID NO: 185136 - RNA, 1410 nt, Artificial Sequence
  derived and/or modified CDS sequence (opt4) from neuraminidase__InfluenzaA__AHM00207
augaaccccaaccagaagaucaucaccaucggcagcgugagccugaccaucagcaccaucugcuucuucaugcagaucgccauccugaucaccaccgugacccugcacuucaagcagcacgaguucaacagcccccccaacaaccaggugaugcugugcgagcccaccaucaucgagagaaacaucaccgagaucguguaccugaccaacaccaccaucgagaaggagaucugccccaagcccgccgaguacagaaacuggagcaagccccagugcggcaucaccggcuucgcccccuucagcaaggacaacagcaucagacugagcgccggcggcaacaucugggugaccagagagcccuacgugagcugcgaccccgacaagugcuaccaguucgcccugggccagggcaccacccugaacaacgugcacagcaacaacaccgugagagacagaacccccuacagaacccugcugaugaacgagcugggcgugcccuuccaccugggcaccaagcaggugugcaucgccuggagcagcagcagcugccacgacggcaaggccuggcugcacgugugcaucaccggcgacgacaagaacgccaccgccagcuucaucuacaacggcagacugguggacagcguggugagcuggagcaaggagauccugagaacccaggagagcgagugcgugugcaucaacggcaccugcaccguggugaugaccgacggcagcgccagcggcaaggccgacaccaagauccuguucaucgaggagggcaagaucgugcacaccagcacccugagcggcagcgcccagcacguggaggagugcagcugcuaccccagauaccccggcgugagaugcgugugcagagacaacuggaagggcagcaacagacccaucguggacaucaacaucaaggaccacagcaucgugagcagcuacgugugcagcggccuggugggcgacacccccagaaagaacgacagcagcagcagcagccacugccuggaccccaacaacgaggagggcggccacggcgugaagggcugggccuucgacgacggcaacgacguguggaugggcagaaccaucaacgagaccagcagacugggcuacgagaccuucaaggugaucgagggcuggagcaaccccaagagcaagcugcagaucaacagacaggugaucguggacagaggcgacagaagcggcuacagcggcaucuucagcguggagggcaagagcugcaucaacagaugcuucuacguggagcugaucagaggcagaaaggaggagaccgaggugcuguggaccagcaacagcaucgugguguucugcggcaccagcggcaccuacggcaccggcagcuggcccgacggcgccgaccugaaccugaugcccaucuga

SEQ ID NO: 185137 - RNA, 1410 nt, Artificial Sequence; identical to SEQ ID NO: 185114
  derived and/or modified CDS sequence (opt4) from neuraminidase__InfluenzaA__AHM00219

SEQ ID NO: 185138 - RNA, 1410 nt, Artificial Sequence; identical to SEQ ID NO: 182206
  derived and/or modified CDS sequence (opt4) from neuraminidase__InfluenzaA__AHM00231

SEQ ID NO: 185139 - RNA, 1410 nt, Artificial Sequence; identical to SEQ ID NO: 182206
  derived and/or modified CDS sequence (opt4) from neuraminidase__InfluenzaA__AHM00243

SEQ ID NO: 185140 - RNA, 1410 nt, Artificial Sequence; identical to SEQ ID NO: 182206
  derived and/or modified CDS sequence (opt4) from neuraminidase__InfluenzaA__AHM00255

SEQ ID NO: 185141 - RNA, 1410 nt, Artificial Sequence
  derived and/or modified CDS sequence (opt4) from neuraminidase__InfluenzaA__AHM00267
augaaccccaaccagaagaucaucaccaucggcagcgugagccugaccaucagcaccaucugcuucuucaugcagaucgccauccugaucaccaccgugacccugcacuucaagcaguacgaguucaacagcccccccaacaaccaggugaugcugugcgagcccaccaucaucgagagaaacaucaccgagaucguguaccugaccaacaccaccaucgagaaggagaucugccccaagcccgccgaguacagaaacuggagcaagccccagugcggcaucaccggcuucgcccccuucagcaaggacaacagcaucagacugagcgccggcggcgacaucugggugaccagagagcccuacgugagcugcgaccccgacaagugcuaccaguucgcccugggccagggcaccacccugaacaacgugcacagcaacaacaccgugagagacagaacccccuacagaacccugcugaugaacgagcugggcgugcccuuccaccugggcaccaagcaggugugcaucgccuggagcagcagcagcugccacgacggcaaggccuggcugcacgugugcaucaccggcgacgacaagaacgccaccgccagcuucaucuacaacggcagacugguggacagcguggccagcuggagcaaggagauccugagaacccaggagagcgagugcgugugcaucaacggcaccugcaccguggugaugaccgacggcagcgccagcggcaaggccgacaccaagauccuguucaucgaggagggcaagaucgugcacaccagcacccugagcggcagcgcccagcacguggaggagugcagcugcuaccccagauaccccggcgugagaugcgugugcagagacaacuggaagggcagcaacagacccaucguggacaucaacaucaaggaccacagcaucgugagcagcuacgugugcagcggccuggugggcgacacccccagaaagaacgacagcagcagcagcagccacugccuggaccccaacaacgaggagggcggccacggcgugaagggcugggccuucgacgacggcaacgacguguggaugggcagaaccaucaacgagaccagcagacugggcuacgagaccuucaaggugaucgagggcuggagcaaccccaagagcaagcugcagaucaacagacaggugaucguggacagaggcgacagaagcggcuacagcggcaucuucagcguggagggcaagagcugcaucaacagaugcuucuacguggagcugaucagaggcagaaaggaggagaccgaggugcuguggaccagcaacagcaucgugguguucugcggcaccagcggcaccuacggcaccggcagcuggcccgacggcgccgaccugaaccugaugcccaucuga

SEQ ID NO: 185142 - RNA, 1410 nt, Artificial Sequence; identical to SEQ ID NO: 183435
  derived and/or modified CDS sequence (opt4) from neuraminidase__InfluenzaA__AHM00279

SEQ ID NO: 185143 - RNA, 1410 nt, Artificial Sequence; identical to SEQ ID NO: 182206
  derived and/or modified CDS sequence (opt4) from neuraminidase__InfluenzaA__AHM00291

SEQ ID NO: 185144 - RNA, 1410 nt, Artificial Sequence; identical to SEQ ID NO: 182206
  derived and/or modified CDS sequence (opt4) from neuraminidase__InfluenzaA__AHM00303

SEQ ID NO: 185145 - RNA, 1410 nt, Artificial Sequence; identical to SEQ ID NO: 182206
  derived and/or modified CDS sequence (opt4) from neuraminidase__InfluenzaA__AHM00315

SEQ ID NO: 185146 - RNA, 1410 nt, Artificial Sequence; identical to SEQ ID NO: 183435
  derived and/or modified CDS sequence (opt4) from neuraminidase__InfluenzaA__AHM00327

SEQ ID NO: 185147 - RNA, 1410 nt, Artificial Sequence; identical to SEQ ID NO: 183435
  derived and/or modified CDS sequence (opt4) from neuraminidase__InfluenzaA__AHM00339

SEQ ID NO: 185148 - RNA, 1410 nt, Artificial Sequence; identical to SEQ ID NO: 185114
  derived and/or modified CDS sequence (opt4) from neuraminidase__InfluenzaA__AHM00351

SEQ ID NO: 185149 - RNA, 1410 nt, Artificial Sequence; identical to SEQ ID NO: 185050
  derived and/or modified CDS sequence (opt4) from neuraminidase__InfluenzaA__AHM00363

SEQ ID NO: 185150 - RNA, 1410 nt, Artificial Sequence
  derived and/or modified CDS sequence (opt4) from neuraminidase__InfluenzaA__AHM00375
augaaccccaaccagaagaucaucaccaucggcagcgugagccugaccaucagcaccaucugcuucuucaugcagaucgccauccugaucaccaccgugacccugcacuucaagcagcacgaguucaacagcccccccaacaaccaggugaugcugugcgagcccaccaucaucgagagaaacaucaccgagaucguguaccugaccaacaccaccaucgagaaggaggugugccccaagcccgccgaguacagaaacuggagcaagccccagugcggcaucaccggcuucgcccccuucagcaaggacaacagcaucagacugagcgccggcggcgacaucugggugaccagagagcccuacgugagcugcgaccccgacaagugcuaccaguucgcccugggccagggcaccacccugaacaacgugcacagcaacaacaccgugagagacagaacccccuacagaacccugcugaugaacgagcugggcgugcccuuccaccugggcaccaagcaggugugcaucgccuggagcagcagcagcugccacgacggcaaggccuggcugcacgugugcaucaccggcgacgacaagaacgccaccgccagcuucaucuacaacggcagacugguggacagcguggugagcuggagcaaggagauccugagaacccaggagagcgagugcgugugcaucaacggcaccugcaccguggugaugaccgacggcagcgccagcggcaaggccgacaccaagauccuguucaucgaggagggcaagaucgugcacaccagcacccugagcggcagcgcccagcacguggaggagugcagcugcuaccccagauaccccggcgugagaugcgugugcagagacaacuggaagggcagcaacagacccaucguggacaucaacaucaaggaccacagcaucgugagcagcuacgugugcagcggccuggugggcgacacccccagaaagaacgacagcagcagcagcagccacugccuggaccccaacaacgaggagggcggccacggcgugaagggcugggccuucgacgacggcaacgacguguggaugggcagaaccaucaacgagaccagcagacugggcuacgagaccuucaaggugaucgagggcuggagcaaccccaagagcaagcugcagaucaacagacaggugaucguggacagaggcgacagaagcggcuacagcggcaucuucagcguggagggcaagagcugcaucaacagaugcuucuacguggagcugaucagaggcagaaaggaggagaccgaggugcuguggaccagcaacagcaucgugguguucugcggcaccagcggcaccuacggcaccggcagcuggcccgacggcgccgaccugaaccugaugcccaucuga

SEQ ID NO: 185151 - RNA, 1410 nt, Artificial Sequence
  derived and/or modified CDS sequence (opt4) from neuraminidase__InfluenzaA__AHM00398
augaaccccaaccagaagaucaucaccaucggcagcgugagccugaccaucagcaccaucugcuucuucaugcagaucgccauccugaucaccaccgugacccugcacuucaagcagcacgaguucaacagcccccccaacaaccaggugaugcugugcgagcccaccaucaucgagagaaacaucaccgagaucguguaccugaccaacaccaccaucgagaaggagaucugccccaagcccgccgaguacagaaacuggagcaagccccagugcggcaucaccggcuucgcccccuucagcaaggagaacagcaucagacugagcgccggcggcgacaucugggugaccagagagcccuacgugagcugcgaccccgacaagugcuaccaguucgcccugggccagggcaccacccugaacaacgugcacagcaacaacaccgugagagacagaacccccuacagaacccugcugaugaacgagcugggcgugcccuuccaccugggcaccaagcaggugugcaucgccuggagcagcagcagcugccacgacggcaaggccuggcugcacgugugcaucaccggcgacgacaagaacgccaccgccagcuucaucuacaacggcagacugguggacagcguggugagcuggagcaaggagauccugagaacccaggagagcgagugcgugugcaucaacggcaccugcaccguggugaugaccgacggcagcgccagcggcaaggccgacaccaagauccuguucaucgaggagggcaagaucgugcacaccagcacccugagcggcagcgcccagcacguggaggagugcagcugcuaccccagauaccccggcgugagaugcgugugcagagacaacuggaagggcagcaacagacccaucguggacaucaacaucaaggaccacagcaucgugagcagcuacgugugcagcggccuggugggcgacacccccagaaagaacgacagcagcagcagcagccacugccuggaccccaacaacgaggagggcggccacggcgugaagggcugggccuucgacgacggcaacgacguguggaugggcagaaccaucaacgagaccagcagacugggcuacgagaccuucaaggugaucgagggcuggagcaaccccaagagcaagcugcagaucaacagacaggugaucguggacagaggcgacagaagcggcuacagcggcaucuucagcguggagggcaagagcugcaucaacagaugcuucuacguggagcugaucagaggcagaaaggaggagaccgaggugcuguggaccagcagcagcaucgugguguucugcggcaccagcggcaccuacggcaccggcagcuggcccgacggcgccgaccugaaccugaugcccaucuga

SEQ ID NO: 185152 - RNA, 1410 nt, Artificial Sequence; identical to SEQ ID NO: 182206
  derived and/or modified CDS sequence (opt4) from neuraminidase__InfluenzaA__AHM00410

SEQ ID NO: 185153 - RNA, 1410 nt, Artificial Sequence
  derived and/or modified CDS sequence (opt4) from neuraminidase__InfluenzaA__AHM00422
augaaccccaaccagaagaucaucaccaucggcagcgugagccugaccaucagcaccaucugcuucuucaugcagaucgccauccuggugaccaccgugacccugcacuucaagcaguacgaguucaacagcccccccaacaaccaggugaugcugugcgagcccaccaucaucgagagaaacaucaccgagaucguguaccugaccaacaccaccaucgagaaggagaucugccccaagcccgccgaguacagaaacuggagcaagccccagugcggcaucaccggcuucgcccccuucagcaaggacaacagcaucagacugagcgccggcggcgacaucugggugaccagagagcccuacgugagcugcgaccccgacaagugcuaccaguucgcccugggccagggcaccacccugaacaacgugcacagcaacaacaccgugagagacagaacccccuacagaacccugcugaugaacgagcugggcgugcccuuccaccugggcaccaagcaggugugcaucgccuggagcagcagcagcugccacgacggcaaggccuggcugcacgugugcaucaccggcgacgacaagaacgccaccgccagcuucaucuacaacggcagacugguggacagcguggugagcuggagcaaggagauccugagaacccaggagagcgagugcgugugcaucaacggcaccugcaccguggugaugaccgacggcagcgccagcggcaaggccgacaccaagauccuguucaucgaggagggcaagaucgugcacaccagcacccugagcggcagcgcccagcacguggaggagugcagcugcuaccccagauaccccggcgugagaugcgugugcagagacaacuggaagggcagcaacagacccaucguggacaucaacaucaaggaccacagcaucgugagcagcuacgugugcagcggccuggugggcgacacccccagaaagaacgacagcagcagcagcagccacugccuggaccccaacaacgaggagggcggccacggcgugaagggcugggccuucgacgacggcaacgacguguggaugggcagaaccaucaacgagaccagcagacugggcuacgagaccuucaaggugaucgagggcuggagcaaccccaagagcaagcugcagaucaacagacaggugaucguggacagaggcgacagaagcggcuacagcggcaucuucagcguggagggcaagagcugcaucaacagaugcuucuacguggagcugaucagaggcagaaaggaggagaccgaggugcuguggaccagcaacagcaucgugguguucugcggcaccagcggcaccuacggcaccggcagcuggcccgacggcgccgaccugaaccugaugcccaucuga

SEQ ID NO: 185154 - RNA, 1410 nt, Artificial Sequence
  derived and/or modified CDS sequence (opt4) from neuraminidase__InfluenzaA__AHM00434
augaaccccaaccagaagaucaucaccaucggcagcgugagccugaccaucagcaccaucugcuucuucaugcagaucgccauccugaucaccaccgugacccugcacuucaagcaguacgaguucaaccccccccccaacaaccaggugaugcugugcgagcccaccaucaucgagagaaacaucaccgagaucguguaccugaccaacaccaccaucgagaaggagaucugccccaagcccgccgaguacagaaacuggagcaagccccagugcggcaucaccggcuucgcccccuucagcaaggacaacagcaucagacugagcgccggcggcgacaucugggugaccagagagcccuacgugagcugcgaccccgacaagugcuaccaguucgcccugggccagggcaccacccugaacaacgugcacagcaacaacaccgugagagacagaacccccuacagaacccugcugaugaacgagcugggcgugcccuuccaccugggcaccaagcaggugugcaucgccuggagcagcagcagcugccacgacggcaaggccuggcugcacgugugcaucaccggcgacgacaagaacgccaccgccagcuucaucuacaacggcagacugguggacagcguggugagcuggagcaaggagauccugagaacccaggagagcgagugcgugugcaucaacggcaccugcaccguggugaugaccgacggcagcgccagcggcaaggccgacaccaagauccuguucaucgaggagggcaagaucgugcacaccagcacccugagcggcagcgcccagcacguggaggagugcagcugcuaccccagauaccccggcgugagaugcgugugcagagacaacuggaagggcagcaacagacccaucguggacaucaacaucaaggaccacagcaucgugagcagcuacgugugcagcggccuggugggcgacacccccagaaagaacgacagcagcagcagcagccacugccuggaccccaacaacgaggagggcggccacggcgugaagggcugggccuucgacgacggcaacgacguguggaugggcagaaccaucaacgagaccagcagacugggcuacgagaccuucaaggugaucgagggcuggagcaaccccaagagcaagcugcagaucaacagacaggugaucguggacagaggcgacagaagcggcuacagcggcaucuucagcguggagggcaagagcugcaucaacagaugcuucuacguggagcugaucagaggcagaaaggaggagaccgaggugcuguggaccagcaacagcaucgugguguucugcggcaccagcggcaccuacggcaccggcagcuggcccgacggcgccgaccugaaccugaugcccaucuga

SEQ ID NO: 185155 - RNA, 1410 nt, Artificial Sequence; identical to SEQ ID NO: 182206
  derived and/or modified CDS sequence (opt4) from neuraminidase__InfluenzaA__AHM00446

SEQ ID NO: 185156 - RNA, 1410 nt, Artificial Sequence; identical to SEQ ID NO: 185114
  derived and/or modified CDS sequence (opt4) from neuraminidase__InfluenzaA__AHM00458

SEQ ID NO: 185157 - RNA, 1410 nt, Artificial Sequence; identical to SEQ ID NO: 185114
  derived and/or modified CDS sequence (opt4) from neuraminidase__InfluenzaA__AHM00470

SEQ ID NO: 185158 - RNA, 1410 nt, Artificial Sequence; identical to SEQ ID NO: 185114
  derived and/or modified CDS sequence (opt4) from neuraminidase__InfluenzaA__AHM00482

SEQ ID NO: 185159 - RNA, 1410 nt, Artificial Sequence; identical to SEQ ID NO: 185114
  derived and/or modified CDS sequence (opt4) from neuraminidase__InfluenzaA__AHM00494

SEQ ID NO: 185160 - RNA, 1410 nt, Artificial Sequence
  derived and/or modified CDS sequence (opt4) from neuraminidase__InfluenzaA__AHM00506
augaaccccaaccagaagaucaucaccaucggcagcgugagccugaccaucagcaccaucugcuucuucaugcagaucgccauccugaucaccaccgugacccugcacuucaagcaguacgaguucaacagcccccccaacaaccaggugaugcugugcgagcccaccaucaucgagagaaacaucaccgagaucguguaccugaccaacaccaccaucgagaaggagaucugccccaagcccgccgaguacagaaacuggagcaagccccagugcggcaucaccggcuucgcccccuucagcaaggacaacagcaucagacugagcgccggcggcgacaucugggugaccagagagcccuacgugagcugcgaccccgacaagugcuaccaguucgcccugggccagggcaccacccugaacaacgugcacagcaacaacaccgugagagacagaacccccuacagaacccugcugaugaacgagcugggcgugcccuuccaccugggcaccaagcaggugugcaucgccuggagcagcagcagcugccacgacggcaaggccuggcugcacgugugcaucaccggcgacgacaagaacgccaccgccagcuucaucuacaacggcagacugguggacagcguggugagcuggagcaaggagauccugagaacccaggagagcgagugcgugugcaucaacggcaccugcaccguggugaugaccgacggcagcgccagcggcaaggccgacaccaagauccuguucaucgaggagggcaagaucgugcacaccagcacccugagcggcagcgcccagcacguggaggagugcagcugcuaccccagauaccccggcgugagaugcgugugcagagacaacuggaagggcagcaacagacccaucguggacaucaacaucaaggaccacagcaucgugagcagcuacgugugcagcggccuggugggcgacacccccagaaagaacgacagcagcagcagcagccacugccuggaccccaacaacgaggagggcggccacggcgugaagggcugggccuucgacgacggcaacgacguguggaugggcagaaccaucaacgagaccagcagacugggcuacgagaccuucaaggugaucgagggcuggagcaaccccaagagcaagcugcagaucaacagacaggugaucgugaacagaggcgacagaagcggcuacagcggcaucuucagcguggagggcaagagcugcaucaacagaugcuucuacguggagcugaucagaggcagaaaggaggagaccgaggugcuguggaccagcaacagcaucgugguguucugcggcaccagcggcaccuacggcaccggcagcuggcccgacggcgccgaccugaaccugaugcccaucuga

SEQ ID NO: 185161 - RNA, 1410 nt, Artificial Sequence; identical to SEQ ID NO: 182206
  derived and/or modified CDS sequence (opt4) from neuraminidase__InfluenzaA__AHM00518

SEQ ID NO: 185162 - RNA, 1410 nt, Artificial Sequence
  derived and/or modified CDS sequence (opt4) from neuraminidase__InfluenzaA__AHM00530
augaaccccaaccagaagaucaucaccaucggcagcgugagccugaccaucagcaccaucugcuucagcaugcagaucgccauccugaucaccaccgugacccugcacuucaagcaguacgaguucaaccccccccccaacaaccaggugaugcugugcgagcccaccaucaucgagagaaacaucaccgagaucguguaccugaccaacaccaccaucgagaaggagaucugccccaagcccgccgaguacagaaacuggagcaagccccagugcggcaucaccggcuucgcccccuucagcaaggacaacagcaucagacugagcgccggcggcgacaucugggugaccagagagcccuacgugagcugcgaccccgacaagugcuaccaguucgcccugggccagggcaccacccugaacaacgugcacagcaacaacaccgugagagacagaacccccuacagaacccugcugaugaacgagcugggcgugcccuuccaccugggcaccaagcaggugugcaucgccuggagcagcagcagcugccacgacggcaaggccuggcugcacgugugcaucaccggcgacgacaagaacgccaccgccagcuucaucuacaacggcagacugguggacagcguggugagcuggagcaaggagauccugagaacccaggagagcgagugcgugugcaucaacggcaccugcaccguggugaugaccgacggcagcgccagcggcaaggccgacaccaagauccuguucaucgaggagggcaagaucgugcacaccagcacccugagcggcagcgcccagcacguggaggagugcagcugcuaccccagauaccccggcgugagaugcgugugcagagacaacuggaagggcagcaacagacccaucguggacaucaacaucaaggaccacagcaucgugagcagcuacgugugcagcggccuggugggcgacacccccagaaagaacgacagcagcagcagcagccacugccuggaccccaacaacgaggagggcggccacggcgugaagggcugggccuucgacgacggcaacgacguguggaugggcagaaccaucaacgagaccagcagacugggcuacgagaccuucaaggugaucgagggcuggagcaaccccaagagcaagcugcagaucaacagacaggugaucguggacagaggcgacagaagcggcuacagcggcaucuucagcguggagggcaagagcugcaucaacagaugcuucuacguggagcugaucagaggcagaaaggaggagaccgaggugcuguggaccagcaacagcaucgugguguucugcggcaccagcggcaccuacggcaccggcagcuggcccgacggcgccgaccugaaccugaugcccaucuga

SEQ ID NO: 185163 - RNA, 1410 nt, Artificial Sequence; identical to SEQ ID NO: 183435
  derived and/or modified CDS sequence (opt4) from neuraminidase__InfluenzaA__AHM00542

SEQ ID NO: 185164 - RNA, 1410 nt, Artificial Sequence
  derived and/or modified CDS sequence (opt4) from neuraminidase__InfluenzaA__AHM00546
augaaccccaaccagaagaucaucaccaucggcagcgugagccugaccaucagcaccaucugcuucuucaugcagaucgccauccugaucaccaccgugacccugcacuucaagcaguacgaguucaacagcccccccaacaaccaggugaugcugugcgagcccaccaucaucgagagaaacaucaccgagaucguguaccugaccaacaccaccaucgagaaggagaucugccccaagcccgccgaguacagaaacuggagcaagccccagugcgacaucaccggcuucgcccccuucagcaaggacaacagcaucagacugagcgccggcggcgacaucugggugaccagagagcccuacgugagcugcgaccccgacaagugcuaccaguucgcccugggccagggcaccacccugaacaacgugcacagcaacaacaccgugagagacagaacccccuacagaacccugcugaugaacgagcugggcgugcccuuccaccugggcaccaagcaggugugcaucgccuggagcagcagcagcugccacgacggcaaggccuggcugcacgugugcaucaccggcgacgacaagaacgccaccgccagcuucaucuacaacggcagacugguggacagcguggugagcuggagcaaggagauccugagaacccaggagagcgagugcgugugcaucaacggcaccugcaccguggugaugaccgacggcagcgccagcggcaaggccgacaccaagauccuguucaucgaggagggcaagaucgugcacaccagcacccugagcggcagcgcccagcacguggaggagugcagcugcuaccccagauaccccggcgugagaugcgugugcagagacaacuggaagggcagcaacagacccaucguggacaucaacaucaaggaccacagcaucgugagcaaguacgugugcagcggccuggugggcgacacccccagaaagaacgacagcagcagcagcagccacugccuggaccccaacaacgaggagggcggccacggcgugaagggcugggccuucgacgacggcaacgacguguggaugggcagaaccaucaacgagaccagcagacugggcuacgagaccuucaaggugaucgagggcuggagcaaccccaagagcaagcugcagaucaacagacaggugaucguggacagaggcgacagaagcggcuacagcggcaucuucagcguggagggcaagagcugcaucaacagaugcuucuacguggagcugaucagaggcagaaaggaggagaccgaggugcuguggaccagcaacagcaucgugguguucugcggcaccagcggcaccuacggcaccggcagcuggcccgacggcgccgaccugaaccugaugcccaucuga

SEQ ID NO: 185165 - RNA, 1410 nt, Artificial Sequence
  derived and/or modified CDS sequence (opt4) from neuraminidase__InfluenzaA__AHM00558
augaaccccaaccagaagaucaucaccaucggcagcgugagccugaccaucagcaccaucugcuucuucaugcagaucgccauccugaucaccaccgugacccugcacuucaagcaguacgaguucaacagcccccccaacaaccaggugaugcugugcgagcccaccaucaucgagagaaacaucaccgagaucguguaccugaccaacaccaccaucgagaaggaggugugccccaagcccgccgaguacagaaacuggagcaagccccagugcggcaucaccggcuucgcccccuucagcaaggacaacagcaucagacugagcgccggcggcgacaucugggugaccagagagcccuacgugagcugcgaccccgacaagugcuaccaguucgcccugggccagggcaccacccugaacaacgugcacagcaacaacaccgugagagacagaacccccuacagaacccugcugaugaacgagcugggcgugcccuuccaccugggcaccaagcaggugugcaucgccuggagcagcagcagcugccacgacggcaaggccuggcugcacgugugcaucaccggcgacgacaagaacgccaccgccagcuucaucuacaacggcagacugguggacagcguggugagcuggagcaaggagauccugagaacccaggagagcgagugcgugugcaucaacggcaccugcaccguggugaugaccgacggcagcgccagcggcaaggccgacaccaagauccuguucaucgaggagggcaagaucgugcacaccagcacccugagcggcagcgcccagcacguggaggagugcagcugcuaccccagauaccccggcgugagaugcgugugcagagacaacuggaagggcagcaacagacccaucguggacaucaacaucaaggaccacagcaucgugagcagcuacgugugcagcggccuggugggcgacacccccagaaagaacgacagcagcagcagcagccacugccuggaccccaacaacgaggagggcggccacggcgugaagggcugggccuucgacgacggcaacgacguguggaugggcagaaccaucaacgagaccagcagacugggcuacgagaccuucaaggugaucgagggcuggagcaaccccaagagcaagcugcagaucaacagacaggugaucguggacagaggcgacagaagcggcuacagcggcaucuucagcguggagggcaagagcugcaucaacagaugcuucuacguggagcugaucagaggcagaaaggaggagaccgaggugcuguggaccagcaacagcaucgugguguucugcggcaccagcggcaccuacggcaccggcagcuggcccgacggcgccgaccugaaccugaugcccaucuga

SEQ ID NO: 185166 - RNA, 1410 nt, Artificial Sequence; identical to SEQ ID NO: 182206
  derived and/or modified CDS sequence (opt4) from neuraminidase__InfluenzaA__AHM00570

SEQ ID NO: 185167 - RNA, 1410 nt, Artificial Sequence; identical to SEQ ID NO: 182206
  derived and/or modified CDS sequence (opt4) from neuraminidase__InfluenzaA__AHM00582

SEQ ID NO: 185168 - RNA, 1410 nt, Artificial Sequence
  derived and/or modified CDS sequence (opt4) from neuraminidase__InfluenzaA__AHM00594
augaaccccaaccagaagaucaucaccaucggcagcgugagccugaccaucagcaccaucugcuucuucaugcagaucgccauccugaucaccaccgugacccugcacuucaagcagcacgaguucaacagcccccccaacaaccaggugaugcugugcgagcccaccaucaucgagagaaacaucaccgagaucgugcaccugaccaacaccaccaucgagaaggagaucugccccaagcccgccgaguacagaaacuggagcaagccccagugcggcaucaccggcuucgcccccuucagcaaggacaacagcaucagacugagcgccggcggcgacaucugggugaccagagagcccuacgugagcugcgaccccgacaagugcuaccaguucgcccugggccagggcaccacccugaacaacgugcacagcaacaacaccgugagagacagaacccccuacagaacccugcugaugaacgagcugggcgugcccuuccaccugggcaccaagcaggugugcaucgccuggagcagcagcagcugccacgacggcaaggccuggcugcacgugugcaucaccggcgacgacaagaacgccaccgccagcuucaucuacaacggcagacugguggacagcguggugagcuggagcaaggagauccugagaacccaggagagcgagugcgugugcaucaacggcaccugcaccguggugaugaccgacggcagcgccagcggcaaggccgacaccaagauccuguucaucgaggagggcaagaucgugcacaccagcacccugagcggcagcgcccagcacguggaggagugcagcugcuaccccagauaccccggcgugagaugcgugugcagagacaacuggaagggcagcaacagacccaucguggacaucaacaucaaggaccacagcaucgugagcagcuacgugugcagcggccuggugggcgacacccccagaaagaacgacagcagcagcagcagccacugccuggaccccaacaacgaggagggcggccacggcgugaagggcugggccuucgacgacggcaacgacguguggaugggcagaaccaucaacgagaccagcagacugggcuacgagaccuucaaggugaucgagggcuggagcaaccccaagagcaagcugcagaucaacagacaggugaucguggacagaggcgacagaagcggcuacagcggcaucuucagcguggagggcaagagcugcaucaacagaugcuucuacguggagcugaucagaggcagaaaggaggagaccgaggugcuguggaccagcaacagcaucgugguguucugcggcaccagcggcaccuacggcaccggcagcuggcccgacggcgccgaccugaaccugaugcccaucuga

SEQ ID NO: 185169 - RNA, 1410 nt, Artificial Sequence; identical to SEQ ID NO: 182206
  derived and/or modified CDS sequence (opt4) from neuraminidase__InfluenzaA__AHM00606

SEQ ID NO: 185170 - RNA, 1410 nt, Artificial Sequence; identical to SEQ ID NO: 182206
  derived and/or modified CDS sequence (opt4) from neuraminidase__InfluenzaA__AHM00618

SEQ ID NO: 185171 - RNA, 1410 nt, Artificial Sequence; identical to SEQ ID NO: 182206
  derived and/or modified CDS sequence (opt4) from neuraminidase__InfluenzaA__AHM00630

SEQ ID NO: 185172 - RNA, 1410 nt, Artificial Sequence; identical to SEQ ID NO: 182206
  derived and/or modified CDS sequence (opt4) from neuraminidase__InfluenzaA__AHM00642

SEQ ID NO: 185173 - RNA, 1410 nt, Artificial Sequence; identical to SEQ ID NO: 183435
  derived and/or modified CDS sequence (opt4) from neuraminidase__InfluenzaA__AHM00654

SEQ ID NO: 185174 - RNA, 1410 nt, Artificial Sequence; identical to SEQ ID NO: 182206
  derived and/or modified CDS sequence (opt4) from neuraminidase__InfluenzaA__AHM00666

SEQ ID NO: 185175 - RNA, 1410 nt, Artificial Sequence; identical to SEQ ID NO: 185114
  derived and/or modified CDS sequence (opt4) from neuraminidase__InfluenzaA__AHM00678

SEQ ID NO: 185176 - RNA, 1410 nt, Artificial Sequence; identical to SEQ ID NO: 183449
  derived and/or modified CDS sequence (opt4) from neuraminidase__InfluenzaA__AHM00690

SEQ ID NO: 185177 - RNA, 1410 nt, Artificial Sequence; identical to SEQ ID NO: 183435
  derived and/or modified CDS sequence (opt4) from neuraminidase__InfluenzaA__AHM00701

SEQ ID NO: 185178 - RNA, 1410 nt, Artificial Sequence
  derived and/or modified CDS sequence (opt4) from neuraminidase__InfluenzaA__AHM00713
augaaccccaaccagaagaucaucaccaucggcagcgugagccugaccaucagcaccaucugcuucuucaugcagaucgccauccugaucaccaccgugacccugcacuucaagcaguacgaguucaacagcccccccaacaaccaggugaugcugugcgagcccaccaucaucgagagaaacaucaccgagaucguguaccugaccaacaccaccaucgagaaggagaucugccccaagagcgccgaguacagaaacuggagcaagccccagugcggcaucaccggcuucgcccccuucagcaaggacaacagcaucagacugagcgccggcggcgacaucugggugaccagagagcccuacgugagcugcgaccccgacaagugcuaccaguucgcccugggccagggcaccacccugaacaacgugcacagcaacaacaccgugagagacagaacccccuacagaacccugcugaugaacgagcugggcgugcccuuccaccugggcaccaagcaggugugcaucgccuggagcagcagcagcugccacgacggcaaggccuggcugcacgugugcaucaccggcgacgacaagaacgccaccgccagcuucaucuacaacggcagacugguggacagcguggugagcuggagcaaggagauccugagaacccaggagagcgagugcgugugcaucaacggcaccugcaccguggugaugaccgacggcagcgccagcggcaaggccgacaccaagauccuguucaucgaggagggcaagaucgugcacaccagcacccugagcggcagcgcccagcacguggaggagugcagcugcuaccccagauaccccggcgugagaugcgugugcagagacaacuggaagggcagcaacagacccaucguggacaucaacaucaaggaccacagcaucgugagcagcuacgugugcagcggccuggugggcgacacccccagaaagaacgacagcagcagcagcagccacugccuggaccccaacaacgaggagggcggccacggcgugaagggcugggccuucgacgacggcaacgacguguggaugggcagaaccaucaacgagaccagcagacugggcuacgagaccuucaaggugaucgagggcuggagcaaccccaagagcaagcugcagaucaacagacaggugaucguggacagaggcgacagaagcggcuacagcggcaucuucagcguggagggcaagagcugcaucaacagaugcuucuacguggagcugaucagaggcagaaaggaggagaccgaggugcuguggaccagcaacagcaucgugguguucugcggcaccagcggcaccuacggcaccggcagcuggcccgacggcgccgaccugaaccugaugcccaucuga

SEQ ID NO: 185179 - RNA, 1410 nt, Artificial Sequence; identical to SEQ ID NO: 182206
  derived and/or modified CDS sequence (opt4) from neuraminidase__InfluenzaA__AHM00725

SEQ ID NO: 185180 - RNA, 1410 nt, Artificial Sequence; identical to SEQ ID NO: 182206
  derived and/or modified CDS sequence (opt4) from neuraminidase__InfluenzaA__AHM00737

SEQ ID NO: 185181 - RNA, 1410 nt, Artificial Sequence; identical to SEQ ID NO: 185114
  derived and/or modified CDS sequence (opt4) from neuraminidase__InfluenzaA__AHM00749

SEQ ID NO: 185182 - RNA, 1410 nt, Artificial Sequence; identical to SEQ ID NO: 182206
  derived and/or modified CDS sequence (opt4) from neuraminidase__InfluenzaA__AHM00761

SEQ ID NO: 185183 - RNA, 1410 nt, Artificial Sequence; identical to SEQ ID NO: 183435
  derived and/or modified CDS sequence (opt4) from neuraminidase__InfluenzaA__AHM00785

SEQ ID NO: 185184 - RNA, 1410 nt, Artificial Sequence; identical to SEQ ID NO: 183070
  derived and/or modified CDS sequence (opt4) from neuraminidase__InfluenzaA__AHM00797

SEQ ID NO: 185185 - RNA, 1410 nt, Artificial Sequence
  derived and/or modified CDS sequence (opt4) from neuraminidase__InfluenzaA__AHM00809
augaaccccaaccagaagaucaucaccaucggcagcgugagccugaccaucagcaccaucugcuucuucauccagaucgccauccugaucaccaccgugacccugcacuucaagcaguacgaguucaacagcccccccaacaaccaggugaugcugugcgagcccaccaucaucgagagaaacaucaccgagaucguguaccugaccaacaccaccaucgagaaggagaucugccccaagcccgccgaguacagaaacuggagcaagccccagugcgacaucaccggcuucgcccccuucagcaaggacaacagcaucagacugagcgccggcggcgacaucugggugaccagagagcccuacgugagcugcgaccccgacaagugcuaccaguucgcccugggccagggcaccacccugaacaacaugcacagcaacaacaccgugagagacagaacccccuacagaacccugcugaugaacgagcugggcgugcccuuccaccugggcaccaagcaggugugcaucgccuggagcagcagcagcugccacgacggcaaggccuggcugcacgugugcaucaccggcgacgacaagaacgccaccgccagcuucaucuacaacggcagacugguggacagcguggugagcuggagcaaggagauccugagaacccaggagagcgagugcgugugcaucaacggcaccugcaccguggugaugaccgacggcagcgccagcggcaaggccgacaccaagauccuguucaucgaggagggcaagaucgugcacaccagcacccugagcggcagcgcccagcacguggaggagugcagcugcuaccccagauaccccggcgugagaugcgugugcagagacaacuggaagggcagcaacagacccaucguggacaucaacaucaaggaccacagcaucgugagcagcuacgugugcagcggccuggugggcgacacccccagaaagaacgacagcagcagcagcagccacugccuggaccccaacaacgaggagggcggccacggcgugaagggcugggccuucgacgacggcaacgacguguggaugggcagaaccaucaacgagaccagcagacugggcuacgagaccuucaaggugaucgagggcuggagcaaccccaagagcaagcugcagaucaacagacaggugaucguggacagaggcgacagaagcggcuacagcggcaucuucagcguggagggcaagagcugcaucaacagaugcuucuacguggagcugaucagaggcagaaaggaggagaccgaggugcuguggaccagcaacagcaucgugguguucugcggcaccagcggcaccuacggcaccggcagcuggcccgacggcgccgaccugaaccugaugcccaucuga

SEQ ID NO: 185186 - RNA, 1410 nt, Artificial Sequence; identical to SEQ ID NO: 185114
  derived and/or modified CDS sequence (opt4) from neuraminidase__InfluenzaA__AHM00821

SEQ ID NO: 185187 - RNA, 1410 nt, Artificial Sequence; identical to SEQ ID NO: 185114
  derived and/or modified CDS sequence (opt4) from neuraminidase__InfluenzaA__AHM00833

SEQ ID NO: 185188 - RNA, 1410 nt, Artificial Sequence; identical to SEQ ID NO: 183070
  derived and/or modified CDS sequence (opt4) from neuraminidase__InfluenzaA__AHM00845

SEQ ID NO: 185189 - RNA, 1410 nt, Artificial Sequence; identical to SEQ ID NO: 182206
  derived and/or modified CDS sequence (opt4) from neuraminidase__InfluenzaA__AHM00857

SEQ ID NO: 185190 - RNA, 1410 nt, Artificial Sequence; identical to SEQ ID NO: 182206
  derived and/or modified CDS sequence (opt4) from neuraminidase__InfluenzaA__AHM00869

SEQ ID NO: 185191 - RNA, 1410 nt, Artificial Sequence; identical to SEQ ID NO: 182206
  derived and/or modified CDS sequence (opt4) from neuraminidase__InfluenzaA__AHM00881

SEQ ID NO: 185192 - RNA, 1410 nt, Artificial Sequence; identical to SEQ ID NO: 183435
  derived and/or modified CDS sequence (opt4) from neuraminidase__InfluenzaA__AHM00893

SEQ ID NO: 185193 - RNA, 1410 nt, Artificial Sequence
  derived and/or modified CDS sequence (opt4) from neuraminidase__InfluenzaA__AHM00905
augaaccccaaccagaagaucaucaccaucggcagcgugagccugaccaucagcaccaucugcuucuucaugcagaucgccauccugaucaccaccgugacccugcacuucaagcaguacgaguucaacagcccccccaacaaccaggugaugcugugcgagcccaccaucaucgagagaaacaucaccgagaucguguaccugaccaacaccaccaucgagaaggagaucugccccaagcccgccgaguacagaaacuggagcaagccccagugcggcaucaccggcuucgcccccuucagcaaggacaacagcaucagacugagcgccggcggcgacaucugggugaccagagagcccuacgugagcugcgaccccgacaagugcuaccaguucgcccugggccagggcaccacccugaacaacgugcacagcaacaacaccgugagagacagaacccccuacagaacccugcugaugaacgagcugggcgugcccuuccaccugggcaccaagcaggugugcaucgccuggagcagcagcagcugccacgacggcaaggccuggcugcacgugugcaucaccggcgacgacaagaacgccaccgccagcuucaucuacaacggcagacugguggacagcguggugagcuggagcaaggagauccugagaacccaggagagcgagugcgugugcaucaacggcaccugcaccguggugaugaccgacggcagcgccagcggcaaggccgacaccaagauccuguucaucgaggagggcaagaucgugcacaccagcacccugagcggcagcgcccagcacguggaggagugcagcugcuaccccagauaccccggcgugagaugcgugugcagagacaacuggaagggcagcaacagacccaucguggacaucaacaucaaggaccacagcaucgugagcagcuacgugugcagcggccuggugggcgacacccccagaaagaccgacagcagcagcagcggccacugccuggaccccaacaacgaggagggcggccacggcgugaagggcugggccuucgacgacggcaacgacguguggaugggcagaaccaucaacgagaccagcagacugggcuacgagaccuucaaggugaucgagggcuggagcaaccccaagagcaagcugcagaucaacagacaggugaucguggacagaggcgacagaagcggcuacagcggcaucuucagcguggagggcaagagcugcaucaacagaugcuucuacguggagcugaucagaggcagaaaggaggagaccgaggugcuguggaccagcaacagcaucgugguguucugcggcaccagcggcaccuacggcaccggcagcuggcccgacggcgccgaccugaaccugaugcccaucuga

SEQ ID NO: 185194 - RNA, 1410 nt, Artificial Sequence
  derived and/or modified CDS sequence (opt4) from neuraminidase__InfluenzaA__AHM00917
augaaccccaaccagaagaucaucaccaucggcagcgugagccugaccaucagcaccaucugcuucuucaugcagaucgccauccugaucaccaccgugacccugcacuucaagcaguacgaguucaacagcccccccaacaaccaggugaugcugugcgagcccaccaucaucgagagaaacaucaccgagaucguguaccugaccaacaccaccaucgagaaggagaucugccccaagcccgccgaguacagaaacuggagcaagccccagugcggcaucaccggcuucgcccccuucagcaaggacaacagcaucagacugagcgccggcggcgacaucugggugaccagagagcccuacgugagcugcgaccccgacaagugcuaccaguucgcccugggccagggcaccacccugaacaacgugcacagcaacaacaccgugagagacagaacccccuacagaacccugcugaugaacgagcugggcgugcccuuccaccugggcaccaagcaggugugcaucgccuggagcagcagcagcugccacgacggcaaggccuggcugcacgugugcaucaccggcgacgacaagaacgccaccgccagcuucaucuacaacggcagacugguggacagcguggugagcuggagcaaggagauccugagaacccaggagagcgagugcgugugcaucaacggcaccugcaccguggugaugaccgacggcagcgccagcggcaaggccgacaccaagauccuguucaucgaggagggcaagaucgugcacaccagcacccugagcggcagcgcccagcacguggaggagugcagcugcuaccccagauaccccggcgugagaugcgugugcagagacaacuggaagggcagcaacagacccaucguggacaucaacaucaaggaccacagcaucgugagcagcuacgugugcagcggccuggugggcgacacccccagaaagaacgacagcagcagcagcagccacugccuggaccccaacaacgaggagggcggccacggcgugaagggcugggccuucgacgacggcaacgacaucuggaugggcagaaccaucaacgagaccagcagacugggcuacgagaccuucaaggugaucgagggcuggagcaaccccaagagcaagcugcagaucaacagacaggugaucguggacagaggcgacagaagcggcuacagcggcaucuucagcguggagggcaagagcugcaucaacagaugcuucuacguggagcugaucagaggcagaaaggaggagaccgaggugcuguggaccagcaacagcaucgugguguucugcggcaccagcggcaccuacggcaccggcagcuggcccgacggcgccgaccugaaccugaugcccaucuga

SEQ ID NO: 185195 - RNA, 1410 nt, Artificial Sequence; identical to SEQ ID NO: 182206
  derived and/or modified CDS sequence (opt4) from neuraminidase__InfluenzaA__AHM00929

SEQ ID NO: 185196 - RNA, 1410 nt, Artificial Sequence
  derived and/or modified CDS sequence (opt4) from neuraminidase__InfluenzaA__AHM00941
augaaccccaaccagaagaucaucaccaucggcagcgugagccugaccaucagcaccaucugcuucuucaugcagaucgccauccugaucaccaccgugacccugcacuucaagcaguacgaguucaacagcccccccaacaaccaggugaugcugugcgagcccaccaucaucgagagaaacaucaccgagaucguguaccugaccaacaccaccaucgagaaggagaucugccccaagcccgccgaguacagaaacuggagcaagccccagugcgacaucaccggcuucgcccccuucagcaaggacaacagcaucagacugagcgccggcggcgacaucugggugaccagagagcccuacgugagcugcgaccccgacaagugcuaccaguucgcccugggccagggcaccacccugaacaacgugcacagcaacaacaccaucagagacagaacccccuacagaacccugcugaugaacgagcugggcgugcccuuccaccugggcaccaagcaggugugcaucgccuggagcagcagcagcugccacgacggcaaggccuggcugcacgugugcaucaccggcgacgacaagaacgccaccgccagcuucaucuacaacggcagacugguggacagcguggugagcuggagcaaggagauccugagaacccaggagagcgagugcgugugcaucaacggcaccugcaccguggugaugaccgacggcagcgccagcggcaaggccgacaccaagauccuguucaucgaggagggcaagaucgugcacaccagcacccugagcggcagcgcccagcacguggaggagugcagcugcuaccccagauaccccggcgugagaugcgugugcagagacaacuggaagggcagcaacagacccaucguggacaucaacaucaaggaccacagcaucgugagcagauacgugugcagcggccuggugggcgacacccccagaaagaacgacagcagcagcagcagccacugccuggaccccaacaacgaggagggcggccacggcgugaagggcugggccuucgacgacggcaacgacguguggaugggcagaaccaucaacgagaccagcagacugggcuacgagaccuucaaggugaucgagggcuggagcaaccccaagagcaagcugcagaucaacagacaggugaucguggacagaggcgacagaagcggcuacagcggcaucuucagcguggagggcaagagcugcaucaacagaugcuucuacguggagcugaucagaggcagaaaggaggagaccgaggugcuguggaccagcaacagcaucgugguguucugcggcaccagcggcaccuacggcaccggcagcuggcccgacggcgccgaccugaaccugaugcccaucuga

SEQ ID NO: 185197 - RNA, 1410 nt, Artificial Sequence
  derived and/or modified CDS sequence (opt4) from neuraminidase__InfluenzaA__AHM00953
augaaccccaaccagaagaucaucaccaucggcagcgugagccugaccaucagcaccaucugcuucuucaugcagaucgccauccugaucaccaccgugacccugcacuucaagcaguacgccuucaacagcccccccaacaaccaggugaugcugugcgagcccaccaucaucgagagaaacaucaccgagaucguguaccugaccaacaccaccaucgagaaggagaucugccccaagcccgccgaguacagaaacuggagcaagccccagugcggcaucaccggcuucgcccccuucagcaaggacaacagcaucagacugagcgccggcggcgacaucugggugaccagagagcccuacgugagcugcgaccccgacaagugcuaccaguucgcccugggccagggcaccacccugaacaacgugcacagcaacaacaccgugagagacagaacccccuacagaacccugcugaugaacgagcugggcgugcccuuccaccugggcaccaagcaggugugcaucgccuggagcagcagcagcugccacgacggcaaggccuggcugcacgugugcaucaccggcgacgacaagaacgccaccgccagcuucaucuacaacggcagacugguggacagcguggugagcuggagcaaggagauccugagaacccaggagagcgagugcgugugcaucaacggcaccugcaccguggugaugaccgacggcagcgccagcggcaaggccgacaccaagauccuguucaucgaggagggcaagaucgugcacaccagcacccugagcggcagcgcccagcacguggaggagugcagcugcuaccccagauaccccggcgugagaugcgugugcagagacaacuggaagggcagcaacagacccaucguggacaucaacaucaaggaccacagcaucgugagcagcuacgugugcagcggccuggugggcgacacccccagaaagaacgacagcagcagcagcagccacugccuggaccccaacaacgaggagggcggccacggcgugaagggcugggccuucgacgacggcaacgacguguggaugggcagaaccaucaacgagaccagcagacugggcuacgagaccuucaaggugaucgagggcuggagcaaccccaagagcaagcugcagaucaacagacaggugaucguggacagaggcgacagaagcggcuacagcggcaucuucagcguggagggcaagagcugcaucaacagaugcuucuacguggagcugaucagaggcagaaaggaggagaccgaggugcuguggaccagcaacagcaucgugguguucugcggcaccagcggcaccuacggcaccggcagcuggcccgacggcgccgaccugaaccugaugcccaucuga

SEQ ID NO: 185198 - RNA, 1410 nt, Artificial Sequence; identical to SEQ ID NO: 183435
  derived and/or modified CDS sequence (opt4) from neuraminidase__InfluenzaA__AHM00965

SEQ ID NO: 185199 - RNA, 1410 nt, Artificial Sequence; identical to SEQ ID NO: 183435
  derived and/or modified CDS sequence (opt4) from neuraminidase__InfluenzaA__AHM00977

SEQ ID NO: 185200 - RNA, 1398 nt, Artificial Sequence
  derived and/or modified CDS sequence (opt4) from neuraminidase__InfluenzaA__AHM24226
augaaccccaaccagaagauccugugcaccagcgccaccgccaucaucaucggcgccaucgccgugcugaucggcaucgccaaccugggccugaacaucggccugcaccugaagcccggcugcaacugcagccacagccagcccgagaccaccaacaccagccagaccaucaucaacaacuacuacaacgagaccaacaucaccaacauccagauggaggagagaaccagcagaaacuucaacaaccugaccaagggccugugcaccaucaacagcuggcacaucuacggcaaggacaacgccgugagaaucggcgagagcagcgacgugcuggugaccagagagcccuacgugagcugcgaccccgacgagugcagauucuacgcccugagccagggcaccaccaucagaggcaagcacagcaacggcaccauccacgacagaagccaguacagagcccugaucagcuggccccugagcagcccccccaccguguacaacagcagaguggagugcaucggcuggagcagcaccagcugccacgacggcaagagcagaaugagcaucugcaucagcggccccaacaacaacgccagcgccguggugugguacaacagaagacccguggccgagaucaacaccugggccagaaacauccugagaacccaggagagcgagugcgugugccacaacggcgugugccccgugguguucaccgacggcagcgccaccggccccgccgacaccagaaucuacuacuucaaggagggcaagaugcugaagugggagagccugaccggcaccgccaagcacaacgaggagugcagcugcuacggcgagagaaccggcaucaccugcaccugcagagacaacuggcagggcagcaacagacccgugauccagaucgaccccguggccaugacccacaccagccaguacaucugcagccccgugcugaccgacaaccccagacccaacgaccccaacaucggcaagugcaacgaccccuaccccggcaacaacaacaacggcgugaagggcuucagcuaccuggacggcgccaacaccuggcugggcagaaccaucagcaccgccagcagaagcggcuacgagaugcugaaggugcccaacgcccugaccgacgacagaagcaagcccauccagggccagaccaucgugcugaacgccgacuggagcggcuacagcggcagcuucauggacuacugggccgagggcgacugcuacagagccugcuucuacguggagcugaucagaggcagacccaaggaggacaaggugugguggaccagcaacagcaucgugagcaugugcagcagcaccgaguuccugggccaguggaacuggcccgacggcgccaagaucgaguacuuccuguga

SEQ ID NO: 185201 - RNA, 1398 nt, Artificial Sequence; identical to SEQ ID NO: 183514
  derived and/or modified CDS sequence (opt4) from neuraminidase__InfluenzaA__AHM24238

SEQ ID NO: 185202 - RNA, 1398 nt, Artificial Sequence
  derived and/or modified CDS sequence (opt4) from neuraminidase__InfluenzaA__AHM24250
augaaccccaaccagaagauccugugcaccagcgccaccgccaucaucaucggcgccaucgccgugcugaucggcaucgccaaccugggccugaacaucggccugcaccugaagcccagcugcaacugcagccacagccagcccgagaccaccaacaccagccagaccaucaucaacaacuacuacaacgagaccaacaucaccaacauccagauggaggagagaaccagcagaaacuucaacaaccugaccaagggccugugcaccaucaacagcuggcacaucuacggcaaggacaacgccgugagaaucggcgagaacagcgacgugcuggugaccagagagcccuacgugagcugcgaccccgacgagugcagauucuacgcccugagccagggcaccaccaucagaggcaagcacagcaacggcaccauccacgacagaagccaguacagagcccugaucagcuggccccugagcagcccccccaccguguacaacagcagaguggagugcaucggcuggagcagcaccagcugccacgacggcaagagcagaaugagcaucugcaucagcggccccaacaacaacgccagcgccguggugugguacaacagaagacccguggccgagaucaacaccugggccagaaacauccugagaacccaggagagcgagugcgugugccacaacggcgugugccccgugguguucaccgacggcagcgccaccggccccgccgacaccagaaucuacuacuucaaggagggcaagauccugaagugggagagccugaccggcaccgccaagcacaucgaggagugcagcugcuacggcgagagaaccggcaucaccugcaccugcagagacaacuggcagggcagcaacagacccgugauccagaucgaccccguggccaugacccacaccagccaguacaucugcagccccgugcugaccgacaaccccagacccaacgaccccaacaucggcaagugcaacgaccccuaccccggcaacaacaacaacggcgugaagggcuucagcuaccuggacggcgccaacaccuggcugggcagaaccaucagcaccgccagcagaagcggcuacgagaugcugaaggugcccaacgcccugaccgacgacagaagcaagcccauccagggccagaccaucgugcugaacgccgacuggagcggcuacagcggcagcuucauggacuacugggccgagggcgacugcuacagagccugcuucuacguggagcugaucagaggcagacccaaggaggacaaggugugguggaccagcaacagcaucgugagcaugugcagcagcaccgaguuccugggccaguggaacuggcccgacggcgccaagaucgaguacuuccuguga

SEQ ID NO: 185203 - RNA, 1410 nt, Artificial Sequence; identical to SEQ ID NO: 180769
  derived and/or modified CDS sequence (opt4) from neuraminidase__InfluenzaA__AHM98312

SEQ ID NO: 185204 - RNA, 1410 nt, Artificial Sequence
  derived and/or modified CDS sequence (opt4) from neuraminidase__InfluenzaA__AHM98331
augaaccccaaccagaagaucaucaccaucggcagcgugugcaugaccaucggcauggccaaccugauccugcagaucggcaacaucaucagcaucuggaucagccacagcauccagcugggcaaccagagccagaucgagaccugcaaccagagcgugaucaccuacgagaacaacaccugggugaaccagaccuacgugaacaucagcaacaccaacuucgccgccggccagagcguggugagcgugaagcuggccggcaacagcagccugugccccgugagcggcugggccaucuacagcaaggacaacagcaucagaaucggcagcaagggcgacguguucgugaucagagagcccuucaucagcugcagcccccuggagugcagaaccuucuuccugacccagggcgcccugcugaacgacaagcacagcaacggcaccaucaaggacagaagccccuacagaacccugaugagcugccccaucggcgaggugcccagccccuacaacagcagauucgagagcguggccuggagcgccagcgccugccacgacggcaucaacuggcugaccaucggcaucagcggccccgacaacggcgccguggccgugcugaaguacaacggcaucaucaccgacaccaucaagagcuggagaaacaacauccugagaacccaggagagcgagugcgccugcgugaacggcagcugcuucaccaucaugaccgacggccccagcgacggccaggccagcuacaagaucuucagaaucgagaagggcaagaucgugaagagcguggagaugaacgcccccaacuaccacuacgaggagugcagcugcuaccccgacagcagcgagaucaccugcgugugcagagacaacuggcacggcagcaacagacccugggugagcuucaaccagaaccuggaguaccagaucggcuacaucugcagcggcaucuucggcgacaaccccagacccaacgacaagaccggcagcugcggccccgugagcagcaacggcgccaacggcgugaagggcuucagcuucaaguacggcaacggcguguggaucggcagaaccaagagcaucagcagcagaaagggcuucgagaugaucugggaccccaacggcuggaccggcaccgacaacaacuucagcaucaagcaggacaucgugggcaucaacgaguggagcggcuacagcggcagcuucgugcagcaccccgagcugaccggccuggacugcaucagacccugcuucuggguggagcugaucagaggcagacccaaggagaacaccaucuggaccagcggcagcagcaucagcuucugcggcgugcacagcgacaccgugggcuggagcuggcccgacggcgccgagcugcccuucaccaucgacaaguga

SEQ ID NO: 185205 - RNA, 1410 nt, Artificial Sequence; identical to SEQ ID NO: 180785
  derived and/or modified CDS sequence (opt4) from neuraminidase__InfluenzaA__AHM98342

SEQ ID NO: 185206 - RNA, 1410 nt, Artificial Sequence
  derived and/or modified CDS sequence (opt4) from neuraminidase__InfluenzaA__AHM98353
augaaccccaaccagaagaucaucaccaucggcagcgugugcaugaccaucggcauggccaaccugauccugcagaucggcaacaucaucagcaucuggaucagccacagcauccagcugggcaaccagagccagaucgagaccugcaaccagagcgugaucaccuacgagaacaacaccugggugaaccagaccuacgugaacaucagcaacaccaacuucgccgccggccagagcguggugagcgugaagcuggccggcaacagcagccugugccccgugagcggcugggccaucuacagcaaggacaacagcaucagaaucggcagcaagggcgacguguucgugaucagagagcccuucaucagcugcagcccccuggagugcagaaccuucuuccugacccagggcgcccugcugaacgacaagcacagcaacggcaccaucaaggacagaagccccuacagaacccugaugagcugccccaucggcgaggugcccagccccuacaacagcagauucgagagcguggccuggagcgccagcgccugccacgacggcaucaacuggcugaccaucggcaucagcggccccgacaacggcgccguggccgugcugaaguacaacggcaucaucaccgacaccaucaagagcuggagaaacaacauccugagaacccaggagagcgagugcgccugcguggacggcagcugcuucaccaucaugaccgacggccccagcgacggccaggccagcuacaagaucuucagaaucgagaagggcaagaucgugaagagcguggagaugaacgcccccaacuaccacuacgaggagugcagcugcuaccccgacagcagcgagaucaccugcgugugcagagacaacuggcacggcagcaacagacccugggugagcuucaaccagaaccuggaguaccagaucggcuacaucugcagcggcaucuucggcgacaaccccagacccaacgacaagaccggcagcugcggccccgugagcagcaacggcgccaacggcgugaagggcuucagcuucaaguacggcaacggcguguggaucggcagaaccaagagcaucagcagcagaaagggcuucgagaugaucugggaccccaacggcuggaccggcaccgacaacaacuucagcaucaagcaggacaucgugggcaucaacgaguggagcggcuacagcggcagcuucgugcagcaccccgagcugaccggccuggacugcaucagacccugcuucuggguggagcugaucagaggcagacccaaggagaacaccaucuggaccagcggcagcagcaucagcuucugcggcgugaacagcgacaccgugggcuggagcuggcccgacggcgccgagcugcccuucaccaucgacaaguga

SEQ ID NO: 185207 - RNA, 1410 nt, Artificial Sequence
  derived and/or modified CDS sequence (opt4) from neuraminidase__InfluenzaA__AHM98364
augaaccccaaccagaagaucaucaccaucggcagcgugugcaugaccaucggcauggccaaccugauccugcagaucggcaacaucaucagcaucuggaucagccacagcauccagcugggcaaccagagccagaucgagaccugcaaccagagcgugaucaccuacgagaacaacaccugggugaaccagaccuacgugaacaucagcaacaccaacuucgccgccggccagagcguggugagcgugaaccuggccggcaacagcagccugugccccgugagcggcugggccaucuacagcaaggacaacagcaucagaaucggcagcaagggcgacguguucgugaucagagagcccuucaucagcugcagcccccuggagugcagaaccuucuuccugacccagggcgcccugcugaacgacaagcacagcaacggcaccaucaaggacagaagccccuacagaacccugaugagcugccccaucggcgaggugcccagccccuacaacagcagauucgagagcguggccuggagcgccagcgccugccacgacggcaucaacuggcugaccaucggcaucagcggccccgacaacggcgccguggccgugcugaaguacaacggcaucaucaccgacaccaucaagagcuggagaaacaacauccugagaacccaggagagcgagugcgccugcgugaacggcagcugcuucaccaucaugaccgacggccccagcgacggccaggccagcuacaagaucuucagaaucgagaagggcaagaucgugaagagcguggagaugaacgcccccaacuaccacuacgaggagugcagcugcuaccccgacagcagcgagaucaccugcgugugcagagacaacuggcacggcagcaacagacccugggugagcuucaaccagaaccuggaguaccagaucggcuacaucugcagcggcaucuucggcgacaaccccagacccaacgacaagaccggcagcugcggccccgugagcagcaacggcgccaacggcgugaagggcuucagcuucaaguacggcaacggcguguggaucggcagaaccaagagcaucagcagcagaaagggcuucgagaugaucugggaccccaacggcuggaccggcaccgacaacaacuucagcaucaagcaggacaucgugggcaucaacgaguggagcggcuacagcggcagcuucgugcagcaccccgagcugaccggccuggacugcaucagacccugcuucuggguggagcugaucagaggcagacccaaggagaacaccaucuggaccagcggcagcagcaucagcuucugcggcgugaacagcgacaccgugggcuggagcuggcccgacggcgccgagcugcccuucaccaucgacaaguga

SEQ ID NO: 185208 - RNA, 1410 nt, Artificial Sequence
  derived and/or modified CDS sequence (opt4) from neuraminidase__InfluenzaA__AHM98375
augaaccccaaccagaagaucaucaccaucggcagcgugugcaugaccaucggcauggccaaccugauccugcagaucggcaacaucaucagcaucuggaucagccacagcauccagcugggcaaccagaaccagaucgagaccugcaaccagagcgugaucaccuacgagaacaacaccugggugaaccagaccuacgugaacaucagcaacaccaacuucgccgccggccagagcguggugagcgugaagcuggccggcaacagcagccugugccccgugagcggcugggccaucuacagcaaggacaacagcaucagaaucggcagcaagggcgacguguucgugaucagagagcccuucaucagcugcagcccccuggagugcagaaccuucuuccugacccagggcgcccugcugaacgacaagcacagcaacggcaccaucaaggacagaagccccuucagaacccugaugagcugccccaucggcgaggugcccagccccuacaacagcagauucgagagcguggccuggagcgccagcgccugccacgacggcaucaacuggcugaccaucggcaucagcggccccgacaacggcgccguggccgugcugaaguacaacggcaucaucaccgacaccaucaagagcuggagaaacaacauccugagaacccaggagagcgagugcgccugcgugaacggcagcugcuucaccaucaugaccgacggccccagcgacggccaggccagcuacaagaucuucagaaucgagaagggcaagaucgugaagagcguggagaugaacgcccccaacuaccacuacgaggagugcagcugcuaccccgacagcagcgagaucaccugcgugugcagagacaacuggcacggcagcaacagacccugggugagcuucaaccagaaccuggaguaccagaucggcuacaucugcagcggcaucuucggcgacaaccccagacccaacgacaagaccggcagcugcggccccgugagcagcaacggcgccaacggcgugaagggcuucagcuucaaguacggcaacggcguguggaucggcagaaccaagagcaucagcagcagaaagggcuucgagaugaucugggaccccaacggcuggaccggcaccgacaacaacuucagcaucaagcaggacaucgugggcaucaacgaguggagcggcuacagcggcagcuucgugcagcaccccgagcugaccggccuggacugcaucagacccugcuucuggguggagcugaucagaggcagacccaaggagaacaccaucuggaccagcggcagcagcaucagcuucugcggcgugaacagcgacaccgugggcuggagcuggcccgacggcgccgagcugcccuucaccaucgacaaguga

SEQ ID NO: 185209 - RNA, 1410 nt, Artificial Sequence; identical to SEQ ID NO: 180769
  derived and/or modified CDS sequence (opt4) from neuraminidase__InfluenzaA__AHM98386

SEQ ID NO: 185210 - RNA, 1410 nt, Artificial Sequence
  derived and/or modified CDS sequence (opt4) from neuraminidase__InfluenzaA__AHM98408
augaaccccaaccagaagaucaucaccaucggcagcgugugcaugaccaucggcauggccaaccugauccugcagaucggcaacaucaucagcaucuggaucagccacagcauccagcugggcaaccagagccagaucgagaccugcaaccagagcgugaucaccuacgagaacaacaccuggaucaaccagaccuacgugaacaucagcaacaccaacuucgccgccggccagagcguggugagcgugaagcuggccggcaacagcagccugugccccgugagcggcugggccaucuacagcaaggacaacagcaucagaaucggcagcaagggcgacguguucgugaucagagagcccuucaucagcugcagcccccuggagugcagaaccuucuuccugacccagggcgcccugcugaacgacaagcacagcaacggcaccaucaaggacagaagccccuacagaacccugaugagcugccccaucggcgaggugcccagccccuacaacagcagauucgagagcguggccuggagcgccagcgccugccacgacggcaucaacuggcugaccaucggcaucagcggccccgacaacggcgccguggccgugcugaaguacaacggcaucaucaccgacaccaucaagagcuggagaaacaacauccugagaacccaggagagcgagugcgccugcgugaacggcagcugcuucaccaucaugaccgacggccccagcgacggccaggccagcuacaagaucuucagaaucgagaagggcaagaucgugaagagcguggagaugaacgcccccaacuaccacuacgaggagugcagcugcuaccccgacagcagcgagaucaccugcgugugcagagacaacuggcacggcagcaacagacccugggugagcuucaaccagaaccuggaguaccagaucggcuacaucugcagcggcaucuucggcgacaaccccagacccaacgacaagaccggcagcugcggccccgugagcagcaacggcgccaacggcgugaagggcuucagcuucaaguacggcaacggcguguggaucggcagaaccaagagcaucagcagcagaaagggcuucgagaugaucugggaccccaacggcuggaccggcaccgacaacagcuucagcaucaagcaggacaucgugggcaucaacgaguggagcggcuacagcggcagcuucgugcagcaccccgagcugaccggccuggacugcaucagacccugcuucuggguggagcugaucagaggcagacccaaggagaacaccaucuggaccagcggcagcagcaucagcuucugcggcgugaacagcgacaccgugggcuggagcuggcccgacggcgccgagcugcccuucaccaucgacaaguga

SEQ ID NO: 185211 - RNA, 1410 nt, Artificial Sequence; identical to SEQ ID NO: 185210
  derived and/or modified CDS sequence (opt4) from neuraminidase__InfluenzaA__AHM98419

SEQ ID NO: 185212 - RNA, 1410 nt, Artificial Sequence
  derived and/or modified CDS sequence (opt4) from neuraminidase__InfluenzaA__AHM98430
augaaccccaaccagaagaucaucaccaucggcagcgugugcaugaccaucggcauggccaaccugauccugcagaucggcaacaucaucagcaucuggaucagccacagcauccagcugggcaaccagagccagaucgagaccugcaaccagaacgugaucaccuacgagaacaacaccugggugaaccagaccuacgugaacaucagcaacaccaacuucgccgccggccagagcguggugcccgugaagcuggccggcaacagcagccugugccccgugagcggcugggccaucuacagcaaggacaacagcaucagaaucggcagcaagggcgacguguucgugaucagagagcccuucaucagcugcagcccccuggagugcagaaccuucuuccugacccagggcgcccugcugaacgacaagcacagcaacggcaccaucaaggacagaagccccuacagaacccugaugagcugccccaucggcgaggugcccagccccuacaacagcagauucgagagcguggccuggagcgccagcgccugccacgacggcaucaacuggcugaccaucggcaucagcggccccgacaacggcgccguggccgugcugaaguacaacggcaucaucaccgacaccaucaagagcuggagaaacaacauccugagaacccaggagagcgagugcgccugcgugaacggcagcugcuucaccaucaugaccgacggccccagcgacggccaggccagcuacaagaucuucagaaucgagaagggcaagaucgugaagagcguggagaugaacgcccccaacuaccacuacgaggagugcagcugcuaccccgacagcagcgagaucaccugcgugugcagagacaacuggcacggcagcaacagacccugggugagcuucaaccagaaccuggaguaccagaucggcuacaucugcagcggcaucuucggcgacaaccccagacccaacgacaagaccggcagcugcggccccgugagcagcaacggcgccaacggcgugaagggcuucagcuucaaguacggcaacggcguguggaucggcagaaccaagagcaucagcagcagaaagggcuucgagaugaucugggaccccaacggcuggaccggcaccgacaacaacuucagcaucaagcaggacaucgugggcaucaacgaguggagcggcuacagcggcagcuucgugcagcaccccgagcugaccggccuggacugcaucagacccugcuucuggguggagcugaucagaggcagacccaaggagaacaccaucuggaccagcggcagcagcaucagcuucugcggcgugaacagcgacaccgugggcuggagcuggcccgacggcgccgagcugcccuucaccaucgacaaguga

SEQ ID NO: 185213 - RNA, 1410 nt, Artificial Sequence; identical to SEQ ID NO: 181017
  derived and/or modified CDS sequence (opt4) from neuraminidase__InfluenzaA__AHM98441

SEQ ID NO: 185214 - RNA, 1410 nt, Artificial Sequence
  derived and/or modified CDS sequence (opt4) from neuraminidase__InfluenzaA__AHM98452
augaaccccaaccagaagaucaucaccaucggcagcgugugcaugaccaucggcauggccaaccugauccugcagaucggcaacaucaucagcaucuggaucagccacagcauccagcugagaaaccagagccagaucgagaccugcaaccagagcgugaucaccuacgagaacaacaccugggugaaccagaccuacgugaacaucagcaacaccaacuucgccgccggccagagcguggugagcgugaagcuggccggcaacagcagccugugccccgugagcggcugggccaucuacagcaaggacaacagcaucagaaucggcagcaagggcgacguguucgugaucagagagcccuucaucagcugcagcccccuggagugcagaaccuucuuccugacccagggcgcccugcugaacgacaagcacagcaacggcaccaucaaggacagaagccccuacagaacccugaugagcugccccaucggcgaggugcccagccccuacaacagcagauucgagagcguggccuggagcgccagcgccugccacgacggcaucaacuggcugaccaucggcaucagcggccccgacaacggcgccguggccgugcugaaguacaacggcaucaucaccgacaccaucaagagcuggagaaacaacauccugagaacccaggagagcgagugcgccugcgugaacggcagcugcuucaccaucaugaccgacggccccagcgacggccaggccagcuacaagaucuucagaaucgagaagggcaagaucgugaagagcguggagaugaacgcccccaacuaccacuacgaggagugcagcugcuaccccgacagcagcgagaucaccugcgugugcagagacaacuggcacggcagcaacagacccugggugagcuucaaccagaaccuggaguaccagaucggcuacaucugcagcggcaucuucggcgacaaccccagacccaacgacaagaccggcagcugcggccccgugagcagcaacggcgccaacggcgugaagggcuucagcuucaaguacggcaacggcguguggaucggcagaaccaagagcaucagcagcagaaagggcuucgagaugaucugggaccccaacggcuggaccggcaccgacaacaacuucagcaucaagcaggacaucgugggcgugaacgaguggagcggcuacagcggcagcuucgugcagcaccccgagcugaccggccuggacugcaucagacccugcuucuggguggagcugaucagaggcagacccaaggagaacaccaucuggaccagcggcagcagcaucagcuucugcggcgugaacagcgacaccgugggcuggagcuggcccgacggcgccgagcugcccuucaccaucgacaaguga

SEQ ID NO: 185215 - RNA, 1410 nt, Artificial Sequence; identical to SEQ ID NO: 180769
  derived and/or modified CDS sequence (opt4) from neuraminidase__InfluenzaA__AHM98474

SEQ ID NO: 185216 - RNA, 1410 nt, Artificial Sequence
  derived and/or modified CDS sequence (opt4) from neuraminidase__InfluenzaA__AHM98485
augaaccccaaccagaagaucaucaccaucggcagcgugugcaugaccaucggcauggccaaccugauccugcagaucggcaacaucaucagcaucuggaucagccacagcauccagcugggcaaccagagccagaucgagaccugcaaccagagcgugaucaccuacgagaacaacaccugggugaaccagaccuacgugaacaucagcaacaccaacuucgccgccggccagagcguggugagcgugaagcuggugggcaacagcagccugugccccgugagcggcugggccaucuacagcaaggacaacagcaucagaaucggcagcaagggcgacguguucgugaucagagagcccuucaucagcugcagcccccuggagugcagaaccuucuuccugacccagggcgcccugcugaacgacaagcacagcaacggcaccaucaaggacagaagccccuacagaacccugaugagcugccccaucggcgaggugcccagccccuacaacagcagauucgagagcguggccuggagcgccagcgccugccacgacggcaucaacuggcugaccaucggcaucagcggccccgacaacggcgccguggccgugcugaaguacaacggcaucaucaccgacaccaucaagagcuggagaaacaacauccugagaacccaggagagcgagugcgccugcgugaacggcagcugcuucaccaucaugaccgacggccccagcgacggccaggccagcuacaagaucuucagaaucgagaagggcaagaucgugaagagcguggagaugaacgcccccaacuaccacuacgaggagugcagcugcuaccccgacagcagcgagaucaccugcgugugcagagacaacuggcacggcagcaacagacccugggugagcuucaaccagaaccuggaguaccagaucggcuacaucugcagcggcaucuucggcgacaaccccagacccaacgacaagaccggcagcugcggccccgugagcagcaacggcgccaacggcgugaagggcuucagcuucaaguacggcaacggcguguggaucggcagaaccaagagcaucagcagcagaaagggcuucgagaugaucugggaccccaacggcuggaccggcaccgacaacaacuucagcaucaagcaggacaucgugggcaucaacgaguggagcggcuacagcggcagcuucgugcagcaccccgagcugaccggccuggacugcaucagacccugcuucuggguggagcugaucagaggcagacccaaggagaacaccaucuggaccagcggcagcagcaucagcuucugcggcgugaacagcgacaccgugggcuggagcuggcccgacggcgccgagcugcccuucaccaucgacaaguga

SEQ ID NO: 185217 - RNA, 1410 nt, Artificial Sequence
  derived and/or modified CDS sequence (opt4) from neuraminidase__InfluenzaA__AHM98496
augaaccccaaccagaagaucaucaccaucggcagcgugugcaugaccaucggcauggccaaccugauccugcagaucggcaacaucaucagcaucuggaucagccacagcauccagcugggcaaccagaaccagaucgagaccugcaaccagagcgugaucaccuacgagaacaacaccugggugaaccagaccuacgugaacaucagcaacaccaacuucgccgccggccagagcguggugagcgugaagcuggccggcaacagcagccugugccccgugagcggcugggccaucuacagcaaggacaacagcaucagaaucggcagcaagggcgacguguucgugaucagagagcccuucaucagcugcagcccccuggagugcagaaccuucuuccugacccagggcgcccugcugaacgacaagcacagcaacggcaccaucaagaacagaagccccuacagaacccugaugagcugccccaucggcgaggugcccagccccuacaacagcagauucgagagcguggccuggagcgccagcgccugccacgacggcaucaacuggcugaccaucggcaucagcggccccgacaacggcgccguggccgugcugaaguacaacggcaucaucaccgacaccaucaagagcuggagaaacaacauccugagaacccaggagagcgagugcgccugcgugaacggcagcugcuucaccaucaugaccgacggccccagcgacggccaggccagcuacaagaucuucagaaucgagaagggcaagaucgugaagagcguggagaugaacgcccccaacuaccacuacgaggagugcagcugcuaccccgacagcagcgagaucaagugcgugugcagagacaacuggcacggcagcaacagacccugggugagcuucaaccagaaccuggaguaccagaucggcuacaucugcagcggcaucuucggcgacaaccccagacccaacgacaagaccggcagcugcggccccgugagcagcaacggcgccaacggcgugaagggcuucagcuucaaguacggcaacggcguguggaucggcagaaccaagagcaucagcagcagaaagggcuucgagaugaucugggaccccaacggcuggaccggcaccgacaacaacuucagcaucaagcaggacaucgugggcaucaacgaguggagcggcuacagcggcagcuucgugcagcaccccgagcugaccggccuggacugcaucagacccugcuucuggguggagcugaucagaggcagacccaaggagaacaccaucuggaccagcggcagcagcaucagcuucugcggcgugaacagcgacaccgugggcuggagcuggcccgacggcgccgagcugcccuucaccaucgacaaguga

SEQ ID NO: 185218 - RNA, 1410 nt, Artificial Sequence; identical to SEQ ID NO: 180769
  derived and/or modified CDS sequence (opt4) from neuraminidase__InfluenzaA__AHM98507

SEQ ID NO: 185219 - RNA, 1410 nt, Artificial Sequence
  derived and/or modified CDS sequence (opt4) from neuraminidase__InfluenzaA__AHM98518
augaaccccaaccagaagaucaucaccaucggcagcgugugcaugaccaucggcauggccaaccugauccugcagaucggcaacaucaucagcaucuggaucagccacagcauccagcugggcaaccagagccagaucgagaccugcaaccagagcgugaucaccuacgagaacaacaccuggaucaaccagaccuacgugaacaucagcaacaccaacuucgccgccggccagagcguggugagcgugaagcuggccggcaacagcagccugugccccgugagcggcugggccaucuacagcaaggacaacagcaucagaaucggcagcaagggcgacguguucgugaucagagagcccuucaucagcugcagcccccuggagugcagaaccuucuuccugacccagggcgcccugcugaacgacaagcacagcaacggcaccaucaaggacagaagccccuacagaacccugaugagcugccccaucggcgaggugcccagccccuacaacagcagauucgagagcguggccuggagcgccagcgccugccacgacggcaucaacuggcugaccaucggcaucagcggccccgacaacggcgccguggccgugcugaaguacaacggcaucaucaccgacaccaucaagagcuggagaaacaacauccugagaacccaggagagcgagugcgccugcgugaacggcagcugcuucaccaucaugaccgacggccccagcgacggccaggccagcuacaagaucuucagaaucgagaagggcaagaucgugaagagcguggagaugaacgcccccaacuaccacuacgaggagugcagcugcuaccccgacagcagcgagaucaccugcgugugcagagacaacuggcacggcagcaacagacccugggugagcuucaaccagaaccuggaguaccagaucggcuacaucugcagcggcaucuucggcgacaaccccagacccaacgacaagaccggcagcugcggccccgugagcagcaacggcgccaacggcgugaagggcuucagcuucaaguacggcaacggcguguggaucggcagaaccaagagcaucagcagcagaaagggcuucgagaugaucugggaccccaacggcuggaccggcaccgacaacaacuucagcaucaagcaggacaucgugggcaucaacgaguggagcggcuacagcggcagcuucgugcagcaccccgagcugaccggccuggacugcaucagacccugcuucuggguggagcugaucagaggcagacccaaggagaacaccaucuggaccagcggcagcagcaugagcuucugcggcgugaacagcgacaccgugggcuggagcuggcccgacggcgccgagcugcccuucaccaucgacaaguga

SEQ ID NO: 185220 - RNA, 1410 nt, Artificial Sequence; identical to SEQ ID NO: 180317
  derived and/or modified CDS sequence (opt4) from neuraminidase__InfluenzaA__AHM98529

SEQ ID NO: 185221 - RNA, 1410 nt, Artificial Sequence; identical to SEQ ID NO: 181061
  derived and/or modified CDS sequence (opt4) from neuraminidase__InfluenzaA__AHM98540

SEQ ID NO: 185222 - RNA, 1410 nt, Artificial Sequence
  derived and/or modified CDS sequence (opt4) from neuraminidase__InfluenzaA__AHM98562
augaaccccaaccagaagaucaucaccaucggcagcgugugcaugaccaucggcauggccaaccugauccugcagaucggcaacaucaucagcaucuggaucagccacagcauccagcugggcaaccagaaccagaucgagaccugcaaccagagcgugaucaccuacgagaacaacaccugggugaaccagaccuacgugaacaucagcaacaccaacuucgccgccggccagagcguggugagcgugaagcuggccggcaacagcagccugugccccgugagcggcugggccaucuacagcaaggacaacagcaucagaaucggcagcaagggcgacguguucgugaucagagagcccuucaucagcugcagcccccuggagugcagaaccuucuuccugacccagggcgcccugcugaacgacaagcacagcaacggcaccaucaaggacagaagccccuacagaacccugaugagcugccccaucggcgaggugcccagccccuacaacagcagauucgagagcguggccuggagcgccagcgccugccacgacggcaucaacuggcugaccaucggcaucagcggccccgacaacggcgccguggccgugcugaaguacaacggcaucaucaccgacaccaucaagagcuggagaaacaacauccugagaacccaggagagcgagugcgccugcgugaacggcagcugcuucaccaucaugaccgacggccccagcgacggccaggccagcuacaagaucuucagaaucgagaagggcaagaucgugaagagcguggagaugaacgcccccaacuaccacuacgaggagugcagcugcuaccccgacagcagcgagaucaccugcgugugcagagacaacuggcacggcagcaacagacccugggugagcuucaaccagaaccuggaguaccagaucggcuacaucugcagcggcaucuucggcgacaaccccagacccaacgacaaggccggcagcugcggccccgugagcagcaacggcgccaacggcgugaagggcuucagcuucaaguacggcaacggcguguggaucggcagaaccaagagcaucagcagcagaaagggcuucgagaugaucugggaccccaacggcuggaccggcaccgacaacaacuucagcaucaagcaggacaucgugggcaucaacgaguggagcggcuacagcggcagcuucgugcagcaccccgagcugaccggccuggacugcaucagacccugcuucuggguggagcugaucagaggcagacccaaggagaacaccaucuggaccagcggcagcagcaucagcuucugcggcgugaacagcuacaccgugggcuggagcuggcccgacggcgccgagcugcccuucaccaucgacaaguga

SEQ ID NO: 185223 - RNA, 1410 nt, Artificial Sequence; identical to SEQ ID NO: 185212
  derived and/or modified CDS sequence (opt4) from neuraminidase__InfluenzaA__AHM98573

SEQ ID NO: 185224 - RNA, 1410 nt, Artificial Sequence
  derived and/or modified CDS sequence (opt4) from neuraminidase__InfluenzaA__AHM98584
augaaccccaaccagaagaucaucaccaucggcagcgugugcaugaccaucggcauggccaaccugauccugcagaucggcaacaucaucagcaucuggaucagccacagcauccagcugggcaaccagagccagaucgagaccugcaaccagagcgugaucaccuacgagaacaacaccuggaucaaccagaccuacgugaacaucagcaacaccaacuucgccgccggccagagcguggugagcgugaagcuggccggcaacagcagccugugccccgugagcggcugggccaucuacagcaaggacaacagcaucagaaucggcagcaagggcgacguguucgugaucagagagcccuucaucagcugcagcccccuggagugcagaaccuucuuccugacccagggcgcccugcugaacgacaagcacagcaacggcaccaucaaggacagaagccccuacagaacccugaugagcugccccaucggcgaggugcccagccccuacaacagcagauucgagagcguggccuggagcgccagcgccugccacgacggcaucaacuggcugaccaucggcaucagcggccccgacaacggcgccguggccgugcugagauacaacggcaucaucaccgacaccaucaagagcuggagaaacaacauccugagaacccaggagagcgagugcgccugcgugaacggcagcugcuucaccaucaugaccgacggccccagcgacggccaggccagcuacaagaucuucagaaucgagaagggcaagaucgugaagagcguggagaugaacgcccccaacuaccacuacgaggagugcagcugcuaccccgacagcagcgagaucaccugcgugugcagagacaacuggcacggcagcaacagacccugggugagcuucaaccagaaccuggaguaccagaucggcuacaucugcagcggcaucuucggcgacaaccccagacccaacgacaagaccggcagcugcggccccgugagcagcaacggcgccaacggcgugaagggcuucagcuucaaguacggcaacggcguguggaucggcagaaccaagagcaucagcagcagaaagggcuucgagaugaucugggaccccaacggcuggaccggcaccgacaacagcuucagcaucaagcaggacaucgugggcaucaacgaguggagcggcuacagcggcagcuucgugcagcaccccgagcugaccggccuggacugcaucagacccugcuucuggguggagcugaucagaggcagacccaaggagaacaccaucuggaccagcggcagcagcaucagcuucugcggcgugaacagcgacaccgugggcuggagcuggcccgacggcgccgagcugcccuucaccaucgacaaguga

SEQ ID NO: 185225 - RNA, 1410 nt, Artificial Sequence; identical to SEQ ID NO: 185212
  derived and/or modified CDS sequence (opt4) from neuraminidase__InfluenzaA__AHM98595

SEQ ID NO: 185226 - RNA, 1410 nt, Artificial Sequence; identical to SEQ ID NO: 180769
  derived and/or modified CDS sequence (opt4) from neuraminidase__InfluenzaA__AHM98606

SEQ ID NO: 185227 - RNA, 1410 nt, Artificial Sequence
  derived and/or modified CDS sequence (opt4) from neuraminidase__InfluenzaA__AHM98617
augaaccccaaccagaagaucaucaccaucggcagcgugugcaugaccaucggcauggccaaccugauccugcagaucggcaacaucaucagcaucuggaucagccacagcauccagcugggcaaccagagccagaucgagaccugcaaccagagcgugaucaccuacgagaacaacaccuggaucaaccagaccuacgugaacaucagcaacaccaacuucgccgccggccagagcguggugagcgugaagcuggccggcaacagcagccugugccccgugagcggcugggccaucuacagcaaggacaacagcaucagaaucggcagcaagggcgacguguucgugaucagagagcccuucaucagcugcagcccccugggcugcagaaccuucuuccugacccagggcgcccugcugaacgacaagcacagcaacggcaccaucaaggacagaagccccuacagaacccugaugagcugccccaucggcgaggugcccagccccuacaacagcagauucgagagcguggccuggagcgccagcgccugccacgacggcaucaacuggcugaccaucggcaucagcggccccgacaacggcgccguggccgugcugaaguacaacggcaucaucaccgacaccaucaagagcuggagaaacaacauccugagaacccaggagagcgagugcgccugcgugaacggcagcugcuucaccaucaugaccgacggccccagcgacggccaggccagcuacaagaucuucagaaucgagaagggcaagaucgugaagagcguggagaugaacgcccccaacuaccacuacgaggagugcagcugcuaccccgacagcagcgagaucaccugcgugugcagagacaacuggcacggcagcaacagacccugggugagcuucaaccagaaccuggaguaccagaucggcuacaucugcagcggcaucuucggcgacaaccccagacccaacgacaagaccggcagcugcggccccgugagcagcaacggcgccaacggcgugaagggcuucagcuucaaguacggcaacggcguguggaucggcagaaccaagagcaucagcagcagaaagggcuucgagaugaucugggaccccaacggcuggaccggcaccgacaacagcuucagcaucaagcaggacaucgugggcaucaacgaguggagcggcuacagcggcagcuucgugcagcaccccgagcugaccggccuggacugcaucagacccugcuucuggguggagcugaucagaggcagacccaaggagaacaccaucuggaccagcggcagcagcaucagcuucugcggcgugaacagcgacaccgugggcuggagcuggcccgacggcgccgagcugcccuucaccaucgacaaguga

SEQ ID NO: 185228 - RNA, 1410 nt, Artificial Sequence; identical to SEQ ID NO: 185210
  derived and/or modified CDS sequence (opt4) from neuraminidase__InfluenzaA__AHM98628

SEQ ID NO: 185229 - RNA, 1410 nt, Artificial Sequence
  derived and/or modified CDS sequence (opt4) from neuraminidase__InfluenzaA__AHM98639
augaaccccaaccagaagaucaucaccaucggcagcgugugcaugaccaucggcauggccaaccugauccugcagaucggcaacaucaucagcaucuggaucagccacagcauccagcugggcaaccagagccagaucgagaccugcaaccagagcgugaucaucuacgagaacaacaccuggaucaaccagaccuacgugaacaucagcaacaccaacuucgccgccgagcagagcguggugagcgugaagcuggccggcaacagcagccugugccccgugagcggcugggccaucuacagcaaggacaacagcaucagaaucggcagcaagggcgacguguucgugaucagagagcccuucaucagcugcagcccccuggagugcagaaccuucuuccugacccagggcgcccugcugaacgacaagcacagcaacggcaccaucaaggacagaagccccuacagaacccugaugagcugccccaucggcgaggugcccagccccuacaacagcagauucgagagcguggccuggagcgccagcgccugccacgacggcaucaacuggcugaccaucggcaucagcggccccgacaacggcgccguggccgugcugaaguacaacggcaucaucaccgacaccaucaagagcuggagaaacaacauccugagaacccaggagagcgagugcgccugcgugaacggcagcugcuucaccaucaugaccgacggccccagcgacggccaggccagcuacaagaucuucagaaucgagaagggcaagaucgugaagagcguggagaugaacgcccccaacuaccacuacgaggagugcagcugcuaccccgacagcagcgagaucaccugcgugugcagagacaacuggcacggcagcaacagacccugggugagcuucaaccagaaccuggaguaccagaucggcuacaucugcagcggcaucuucggcgacaaccccagacccaacgacaagaccggcagcugcggccccgugagcagcaacggcgccaacggcgugaagggcuucagcuucaaguacggcaacggcguguggaucggcagaaccaagagcaucagcagcagaaagggcuucgagaugaucugggaccccaacggcuggaccggcaccgacaacagcuucagcaucaagcaggacaucgugggcaucaacgaguggagcggcuacagcggcagcuucgugcagcaccccgagcugaccggccuggacugcaucagacccugcuucuggguggagcugaucagaggcagacccaaggagaacaccaucuggaccagcggcagcagcaucagcuucugcggcgugaacagcgacaccgugggcuggagcuggcccgacggcgccgagcugcccuucaccaucgacaaguga

SEQ ID NO: 185230 - RNA, 1410 nt, Artificial Sequence; identical to SEQ ID NO: 180769
  derived and/or modified CDS sequence (opt4) from neuraminidase__InfluenzaA__AHM98650

SEQ ID NO: 185231 - RNA, 1410 nt, Artificial Sequence; identical to SEQ ID NO: 180769
  derived and/or modified CDS sequence (opt4) from neuraminidase__InfluenzaA__AHM98661

SEQ ID NO: 185232 - RNA, 1410 nt, Artificial Sequence
  derived and/or modified CDS sequence (opt4) from neuraminidase__InfluenzaA__AHM98672
augaaccccaaccagaagaucaucaccaucggcagcgugugcaugaccaucggcauggccaaccugauccugcagaucggcaacaucaucagcaucuggaucagccacagcauccagcugggcaaccagagccagaucgagaccugcaaccagaacgugaucaccuacgagaacaacaccugggugaaccagaccuacgugaacaucagcaacaccaacuucgccgccgagcagagcguggugcccgugaagcuggccggcaacagcagccugugccccgugagcggcugggccaucuacagcaaggacaacagcaucagaaucggcagcaagggcgacguguucgugaucagagagcccuucaucagcugcagcccccuggagugcagaaccuucuuccugacccagggcgcccugcugaacgacaagcacagcaacggcaccaucaaggacagaagccccuacagaacccugaugagcugccccaucggcgaggugcccagccccuacaacagcagauucgagagcguggccuggagcgccagcgccugccacgacggcaucaacuggcugaccaucggcaucagcggccccgacaacggcgccguggccgugcugaaguacaacggcaucaucaccgacaccaucaagagcuggagaaacaacauccugagaacccaggagagcgagugcgccugcgugaacggcagcugcuucaccaucaugaccgacggccccagcgacggccaggccagcuacaagaucuucagaaucgagaagggcaagaucgugaagagcguggagaugaacgcccccaacuaccacuacgaggagugcagcugcuaccccgacagcagcgagaucaccugcgugugcagagacaacuggcacggcagcaacagacccugggugagcuucaaccagaaccuggaguaccagaucggcuacaucugcagcggcaucuucggcgacaaccccagacccaacgacaagaccggcagcugcggccccgugagcagcaacggcgccaacggcgugaagggcuucagcuucaaguacggcaacggcguguggaucggcagaaccaagagcaucagcagcagaaagggcuucgagaugaucugggaccccaacggcuggaccggcaccgacaacaacuucagcaucaagcaggacaucgugggcaucaacgaguggagcggcuacagcggcagcuucgugcagcaccccgagcugaccggccuggacugcaucagacccugcuucuggguggagcugaucagaggcagacccaaggagaacaccaucuggaccagcggcagcagcaucagcuucugcggcgugaacagcgacaccgugggcuggagcuggcccgacggcgccgagcugcccuucaccaucgacaaguga

SEQ ID NO: 185233 - RNA, 1410 nt, Artificial Sequence
  derived and/or modified CDS sequence (opt4) from neuraminidase__InfluenzaA__AHM98683
augaaccccaaccagaagaucaucaccaucggcagcgugugcaugaccaucggcauggccaaccugauccugcagaucggcaacaucaucagcaucuggaucagccacagcauccagcugggcaaccagaaccagaucgagaccugcaaccagagcgugaucaccuacgagaacaacaccugggugaaccagaccuacgugaacaucagcaacaccaacuucgacgccggccagagcguggugagcgugagacuggccggcaacagcagccugugccccgugagcggcugggccaucuacagcaaggacaacagcaucagaaucggcagcaagggcgacguguucgugaucagagagcccuucaucagcugcagcccccuggagugcagaaccuucuuccugacccagggcgcccugcugaacgacaagcacagcaacggcaccaucaaggacagaagccccuacagaacccugaugagcugccccaucggcgaggugcccagccccuacaacagcagauucgagagcguggccuggagcgccagcgccugccacgacggcuucaacuggcugaccaucggcaucagcggccccgacaacggcgccguggccgugcugaaguacaacggcaucaucaccgacaccaucagaagcuggagaaacaacauccugagaacccaggagagcgagugcgccugcgugaacggcagcugcuucaccaucaugaccgacggccccagcgacggccaggccagcuacaagaucuucagaaucgagaagggcaagaucgugaagagcguggagaugaacgcccccaacuaccacuacgaggagugcagcugcuaccccgacagcagcgagaucaccugcgugugcagagacaacuggcacggcagcaacagacccugggugagcuucaaccagaaccuggaguaccagaucggcuacaucugcagcggcaucuucggcgacaaccccagacccaacgacaagaccggcagcugcggccccgugagcagcaacggcgccaacggcgugaagggcuucagcuucaaguacggcaacggcguguggaucggcagaaccaagagcaucagcagcagaaagggcuucgagaugaucugggaccccaacggcuggaccggcaccgacaacaacuucagcaucaagcaggacaucgugggcaucaacgaguggagcggcuacagcggcagcuucgugcagcaccccgagcugaccggccuggacugcaucagacccugcuucuggguggagcugaucagaggcagacccaaggagaacaccaucuggaccagcggcagcagcaucagcuucugcggcgugaacagcgacaccgugggcuggagcuggcccgacggcgccgagcugcccuucaccaucgacaaguga

SEQ ID NO: 185234 - RNA, 1410 nt, Artificial Sequence; identical to SEQ ID NO: 180769
  derived and/or modified CDS sequence (opt4) from neuraminidase__InfluenzaA__AHM98693

SEQ ID NO: 185235 - RNA, 1410 nt, Artificial Sequence; identical to SEQ ID NO: 183218
  derived and/or modified CDS sequence (opt4) from neuraminidase__InfluenzaA__AHM98704

SEQ ID NO: 185236 - RNA, 1410 nt, Artificial Sequence; identical to SEQ ID NO: 183218
  derived and/or modified CDS sequence (opt4) from neuraminidase__InfluenzaA__AHM98715

SEQ ID NO: 185237 - RNA, 1410 nt, Artificial Sequence; identical to SEQ ID NO: 180769
  derived and/or modified CDS sequence (opt4) from neuraminidase__InfluenzaA__AHM98726

SEQ ID NO: 185238 - RNA, 1410 nt, Artificial Sequence
  derived and/or modified CDS sequence (opt4) from neuraminidase__InfluenzaA__AHM98737
augaaccccaaccagaagaucaucaccaucggcagcgugugcaugaccaucggcauggccaaccugauccugcagaucggcaacaucaucagcaucuggaucagccacagcauccagcugagaaaccagagccagaucgagaccugcaaccagagcgugaucaacuacgagaacaacaccugggugaaccagaccuacgugaacaucagcaacaccaacuucgccgccggccagagcguggugagcgugaagcuggccggcaacagcagccugugccccgugagcggcugggccaucuacagcaaggacaacagcaucagaaucggcagcaagggcgacguguucgugaucagagagcccuucgugagcugcagcccccuggagugcagaaccuucuuccugacccagggcgcccugcugaacgacaagcacagcaacggcaccaucaaggacagaagccccuacagaacccugaugagcugccccaucggcgaggugcccagccccuacaacagcagauucgagagcguggccuggagcgccagcgccugccacgacggcaucaacuggcugaccaucggcaucagcggccccgacaacggcgccguggccgugcugaaguacaacggcaucaucaccgacaccaucaagagcuggagaaacgacauccugagaacccaggagagcgagugcgccugcgugaacggcagcugcuucaccaucaugaccgacggccccagcgacggccaggccagcuacaagaucuucagaaucgagaagggcaagaucgugaagagcguggagaugaacgcccccaacuaccacuacgaggagugcagcugcuaccccgacagcagcgagaucaccugcgugugcagagacaacuggcacggcagcaacagacccugggugagcuucaaccagaaccuggaguaccagaucggcuacaucugcagcggcaucuucggcgacaaccccagacccaacgacaagaccggcagcugcggccccgugagcagcaacggcgccaacggcgugaagggcuucagcuucaaguacggcaacggcguguggaucggcagaaccaagagcaucagcagcagaaagggcuucgagaugaucugggaccccaacggcuggaccggcaccgacaacaacuucagcaucaagcaggacaucgugggcaucaacgaguggagcggcuacagcggcagcuucgugcagcaccccgagcugaccggccuggacugcaucagacccugcuucuggguggagcugaucagaggcagacccaaggagaacaccaucuggaccagcggcagcagcaucagcuucugcggcgugaacagcgacaccgugggcuggagcuggcccgacggcgccgagcugcccuucaccaucgacaaguga

SEQ ID NO: 185239 - RNA, 1410 nt, Artificial Sequence; identical to SEQ ID NO: 183218
  derived and/or modified CDS sequence (opt4) from neuraminidase__InfluenzaA__AHM98748

SEQ ID NO: 185240 - RNA, 1410 nt, Artificial Sequence; identical to SEQ ID NO: 183218
  derived and/or modified CDS sequence (opt4) from neuraminidase__InfluenzaA__AHM98759

SEQ ID NO: 185241 - RNA, 1410 nt, Artificial Sequence
  derived and/or modified CDS sequence (opt4) from neuraminidase__InfluenzaA__AHM98770
augaaccccaaccagaagaucaucaccaucggcagcgugugcaugaccaucggcauggccaaccugauccugcagaucggcaacaucaucagcaucuggaucagccacagcauccagcugagaaaccagagccagaucgagaccugcaaccagagcgccaucaccuacgagaacaacaccugggugaaccagaccuacgugaacaucagcaacaccaacuucgccgccggccagagcguggugagcgugaagcuggccggcaacagcagccugugccccgugagcggcugggccaucuacagcaaggacaacagcaucagaaucggcagcaagggcgacguguucgugaucagagagcccuucaucagcugcagcccccuggagugcagaaccuucuuccugacccagggcgcccugcugaacgacaagcacagcaacggcaccaucaaggacagaagccccuacagaacccugaugagcugccccaucggcgaggugcccagccccuacaacagcagauucgagagcguggccuggagcgccagcgccugccacgacggcaucaacuggcugaccaucggcaucagcggccccgacaacggcgccguggccgugcugaaguacaacggcaucaucaccgacaccaucaagagcuggagaaacaacauccugagaacccaggagagcgagugcgccugcgugaacggcagcugcuucaccaucaugaccgacggccccagcgacggccaggccagcuacaagaucuucagaaucgagaagggcaagaucgugaagagcguggagaugaacgcccccaacuaccacuacgaggagugcagcugcuaccccgacagcagcgagaucaccugcgugugcagagacaacuggcacggcagcaacagacccugggugagcuucaaccagaaccuggaguaccagaucggcuacaucugcagcggcaucuucggcgacaaccccagacccaacgacaagaccggcagcugcggccccgugagcagcaacggcgccaacggcgugaagggcuucagcuucaaguacggcaacggcguguggaucggcagaaccaagagcaucagcagcagaaagggcuucgagaugaucugggaccccaacggcuggaccggcaccgacaacaacuucagcaucaagcaggacaucgugggcaucaacgaguggagcggcuacagcggcagcuucgugcagcaccccgagcugaccggccuggacugcaucagacccugcuucuggguggagcugaucagaggcagacccaaggagaacaccaucuggaccagcggcagcagcaucagcuucugcggcgugaacagcgacaccgugggcuggagcuggcccgacggcgccgagcugcccuucaccaucgacaaguga

SEQ ID NO: 185242 - RNA, 1410 nt, Artificial Sequence
  derived and/or modified CDS sequence (opt4) from neuraminidase__InfluenzaA__AHM98781
augaaccccaaccagaagaucaucaccaucggcagcgugugcaugaccaucggcauggccaaccugauccugcagaucggcaacaucaucagcaucuggaucagccacagcauccagcugggcaaccagaaccagaucgagaccugcaaccagagcgugaucaccuacgagaacaacaccugggugaaccagaccuacgugaacaucagcaacaccaacuucgccgccggccagagcguggugagcgugaagcuggccggcaacagcagccugugccccgugagcggcugggccaucuacagcaaggacaacagcaucagaaucggcagcaagggcgacguguucgugaucagagagcccuucaucagcugcagcccccuggagugcagaaccuucuuccugacccagggcgcccugcugaacgacaagcacagcaacggcaccaucaaggacagaagccccuacagaacccugaugagcugccccaucggcgaggugcccagccccuacaacagcagauucgagagcguggccuggagcgccagcgccugccacgacggcaucaacuggcugaccaucggcaucagcggccccgacaacggcgccguggccgugcugaaguacaacggcaucaucaccgacaccaucaagagcuggagaaacaacauccugagaacccaggagagcgagugcgccugcgugaacggcagcugcuucaccaucaugaccgacggccccagcgacggccaggccagcuacaagaucuucagaaucgagaagggcaagaucgugaagagcguggagaugaacgcccccaacuaccacuacgaggagugcagcugcuaccccgacagcagcgagaucaccugcgugugcagagacaacuggcacggcagcaacagacccugggugagcuucaaccagaaccuggaguaccagaucggcuacaucugcagcggcaucuucggcgacaaccccagacccagcgacaagaccggcagcugcggccccgugagcagcaacggcgccaacggcgugaagggcuucagcuucaaguacggcaacggcguguggaucggcagaaccaagagcaucagcagcagaaagggcuucgagaugaucugggaccccaacggcuggaccggcaccgacaacagcuucagcaucaagcaggacaucgugggcaucaacgaguggagcggcuacagcggcagcuucgugcagcaccccgagcugaccggccuggacugcaucagacccugcuucuggguggagcugaucagaggcagacccaaggagaacaccaucuggaccagcggcagcagcaucagcuucugcggcgugaacagcggcaccgugggcuggagcuggcccgacggcgccgagcugcccuucaccaucgacaaguga

SEQ ID NO: 185243 - RNA, 1410 nt, Artificial Sequence; identical to SEQ ID NO: 180769
  derived and/or modified CDS sequence (opt4) from neuraminidase__InfluenzaA__AHM98801

SEQ ID NO: 185244 - RNA, 1410 nt, Artificial Sequence; identical to SEQ ID NO: 180317
  derived and/or modified CDS sequence (opt4) from neuraminidase__InfluenzaA__AHM98812

SEQ ID NO: 185245 - RNA, 1410 nt, Artificial Sequence
  derived and/or modified CDS sequence (opt4) from neuraminidase__InfluenzaA__AHM98823
augaaccccaaccagaagaucaucaccaucggcagcgugugcaugaccaucggcauggccaaccugauccugcagaucggcaacaucaucagcaucuggaucagccacagcauccagcugggcaaccagagccagaucgagaccugcaaccagagcgugaucaccuacgagaacaacaccugggugaaccagaccuacaucaacaucagcaacaccaacuucgccgccggccagagcguggugagcgugaagcuggccggcaacagcagccugugccccgugagcggcugggccaucuacagcaaggacaacagcaucagaaucggcagcaagggcgacguguucgugaucagagagcccuucaucagcugcagccccagcgagugcagaaccuucuuccugacccagggcgcccugcugaacgacaagcacagcaacggcaccaucaaggacagaagccccuacagaacccugaugagcugccccaucggcgaggugcccagccccuacaacagcagauucgagagcguggccuggagcgccagcgccugccacgacggcaucaacuggcugaccaucggcaucagcggccccgacaacggcgccguggccgugcugaaguacaacggcaucaucaccgacaccaucaagagcuggagaaacaacauccugagaacccaggagagcgagugcgccugcgugaacggcagcugcuucaccaucaugaccgacggccccagcgacggccaggccagcuacaagaucuucagaaucgagaagggcaagaucgugaagagcguggagaugaacgcccccaacuaccacuacgaggagugcagcugcuaccccgacagcagcgagaucaccugcgugugcagagacaacuggcacggcagcaacagacccugggugagcuucaaccagaaccuggaguaccagaucggcuacaucugcagcggcaucuucggcgacaaccccagacccaacgacaagaccggcagcugcggccccgugagcagcaacggcgccaacggcgugaagggcuucagcuucaaguacggcaacggcguguggaucggcagaaccaagagcaucagcagcagaaagggcuucgagaugaucugggaccccaacggcuggaccggcaccgacaacaacuucagcaucaagcaggacaucgugggcaucaacgaguggagcggcuacagcggcagcuucgugcagcaccccgagcugaccggccuggacugcaucagacccugcuucuggguggagcugaucagaggcagacccaaggagaacaccaucuggaccagcggcagcagcaucagcuucugcggcgugaacagcgacaccgugggcuggagcuggcccgacggcgccgagcugcccuucaccaucgacaaguga

SEQ ID NO: 185246 - RNA, 1410 nt, Artificial Sequence
  derived and/or modified CDS sequence (opt4) from neuraminidase__InfluenzaA__AHM98839
augaaccccaaccagaagaucaucaccaucggcagcgugugcaugaccgugggcauggccaaccugauccugcagaucggcaacaucaucagcaucuggaucagccacagcauccagcugggcaaccagagccagaucgagaccugcaaccagagcgugaucaccuacgagaacaacaccugggugaaccagaccuacgugaacaucagcaacaccaacuucgccgccggccagagcguggugagcgugaagcuggccggcaacagcagccugugccccgugagcggcugggccaucuacagcaaggacaacagcaucagaaucggcagcaagggcgacguguucgugaucagagagcccuucaucagcugcagcccccuggagugcagaaccuucuuccugacccagggcgcccugcugaacgacaagcacagcaacggcaccaucaaggacagaagccccuacagaacccugaugagcugccccaucggcgaggugcccagccccuacaacagcagauucgagagcguggccuggagcgccagcgccugccacgacggcaucaacuggcugaccaucggcaucagcggccccgacaacggcgccguggccgugcugaaguacaacggcaucaucaccgacaccaucaagagcuggagaaacaacauccugagaacccaggagagcgagugcgccugcgugaacggcagcugcuucaccaucaugaccgacggccccagcgacggccaggccagcuacaagaucuucagaaucgagaagggcaagaucgugaagagcguggagaugaacgcccccaacuaccacuacgaggagugcagcugcuaccccgacagcagcgagaucaccugcgugugcagagacaacuggcacggcagcaacagacccugggugagcuucaaccagaaccuggaguaccagaucggcuacaucugcagcggcaucuucggcgacaaccccagacccaacgacaagaccggcagcugcggccccgugagcagcaacggcgccaacggcgugaagggcuucagcuucaaguacggcaacggcguguggaucggcagaaccaagagcaucagcagcagaaagggcuucgagaugaucugggaccccaacggcuggaccggcaccgacaacaacuucagcaucaagcaggacaucgugggcaucaacgaguggagcggcuacagcggcagcuucgugcagcaccccgagcugaccggccuggacugcaucagacccugcuucuggguggagcugaucagaggcagacccaaggagaacaccaucuggaccagcggcagcagcaucagcuucugcggcgugaacagcgacaccgugggcuggagcuggcccgacggcgccgagcugcccuucaccaucgacaaguga

SEQ ID NO: 185247 - RNA, 1410 nt, Artificial Sequence; identical to SEQ ID NO: 180317
  derived and/or modified CDS sequence (opt4) from neuraminidase__InfluenzaA__AHM98850

SEQ ID NO: 185248 - RNA, 1410 nt, Artificial Sequence; identical to SEQ ID NO: 180317
  derived and/or modified CDS sequence (opt4) from neuraminidase__InfluenzaA__AHM98861

SEQ ID NO: 185249 - RNA, 1410 nt, Artificial Sequence
  derived and/or modified CDS sequence (opt4) from neuraminidase__InfluenzaA__AHM98901
augaaccccaaccagaagaucaucaccaucggcagcgugugcaugaccaucggcauggccaaccugauccugcagaucggcaacaucaucagcaucuggaucagccacagcauccagcugggcaaccagaaccagaucgagaccugcaaccagagcgugaucaccuacgagaacaacaccugggugaaccagaccuacgugaacaucagcaacaccaacuucgccgccggccagagcguggugagcgugaagcuggccggcaacagcagccugugccccgugagcggcugggccaucuacagcaaggacaacagcaucagaaucggcagcaagggcgacguguucgugaucagagagcccuucaucagcugcagcccccuggagugcagaaccuucuuccugacccagggcgcccugcugaacgacaagcacagcaacggcaccaucaaggacagaagcccccacagaacccugaugagcugccccaucggcgaggugcccagccccuacaacagcagauucgagagcguggccuggagcgccagcgccugccacgacggcaucaacuggcugaccaucggcaucagcggccccgacaacggcgccguggccgugcugaaguacaacggcaucaucaccgacaccaucaagagcuggagaaacaacauccugagaacccaggagagcgagugcgccugcgugaacggcagcugcuucaccaucaugaccgacggccccagcgacggccaggccagcuacaagaucuucagaaucgagaagggcaagaucgugaagagcguggagaugaacgcccccaacuaccacuacgaggagugcagcugcuaccccgacagcagcgagaucaccugcgugugcagagacaacuggcacggcagcaacagacccugggugagcuucaaccagaaccuggaguaccagaucggcuacaucugcagcggcaucuucggcgacaaccccagacccaacgacaagaccggcagcugcggccccgugagcagcaacggcgccaacggcgugaagggcuucagcuucaaguacggcaacggcguguggaucggcagaaccaagagcaucagcagcagaaagggcuucgagaugaucugggaccccaacggcuggaccggcaccgacaacaacuucagcaucaagcaggacaucgugggcaucaacgaguggagcggcuacagcggcagcuucgugcagcaccccgagcugaccggccuggacugcaucagacccugcuucuggguggagcugaucagaggcagacccaaggagaacaccaucuggaccagcggcagcagcaucagcuucugcggcgugaacagcgacaccgugggcuggagcuggcccgacggcgccgagcugcccuucaccaucgacaaguga

SEQ ID NO: 185250 - RNA, 1410 nt, Artificial Sequence; identical to SEQ ID NO: 183906
  derived and/or modified CDS sequence (opt4) from neuraminidase__InfluenzaA__AHM98912

SEQ ID NO: 185251 - RNA, 1410 nt, Artificial Sequence; identical to SEQ ID NO: 183906
  derived and/or modified CDS sequence (opt4) from neuraminidase__InfluenzaA__AHM98923

SEQ ID NO: 185252 - RNA, 1410 nt, Artificial Sequence; identical to SEQ ID NO: 183906
  derived and/or modified CDS sequence (opt4) from neuraminidase__InfluenzaA__AHM98935

SEQ ID NO: 185253 - RNA, 1410 nt, Artificial Sequence; identical to SEQ ID NO: 183906
  derived and/or modified CDS sequence (opt4) from neuraminidase__InfluenzaA__AHM98943

SEQ ID NO: 185254 - RNA, 1410 nt, Artificial Sequence; identical to SEQ ID NO: 183906
  derived and/or modified CDS sequence (opt4) from neuraminidase__InfluenzaA__AHM98954

SEQ ID NO: 185255 - RNA, 1410 nt, Artificial Sequence; identical to SEQ ID NO: 183906
  derived and/or modified CDS sequence (opt4) from neuraminidase__InfluenzaA__AHM98972

SEQ ID NO: 185256 - RNA, 1410 nt, Artificial Sequence; identical to SEQ ID NO: 183906
  derived and/or modified CDS sequence (opt4) from neuraminidase__InfluenzaA__AHM98978

SEQ ID NO: 185257 - RNA, 1410 nt, Artificial Sequence; identical to SEQ ID NO: 183906
  derived and/or modified CDS sequence (opt4) from neuraminidase__InfluenzaA__AHM98990

SEQ ID NO: 185258 - RNA, 1410 nt, Artificial Sequence; identical to SEQ ID NO: 183906
  derived and/or modified CDS sequence (opt4) from neuraminidase__InfluenzaA__AHM99000

SEQ ID NO: 185259 - RNA, 1410 nt, Artificial Sequence; identical to SEQ ID NO: 183906
  derived and/or modified CDS sequence (opt4) from neuraminidase__InfluenzaA__AHM99011

SEQ ID NO: 185260 - RNA, 1410 nt, Artificial Sequence; identical to SEQ ID NO: 183882
  derived and/or modified CDS sequence (opt4) from neuraminidase__InfluenzaA__AHM99022

SEQ ID NO: 185261 - RNA, 1410 nt, Artificial Sequence; identical to SEQ ID NO: 183882
  derived and/or modified CDS sequence (opt4) from neuraminidase__InfluenzaA__AHM99034

SEQ ID NO: 185262 - RNA, 1410 nt, Artificial Sequence; identical to SEQ ID NO: 183882
  derived and/or modified CDS sequence (opt4) from neuraminidase__InfluenzaA__AHM99046

SEQ ID NO: 185263 - RNA, 1410 nt, Artificial Sequence; identical to SEQ ID NO: 183882
  derived and/or modified CDS sequence (opt4) from neuraminidase__InfluenzaA__AHM99057

SEQ ID NO: 185264 - RNA, 1410 nt, Artificial Sequence; identical to SEQ ID NO: 183882
  derived and/or modified CDS sequence (opt4) from neuraminidase__InfluenzaA__AHM99068

SEQ ID NO: 185265 - RNA, 1410 nt, Artificial Sequence; identical to SEQ ID NO: 183906
  derived and/or modified CDS sequence (opt4) from neuraminidase__InfluenzaA__AHM99078

SEQ ID NO: 185266 - RNA, 1410 nt, Artificial Sequence
  derived and/or modified CDS sequence (opt4) from neuraminidase__InfluenzaA__AHN00720
augaacaccaaccagagaaucaucaccaucggcaccaucugccugaucgugggcaucaucagccugcugcugcagaucggcaacaucgugagccuguggaucagccacagcauccagaccgaggagaagagccaccccgaggugugcaaccagagcgugaucaccuacgagaacaacaccugggugaaccagaccuacaucaacaucagcaacaccaacaucgccgccggccagggcgugacccccaucauccuggccggcaacagcagccugugccccaucagcggcugggccaucuacagcaaggacaacagcaucagaaucggcagcaagggcgacaucuucgugaugagagagcccuucaucagcugcagccaccuggagugcagaaccuucuuccugacccagggcgcccugcugaacgacagacacagcaacggcaccgugaaggacagaagccccuacagaacccugaugagcugccccaucggcgaggcccccagccccuacaacagcagauucgagagcguggccuggagcgccagcgccugccacgacggcaugggcuggcugaccaucggcaucagcggccccgacaacggcgccguggccgugcugaaguacaacggcaucaucaccgacaccaugaagagcuggagaaacaagauccugagaacccaggagagcgagugcgugugcaucaacggcagcugcuucaccaucaugaccgacggccccagcaacggccaggccagcuacaagaucuucaagauggagaagggcaagaucaucaagagcaucgagcuggacgcccccaacuaccacuacgaggagugcagcugcuaccccgacaccggcaagguggugugcgugugcagagacaacuggcacgccagcaacagacccugggugagcuucgaccagaaccuggacuaccagaucggcuacaucugcagcggcguguucggcgacaaccccagaagcaacgacggcaagggcaacugcggccccgugcugagcaacggcgccaacggcgugaagggcuucagcuucagauacggcaacggcguguggaucggcagaaccaagagcaucagcagcagaagcggcuucgagaugaucugggaccccaacggcuggaccgagaccgacagcagcuucagcaugaagcaggacaucaucgcccugaccgacuggagcggcuacagcggcagcuucgugcagcaccccgagcugaccggcaugaacugcaucagacccugcuucuggguggagcugaucagaggccagcccaaggagagcaccaucuggaccagcggcagcagcaucagcuucugcggcgugaacagcgagaccgccagcuggagcuggcccgacggcgccgaccugcccuucaccaucgacaaguga

SEQ ID NO: 185267 - RNA, 1410 nt, Artificial Sequence
  derived and/or modified CDS sequence (opt4) from neuraminidase__InfluenzaA__AHN00767
augaacaccaaccagagaaucaucaccaucggcaccaucugccugaucgugggcaucaucagccugcugcugcagaucggcaacaucgugagccuguggaucagccacagcauccagaccggcgagaagagccaccccgaggugugcaaccagagcgugaucaccuacgagaacaacaccugggugaaccagaccuacgugaacaucagcaacaccaacaucgccgccggccagggcgugacccccaucauccuggccggcaacagcagccugugccccaucagcggcugggccaucuacagcaaggacaacagcaucagaaucggcagcaagggcgacaucuucgugaugagagagcccuucaucagcugcagccaccuggagugcagaaccuucuuccugacccagggcgcccugcugaacgacagacacagcaacggcaccgugaaggacagaagccccuacagaacccugaugagcugccccaucggcgaggcccccagccccuacaacagcagauucgagagcguggccuggagcgccagcgccugccacgacggcaugggcuggcugaccaucggcaucagcggccccgacaacggcgccguggccgugcugaaguacaacggcaucaucaccgacaccaucaagagcuggagaaacaagauccugagaacccaggagagcgagugcgugugcaucaacggcagcugcuucaccaucaugaccgacggccccagcaacggccaggccagcuacaagaucuucaagauggagaagggcaagaucaucaagagcaucgagcuggacgcccccaacuaccacuacgaggagugcagcugcuaccccgacaccggcaagguggugugcgugugcagagacaacuggcacgccagcaacagacccugggugagcuucgaccagaaccuggacuaccagaucggcuacaucugcagcggcguguucggcgacaaccccagaagcaacgacggcaagggcaacugcggccccgugcugagcaacggcgccaacggcgugaagggcuucagcuucagauacggcaacggcguguggaucggcagaaccaagagcaucagcagcagaagcggcuucgagaugaucugggaccccaacggcuggaccgagaccgacagcagcuucagcaugaagcaggacaucaucgcccugaccgacuggagcggcuacagcggcagcuucgugcagcaccccgagcugaccggcaugaacugcaucagacccugcuucuggguggagcugaucagaggccagcccaaggagagcaccaucuggaccagcggcagcagcaucagcuucugcggcgugaacagcgagaccgccagcuggagcuggcccgacggcgccgaccugcccuucaccaucgacaaguga

SEQ ID NO: 185268 - RNA, 1398 nt, Artificial Sequence
  derived and/or modified CDS sequence (opt4) from neuraminidase__InfluenzaA__AHN96324
augaaccccaaccagaagauccugugcaccagcgccaccgccaucaucaucggcgccaucgccgugcugaucggcaucgccaaccugggccugaacaucggccugcaccugaagcccagcugcaacugcagccacagccagcccgagaccaccaacaccagccagaccaucaucaacaacuacuacaacgagaccaacaucaccaacauccagauggaggagagaaccagcagaaacuucaacaaccugaccaagggccugugcaccaucaacagcuggcacaucuacggcaaggacaacgccgugagaaucggcgagagcagcgacgugcuggugaccagagagcccuacgugagcugcgaccccgacgagugcagauucuacgcccugagccagggcaccaccaucagaggcaagcacagcaacggcaccauccacgacagaagccaguacagagcccugaucagcuggccccugagcagcccccccaccguguacaacagcagaguggagugcaucggcuggagcagcaccagcugccacgacggcaagagcagaaugagcaucugcaucagcggccccaacaacaacgccagcgccguggugugguacaacagaagacccguggccgagaucaacaccugggccagaaacauccugagaacccaggagagcgagugcgugugccacaacggcgugugccccgugguguucaccgacggcagcgccaccggccccgccgacaccagaaucuacuacuucaaggagggcaagauccugaagugggagagccugaccggcaccgccaagcacaucgaggagugcagcugcuacggcgagagaaccggcaucaccugcaccugcagagacaacuggcagggcagcaacagacccguggugcagaucgaccccguggccaugacccacaccagccaguacaucugcagccccgugcugaccgacaaccccagacccaacgaccccaacaucggcaagugcaacgaccccuaccccggcaacaacaacaacggcgugaagggcuucagcuaccuggacggcgccaacaccuggcugggcagaaccaucagcaccgccagcagaagcggcuacgagaugcugaaggugcccaacgcccugaccgacgacagaagcaagcccauccagggccagaccaucgugcugaacgccgacuggagcggcuacagcggcagcuucauggacuacugggccgagggcgacugcuacagagccugcuucuacguggagcugaucagaggcagacccaaggaggacaaggugugguggaccagcaacagcaucgugagcaugugcagcagcaccgaguuccugggccaguggaacuggcccgacggcgccaagaucgaguacuuccuguga

SEQ ID NO: 185269 - RNA, 1410 nt, Artificial Sequence; identical to SEQ ID NO: 181203
  derived and/or modified CDS sequence (opt4) from neuraminidase__InfluenzaA__AHN96448

SEQ ID NO: 185270 - RNA, 1410 nt, Artificial Sequence; identical to SEQ ID NO: 182206
  derived and/or modified CDS sequence (opt4) from neuraminidase__InfluenzaA__AHN96450

SEQ ID NO: 185271 - RNA, 1410 nt, Artificial Sequence
  derived and/or modified CDS sequence (opt4) from neuraminidase__InfluenzaA__AHN96451
augaaccccaaccagaagaucaucaccaucggcagcgugagccugaccaucagcaccaucugcuucuucaugcagaucgccauccugaucaccaccgugacccugcacuucaagcaguacgaguucaacagcccccccaacaaccaggugaugcugugcgagcccaccaucaucgagagaaacaucaccgagaucauguaccugaccaacaccaccaucgagaaggagaucugccccaagcccgccgaguacagaaacuggagcaagccccagugcggcaucaccggcuucgcccccuucagcaaggacaacagcaucagacugagcgccggcggcgacaucugggugaccagagagcccuacgugagcugcgaccccgacaagugcuaccaguucgcccugggccagggcaccacccugaacaacgugcacagcaacaacaccgugagagacagaacccccuacagaacccugcugaugaacgagcugggcgugcccuuccaccugggcaccaagcaggugugcaucgccuggagcagcagcagcugccacgacggcaaggccuggcugcacgugugcaucaccggcgacgacaagaacgccaccgccagcuucaucuacaacggcagacugguggacagcguggugagcuggagcaaggagauccugagaacccaggagagcgagugcgugugcaucaacggcaccugcaccguggugaugaccgacggcagcgccagcggcaaggccgacaccaagauccuguucaucgaggagggcaagaucgugcacaccagcacccugagcggcagcgcccagcacguggaggagugcagcugcuaccccagauaccccggcgugagaugcgugugcagagacaacuggaagggcagcaacagacccaucguggacaucaacaucaaggaccacagcaucgugagcagcuacgugugcagcggccuggugggcgacacccccagaaagaacgacagcagcagcagcagccacugccuggaccccaacaacgaggagggcggccacggcgugaagggcugggccuucgacgacggcaacgacguguggaugggcagaaccaucaacgagaccagcagacugggcuacgagaccuucaaggugaucgagggcuggagcaaccccaagagcaagcugcagaucaacagacaggugaucguggacagaggcgacagaagcggcuacagcggcaucuucagcguggagggcaagagcugcaucaacagaugcuucuacguggagcugaucagaggcagaaaggaggagaccgaggugcuguggaccagcaacagcaucgugguguucugcggcaccagcggcaccuacggcaccggcagcuggcccgacggcgccgaccugaaccugaugcccaucuga

SEQ ID NO: 185272 - RNA, 1410 nt, Artificial Sequence
  derived and/or modified CDS sequence (opt4) from neuraminidase__InfluenzaA__AHN96453
augaaccccaaccagaagaucaucaccaucggcagcgugagccugaccaucagcaccaucugcuucuucaugcagaucgccauccugaucaccaccgugacccugcacuucaagcaguacgaguucaacagcccccccaacaaccaggugaugcugugcgagcccaccaucaucgagagaaacaucaccgagaucguguaccugaccaacaccaccaucgagaaggagaucugccccaagcccgccgaguacagaaacuggagcaagccccagugcggcaucaccggcuucgcccccuucagcaaggacaacagcaucagacugagcgccggcggcgacaucugggugaccagagagcccuacgugagcugcgaccccgacaagugcuaccaguucgcccugggccagggcaccacccuggacaacgugcacagcaacaacaccgugagaaacagaacccccuacagaacccugcugaugaacgagcugggcgugcccuuccaccugggcaccaagcaggugugcaucgccuggagcagcagcagcugccacgacggcaaggccuggcugcacgugugcaucaccggcgacgacaagaacgccaccgccagcuucaucuacaacggcagacugguggacagcguggugagcuggagcaaggacauccugagaacccaggagagcgagugcgugugcaucaacggcaccugcaccguggugaugaccgacggcagcgccagcggcaaggccgacaccaagauccuguucaucgaggagggcaagaucgugcacaccagcacccugagcggcagcgcccagcacguggaggagugcagcugcuaccccagauaccccggcgugagaugcgugugcagagacaacuggaagggcagcaacagacccaucguggacaucaacaucaaggaccacagcaucgugagcagcuacgugugcagcggccuggugggcgacacccccagaaagaacgacagcagcagcagcagccacugccuggaccccaacaacgaggagggcggccacggcgugaagggcugggccuucgacgacggcaacgacguguggaugggcagaaccaucaacgagaccagcagacugggcuacgagaccuucaaggugaucgagggcuggagcaaccccaagagcaagcugcagaucaacagacaggugaucguggacagaggcgacagaagcggcuacagcggcaucuucagcaucgagggcaagagcugcaucaacagaugcuucuacguggagcugaucagaggcagaaaggaggagaccgaggugcuguggaccagcaacagcaucgugguguucugcggcaccagcggcaccuacggcaccggcagcuggcccgacggcgccgaccugaaccugaugcccaucuga

SEQ ID NO: 185273 - RNA, 1410 nt, Artificial Sequence
  derived and/or modified CDS sequence (opt4) from neuraminidase__InfluenzaA__AHZ13526
augaaccccaaccagaagaucaucaccaucggcagcgugagccugaccaucgccaccaucugcuuccugaugcagaucgccauccuggugaccaccgugacccugcacuucaagcaguacgagugcagcagcccccccaacaaccaggugaugcccugcgagcccaucaucaucgagagaaacaugaccgagaucguguaccugaccaacaccaccaucgagaaggagaucugccccaagcugguggaguacagaaacuggagcaagccccagugcaagaucaccggcuucgcccccuucagcaaggacaacagcaucagacugagcgccggcggcgacaucugggugaccagagagcccuacgugagcugcgaccccggcaagugcuaccaguucgcccugggccagggcaccacccugaacaacaagcacagcaacgacaccauccacgacagaacccccuacagaacccugcugaugaacgagcugggcgugcccuuccaccugggcaccaagcaggugugcaucgccuggagcagcagcagcugccacgacggcaaggccuggcugcacgugugcgugaccggccacgacaagaacgccaccgccagcuucaucuacgacggcagacugguggacagcaucggcagcuggagcaagaacauccugagaacccaggagagcgagugcgugugcaucaacggcaccugcaccguggugaugaccgacggcagcgccagcgacagagccgacaccaagauccuguucaucgaggagggcaagaucgugcacaucagcccccugagcggcagcgcccagcacguggaggagugcagcugcuaccccagauaccccggcgugagaugcgugugcagagacaacuggaagggcagcaacagacccaucguggacaucaacgugaaggacuacagcaucgugagcagcuacgugugcagcggccuggugggcgacacccccagaaagaacgacggcagcagcagcagcuacugcagaaaccccaacaacgagaagggcaaccacggcgugaagggcugggccuucgacgacggcaacgacguguggaugggcagaaccaucggcgaggagcugagaagcggcuacgagaccuucaaggugaucggcggcuggagcacccccaacagcaagcugcagaucaacagacaggugaucguggacagcaacaacagaagcggcuacagcggcaucuucagcguggagggcaagagcugcaucaacagaugcuucuacguggagcugaucagaggcagagagcaggagaccagagugugguggaccagcaacagcaucgugguguucugcggcaccagcggcaccuacggcaccggcagcuggcccgacggcgccgacaucaaccugaugcccaucuga

SEQ ID NO: 185274 - RNA, 1413 nt, Artificial Sequence; identical to SEQ ID NO: 180265
  derived and/or modified CDS sequence (opt4) from neuraminidase__InfluenzaA__AHZ13584

SEQ ID NO: 185275 - RNA, 1410 nt, Artificial Sequence; identical to SEQ ID NO: 182982
  derived and/or modified CDS sequence (opt4) from neuraminidase__InfluenzaA__AHZ35575

SEQ ID NO: 185276 - RNA, 1410 nt, Artificial Sequence; identical to SEQ ID NO: 182982
  derived and/or modified CDS sequence (opt4) from neuraminidase__InfluenzaA__AHZ35587

SEQ ID NO: 185277 - RNA, 1410 nt, Artificial Sequence
  derived and/or modified CDS sequence (opt4) from neuraminidase__InfluenzaA__AHZ35611
augaaccccaaccagaagaucaucaccaucggcagcgugagccugaccaucagcaccaucugcuucuucaugcagaucgccauccugaucaccaccgugacccugcacuucaagcaguacgaguucaacagcccccccaacaaccaggugaugcugugcgagcccaccaucaucgagagaaacaucaccgagaucguguaccugaccaacaccaccaucgagaaggagaucugccccaagcccgccgaguacagaaacuggagcaagccccagugcgacaucaccggcuucgcccccuucagcaaggacaacagcaucagacugagcgccggcggcgacaucugggugaccagagagcccuacgugagcugcgaccccgacaagugcuaccaguucgcccugggccagggcaccacccugaacaacgugcacagcaacaacaccgugagagacagaacccccuacagaacccugcugaugaacgagcugggcgugcccuuccaccugggcaccaagcaggugugcaucgccuggagcagcagcagcugccacgacggcaaggccuggcugcacgugugcaucaccggcgacgacaagaacgccaccgccagcuucaucuacaacggcagacugguggacagcguggugagcuggagcaaggagauccugagaacccaggagagcgagugcgugugcaucaacggcaccugcaccguggugaugaccgacggcagcgccagcggcaaggccgacaccaagauccuguucaucgaggagggcaagaucgugcacaccagcacccugagcggcagcgcccagcacguggaggagugcagcugcuaccccagauaccccggcgugagaugcgugugcagagacaacuggaagggcagcaacagacccaucguggacaucaacaucaaggaccacagcaucgugagcagcuacgugugcagcggccuggugggcgacacccccagaaagaacgacagcagcagcagcagccacugccuggaccccaacaacgaggagggcggccacggcgugaagggcugggccuucgacgacggcaacgacguguggaugggcagaaccaucaacgagaccagcagacugggcuacgagaccuucaaggugaucgagggcuggagcaaccccaagagcaagcugcagaucaacagacaggugaucguggacagaggcgacagaagcggcuacagcggcaucuucagcguggagggcagaagcugcaucaacagaugcuucuacguggagcugaucagaggcagaaaggaggagaccgaggugcuguggaccagcaacagcaucgugguguucugcggcaccagcggcaccuacggcaccggcagcuggcccgacggcgccgaccugaaccugaugcccaucuga

SEQ ID NO: 185278 - RNA, 1410 nt, Artificial Sequence; identical to SEQ ID NO: 182982
  derived and/or modified CDS sequence (opt4) from neuraminidase__InfluenzaA__AHZ35623

SEQ ID NO: 185279 - RNA, 1410 nt, Artificial Sequence; identical to SEQ ID NO: 182982
  derived and/or modified CDS sequence (opt4) from neuraminidase__InfluenzaA__AHZ35635

SEQ ID NO: 185280 - RNA, 1410 nt, Artificial Sequence
  derived and/or modified CDS sequence (opt4) from neuraminidase__InfluenzaA__AHZ35647
augaaccccaaccagaagaucaucaccaucggcagcgugagccugaccaucagcaccaucugcuucuucaugcagaucgccauccugaucaccaccgugacccugcacuucaagcaguacgaguucaacagcccccccaacaaccaggugaugcugugcgagcccaccaucaucgagagaaacaucaccgagaucguguaccugaccaacaccaccaucgagaaggagaucugccccaagcccgccgaguacagaaacuggagcaagccccagugcgacaucaccggcuucgcccccuucagcaaggacaacagcaucagacugagcgccggcggcgacaucugggugaccagagagcccuacgugagcugcgaccccgacaagugcuaccaguucgcccugggccagggcaccacccugaacaacgugcacagcaacaacaccgugagagacagaacccccuacagaacccugcugaugaacgagcugggcgugcccuuccaccugggcaccaagcaggugugcaucgccuggagcagcagcagcugccacgacggcaaggccuggcugcacgugugcaucaccggcgacgacaagaacgccaccgccagcuucaucuacaacggcagacugguggacagcguggugagcuggagcaaggagauccugagaacccaggagagcgagugcgugugcaucaacggcaccugcaccguggugaugaccgacggcagcgccagcggcaaggccgacaccaagauccuguucaucgaggagggcaagaucgugcacaccagcacccugagcggcagcgcccagcacguggaggagugcagcugcuaccccagauaccccgacgugagaugcgugugcagagacaacuggaagggcagcaacagacccaucguggacaucaacaucaaggaccacagcaucgugagcagcuacgugugcagcggccuggugggcgacacccccagaaagaacgacagcagcagcagcagccacugccuggaccccaacaacgaggagggcggccacggcgugaagggcugggccuucgacgacggcaacgacguguggaugggcagaaccaucaacgagaccagcagacugggcuacgagaccuucaaggugaucgagggcuggagcaaccccaagagcaagcugcagaucaacagacaggugaucguggacagaggcgacagaagcggcuacagcggcaucuucagcguggagggcaagagcugcaucaacagaugcuucuacguggagcugaucagaggcagaaaggaggagaccgaggugcuguggaccagcaacagcaucgugguguucugcggcaccagcggcaccuacggcaccggcagcuggcccgacggcgccgaccugaaccugaugcccaucuga

SEQ ID NO: 185281 - RNA, 1410 nt, Artificial Sequence; identical to SEQ ID NO: 182982
  derived and/or modified CDS sequence (opt4) from neuraminidase__InfluenzaA__AHZ35659

SEQ ID NO: 185282 - RNA, 1410 nt, Artificial Sequence; identical to SEQ ID NO: 182982
  derived and/or modified CDS sequence (opt4) from neuraminidase__InfluenzaA__AHZ35671

SEQ ID NO: 185283 - RNA, 1410 nt, Artificial Sequence; identical to SEQ ID NO: 182982
  derived and/or modified CDS sequence (opt4) from neuraminidase__InfluenzaA__AHZ35683

SEQ ID NO: 185284 - RNA, 1410 nt, Artificial Sequence
  derived and/or modified CDS sequence (opt4) from neuraminidase__InfluenzaA__AHZ35695
augaaccccaaccagaagaucaucaccaucggcagcgugagccugaccaucagcaccaucugcuucuucaugcagaucgccauccugaucaccaccgugacccugcacuucaagcaguacgaguucaaccccccccccaacaaccaggugaugcugugcgagcccaccaucaucgagagaaacaucaccgagaucguguaccugaccaacaccaccaucgagaaggagaucugccccaagcccgccgaguacagaaacuggagcaagccccagugcgacaucaccggcuucgcccccuucagcaaggacaacagcaucagacugagcgccggcggcgacaucugggugaccagagagcccuacgugagcugcgaccccgacaagugcuaccaguucgcccugggccagggcaccacccugaacaacgugcacagcaacaacaccgugagagacagaacccccuacagaacccugcugaugaacgagcugggcgugcccuuccaccugggcaccaagcaggugugcaucgccuggagcagcagcagcugccacgacggcaaggccuggcugcacgugugcaucaccggcgacgacaagaacgccaccgccagcuucaucuacaacgagagacugguggacagcguggugagcuggagcaaggagauccugagaacccaggagagcgagugcgugugcaucaacggcaccugcaccguggugaugaccgacggcagcgccagcggcaaggccgacaccaagauccuguucaucgaggagggcaagaucgugcacaccagcacccugagcggcagcgcccagcacguggaggagugcagcugcuaccccagauaccccggcgugagaugcgugugcagagacaacuggaagggcagcaacagacccaucguggacaucaacaucaaggaccacagcaucgugagcagcuacgugugcagcggccuggugggcgacacccccagaaagaacgacagcagcagcagcagccacugccuggaccccaacaacgaggagggcggccacggcgugaagggcugggccuucgacgacggcaacgacguguggaugggcagaaccaucaacgagaccagcagacugggcuacgagaccuucaaggugaucgagggcuggagcaaccccaagagcaagcugcagaucaacagacaggugaucguggacagaggcgacagaagcggcuacagcggcaucuucagcguggagggcaacagcugcaucaacagaugcuucuacguggagcugaucagaggcagaaaggaggagaccgaggugcuguggaccagcaacagcaucgugguguucugcggcaccagcggcaccuacggcaccggcagcuggcccgacggcgccgaccugaaccugaugcccaucuga

SEQ ID NO: 185285 - RNA, 1410 nt, Artificial Sequence
  derived and/or modified CDS sequence (opt4) from neuraminidase__InfluenzaA__AHZ35719
augaaccccaaccagaagaucaucaccaucggcagcgugagccugaccaucagcaccaucugcuucuucaugcagaucgccauccugaucaccaccgugacccugcacuucaagcaguacgaguucaacagcccccccaacaaccaggugaugcugugcgagcccaccaucaucgagagaaacaucaccgagaucguguaccugaccaacaccaccaucgagaaggagaucugccccaagcccgccgaguacagaaacuggagcaagccccagugcgacaucaccggcuucgcccccuucagcaaggacaacagcaucagacugagcgccggcggcgacaucugggugaccagagagcccuacgugagcugcgaccccgacaagugcuaccaguucgcccugggccagggcaccacccugaacaacgugcacagcaacaacaccgugagagacagaacccccuacagaacccugcugaugaacgagcugggcgugcccuuccaccugggcaccaagcaggugugcaucgccuggagcagcagcagcugccacgacggcaaggccuggcugcacgugugcaucaccggcgacgacaagaacgccaccgccagcuucaucuacaacggcagacugguggacagcguggugagcuggagcaaggagauccugagaacccaggagagcgagugcgugugcaucaacggcaccugcaccguggugaugaccgacggcagcgccagcggcaaggccgacaccaagauccuguucaucgaggagggcaagaucgugcacaccagcacccugagcggcagcgcccagcacguggaggagugcagcugcuaccccagauaccccggcgugagaugcgugugcagagacaacuggaagggcagcaacagacccaucguggacaucaacaucaaggaccacagcaucgugagcagcuacgugugcagcggccuggugggcgacacccccagaaagaacgacagcagcagcagcagccacugccuggaccccaacaacgaggagggcggccacggcgugaagggcugggccuucgacgacggcaacgacguguggaugggcagaaccaucaacgagaccagcagacugggcuacgagaccuucaaggugaucgagggcuggagcaaccccaagagcaagcugcagaucaacagacaggugaucguggacagaggcgacagaagcggcuacagcggcaucuucagcguggagggcaagagcugcaucaacagaugcuucuacguggagcugaucagaggcagaaaggaggagaccgaggugcuguggaccagcaacagcaucgugguguucugcggcaccagcggcaccuacggcaccggcagcuggcccgacggcgccgaccugaaccugacccccaucuga

SEQ ID NO: 185286 - RNA, 1410 nt, Artificial Sequence; identical to SEQ ID NO: 182982
  derived and/or modified CDS sequence (opt4) from neuraminidase__InfluenzaA__AHZ35731

SEQ ID NO: 185287 - RNA, 1410 nt, Artificial Sequence; identical to SEQ ID NO: 182982
  derived and/or modified CDS sequence (opt4) from neuraminidase__InfluenzaA__AHZ35743

SEQ ID NO: 185288 - RNA, 1410 nt, Artificial Sequence; identical to SEQ ID NO: 182982
  derived and/or modified CDS sequence (opt4) from neuraminidase__InfluenzaA__AHZ35755

SEQ ID NO: 185289 - RNA, 1410 nt, Artificial Sequence; identical to SEQ ID NO: 182982
  derived and/or modified CDS sequence (opt4) from neuraminidase__InfluenzaA__AHZ35767

SEQ ID NO: 185290 - RNA, 1410 nt, Artificial Sequence; identical to SEQ ID NO: 182982
  derived and/or modified CDS sequence (opt4) from neuraminidase__InfluenzaA__AHZ35779

SEQ ID NO: 185291 - RNA, 1410 nt, Artificial Sequence
  derived and/or modified CDS sequence (opt4) from neuraminidase__InfluenzaA__AHZ35803
augaaccccaaccagaagaucaucaccaucggcagcgugugcaugaccaucggcauggccaaccugaugcugcagaucggcaacaucaucagcaucuggaucagccacagcauccagcugggcaacaagaaccagaucgagaccugcaaccagagcgugaucaccuacgagaacaacaccugggugaaccagaccuacgugaacaucagcaacaccaacuucgccgccggccagagcguggugagcgugaagaucgccggcaacagcagccugugccccgugagcggcugggccaucuacagcaaggacaacagcaucagaaucggcagcaagggcgacguguucgugaucagagagcccuucaucagcugcagcccccuggagugcagaaccuucuuccugacccagggcgcccugcugaacgacaagcacagcaacggcaccaucaaggacagaagccccuacagaacccugaugagcugccccaucggcgaggugcccagccccuacaacagcagauucgagagcguggccuggagcgccagcgccugccacgacggcaucaacuggcugaccaucggcaucagcggccccgacaacggcgccguggccgugcugaaguacaacggcaucaucaccgacaccaucaagagcuggagaaacaacauccugagaacccaggagagcgagugcgccugcgugaacggcagcugcuucaccaucaugaccgacggccccagcgacggccaggccagcuacaagaucuucagaaucgagaagggcaagaucgugaagagcguggagaugaacgcccccaacuaccacuacgaggagugcagcugcuaccccgacagcagcgagaucaccugcgugugcagagacaacuggcacggcagcaacagacccugggugagcuucaaccagaaccuggaguaccagaucggcuacaucugcagcggcaucuucggcgacaaccccagaccccacgacaagaccggcagcugcggccccgugagcagcaacggcgccaacggcgugaagggcuucagcuucaaguacggcaacggcguguggaucggcagaaccaagagcaucagcagcagaaagggcuucgagaugaucugggaccccaacggcuggaccggcaccgacaacaacuucagcaucaagcaggacaucgugggcaugaacgaguggagcggcuacagcggcagcuucgugcagcaccccgagcugaccggccuggacugcaucagacccugcuucuggguggagcugaucagaggcagacccaaggagaacaccaucuggaccagcggcagcagcaucagcuucugcggcgugaacagcgacaccgugggcuggagcuggcccgacggcgccgagcugcccuucaccaucgacaaguga

SEQ ID NO: 185292 - RNA, 1410 nt, Artificial Sequence
  derived and/or modified CDS sequence (opt4) from neuraminidase__InfluenzaA__AHZ35814
augaaccccaaccagaagaucaucaccaucggcagcgugagccugaccaucagcaccaucugcuucuucaugcagaucgccauccugaucaccaccgugacccugcacuucaagcaguacgaguucaacagcccccccaacaaccaggugaugcugugcgagcccaccaucaucgagagaaacaucaccgagaucguguaccugaccaacaccaccaucgagaaggagaucugccccaagcuggccgaguacagaaacuggagcaagccccagugcgacaucaccggcuucgcccccuucagcaaggacaacagcaucagacugagcgccggcggcgaccugugggugaccagagagcccuacgugagcugcgaccccgacaagugcuaccaguucgcccugggccagggcaccacccugaacaacgugcacagcaacaacaccgugagagacagaacccccuacagaacccugcugaugaacgagcugggcgugcccuuccaccugggcaccaagcaggugugcaucgccuggagcagcagcagcugccacgacggcaaggccuggcugcacgugugcaucaccggcgacgacaagaacgccaccgccagcuucaucuacaacggcagacugguggacagcguggugagcuggagcaaggagauccugagaacccaggagagcgagugcgugugcaucaacggcaccugcaccguggugaugaccgacggcagcgccagcggcaaggccgacaccaagauccuguucaucgaggagggcaagaucgugcacaccagcacccugagcggcagcgcccagcacguggaggagugcagcugcuaccccagauaccccggcgugagaugcgugugcagagacaacuggaagggcagcaacagacccaucguggacaucaacaucaaggaccacagcaucgugagcagcuacgugugcagcggccuggugggcgacacccccagaaagaacgacagcagcagcagcagccacugccuggaccccaacaacgaggagggcggccacggcgugaagggcugggccuucgacgacggcaacgacguguggaugggcagaaccaucaacgagaccagcagacugggcuacgagaccuucaaggugaucgagggcuggagcaaccccaagagcaagcugcagaucaacagacaggugaucguggacagaggcaacagaagcggcuacagcggcaucuucagcguggagggcaagagcugcaucaacagaugcuucuacguggagcugaucagaggcagaaaggaggagaccgaggugcuguggaccagcaacagcaucgugguguucugcggcaccagcggcaccuacggcaccggcagcuggcccgacggcgccgaccugaaccugaugcccaucuga

SEQ ID NO: 185293 - RNA, 1410 nt, Artificial Sequence
  derived and/or modified CDS sequence (opt4) from neuraminidase__InfluenzaA__AHZ35837
augaaccccaaccagaagaucaucaccaucggcagcgugugcaugaccaucggcauggccaaccugaugcugcagaucggcaacaucaucagcaucuggaucagccacagcauccagcugggcaacaagaaccagaucgagaccugcaaccagagcgugaucaccuacgagaacaacaccugggugaaccagaccuacgugaacaucagcaacaccaacuucgccgccggccagagcguggugagcgugaagaucgccggcaacagcagccugugccccgugagcggcugggccaucuacagcaaggacaacagcaucagaaucggcagcaagggcgacguguucgugaucagagagcccuucaucagcugcagcccccuggagugcagaaccuucuuccugacccagggcgcccugcugaacgacaagcacagcaacggcaccaucaaggacagaagccccuacagaacccugaugagcugccccaucggcgaggugcccagccccuacaacagcagauucgagagcguggccuggagcgccagcgccugccacgacggcaucaacuggcugaccaucggcaucagcggccccgacaacggcgccguggccgugcugaaguacaacggcaucaucaccgacaccaucaagagcuggagaaacaacauccugagaacccaggagagcgagugcgccugcgugaacggcagcugcuucaccaucaugaccgacggccccagcgacggccaggccagcuacaagaucuucagaaucgagaagggcaagaucgugaagagcguggagaugaacgcccccaacuaccacuacgaggagugcagcugcuaccccgacagcagcgagaucaccugcgugugcagagacaacuggcacggcagcaacagacccugggugagcuucaaccagaaccuggaguaccagaucggcuacaucugcagcggcaucuucggcgacaaccccagaccccacgacaagaccggcagcugcggccccgugagcagcaacggcgccaacggcgugaagggcuucagcuucaaguacggcaacggcguguggaucggcagaaccaagagcaucagcagcagaaagggcuucgagaugaucugggaccccaacggcuggaccggcaccgacaacaacuucagcaucaagcaggacaucgugggcaucaacgaguggagcggcuacagcggcagcuucgugcagcaccccgagcugaccggccuggacugcaucagacccugcuucuggguggagcugaucagaggcagacccaaggagaacaccaucuggaccagcggcagcagcaucagcuucugcggcgugaacagcgacaccgugggcuggagcuggcccgacggcgccgagcugcccuucaccaucgacaaguga

SEQ ID NO: 185294 - RNA, 1410 nt, Artificial Sequence; identical to SEQ ID NO: 185293
  derived and/or modified CDS sequence (opt4) from neuraminidase__InfluenzaA__AHZ35848

SEQ ID NO: 185295 - RNA, 1410 nt, Artificial Sequence; identical to SEQ ID NO: 185293
  derived and/or modified CDS sequence (opt4) from neuraminidase__InfluenzaA__AHZ35859

SEQ ID NO: 185296 - RNA, 1410 nt, Artificial Sequence; identical to SEQ ID NO: 185292
  derived and/or modified CDS sequence (opt4) from neuraminidase__InfluenzaA__AHZ35870

SEQ ID NO: 185297 - RNA, 1410 nt, Artificial Sequence; identical to SEQ ID NO: 185292
  derived and/or modified CDS sequence (opt4) from neuraminidase__InfluenzaA__AHZ35882

SEQ ID NO: 185298 - RNA, 1410 nt, Artificial Sequence
  derived and/or modified CDS sequence (opt4) from neuraminidase__InfluenzaA__AHZ35894
augaaccccaaccagaagaucaucaccaucggcagcgugugcaugaccaucggcauggccaaccugaugcugcagaucggcaacaucaucagcaucuggaucagccacagcauccagcugggcaacaagaaccagaucgagaccugcaaccagagcgugaucaccuacgagaacaacaccugggugaaccagaccuacgugaacaucagcaacaccaacuucgccgccggccagagcguggugagcgugaagaucgccggcaacagcagccugugccccgugagcggcugggccaucuacagcaaggacaacagcaucagaaucggcagcaagggcgacguguucgugaucagagagcccuucaucagcugcagcccccuggagugcagaaccuucuuccugacccagggcgcccugcugaacgacaagcacagcaacggcaccaucaaggacagaagccccuacagaacccugaugagcugccccaucggcgaggugcccagccccuacaacagcagauucgagagcguggccuggagcgccagcgccugccacgacggcaucaacuggcugaccaucggcaucagcggccccgacaacggcgccguggccgugcugaaguacaacggcaucaucaccgacaccaucaagagcuggagaaacaacauccugagaacccaggagagcgagugcgccugcgugaacggcagcugcuucaccaucaugaccgacggccccagcgacggccaggccagcuacaagaucuucagaaucgagaagggcaagaucgugaagagcguggagaugaacgcccccaacuaccacuacgaggagugcagcugcuaccccgacagcagcgagaucaccugcgugugcagagacaacuggcacggcagcaacagacccugggugagcuucaaccagaaccuggaguaccagaucggcuacaucugcagcggcaucuucggcgacaaccccagaccccacgacaagaccggcagcugcggccccgugagcagcaacggcgccaacggcgugaagggcuucagcuucaaguacggcagcggcguguggaucggcagaaccaagagcaucagcagcagaaagggcuucgagaugaucugggaccccaacggcuggaccggcaccgacaacaacuucagcaucaagcaggacaucgugggcaucaacgaguggagcggcuacagcggcagcuucgugcagcaccccgagcugaccggccuggacugcaucagacccugcuucuggguggagcugaucagaggcagacccaaggagaacaccaucuggaccagcggcagcagcaucagcuucugcggcgugaacagcgacaccgugggcuggagcuggcccgacggcgccgagcugcccuucaccaucgacaaguga

SEQ ID NO: 185299 - RNA, 1410 nt, Artificial Sequence; identical to SEQ ID NO: 185293
  derived and/or modified CDS sequence (opt4) from neuraminidase__InfluenzaA__AHZ35905

SEQ ID NO: 185300 - RNA, 1410 nt, Artificial Sequence; identical to SEQ ID NO: 185293
  derived and/or modified CDS sequence (opt4) from neuraminidase__InfluenzaA__AHZ35916

SEQ ID NO: 185301 - RNA, 1410 nt, Artificial Sequence; identical to SEQ ID NO: 181018
  derived and/or modified CDS sequence (opt4) from neuraminidase__InfluenzaA__AHZ35927

SEQ ID NO: 185302 - RNA, 1410 nt, Artificial Sequence
  derived and/or modified CDS sequence (opt4) from neuraminidase__InfluenzaA__AHZ35938
augaaccccaaccagaagaucaucaccaucggcagcgugugcaugaucaucggcauggccaaccugauccugcagaucggcaacaucaucagcaucuggaucagccacagcauccagcugggcaaccagaaccagaucgagaccugcaaccagagcgugaucaccuacgagaacaacaccugggugaaccagaccuacgugaacaucagcaacaccaacuucgccgccggccagagcguggugagcgugaagcuggccggcaacagcagccugugccccgugagcggcugggccaucuacagcaaggacaacagcaucagaaucggcagcaagggcgacguguucgugaucagagagcccuucaucagcugcagcccccuggagugcagaaccuucuuccugacccagggcgcccugcugaacgacaagcacagcaacggcaccaucaaggacagaagccccuacagaacccugaugagcugccccaucggcgaggugcccagccccuacaacagcagauucgagagcguggccuggagcgccagcgccugccacgacggcaucaacuggcugaccaucggcaucagcggccccgacaacggcgccguggccgugcugaaguacaacggcaucaucaccgacaccaucaagagcuggagaaacaacauccugagaacccaggagagcgagugcgccugcgugaacggcagcugcuucaccaucaugaccgacggccccagcgacggccaggccagcuacaagaucuucagaaucgagaagggcaagaucgugaagagcguggagaugaacgcccccaacuaccacuacgaggagugcagcugcuaccccgacagcagcgagaucaccugcgugugcagagacaacuggcacggcagcaacagacccugggugagcuucaaccagaaccuggaguaccagaucggcuacaucugcagcggcaucuucggcgacaaccccagaccccacgacaagaccggcagcugcggccccgugagcagcaacggcgccaacggcgugaagggcuucagcuucaaguacggcaacggcguguggaucggcagaaccaagagcaucagcagcagaaagggcuucgagaugaucugggaccccaacggcuggaccggcaccgacaacaacuucagcaucaagcaggacaucgugggcaucaacgaguggagcggcuacagcggcagcuucgugcagcaccccgagcugaccggccuggacugcaucagacccugcuucuggguggagcugaucagaggcagacccaaggagaacaccaucuggaccagcggcagcagcaucagcuucugcggcgugaacagcgacaccgugggcuggagcuggcccgacggcgccgagcugcccuucaccaucgacaaguga

SEQ ID NO: 185303 - RNA, 1410 nt, Artificial Sequence; identical to SEQ ID NO: 185292
  derived and/or modified CDS sequence (opt4) from neuraminidase__InfluenzaA__AHZ35949

SEQ ID NO: 185304 - RNA, 1410 nt, Artificial Sequence
  derived and/or modified CDS sequence (opt4) from neuraminidase__InfluenzaA__AHZ35961
augaaccccaaccagaagaucaucaccaucggcagcgugugcaugaccaucggcauggccaaccugaugcugcagaucggcaacaucaucagcaucuggaucagccacagcauccagcugggcaacaagaaccagaucgagaccugcaaccagagcgugaucaccuacgagaacaacaccugggugaaccagaccuacgugaacaucagcaacaccaacuucgccgccggccagagcguggugagcgugaagaucgccggcaacagcagccugugccccgugagcggcugggccaucuacagcaaggacaacagcaucagaaucggcagcaagggcgacguguucgugaucagagagcccuucaucagcugcagcccccuggagugcagaaccuucuuccugacccagggcgcccugcugaacgacaagcacagcaacggcaccaucaaggacagaagccccuacagaacccugaugagcugccccaucggcgaggugcccagccccuacaacagcagauucgagagcguggccuggagcgccagcgccugccacgacggcaucaacuggcugaccaucggcaucagcggccccgacaacggcgccguggccgugcugaaguacaacggcaucaucaccgacaccaucaagagcuggagaaacaacauccugagaacccaggagagcgagugcgccugcgugaacggcagcugcuucaccaucaugaccgacggccccagcgacggccaggccagcuacaagaucuucagaaucgagaagggcaagaucgugaagagcguggagaugaacgcccccaacuaccacuacgaggagugcagcugcuaccccgacagcagcgagaucaccugcgugugcagagacaacuggcacggcagcaacagacccugggugagcuucaaccagaaccuggaguaccagaucggcuacaucugcagcggcaucuucggcgacaaccccagaccccacgacaagaccggcagcugcggccccgugagcagcaacggcgccaacggcgugaagggcuucagcuucaaguacggcaacggcguguggaucggcagaaccaagagcaucagcagcagaaagggcuucgagaugaucugggaccccaacggcuggaccggcaccgacaacaacuucagcaucaagcaggacaucgugggcaucaacgaguggagcggcuacagcggcagcuucgugcagcaccccgagcugaccggccuggacugcaucagacccugcuucuggguggagcugaucagaggcagacccaaggagagcaccaucuggaccagcggcagcagcaucagcuucugcggcgugaacagcgacaccgugggcuggagcuggcccgacggcgccgagcugcccuucaccaucgacaaguga

SEQ ID NO: 185305 - RNA, 1410 nt, Artificial Sequence; identical to SEQ ID NO: 185293
  derived and/or modified CDS sequence (opt4) from neuraminidase__InfluenzaA__AHZ35972

SEQ ID NO: 185306 - RNA, 1410 nt, Artificial Sequence
  derived and/or modified CDS sequence (opt4) from neuraminidase__InfluenzaA__AHZ35983
augaaccccaaccagaagaucaccaccaucggcagcgugugcaugaccaucggcauggccaaccugaugcugcagaucggcaacaucaucagcaucuggaucagccacagcauccagcugggcaacaagaaccagaucgagaccugcaaccagagcgugaucaccuacgagaacaacaccugggugaaccagaccuacgugaacaucagcaacaccaacuucgccgccggccagagcguggugagcgugaagaucgccggcaacagcagccugugccccgugagcggcugggccaucuacagcaaggacaacagcaucagaaucggcagcaagggcgacguguucgugaucagagagcccuucaucagcugcagcccccuggagugcagaaccuucuuccugacccagggcgcccugcugaacgacaagcacagcaacggcaccaucaaggacagaagccccuacagaacccugaugagcugccccaucggcgaggugcccagccccuacaacagcagauucgagagcguggccuggagcgccagcgccugccacgacggcaucaacuggcugaccaucggcaucagcggccccgacaacggcgccguggccgugcugaaguacaacggcaucaucaccgacaccaucaagagcuggagaaacaacauccugagaacccaggagagcgagugcgccugcgugaacggcagcugcuucaccaucaugaccgacggccccagcgacggccaggccagcuacaagaucuucagaaucgagaagggcaagaucgugaagagcguggagaugaacgcccccaacuaccacuacgaggagugcagcugcuaccccgacagcagcgagaucaccugcgugugcagagacaacuggcacggcagcaacagacccugggugagcuucaaccagaaccuggaguaccagaucggcuacaucugcagcggcaucuucggcgacaaccccagaccccacgacaagaccggcagcugcggccccgugagcagcaacggcgccaacggcgugaagggcuucagcuucaaguacggcaacggcguguggaucggcagaaccaagagcaucagcagcagaaagggcuucgagaugaucugggaccccaacggcuggaccggcaccgacaacaacuucagcaucaagcaggacaucgugggcaucaacgaguggagcggcuacagcggcagcuucgugcagcaccccgagcugaccggccuggacugcaucagacccugcuucuggguggagcugaucagaggcagacccaaggagaacaccaucuggaccagcggcagcagcaucagcuucugcggcgugaacagcgacaccgugggcuggagcuggcccgacggcgccgagcugcccuucaccaucgacaaguga

SEQ ID NO: 185307 - RNA, 1410 nt, Artificial Sequence; identical to SEQ ID NO: 185293
  derived and/or modified CDS sequence (opt4) from neuraminidase__InfluenzaA__AHZ35994

SEQ ID NO: 185308 - RNA, 1410 nt, Artificial Sequence; identical to SEQ ID NO: 185293
  derived and/or modified CDS sequence (opt4) from neuraminidase__InfluenzaA__AHZ36005

SEQ ID NO: 185309 - RNA, 1410 nt, Artificial Sequence; identical to SEQ ID NO: 185293
  derived and/or modified CDS sequence (opt4) from neuraminidase__InfluenzaA__AHZ36016

SEQ ID NO: 185310 - RNA, 1410 nt, Artificial Sequence
  derived and/or modified CDS sequence (opt4) from neuraminidase__InfluenzaA__AHZ36027
augaaccccaaccagaagaucaucaccaucggcagcgugugcaugaccaucggcauggccaaccugauccugcagaucggcaacaucaucagcaucuggaucagccacagcauccagcugggcaaccagaaccagaucgagaccugcaaccagagcgugaucaucuacgagaacaacaccugggugaaccagaccuacgugaacaucagcaacaccaacuucgccgccggccagagcguggugagcgugaagcuggccggcaacagcagccugugccccgugagcggcugggccaucuacagcaaggacaacagcaucagaaucggcagcaagggcgacguguucgugaucagagagcccuucaucagcugcagcccccuggagugcagaaccuucuuccugacccagggcgcccugcugaacgacaagcacagcaacggcaccaucaaggacagaagccccuacagaacccugaugagcugccccaucggcgaggugcccagccccuacaacagcagauucgagagcguggccuggagcgccagcgccugccacgacggcuucaacuggcugaccaucggcaucagcggccccgacaacggcgccguggccgugcugaaguacaacggcaucaucaccgacaccaucaagagcuggagaaacaacauccugagaacccaggagagcgagugcgccugcgugaacggcagcugcuucaccaucaugaccgacggccccagcgacggccaggccagcuacaagaucuucagaaucgagaagggcaagaucgugaagagcguggagaugaacgcccccaacuaccacuacgaggagugcagcugcuaccccgacagcagcgagaucaccugcgugugcagagacaacuggcacggcagcaacagacccugggugagcuucaaccagaaccuggaguaccagaucggcuacaucugcagcggcaucuucggcgacaaccccagacccaacgacaagaccggcagcugcggccccgugagcagcaacggcgccaacggcgugaagggcuucagcuucaaguacggcaacggcguguggaucggcagaaccaagagcaucagcagcagaaagggcuucgagaugaucugggaccccaacggcuggaccggcaccgacaacaacuucagcaucaagcaggacaucaucggcaucaacgaguggagcggcuacagcggcagcuucgugcagcaccccgagcugaccggccuggacugcaucagacccugcuucuggguggagcugaucagaggcagacccaaggagaacaccaucuggaccagcggcagcagcaucagcuucugcggcgugaacagcgacaccgugggcuggagcuggcccgacggcgccgagcugcccuucaccaucgacaaguga

SEQ ID NO: 185311 - RNA, 1410 nt, Artificial Sequence
  derived and/or modified CDS sequence (opt4) from neuraminidase__InfluenzaA__AHZ36050
augaaccccaaccagaagaucaucaccaucggcagcgugagccugaccaucagcaccaucugcuucuucaugcagaucgccauccugaucaccaccgugacccugcacuucaagcaguacgaguucaacagcccccccaacaaccaggugaugcugugcgagcccaccaucaucgagagaaacaucaccgagaucguguaccugaccaacaccaccaucgagaaggagaucugccccaagcuggccgaguacagaaacuggagcaagccccagugcgacaucaccggcuucgcccccuucagcaaggacaacagcaucagacugagcgccggcggcgacaucugggugaccagagagcccuacgugagcugcgaccccgacaagugcuaccaguucgcccugggccagggcaccacccugaacaacgugcacagcaacaacaccgugagagacagaacccccuacagaacccugcugaugaacgagcugggcgugcccuuccaccugggcaccaagcaggugugcaucgccuggagcagcagcagcugccacgacggcaaggccuggcugcacgugugcaucaccggcgacgacaagaacgccaccgccagcuucaucuacaacggcagacugguggacagcguggugagcuggagcaaggagauccugagaacccaggagagcgagugcgugugcaucaacggcaccugcaccguggugaugaccgacggcagcgccagcggcaaggccgacaccaagauccuguucaucgaggagggcaagaucgugcacaccagcacccugagcggcagcgcccagcacguggaggagugcagcugcuaccccagauaccccggcgugagaugcgugugcagagacaacuggaagggcagcaacagacccaucguggacaucaacaucaaggaccacagcaucgugagcagcuacgugugcagcggccuggugggcgacacccccagaagaaacgacagcagcagcagcagccacugccuggaccccaacaacgaggagggcggccacggcgugaagggcugggccuucgacgacggcaacgacguguggaugggcagaaccaucaacgagaccagcagacugggcuacgagaccuucaaggugaucgagggcuggagcaaccccaagagcaagcugcagaucaacagacaggugaucguggacagaggcaacagaagcggcuacagcggcaucuucagcguggagggcaagagcugcaucaacagaugcuucuacguggagcugaucagaggcagaaaggaggagaccgaggugcuguggaccagcaacagcaucgugguguucugcggcaccagcggcaccuacggcaccggcagcuggcccgacggcgccgaccugaaccugaugcccaucuga

SEQ ID NO: 185312 - RNA, 1410 nt, Artificial Sequence
  derived and/or modified CDS sequence (opt4) from neuraminidase__InfluenzaA__AHZ36062
augaaccccaaccagaagaucaucaccaucggcagcgugugcaugaccaucggcauggccaaccugaugcugcagaucggcaacaucaucagcaucuggaucagccacagcauccagcugggcaacaagaaccagaucgagaccugcaaccagagcgugaucaccuacgagaacaacaccugggugaaccagaccuacgugaacaucagcaacaccaacuucgccgccggccagagcguggugagcgugaagaucgccggcaacagcagccugugccccgugagcggcugggccaucuacagcaaggacaacagcaucagaaucggcagcaagggcgacguguucgugaucagagagcccuucaucagcugcagcccccugggcugcagaaccuucuuccugacccagggcgcccugcugaacgacaagcacagcaacggcaccaucaaggacagaagccccuacagaacccugaugagcugccccaucggcgaggugcccagccccuacaacagcagauucgagagcguggccuggagcgccagcgccugccacgacggcaucaacuggcugaccaucggcaucagcggccccgacaacggcgccguggccgugcugaaguacaacggcaucaucaccgacaccaucaagagcuggagaaacaacauccugagaacccaggagagcgagugcgccugcgugaacggcagcugcuucaccaucaugaccgacggccccagcgacggccaggccagcuacaagaucuucagaaucgagaagggcaagaucgugaagagcguggagaugaacgcccccaacuaccacuacgaggagugcagcugcuaccccgacagcagcgagaucaccugcgugugcagagacaacuggcacggcagcaacagacccugggugagcuucaaccagaaccuggaguaccagaucggcuacaucugcagcggcaucuucggcgacaaccccagaccccacgacaagaccggcagcugcggccccgugagcagcaacggcgccaacggcgugaagggcuucagcuucaaguacggcaacggcguguggaucggcagaaccaagagcaucagcagcagaaagggcuucgagaugaucugggaccccaacggcuggaccggcaccgacaacaacuucagcaucaagcaggacaucgugggcaucaacgaguggagcggcuacagcggcagcuucgugcagcaccccgagcugaccggccuggacugcaucagacccugcuucuggguggagcugaucagaggcagacccaaggagaacaccaucuggaccagcggcagcagcaucagcuucugcggcgugaacagcgacaccgugggcuggagcuggcccgacggcgccgagcugcccuucaccaucgacaaguga

SEQ ID NO: 185313 - RNA, 1410 nt, Artificial Sequence; identical to SEQ ID NO: 185293
  derived and/or modified CDS sequence (opt4) from neuraminidase__InfluenzaA__AHZ36084

SEQ ID NO: 185314 - RNA, 1410 nt, Artificial Sequence
  derived and/or modified CDS sequence (opt4) from neuraminidase__InfluenzaA__AHZ36095
augaaccccaaccagaagaucaucaccaucggcagcgugugcaugaccaucggcauggccaaccugauccugcagaucggcaacaucaucagcaucuggaucagccacagcauccagcugggcaaccagaaccagaucgagaccugcaaccagagcgugaucaucuacgagaacaacaccugggugaaccagaccuacgugaacaucagcaacaccaacuucgccgccggccagagcguggugagcgugaagcuggccggcaacagcagccugugccccgugagcggcugggccaucuacagcaaggacaacagcaucagaaucggcagcaagggcgacguguucgugaucagagagcccuucaucagcugcagcccccuggagugcagaaccuucuuccugacccagggcgcccugcugaacgacaagcacagcaacggcaccaucaaggacagaagccccuacagaacccugaugagcugccccaucggcgaggugcccagccccuacaacagcagauucgagagcguggccuggagcgccagcgccugccacgacggcuucaacuggcugaccaucggcaucagcggccccgacaacggcgccguggccgugcugaaguacaacggcaucaucaccgacaccaucaagagcuggagaaacaacauccugagaacccaggagagcgagugcgccugcgugaacggcagcugcuucaccaucaugaccgacggccccagcgacggccaggccagcuacaagaucuucagaaucgagaagggcaagaucgugaagagcguggagaugaacgcccccaacuaccacuacgaggagugcagcugcuaccccgacagcagcgagaucaccugcgugugcagagacaacuggcacggcagcaacagacccugggugagcuucaaccagaaccuggaguaccagaucggcuacaucugcagcggcaucuucggcgacaaccccagacccaacgacaagaccggcggcugcggccccgugagcagcaacggcgccaacggcgugaagggcuucagcuucaaguacggcaacggcguguggaucggcagaaccaagagcaucagcagcagaaagggcuucgagaugaucugggaccccaacggcuggaccggcaccgacaacaacuucagcaucaagcaggacaucaucggcaucaacgaguggagcggcuacagcggcagcuucgugcagcaccccgagcugaccggccuggacugcaucagacccugcuucuggguggagcugaucagaggcagacccaaggagaacaccaucuggaccagcggcagcagcaucagcuucugcggcgugaacagcgacaccgugggcuggagcuggcccgacggcgccgagcugcccuucaccaucgacaaguga

SEQ ID NO: 185315 - RNA, 1410 nt, Artificial Sequence; identical to SEQ ID NO: 185293
  derived and/or modified CDS sequence (opt4) from neuraminidase__InfluenzaA__AHZ36106

SEQ ID NO: 185316 - RNA, 1410 nt, Artificial Sequence
  derived and/or modified CDS sequence (opt4) from neuraminidase__InfluenzaA__AHZ36117
augaaccccaaccagaagaucaucaccaucggcagcgugugcaugaccaucggcauggccaaccugauccugcagaucggcaacaucaucagcaucuggaucagccacagcauccagcugggcaaccagaaccagaucgagaccugcaaccagagcgugaucaucuacgagaacaacaccugggugaaccagaccuacgugaacaucagcaacaccaacuucgccgccggccagagcguggugagcgugaagcuggccggcaacagcagccugugccccgugagcggcugggccaucuacagcaaggacaacagcaucagaaucggcagcaagggcgacguguucgugaucagagagcccuucaucagcugcagcccccuggagugcagaaccuucuuccugacccagggcgcccugcugaacgacaagcacagcaacggcaccaucaaggacagaagccccuacagaacccugaugagcugcagcaucggcgaggugcccagccccuacaacagcagauucgagagcguggccuggagcgccagcgccugccacgacggcuucaacuggcugaccaucggcaucagcggccccgacaacggcgccguggccgugcugaaguacaacggcaucaucaccgacaccaucaagagcuggagaaacaacauccugagaacccaggagagcgagugcgccugcgugaacggcagcugcuucaccaucaugaccgacggccccagcgacggccaggccagcuacaagaucuucagaaucgagaagggcaagaucgugaagagcguggagaugaacgcccccaacuaccacuacgaggagugcagcugcuaccccgacagcagcgagaucaccugcgugugcagagacaacuggcacggcagcaacagacccugggugagcuucaaccagaaccuggaguaccagaucggcuacaucugcagcggcaucuucggcgacaaccccagacccaacgacaagaccggcagcugcggccccgugagcagcaacggcgccaacggcgugaagggcuucagcuucaaguacggcaacggcguguggaucggcagaaccaagagcaucagcagcagaaagggcuucgagaugaucugggaccccaacggcuggaccggcaccgacaacaacuucagcaucaagcaggacaucaucggcaucaacgaguggagcggcuacagcggcagcuucgugcagcaccccgagcugaccggccuggacugcaucagacccugcuucuggguggagcugaucagaggcagacccaaggagaacaccaucuggaccagcggcagcagcaucagcuucugcggcgugaacagcgacaccgugggcuggagcuggcccgacggcgccgagcugcccuucaccaucgacaaguga

SEQ ID NO: 185317 - RNA, 1410 nt, Artificial Sequence; identical to SEQ ID NO: 185293
  derived and/or modified CDS sequence (opt4) from neuraminidase__InfluenzaA__AHZ36128

SEQ ID NO: 185318 - RNA, 1410 nt, Artificial Sequence; identical to SEQ ID NO: 185293
  derived and/or modified CDS sequence (opt4) from neuraminidase__InfluenzaA__AHZ36139

SEQ ID NO: 185319 - RNA, 1410 nt, Artificial Sequence; identical to SEQ ID NO: 185311
  derived and/or modified CDS sequence (opt4) from neuraminidase__InfluenzaA__AHZ36150

SEQ ID NO: 185320 - RNA, 1410 nt, Artificial Sequence; identical to SEQ ID NO: 185293
  derived and/or modified CDS sequence (opt4) from neuraminidase__InfluenzaA__AHZ36161

SEQ ID NO: 185321 - RNA, 1410 nt, Artificial Sequence; identical to SEQ ID NO: 185293
  derived and/or modified CDS sequence (opt4) from neuraminidase__InfluenzaA__AHZ36172

SEQ ID NO: 185322 - RNA, 1410 nt, Artificial Sequence
  derived and/or modified CDS sequence (opt4) from neuraminidase__InfluenzaA__AHZ36183
augaaccccaaccagaagaucaucaccaucggcagcgugugcaugaccaucggcauggccaaccugaugcugcagaucggcaacaucaucagcaucuggaucagccacagcauccagcugggcaacaagaaccagaucgagaccugcaaccagagcgugaucaccuacgagaacaacaccugggugaaccagaccuacgugaacaucagcaacaccaacuucgccgccggccagagcguggugagcgugaagaucgccggcaacagcagccugugccccgugagcggcugggccaucuacagcaaggacaacagcaucagaaucggcagcaagggcgacguguucgugaucagagagcccuucaucagcugcagcccccuggagugcagaaccuucuuccugacccagggcgcccugcugaacgacaagcacagcaacggcaccaucaaggacagaagccccuacagaacccugaugagcugccccaucggcgaggugcccagccccuacaacagcagauucgagagcguggccuggagcgccagcgccugccacgacggcaucaacuggcugaccaucggcaucagcggccccgacaacggcgccguggccgugcugaaguacaacggcaucaucaccgacaccaucaagagcuggagaaacaacauccugagaacccaggagagcgagugcgccugcgugaacggcagcugcuucaccaucaugaccgacggccccagcgacggccaggccagcuacaagaucuucagaaucgagaagggcaagaucgugaagagcguggagaugaacgcccccaacuaccacuacgaggagugcagcugcuaccccgacagcagcgagaucaccugcgugugcagagacaacuggcacggcagcaacagacccugggugagcuucaaccagaaccuggaguaccagaucggcuacaucugcagcggcauccugggcgacaaccccagaccccacgacaagaccggcagcugcggccccgugagcagcaacggcgccaacggcgugaagggcuucagcuucaaguacggcaacggcguguggaucggcagaaccaagagcaucagcagcagaaagggcuucgagaugaucugggaccccaacggcuggaccggcaccgacaacaacuucagcaucaagcaggacaucgugggcaucaacgaguggagcggcuacagcggcagcuucgugcagcaccccgagcugaccggccuggacugcaucagacccugcuucuggguggagcugaucagaggcagacccaaggagaacaccaucuggaccagcggcagcagcaucagcuucugcggcgugaacagcgacaccgugggcuggagcuggcccgacggcgccgagcugcccuucaccaucgacaaguga

SEQ ID NO: 185323 - RNA, 1410 nt, Artificial Sequence; identical to SEQ ID NO: 185292
  derived and/or modified CDS sequence (opt4) from neuraminidase__InfluenzaA__AHZ36194

SEQ ID NO: 185324 - RNA, 1410 nt, Artificial Sequence; identical to SEQ ID NO: 185311
  derived and/or modified CDS sequence (opt4) from neuraminidase__InfluenzaA__AHZ36206

SEQ ID NO: 185325 - RNA, 1410 nt, Artificial Sequence; identical to SEQ ID NO: 185293
  derived and/or modified CDS sequence (opt4) from neuraminidase__InfluenzaA__AHZ36218

SEQ ID NO: 185326 - RNA, 1410 nt, Artificial Sequence; identical to SEQ ID NO: 185311
  derived and/or modified CDS sequence (opt4) from neuraminidase__InfluenzaA__AHZ36229

SEQ ID NO: 185327 - RNA, 1410 nt, Artificial Sequence; identical to SEQ ID NO: 185293
  derived and/or modified CDS sequence (opt4) from neuraminidase__InfluenzaA__AHZ36241

SEQ ID NO: 185328 - RNA, 1410 nt, Artificial Sequence; identical to SEQ ID NO: 185293
  derived and/or modified CDS sequence (opt4) from neuraminidase__InfluenzaA__AHZ36252

SEQ ID NO: 185329 - RNA, 1410 nt, Artificial Sequence; identical to SEQ ID NO: 185293
  derived and/or modified CDS sequence (opt4) from neuraminidase__InfluenzaA__AHZ36263

SEQ ID NO: 185330 - RNA, 1410 nt, Artificial Sequence; identical to SEQ ID NO: 182982
  derived and/or modified CDS sequence (opt4) from neuraminidase__InfluenzaA__AHZ36274

SEQ ID NO: 185331 - RNA, 1410 nt, Artificial Sequence; identical to SEQ ID NO: 185293
  derived and/or modified CDS sequence (opt4) from neuraminidase__InfluenzaA__AHZ36286

SEQ ID NO: 185332 - RNA, 1410 nt, Artificial Sequence
  derived and/or modified CDS sequence (opt4) from neuraminidase__InfluenzaA__AHZ36297
augaaccccaaccagaagaucaucaccaucggcagcgugagccugaccaucagcaccaucugcuucuucaugcagaucgccauccugaucaccaccgugacccugcacuucaagcaguacgaguucaacagcccccccaacaaccaggugaugcugugcgagcccaccaucaucgagagaaacaucaccgagaucguguaccugaccaacaccaccaucgagaaggagaucugccccagacccgccgaguacagaaacuggagcaagccccagugcgacaucaccggcuucgcccccuucagcaaggacaacagcaucagacugagcgccggcggcgacaucugggugaccagagagcccuacgugagcugcgaccccgacaagugcuaccaguucgcccugggccagggcaccacccugaacaacgugcacagcaacaacaccgugagagacagaacccccuacagaacccugcugaugaacgagcugggcgugcccuuccaccugggcaccaagcaggugugcaucgccuggagcagcagcagcugccacgacggcaaggccuggcugcacgugugcaucaccggcgacgacaagaacgccaccgccagcuucaucuacaacggcagacugguggacagcguggugagcuggagcaaggagauccugagaacccaggagagcgagugcgugugcaucaacggcaccugcaccguggugaugaccgacggcagcgccagcggcaaggccgacaccaagauccuguucaucgaggagggcaagaucgugcacaccagcacccugagcggcggcgcccagcacguggaggagugcagcugcuaccccagauaccccggcgugagaugcgugugcagagacaacuggaagggcagcaacagacccaucguggacaucaacaucaaggaccacagcaucgugagcagcuacgugugcagcggccuggugggcgacacccccagaaagaacgacagcagcagcagcagccacugccuggaccccaacaacgaggagggcggccacggcgugaagggcugggccuucgacgacggcaacgacguguggaugggcagaaccaucaacgagaccagcagacugggcuacgagaccuucaaggugaucgagggcuggagcaaccccaagagcaagcugcagaucaacagacaggugaucguggacagaggcgacagaagcggcuacagcggcaucuucagcguggagggcaagagcugcaucaacagaugcuucuacguggagcugaucagaggcagaaaggaggagaccgaggugcuguggaccagcaacagcaucgugguguucugcggcaccagcggcaccuacggcaccggcagcuggcccgacggcgccgaccugaaccugaugcccaucuga

SEQ ID NO: 185333 - RNA, 1410 nt, Artificial Sequence
  derived and/or modified CDS sequence (opt4) from neuraminidase__InfluenzaA__AHZ36309
augaaccccaaccagaagaucaucaccaucggcagcgugugcaugaccaucggcauggccaaccugaugcugcagaucggcaacaucaucagcaucuggaucagccacagcauccagcugggcgacaagaaccagaucgagaccugcaaccagagcgugaucaccuacgagaacaacaccugggugaaccagaccuacgugaacaucagcaacaccaacuucgccgccggccagagcguggugagcgugaagaucgccggcaacagcagccugugccccgugagcggcugggccaucuacagcaaggacaacagcaucagaaucggcagcaagggcgacguguucgugaucagagagcccuucaucagcugcagcccccuggagugcagaaccuucuuccugacccagggcgcccugcugaacgacaagcacagcaacggcaccaucaaggacagaagccccuacagaacccugaugagcugccccaucggcgaggugcccagccccuacaacagcagauucgagagcguggccuggagcgccagcgccugccacgacggcaucaacuggcugaccaucggcaucagcggccccgacaacggcgccguggccgugcugaaguacaacggcaucaucaccgacaccaucaagagcuggagaaacaacauccugagaacccaggagagcgagugcgccugcgugaacggcagcugcuucaccaucaugaccgacggccccagcgacggccaggccagcuacaagaucuucagaaucgagaagggcaagaucgugaagagcguggagaugaacgcccccaacuaccacuacgaggagugcagcugcuaccccgacagcagcgagaucaccugcgugugcagagacaacuggcacggcagcaacagacccugggugagcuucaaccagaaccuggaguaccagaucggcuacaucugcagcggcaucuucggcgacaaccccagaccccacgacaagaccggcagcugcggccccgugagcagcaacggcgccaacggcgugaagggcuucagcuucaaguacggcaacggcguguggaucggcagaaccaagagcaucagcagcagaaagggcuucgagaugaucugggaccccaacggcuggaccggcaccgacaacaacuucagcaucaagcaggacaucgugggcaucaacgaguggagcggcuacagcggcagcuucgugcagcaccccgagcugaccggccuggacugcaucagacccugcuucuggguggagcugaucagaggcagacccaaggagaacaccaucuggaccagcggcagcagcaucagcuucugcggcgugaacagcgacaccgugggcuggagcuggcccgacggcgccgagcugcccuucaccaucgacaaguga

SEQ ID NO: 185334 - RNA, 1410 nt, Artificial Sequence; identical to SEQ ID NO: 185293
  derived and/or modified CDS sequence (opt4) from neuraminidase__InfluenzaA__AHZ36320

SEQ ID NO: 185335 - RNA, 1410 nt, Artificial Sequence; identical to SEQ ID NO: 185293
  derived and/or modified CDS sequence (opt4) from neuraminidase__InfluenzaA__AHZ36331

SEQ ID NO: 185336 - RNA, 1410 nt, Artificial Sequence; identical to SEQ ID NO: 182982
  derived and/or modified CDS sequence (opt4) from neuraminidase__InfluenzaA__AHZ36353

SEQ ID NO: 185337 - RNA, 1410 nt, Artificial Sequence
  derived and/or modified CDS sequence (opt4) from neuraminidase__InfluenzaA__AHZ36365
augaaccccaaccagaagaucaucaccaucggcagcgugugcaugaccaucggcauggccaaccugaugcugcagaucggcaacaucaucagcaucuggaucagccaccccauccagcugggcaacaagaaccagaucgagaccugcaaccagagcgugaucaccuacgagaacaacaccugggugaaccagaccuacgugaacaucagcaacaccaacuucgccgccggccagagcguggugagcgugaagaucgccggcaacagcagccugugccccgugagcggcugggccaucuacagcaaggacaacagcaucagaaucggcagcaagggcgacguguucgugaucagagagcccuucaucagcugcagcccccuggagugcagaaccuucuuccugacccagggcgcccugcugaacgacaagcacagcaacggcaccaucaaggacagaagccccuacagaacccugaugagcugccccaucggcgaggugcccagccccuacaacagcagauucgagagcguggccuggagcgccagcgccugccacgacggcaucaacuggcugaccaucggcaucagcggccccgacaacggcgccguggccgugcugaaguacaacggcaucaucaccgacaccaucaagagcuggagaaacaacauccugagaacccaggagagcgagugcgccugcgugaacggcagcugcuucaccaucaugaccgacggccccagcgacggccaggccagcuacaagaucuucagaaucgagaagggcaagaucgugaagagcguggagaugaacgcccccaacuaccacuacgaggagugcagcugcuaccccgacagcagcgagaucaccugcgugugcagagacaacuggcacggcagcaacagacccugggugagcuucaaccagaaccuggaguaccagaucggcuacaucugcagcggcaucuucggcgacaaccccagaccccacgacaagaccggcagcugcggccccgugagcagcaacggcgccaacggcgugaagggcuucagcuucaaguacggcaacggcguguggaucggcagaaccaagagcaucagcagcagaaagggcuucgagaugaucugggaccccaacggcuggaccggcaccgacaacaacuucagcaucaagcaggacaucgugggcaucaacgaguggagcggcuacagcggcagcuucgugcagcaccccgagcugaccggccuggacugcaucagacccugcuucuggguggagcugaucagaggcagacccaaggagaacaccaucuggaccagcggcagcagcaucagcuucugcggcgugaacagcgacaccgugggcuggagcuggcccgacggcgccgagcugcccuucaccaucgacaaguga

SEQ ID NO: 185338 - RNA, 1410 nt, Artificial Sequence; identical to SEQ ID NO: 182982
  derived and/or modified CDS sequence (opt4) from neuraminidase__InfluenzaA__AHZ36376

SEQ ID NO: 185339 - RNA, 1410 nt, Artificial Sequence; identical to SEQ ID NO: 182982
  derived and/or modified CDS sequence (opt4) from neuraminidase__InfluenzaA__AHZ36388

SEQ ID NO: 185340 - RNA, 1410 nt, Artificial Sequence; identical to SEQ ID NO: 182982
  derived and/or modified CDS sequence (opt4) from neuraminidase__InfluenzaA__AHZ36400

SEQ ID NO: 185341 - RNA, 1410 nt, Artificial Sequence; identical to SEQ ID NO: 182982
  derived and/or modified CDS sequence (opt4) from neuraminidase__InfluenzaA__AHZ36412

SEQ ID NO: 185342 - RNA, 1410 nt, Artificial Sequence; identical to SEQ ID NO: 182982
  derived and/or modified CDS sequence (opt4) from neuraminidase__InfluenzaA__AHZ36424

SEQ ID NO: 185343 - RNA, 1410 nt, Artificial Sequence; identical to SEQ ID NO: 182982
  derived and/or modified CDS sequence (opt4) from neuraminidase__InfluenzaA__AHZ36436

SEQ ID NO: 185344 - RNA, 1410 nt, Artificial Sequence
  derived and/or modified CDS sequence (opt4) from neuraminidase__InfluenzaA__AHZ36448
augaaccccaaccagaagaucaucaccaucggcagcgugagccugaccaucagcaccaucugcuucuucaugcagaucgccauccugaucaccaccgugacccugcacuucaagcaguacgaguucaacagcccccccaacaaccaggugaugcugugcgagcccaccaucaucgagaagaacaucaccgagaucguguaccugaccaacaccaccaucgagaaggagaucugccccaagcccgccgaguacagaaacuggagcaagccccagugcgacaucaccggcuucgcccccuucagcaaggacaacagcaucagacugagcgccggcggcgacaucugggugaccagagagcccuacgugagcugcgaccccgacaagugcuaccaguucgcccugggccagggcaccacccugaacaacgugcacagcaacaacaccgugagagacagaacccccuacagaacccugcugaugaacgagcugggcgugcccuuccaccugggcaccaagcaggugugcaucgccuggagcagcagcagcugccacgacggcaaggccuggcugcacgugugcaucaccggcgacgacaagaacgccaccgccagcuucaucuacaacggcagacugguggacagcguggugagcuggagcaaggagauccugagaacccaggagagcgagugcgugugcaucaacggcaccugcaccguggugaugaccgacggcagcgccagcggcaaggccgacaccaagauccuguucaucgaggagggcaagaucgugcacaccagcacccugagcggcagcgcccagcacguggaggagugcagcugcuaccccagauaccccggcgugagaugcgugugcagagacaacuggaagggcagcaacagacccaucguggacaucaacaucaaggaccacagcaucgugagcagcuacgugugcagcggccuggugggcgacacccccagaaagaacgacagcagcagcagcagccacugccuggaccccaacaacgaggagggcggccacggcgugaagggcugggccuucgacgacggcaacgacguguggaugggcagaaccaucaacgagaccagcagacugggcuacgagaccuucaaggugaucgagggcuggagcaaccccaagagcaagcugcagaucaacagacaggugaucguggacagaggcgacagaagcggcuacagcggcaucuucagcguggagggcaagagcugcaucaacagaugcuucuacguggagcugaucagaggcagaaaggaggagaccgaggugcuguggaccagcaacagcaucgugguguucugcggcaccagcggcaccuacggcaccggcagcuggcccgacggcgccgaccugaaccugaugcccaucuga

SEQ ID NO: 185345 - RNA, 1410 nt, Artificial Sequence; identical to SEQ ID NO: 182982
  derived and/or modified CDS sequence (opt4) from neuraminidase__InfluenzaA__AHZ36460

SEQ ID NO: 185346 - RNA, 1410 nt, Artificial Sequence; identical to SEQ ID NO: 182982
  derived and/or modified CDS sequence (opt4) from neuraminidase__InfluenzaA__AHZ36472

SEQ ID NO: 185347 - RNA, 1410 nt, Artificial Sequence; identical to SEQ ID NO: 182982
  derived and/or modified CDS sequence (opt4) from neuraminidase__InfluenzaA__AHZ36484

SEQ ID NO: 185348 - RNA, 1410 nt, Artificial Sequence; identical to SEQ ID NO: 182982
  derived and/or modified CDS sequence (opt4) from neuraminidase__InfluenzaA__AHZ36496

SEQ ID NO: 185349 - RNA, 1410 nt, Artificial Sequence; identical to SEQ ID NO: 182982
  derived and/or modified CDS sequence (opt4) from neuraminidase__InfluenzaA__AHZ36508

SEQ ID NO: 185350 - RNA, 1410 nt, Artificial Sequence; identical to SEQ ID NO: 182982
  derived and/or modified CDS sequence (opt4) from neuraminidase__InfluenzaA__AHZ36520

SEQ ID NO: 185351 - RNA, 1410 nt, Artificial Sequence
  derived and/or modified CDS sequence (opt4) from neuraminidase__InfluenzaA__AHZ36532
augaaccccaaccagaagaucaucaccaucggcagcgugagccugaccaucagcaccaucugcuucuucaugcagaucgccauccugaucaccaccgugacccugcacuucaagcaguacgaguucaacagcccccccaacaaccaggugaugcugugcgagcccaccaucaucgagagaaacaucaccgagaucguguaccugaccaacaccaccaucgagaaggagaucugccccaagcccgccgaguacagaaccuggagcaagccccagugcgacaucaccggcuucgcccccuucagcaaggacaacagcaucagacugagcgccggcggcgacaucugggugaccagagagcccuacgugagcugcgaccccgacaagugcuaccaguucgcccugggccagggcaccacccugaacaacgugcacagcaacaacaccgugagagacagaacccccuacagaacccugcugaugaacgagcugggcgugcccuuccaccugggcaccaagcaggugugcaucgccuggagcagcagcagcugccacgacggcaaggccuggcugcacgugugcaucaccggcgacgacaagaacgccaccgccagcuucaucuacaacggcagacugguggacagcguggugagcuggagcaaggagauccugagaacccaggagagcgagugcgugugcaucaacggcaccugcaccguggugaugaccgacggcagcgccagcggcaaggccgacaccaagauccuguucaucgaggagggcaagaucgugcacaccagcacccugagcggcagcgcccagcacguggaggagugcagcugcuaccccagauaccccggcgugagaugcgugugcagagacaacuggaagggcagcaacagacccaucguggacaucaacaucaaggaccacagcaucgugagcagcuacgugugcagcggccuggugggcgacacccccagaaagaacgacagcagcagcagcagccacugccuggaccccaacaacgaggagggcggccacggcgugaagggcugggccuucgacgacggcaacgacguguggaugggcagaaccaucaacgagaccagcagacugggcuacgagaccuucaaggugaucgagggcuggagcaaccccaagagcaagcugcagaucaacagacaggugaucguggacagaggcgacagaagcggcuacagcggcaucuucagcguggagggcaagagcugcaucaacagaugcuucuacguggagcugaucagaggcagaaaggaggagaccgaggugcuguggaccagcaacagcaucgugguguucugcggcaccagcggcaccuacggcaccggcagcuggcccgacggcgccgaccugaaccugaugcccaucuga

SEQ ID NO: 185352 - RNA, 1410 nt, Artificial Sequence; identical to SEQ ID NO: 182982
  derived and/or modified CDS sequence (opt4) from neuraminidase__InfluenzaA__AHZ36544

SEQ ID NO: 185353 - RNA, 1410 nt, Artificial Sequence; identical to SEQ ID NO: 182982
  derived and/or modified CDS sequence (opt4) from neuraminidase__InfluenzaA__AHZ36556

SEQ ID NO: 185354 - RNA, 1410 nt, Artificial Sequence; identical to SEQ ID NO: 182982
  derived and/or modified CDS sequence (opt4) from neuraminidase__InfluenzaA__AHZ36568

SEQ ID NO: 185355 - RNA, 1410 nt, Artificial Sequence; identical to SEQ ID NO: 182982
  derived and/or modified CDS sequence (opt4) from neuraminidase__InfluenzaA__AHZ36580

SEQ ID NO: 185356 - RNA, 1410 nt, Artificial Sequence; identical to SEQ ID NO: 182982
  derived and/or modified CDS sequence (opt4) from neuraminidase__InfluenzaA__AHZ36592

SEQ ID NO: 185357 - RNA, 1410 nt, Artificial Sequence; identical to SEQ ID NO: 182982
  derived and/or modified CDS sequence (opt4) from neuraminidase__InfluenzaA__AHZ36604

SEQ ID NO: 185358 - RNA, 1410 nt, Artificial Sequence; identical to SEQ ID NO: 182982
  derived and/or modified CDS sequence (opt4) from neuraminidase__InfluenzaA__AHZ36616

SEQ ID NO: 185359 - RNA, 1410 nt, Artificial Sequence
  derived and/or modified CDS sequence (opt4) from neuraminidase__InfluenzaA__AHZ36628
augaaccccaaccagaagaucaucaccaucggcagcgugagccugaccaucagcaccaucugcuucuucaugcagaucgccauccugaucaccaccgugacccugcacuucaagcagugcgaguucaacagcccccccaacaaccaggugaugcugugcgagcccaccaucaucgagagaaacaucaccgagaucguguaccugaccaacaccaccaucgagaaggagaucugccccaagcccgccgaguacagaaacuggagcaagccccagugcgacaucaccggcuucgcccccuucagcaaggacaacagcaucagacugagcgccggcggcgacaucugggugaccagagagcccuacgugagcugcgaccccgacaagugcuaccaguucgcccugggccagggcaccacccugaacaacgugcacagcaacaacaccgugagagacagaacccccuacagaacccugcugaugaacgagcugggcgugcccuuccaccugggcaccaagcaggugugcaucgccuggagcagcagcagcugccacgacggcaaggccuggcugcacgugugcaucaccggcgacgacaagaacgccaccgccagcuucaucuacaacggcagacugguggacagcguggugagcuggagcaaggagauccugagaacccaggagagcgagugcgugugcaucaacggcaccugcaccguggugaugaccgacggcagcgccagcggcaaggccgacaccaagauccuguucaucgaggagggcaagaucgugcacaccagcacccugagcggcagcgcccagcacguggaggagugcagcugcuaccccagauaccccggcgugagaugcgugugcagagacaacuggaagggcagcaacagacccaucguggacaucaacaucaaggaccacagcaucgugagcagcuacgugugcagcggccuggugggcgacacccccagaaagaacgacagcagcagcagcagccacugccuggaccccaacaacgaggagggcggccacggcgugaagggcugggccuucgacgacggcaacgacguguggaugggcagaaccaucaacgagaccagcagacugggcuacgagaccuucaaggugaucgagggcuggagcaaccccaagagcaagcugcagaucaacagacaggugaucguggacagaggcgacagaagcggcuacagcggcaucuucagcguggagggcaagagcugcaucaacagaugcuucuacguggagcugaucagaggcagaaaggaggagaccgaggugcuguggaccagcaacagcaucgugguguucugcggcaccagcggcaccuacggcaccggcagcuggcccgacggcgccgaccugaaccugaugcccaucuga

SEQ ID NO: 185360 - RNA, 1410 nt, Artificial Sequence
  derived and/or modified CDS sequence (opt4) from neuraminidase__InfluenzaA__AHZ36640
augaaccccaaccagaagaucaucaccaucggcagcgugagccugaccaucagcaccaucugcuucuucaugcagaucgccauccugaucaccaccgugacccugcacuucaagcaguacgaguucaacagcccccccaacaaccaggugaugcugugcgagcccaccaucaucgagagaaacaucaccgagaucguguaccugaccaacaccaccaucgagaaggagaucugccccaagcccgccgaguacagaaacuggagcaagccccagugcgacaucaccggcuucgcccccuucagcaaggacaacagcaucagacugagcgccggcggcgacaucugggugaccagagagcccuacgugagcugcgaccccgacaagugcuaccaguucgcccugggccagggcaccacccugaacaacgugcacagcaacaacaccgugcacgacagaacccccuacagaacccugcugaugaacgagcugggcgugcccuuccaccugggcaccaagcaggugugcaucgccuggagcagcagcagcugccacgacggcaaggccuggcugcacgugugcaucaccggcgacgacaagaacgccaccgccagcuucaucuacaacggcagacugguggacagcguggugagcuggagcaaggagauccugagaacccaggagagcgagugcgugugcaucaacggcaccugcaccguggugaugaccgacggcagcgccagcggcaaggccgacaccaagauccuguucaucgaggagggcaagaucgugcacaccagcacccugagcggcagcgcccagcacguggaggagugcagcugcuaccccagauaccccggcgugagaugcgugugcagagacaacuggaagggcagcaacagacccaucguggacaucaacaucaaggaccacagcaucgugagcagcuacgugugcagcggccuggugggcgacacccccagaaagaacgacagcagcagcagcagccacugccuggaccccaacaacgaggagggcggccacggcgugaagggcugggccuucgacgacggcaacgacguguggaugggcagaaccaucaacgagaccagcagacugggcuacgagaccuucaaggugaucgagggcuggagcaaccccaagagcaagcugcagaucaacagacaggugaucguggacagaggcgacagaagcggcuacagcggcaucuucagcguggagggcaagagcugcaucaacagaugcuucuacguggagcugaucagaggcagaaaggaggagaccgaggugcuguggaccagcaacagcaucgugguguucugcggcaccagcggcaccuacggcaccggcagcuggcccgacggcgccgaccugaaccugaugcccaucuga

SEQ ID NO: 185361 - RNA, 1410 nt, Artificial Sequence; identical to SEQ ID NO: 182982
  derived and/or modified CDS sequence (opt4) from neuraminidase__InfluenzaA__AHZ36652

SEQ ID NO: 185362 - RNA, 1410 nt, Artificial Sequence; identical to SEQ ID NO: 182206
  derived and/or modified CDS sequence (opt4) from neuraminidase__InfluenzaA__AHZ36664

SEQ ID NO: 185363 - RNA, 1410 nt, Artificial Sequence; identical to SEQ ID NO: 182206
  derived and/or modified CDS sequence (opt4) from neuraminidase__InfluenzaA__AHZ36676

SEQ ID NO: 185364 - RNA, 1410 nt, Artificial Sequence; identical to SEQ ID NO: 182206
  derived and/or modified CDS sequence (opt4) from neuraminidase__InfluenzaA__AHZ36688

SEQ ID NO: 185365 - RNA, 1398 nt, Artificial Sequence; identical to SEQ ID NO: 183514
  derived and/or modified CDS sequence (opt4) from neuraminidase__InfluenzaA__AHZ39689

SEQ ID NO: 185366 - RNA, 1398 nt, Artificial Sequence; identical to SEQ ID NO: 183514
  derived and/or modified CDS sequence (opt4) from neuraminidase__InfluenzaA__AHZ39713

SEQ ID NO: 185367 - RNA, 1398 nt, Artificial Sequence; identical to SEQ ID NO: 183514
  derived and/or modified CDS sequence (opt4) from neuraminidase__InfluenzaA__AHZ39725

SEQ ID NO: 185368 - RNA, 1398 nt, Artificial Sequence; identical to SEQ ID NO: 183514
  derived and/or modified CDS sequence (opt4) from neuraminidase__InfluenzaA__AHZ39737

SEQ ID NO: 185369 - RNA, 1398 nt, Artificial Sequence
  derived and/or modified CDS sequence (opt4) from neuraminidase__InfluenzaA__AHZ39749
augaaccccaaccagaagauccugugcaucagcgccaccgccaucaucaucggcgccaucgccgugcugaucggcaucgccaaccugggccugaacaucggccugcaccugaagcccggcugcaacugcagccacagccagcccgagaccaccaacaccagccagaccaucaucaacaacuacuacaacgagaccaacaucaccaacauccagauggaggagagaaccagcagaaacuucaacaaccugaccaagggccugugcaccaucaacagcuggcacaucuacggcaaggacaacgccgugagaaucggcgagagcagcgacgugcuggugaccagagagcccuacgugagcugcgaccccgacgagugcagauucuacgcccugagccagggcaccaccaucagaggcaagcacagcaacggcaccauccacgacagaagccaguacagagcccugaucagcuggccccugagcagcccccccaccguguacaacagcagaguggagugcaucggcuggagcagcaccagcugccacgacggcaagagcagaaugagcaucugcaucagcggccccaacaacaacgccagcgccguggugugguacaacagaagacccguggccgagaucaacaccugggccagaaacauccugagaacccaggagagcgagugcgugugccacaacggcgugugccccgugguguucaccgacggcagcgccaccggccccgccgacaccagaaucuacuacuucaaggagggcaagauccugaagugggagagccugaccggcaccgccaagcacaucgaggagugcagcugcuacggcgagagaaccggcaucaccugcaccugcagagacaacuggcagggcagcaacagacccgugauccagaucgaccccguggccaugacccacaccagccaguacaucugcagccccgugcugaccgacaaccccagacccaacgaccccaacaucggcaagugcaacgaccccuaccccggcaacaacaacaacggcgugaagggcuucagcuaccuggacggcgccaacaccuggcugggcagaaccaucagcaccgccagcagaagcggcuacgagaugcugaaggugcccaacgcccugaccgacgacagaagcaagcccauccagggccagaccaucgugcugaacgccgacuggagcggcuacagcggcagcuucauggacuacugggccgagggcgacugcuacagagccugcuucuacguggagcugaucagaggcagacccaaggaggacaaggugugguggaccagcaacagcaucgugagcaugugcagcagcaccgaguuccugggccaguggaacuggcccgacggcgccaagaucgaguacuuccuguga

SEQ ID NO: 185370 - RNA, 1398 nt, Artificial Sequence; identical to SEQ ID NO: 185369
  derived and/or modified CDS sequence (opt4) from neuraminidase__InfluenzaA__AHZ39761

SEQ ID NO: 185371 - RNA, 1398 nt, Artificial Sequence; identical to SEQ ID NO: 183514
  derived and/or modified CDS sequence (opt4) from neuraminidase__InfluenzaA__AHZ39773

SEQ ID NO: 185372 - RNA, 1398 nt, Artificial Sequence; identical to SEQ ID NO: 183514
  derived and/or modified CDS sequence (opt4) from neuraminidase__InfluenzaA__AHZ39785

SEQ ID NO: 185373 - RNA, 1410 nt, Artificial Sequence
  derived and/or modified CDS sequence (opt4) from neuraminidase__InfluenzaA__AHZ39797
augaaccccaaccagaagaucaucaccaucggcagcgugagccugaccaucagcaccgugugcuucuucaugcagaucgccauccugaucaccaccgugacccugcacuucaagcaguacgaguucaaccccccccccaacaaccaggugaugcugugcgagcccaccaucaucgagagaaacaucaccgagaucguguaccugaccaacaccaccaucgagaaggagaucugccccaagcccgccgaguacagaaacuggagcaagccccagugcggcaucaccggcuucgcccccuucagcaaggacaacagcaucagacugagcgccggcggcgacaucugggugaccagagagcccuacgugagcugcgaccccgacaagugcuaccaguucgcccugggccagggcaccacccugaacaacgugcacagcaacaacaccgugagagacagaacccccuacagaacccugcugaugaacgagcugggcgugcccuuccaccugggcaccaagcaggugugcaucgccuggagcagcagcagcugccacgacggcaaggccuggcugcacgugugcaucaccggcgacgacaagaacgccaccgccagcuucaucuacaacggcagacugguggacagcguggugagcuggagcaaggagauccugagaacccaggagagcgagugcgugugcaucaacggcaccugcaccguggugaugaccgacggcagcgccagcggcaagagcgacaccaagauccuguucaucgaggagggcaagaucgugcacaccagcacccugagcggcagcgcccagcacguggaggagugcagcugcuaccccagauaccccggcgugagaugcgugugcagagacaacuggaagggcagcaacagacccaucguggacaucaacaucaaggaccacagcaucgugagcagcuacgugugcagcggccuggugggcgacacccccagaaagaacgacagcagcagcagcagccacugccuggaccccaacaacgaggagggcggccacggcgugaagggcugggccuucgacgacggcaacgacguguggaugggcagaaccaucaacgagaccagcagacugggcuacgagaccuucaaggugaucgagggcuggagcaaccccaagagcaagcugcagaucaacagacaggugaucguggacagaggcgacagaagcggcuacagcggcaucuucagcguggagggcaagagcugcaucaacagaugcuucuacguggagcugaucagaggcagaaaggaggagaccgaggugcuguggaccagcaacagcaucgugguguucugcggcaccagcggcaccuacggcaccggcagcuggcccgacggcgccgaccugaaccugaugcccaucuga

SEQ ID NO: 185374 - RNA, 1410 nt, Artificial Sequence
  derived and/or modified CDS sequence (opt4) from neuraminidase__InfluenzaA__AHZ39821
augaaccccaaccagaagaucaucaccaucggcagcgugagccugaccaucagcaccaucugcuucuucaugcagaccgccauccugaucaccaccgugacccugcacuucaagcaguacgaguucaacagcccccccaacaaccaggugaugcugugcgagcccaccaucaucgagagaaacaucaccgagaucguguaccugaccaacaccaccaucgagaaggagaucugccccaagcuggccgaguacagaaacuggagcaagccccagugcgacaucaccggcuucgcccccuucagcaaggacaacagcaucagacugagcgccggcggcgacaucugggugaccagagagcccuacgugagcugcgaccccgacaagugcuaccaguucgcccugggccagggcaccacccugaacaacgugcacagcaacaacaccgugagagacagaacccccuacagaacccugcugaugaacgagcugggcgugcccuuccaccugggcaccaagcaggugugcaucgccuggagcagcagcagcugccacgacggcaaggccuggcugcacgugugcaucaccggcgacgacaagaacgccaccgccagcuucaucuacaacggcagacugguggacagcguggugagcuggagcaaggagauccugagaacccaggagagcgagugcgugugcaucaacggcaccugcaccguggugaugaccgacggcagcgccagcggcaaggccgacaccaagauccuguucaucgaggagggcaagaucgugcacaccagcacccugagcggcagcgcccagcacguggaggagugcagcugcuaccccagauaccccggcgugagaugcgugugcagagacaacuggaagggcagcaacagacccaucguggacaucaacaucaaggaccacagcaucgugagcagcuacgugugcagcggccuggugggcgacacccccagaagaaacgacagcagcagcagcagccacugccuggaccccaacaacgaggagggcggccacggcgugaagggcugggccuucgacgacggcaacgacguguggaugggcagaaccaucaacgagaccagcagacugggcuacgagaccuucaaggugaucgagggcuggagcaaccccaagagcaagcugcagaucaacagacaggugaucguggacagaggcaacagaagcggcuacagcggcaucuucagcguggagggcaagagcugcaucaacagaugcuucuacguggagcugaucagaggcagaaaggaggagaccgaggugcuguggaccagcaacagcaucgugguguucugcggcaccagcggcaccuacggcaccggcagcuggcccgacggcgccgaccugaaccugaugcccaccuga

SEQ ID NO: 185375 - RNA, 1410 nt, Artificial Sequence; identical to SEQ ID NO: 183449
  derived and/or modified CDS sequence (opt4) from neuraminidase__InfluenzaA__AHZ39833

SEQ ID NO: 185376 - RNA, 1410 nt, Artificial Sequence; identical to SEQ ID NO: 182206
  derived and/or modified CDS sequence (opt4) from neuraminidase__InfluenzaA__AHZ39844

SEQ ID NO: 185377 - RNA, 1410 nt, Artificial Sequence
  derived and/or modified CDS sequence (opt4) from neuraminidase__InfluenzaA__AHZ39856
augaaccccaaccagaagaucaucaccaucggcagcgugagccugaccaucagcaccaucugcuucuucaugcagaucgccauccugaucaccaccgugacccugcacuucaagcaguacgaguucaacagcccccccaacaaccaggugaugcugugcgagcccaccaucaucgagagaaacaucaccgagaucguguaccugaccaacaccaccaucgagaaggagaucugccccaagcccgccgaguacagaaacuggagcaagccccagugcgacaucaccggcuucgcccccuucagcaaggacaacagcaucagacugagcgccggcggcgacaucugggugaccagagagcccuacgugagcugcgaccccgacaagugcuaccaguucgcccugggccagggcaccacccugaacaacgugcacagcaacaacaccgugagagacagaacccccuacagaacccugcugaugaacgagcugggcgugcccuuccaccugggcaccaagcaggugugcaucgccuggagcagcagcagcugccacgacggcaaggccuggcugcacgugugcaucaccggcgacgacaagaacgccaccgccagcuucaucuacaacggcagacugguggacagcguggugagcuggagcaaggagauccugagaacccaggagagcgagugcgugugcaucaacggcaccugcaccguggugaugaccgacggcagcgccagcggcaaggccgacaccaagauccuguucaucgaggagggcaagaucgugcacaccagcacccugagcggcagcgcccagcacguggaggagugcagcugcuaccccagauaccccggcgugagaugcgugugcagagacaacuggaagggcagcaacagacccaucguggacaucaacaucaaggaccacagcaucgugagcagauacgugugcagcggccuggugggcgacacccccagaaagaacgacagcagcagcagcagccacugccuggaccccaacaacgaggagggcggccacggcgugaagggcugggccuucgacgacggcaacgacguguggaugggcagaaccaucaacgagaccagcagacugggcuacgagaccuucaaggugaucgagggcuggagcaaccccaagagcaagcugcccaucaacagacaggugaucguggacagaggcgacagaagcggcuacagcggcaucuucagcguggagggcaagagcugcaucaacagaugcuucuacguggagcugaucagaggcagaaaggaggagaccgaggugcuguggaccagcaacagcaucgugguguucugcggcaccagcggcaccuacggcaccggcagcuggcccgacggcgccgaccugaaccugaugcccaucuga

SEQ ID NO: 185378 - RNA, 1410 nt, Artificial Sequence; identical to SEQ ID NO: 182206
  derived and/or modified CDS sequence (opt4) from neuraminidase__InfluenzaA__AHZ39868

SEQ ID NO: 185379 - RNA, 1410 nt, Artificial Sequence
  derived and/or modified CDS sequence (opt4) from neuraminidase__InfluenzaA__AHZ39892
augaaccccaaccagaagaucaucaccaucggcagcgugagccugaccaucagcaccaucugcuucuucaugcagaucgccauccugaucaccaccgugacccugcacuucaagcaguacgaguucaacagcccccccaacaaccagguggugcugugcgagcccaccaucaucgagagaaacaucaccgagaucguguaccugaccaacaccaccaucgagaaggagaucugccccaagcccgccgaguacagaaacuggagcaagccccagugcgacaucaccggcuucgcccccuucagcaaggacaacagcaucagacugagcgccggcggcgacaucugggugaccagagagcccuacgugagcugcgaccccgacaagugcuaccaguucgcccugggccagggcaccacccugaacaacgugcacagcaacaacaccgugagagacagaacccccuacagaacccugcugaugaacgagcugggcgugcccuuccaccugggcaccaagcaggugugcaucgccuggagcagcagcagcugccacgacggcaaggccuggcugcacgugugcaucaccggcgacgacaagaacgccaccgccagcuucaucuacaacggcagacugguggacagcguggugagcuggagcaaggagauccugagaacccaggagagcgagugcgugugcaucaacggcaccugcaccguggugaugaccgacggcagcgccagcggcaaggccgacaccaagauccuguucaucgaggagggcaagaucgugcacaccagcacccugagcggcagcgcccagcacguggaggagugcagcugcuaccccagauaccccggcgugagaugcgugugcagagacaacuggaagggcagcaacagacccaucguggacaucaacaucaaggaccacagcaucgugagcagauacgugugcagcggccuggugggcgacacccccagaaagaacgacagcagcagcagcagccacugccuggaccccaacaacgaggagggcggccacggcgugaagggcugggccuucgacgacggcaacgacguguggaugggcagaaccaucaacgagaccagcagacugggcuacgagaccuucaaggugaucgagggcuggagcaaccccaagagcaagcugcagaucaacagacaggugaucguggacagaggcgacagaagcggcuacagcggcaucuucagcguggagggcaagagcugcaucaacagaugcuucuacguggagcugaucagaggcagaaaggaggagaccgaggugcuguggaccagcaacagcaucgugguguucugcggcaccagcggcaccuacggcaccggcagcuggcccgacggcgccgaccugaaccugaugcccaucuga

SEQ ID NO: 185380 - RNA, 1410 nt, Artificial Sequence; identical to SEQ ID NO: 183414
  derived and/or modified CDS sequence (opt4) from neuraminidase__InfluenzaA__AHZ39904

SEQ ID NO: 185381 - RNA, 1410 nt, Artificial Sequence; identical to SEQ ID NO: 183414
  derived and/or modified CDS sequence (opt4) from neuraminidase__InfluenzaA__AHZ39916

SEQ ID NO: 185382 - RNA, 1410 nt, Artificial Sequence; identical to SEQ ID NO: 182206
  derived and/or modified CDS sequence (opt4) from neuraminidase__InfluenzaA__AHZ39928

SEQ ID NO: 185383 - RNA, 1410 nt, Artificial Sequence
  derived and/or modified CDS sequence (opt4) from neuraminidase__InfluenzaA__AHZ39940
augaaccccaaccagaagaucaucaccaucggcagcgugagccugaccaucagcaccaucugcuucuucaugcagaucgccauccugaucaccaccgugacccugcacuucaagcaguacgaguucaacagcccccccaacaaccaggugaugcugugcgagcccaccaucaucgagagaaacaugaccgagaucguguaccugaccaacaccaccaucgagaaggagaucugccccaagcccgccgaguacagaaacuggagcaagccccagugcggcaucaccggcuucgcccccuucagcaaggacaacagcaucagacugagcgccggcggcgacaucugggugaccagagagcccuacgugagcugcgaccccgacaagugcuaccaguucgcccugggccagggcaccacccugaacaacgugcacagcaacaacaccgugagagacagaacccccuacagaacccugcugaugaacgagcugggcgugcccuuccaccugggcaccaagcaggugugcaucgccuggagcagcagcagcugccacgacggcaaggccuggcugcacgugugcaucaccggcgacgacaagaacgccaccgccagcuucaucuacaacggcagacugguggacagcguggugagcuggagcaaggagauccugagaacccaggagagcgagugcgugugcaucaacggcaccugcaccguggugaugaccgacggcagcgccagcggcaaggccgacaccaagauccuguucaucgaggagggcaagaucgugcacaccagcacccugagcggcagcgcccagcacguggaggagugcagcugcuaccccagauaccccggcgugagaugcgugugcagagacaacuggaagggcagcaacagacccaucguggacaucaacaucaaggaccacagcaucgugagcagcuacgugugcagcggccuggugggcgacacccccagaaagaccgacagcagcagcagcagccacugccuggaccccaacaacgaggagggcggccacggcgugaagggcugggccuucgacgacggcaacgacguguggaugggcagaaccaucaacgagaccagcagacugggcuacgagaccuucaaggugaucgagggcuggagcaaccccaagagcaagcugcagaucaacagacaggugaucguggacagaggcgacagaagcggcuacagcggcaucuucagcguggagggcaagagcugcaucaacagaugcuucuacguggagcugaucagaggcagaaaggaggagaccgaggugcuguggaccagcaacagcaucgugguguucugcggcaccagcggcaccuacggcaccggcagcuggcccgacggcgccgaccugaaccugaugcccaucuga

SEQ ID NO: 185384 - RNA, 1410 nt, Artificial Sequence; identical to SEQ ID NO: 182206
  derived and/or modified CDS sequence (opt4) from neuraminidase__InfluenzaA__AHZ39952

SEQ ID NO: 185385 - RNA, 1410 nt, Artificial Sequence; identical to SEQ ID NO: 182206
  derived and/or modified CDS sequence (opt4) from neuraminidase__InfluenzaA__AHZ39976

SEQ ID NO: 185386 - RNA, 1410 nt, Artificial Sequence
  derived and/or modified CDS sequence (opt4) from neuraminidase__InfluenzaA__AHZ39988
augaaccccaaccagaagaucaucaccaucggcagcgugagccugaccaucagcaccaucugcuucuucaugcagaucgccauccugaucaccaccgugacccugcacuucaagcaguacgaguucaacagcccccccaacaaccaggugaugcugugcgagcccaccaucaucgagagaaacaucaccgagaucguguaccugaccaacaccaccaucgagaaggagaucugccccaagcccgccgaguacagaaacuggagcaagccccagugcggcaucaccggcuucgcccccuucagcaaggacaacagcaucagacugagcgccggcggcgacaucugggugaccagagagcccuacgugagcugcgaccccgacaagugcuaccaguucgcccugggccagggcaccacccugaacaacaugcacagcaacaacaccgugagagacagaacccccuacagaacccugcugaugaacgagcugggcgugcccuuccaccugggcaccaagcaggugugcaucgccuggagcagcagcagcugccacgacggcaaggccuggcugcacgugugcaucaccggcgacgacaagaacgccaccgccagcuucaucuacaacggcagacugguggacagcguggugagcuggagcaaggagauccugagaacccaggagagcgagugcgugugcaucaacggcaccugcaccguggugaugaccgacggcagcgccagcggcaaggccgacaccaagauccuguucaucgaggagggcaagaucgugcacaccagcacccugagcggcagcacccagcacguggaggagugcagcugcuaccccagauaccccggcgugagaugcgugugcagagacaacuggaagggcagcaacagacccaucguggacaucaacaucaaggaccacagcaucgugagcagcuacgugugcagcggccuggugggcgacacccccagaaagaacgacagcagcagcagcagccacugccuggaccccaacaacgaggagggcggccacggcgugaagggcugggccuucgacgacggcaacgacguguggaugggcagaaccaucaacgagaccagcagacugggcuacgagaccuucaaggugaucgagggcuggagcaaccccaagagcaagcugcagaucaacagacaggugaucguggacagaggcgacagaagcggcuacagcggcaucuucagcguggagggcaagagcugcaucaacagaugcuucuacguggagcugaucagaggcagaaaggaggagaccgaggugcuguggaccagcaacagcaucgugguguucugcggcaccagcggcaccuacggcaccggcagcuggcccgacggcgccgaccugaaccugaugcccaucuga

SEQ ID NO: 185387 - RNA, 1410 nt, Artificial Sequence; identical to SEQ ID NO: 182206
  derived and/or modified CDS sequence (opt4) from neuraminidase__InfluenzaA__AHZ40000

SEQ ID NO: 185388 - RNA, 1410 nt, Artificial Sequence; identical to SEQ ID NO: 182206
  derived and/or modified CDS sequence (opt4) from neuraminidase__InfluenzaA__AHZ40012

SEQ ID NO: 185389 - RNA, 1410 nt, Artificial Sequence
  derived and/or modified CDS sequence (opt4) from neuraminidase__InfluenzaA__AHZ40024
augaaccccaaccagaagaucaucaccaucggcagcgugagccugaccaucagcaccaucugcuucuucaugcagaucgccauccugaucaccaccgugacccugcacuucaagcaguacgaguucaacagcccccccaacaaccaggugaugcugugcgagcccaccaucaucgagagaaacaucaccgagaucguguaccugaccaacaccaccaucgagaaggagaucugccccaagcccgccgaguacagaaacuggagcaagccccagugcggcaucaccggcuucgcccccuucagcaaggacaacagcaucagacugagcgccggcggcgacaucugggugaccagagagcccuacgugagcugcgaccccgacaagugcuaccaguucgcccugggccagggcaccacccugaacaacgugcacagcaacaacaccgugagagacagaacccccuacagaacccugcugaugaacgagcugggcgugcccuuccaccugggcaccaagcaggugugcaucgccuggagcagcagcagcugccacgacggcaaggccuggcugcacgugugcaucaccggcgacgacaagaacgccaccgccagcuucaucuacaacggcagacugguggacagcguggugagcuggagcaaggagauccugagaacccaggagagcgagugcgugugcaucaacggcaccugcaccguggugaugaccgacggcagcgccagcggcaaggccgacaccaagauccuguucaucgaggagggcaagaucgugcacaccagcacccugagcggcagcgcccagcacguggaggagugcagcugcuaccccagauaccccggcgugagaugcgugugcagagacaacuggaagggcagcaacagacccaucguggacaucaacaucaaggaccacagcaucgugagcagcuacgugugcagcggccuggugggcgacacccccagaaagaacgacagcagcagcagcagccacugccuggaccccaacaacgaggagggcggccacggcgugaagggcugggccuucgacgacggcaacgacguguggaugggcagaaccaucaacgagaccagcagacugggcuucgagaccuucaaggugaucgagggcuggagcaaccccaagagcaagcugcagaucaacagacaggugaucguggacagaggcgacagaagcggcuacagcggcaucuucagcguggagggcaagagcugcaucaacagaugcuucuacguggagcugaucagaggcagaaaggaggagaccgaggugcuguggaccagcaacagcaucgugguguucugcggcaccagcggcaccuacggcaccggcagcuggcccgacggcgccgaccugaaccugaugcccaucuga

SEQ ID NO: 185390 - RNA, 1410 nt, Artificial Sequence; identical to SEQ ID NO: 182206
  derived and/or modified CDS sequence (opt4) from neuraminidase__InfluenzaA__AHZ40036

SEQ ID NO: 185391 - RNA, 1410 nt, Artificial Sequence; identical to SEQ ID NO: 183417
  derived and/or modified CDS sequence (opt4) from neuraminidase__InfluenzaA__AHZ40048

SEQ ID NO: 185392 - RNA, 1410 nt, Artificial Sequence; identical to SEQ ID NO: 182206
  derived and/or modified CDS sequence (opt4) from neuraminidase__InfluenzaA__AHZ40063

SEQ ID NO: 185393 - RNA, 1410 nt, Artificial Sequence
  derived and/or modified CDS sequence (opt4) from neuraminidase__InfluenzaA__AHZ40075
augaaccccaaccagaagaucaucaccaucggcagcgugagccugaccaucagcaccgugugcuucuucaugcagaucgccauccugaucaccaccgugacccugcacuucaagcaguacgaguucaacagcccccccaacaaccaggugaugcugugcgagcccaccaucaucgagagaaacaucaccgagaucguguaccugaccaacaccaccaucgagaaggagaucugccccaagcccgccgaguacagaaacuggagcaagccccagugcggcaucaccggcuucgcccccuucagcaaggacaacagcaucagacugagcgccggcggcgacaucugggugaccagagagcccuacgugagcugcgaccccgacaagugcuaccaguucgcccugggccagggcaccacccugaacaacgugcacagcaacaacaccgugagagacagaacccccuacagaacccugcugaugaacgagcugggcgugcccuuccaccugggcaccaagcaggugugcaucgccuggagcagcagcagcugccacgacggcaaggccuggcugcacgugugcaucaccggcgacgacaagaacgccaccgccagcuucaucuacaacggcagacugguggacagcguggugagcuggagcaaggagauccugagaacccaggagagcgagugcgugugcaucaacggcaccugcaccguggugaugaccgacggcagcgccagcggcaaggccgacaccaagauccuguucaucgaggagggcaagaucgugcacaccagcacccugagcggcagcgcccagcacguggaggagugcagcugcuaccccagauaccccggcgugagaugcgugugcagagacaacuggaagggcagcaacagacccaucguggacaucaacaucaaggaccacagcaucgugagcagcuacgugugcagcggccuggugggcgacacccccagaaagaacgacagcagcagcagcagccacugccuggaccccaacaacgaggagggcggccacggcgugaagggcugggccuucgacgacggcaacgacguguggaugggcagaaccaucaacgagaccagcagacugggcuacgagaccuucaaggugaucgagggcuggagcaacagcaagagcaagcugcagaucaacagacaggugaucguggacagaggcgacagaagcggcuacagcggcaucuucagcguggagggcaagagcugcaucaacagaugcuucuacguggagcugaucagaggcagaaaggaggagaccgaggugcuguggaccagcaacagcaucgugguguucugcggcaccagcggcaccuacggcaccggcagcuggcccgacggcgccgaccugaaccugaugcccaucuga

SEQ ID NO: 185394 - RNA, 1410 nt, Artificial Sequence; identical to SEQ ID NO: 182206
  derived and/or modified CDS sequence (opt4) from neuraminidase__InfluenzaA__AHZ40087

SEQ ID NO: 185395 - RNA, 1410 nt, Artificial Sequence; identical to SEQ ID NO: 183417
  derived and/or modified CDS sequence (opt4) from neuraminidase__InfluenzaA__AHZ40099

SEQ ID NO: 185396 - RNA, 1410 nt, Artificial Sequence
  derived and/or modified CDS sequence (opt4) from neuraminidase__InfluenzaA__AHZ40111
augaaccccaaccagaagaucaucaccaucggcagcgugagccugaccaucagcaccaucugcuucuucaugcagaucgccauccugaucaccaccgugacccugcacuucaagcaguacgaguucaaccccccccccaacaaccaggugaugcugugcgagcccaccaucaucgagagaaacaucaccgagaucguguaccugaccaacaccaccaucgagaaggagaucugccccaagcuggccgaguacagaaacuggagcaagccccagugcgacaucaccggcuucgcccccuucagcaaggacaacagcaucagacugagcgccggcggcgacaucugggugaccagagagcccuacgugagcugcgaccccgacaagugcuaccaguucgcccugggccagggcaccacccugaacaacgugcacagcaacaacaccgugagagacagaacccccuacagaacccugcugaugaacgagcugggcgugcccuuccaccugggcaccaagcaggugugcaucgccuggagcagcagcagcugccacgacggcaaggccuggcugcacgugugcaucaccggcgacgacaagaacgccaccgccagcuucaucuacaacggcagacugguggacagcguggugagcuggagcaaggacauccugagaacccaggagagcgagugcgugugcaucaacggcaccugcgccguggugaugaccgacggcagcgccagcggcaaggccgacaccaagauccuguucaucgaggagggcaagaucgugcacaccagcacccugagcggcagcgcccagcacguggaggagugcagcugcuaccccagauaccccggcgugagaugcgugugcagagacaacuggaagggcagcaacagacccaucguggacaucaacaucaaggaccacagcaucgugagcagcuacgugugcagcggccuggugggcgacacccccagaaagaacgacagcagcagcagcggccacugccuggaccccaacaacgaggagggcggccacggcgugaagggcugggccuucgacgacggcaacgacguguggaugggcagaaccaucaacgagaccagcagacugggcuacgagaccuucaaggugaucgagggcuggagcaaccccaagagcaagcugcagaucaacagacaggugaucguggacagaggcaacagaagcggcuacagcggcaucuucagcguggagggcaagaacugcaucaacagaugcuucuacguggagcugaucagaggcagaaaggaggagaccgaggugcuguggaccagcaacagcaucgugguguucugcggcaccagcggcaccuacggcaccggcagcuggcccgacggcgccgaccugaaccugaugcccaucuga

SEQ ID NO: 185397 - RNA, 1410 nt, Artificial Sequence
  derived and/or modified CDS sequence (opt4) from neuraminidase__InfluenzaA__AHZ40123
augaaccccaaccagaagaucaucaccaucggcagcgugagccugaccaucagcaccaucugcuucuucaugcagaucgccauccugaucaccaccgugacccugcacuucaagcaguacgaguucaacagcccccccaacaaccaggugaugcugugcgagcccaccaucaccgagagaaacaucaccgagaucguguaccugaccaacaccaccaucgagaaggagaucugccccaagcccgccgaguacagaaacuggagcaagccccagugcggcaucaccggcuucgcccccuucagcaaggacaacagcaucagacugagcgccggcggcgacaucugggugaccagagagcccuacgugagcugcgaccccgacaagugcuaccaguucgcccugggccagggcaccacccugaacaacgugcacagcaacaacaccgugagagacagaacccccuacagaacccugcugaugaacgagcugggcgugcccuuccaccugggcaccaagcaggugugcaucgccuggagcagcagcagcugccacgacggcaaggccuggcugcacgugugcaucaccggcgacgacaagaacgccaccgccagcuucaucuacaacggcagacugguggacagcguggugagcuggagcaaggagauccugagaacccaggagagcgagugcgugugcaucaacggcaccugcaccguggugaugaccgacggcagcgccagcggcaaggccgacaccaagauccuguucaucgaggagggcaagaucgugcacaccagaacccugagcggcagcgcccagcacguggaggagugcagcugcuaccccagauaccccggcgugagaugcgugugcagagacaacuggaagggcagcaacagacccaucguggacaucaacaucaaggaccacagcaucgugagcagcuacgugugcagcggccuggugggcgacacccccagaaagaacgacagcagcagcagcagccacugccuggaccccaacaacgaggagggcggccacggcgugaagggcugggccuucgacgacggcaacgacguguggaugggcagaaccaucaacgagaccagcagacugggcuacgagaccuucaaggugaucgagggcuggagcaaccccaagagcaagcugcagaucaacagacaggugaucguggacagaggcgacagaagcggcuacagcggcaucuucagcguggagggcaagagcugcaucaacagaugcuucuacguggagcugaucagaggcagaaaggaggagaccgaggugcuguggaccagcaacagcaucgugguguucugcggcaccagcggcaccuacggcaccggcagcuggcccgacggcgccgaccugaaccugaugcccaucuga

SEQ ID NO: 185398 - RNA, 1410 nt, Artificial Sequence; identical to SEQ ID NO: 182206
  derived and/or modified CDS sequence (opt4) from neuraminidase__InfluenzaA__AHZ40133

SEQ ID NO: 185399 - RNA, 1410 nt, Artificial Sequence; identical to SEQ ID NO: 183424
  derived and/or modified CDS sequence (opt4) from neuraminidase__InfluenzaA__AHZ40145

SEQ ID NO: 185400 - RNA, 1410 nt, Artificial Sequence
  derived and/or modified CDS sequence (opt4) from neuraminidase__InfluenzaA__AHZ40157
augaaccccaaccagaagaucaucaccaucggcagcgugagccugaccaucagcaccaucugcuucuucaugcagaucgccauccugaucaccaccgugacccugcacuucaagcaguacgaguucaacagcccccccaacaaccaggugaugcugugcgagcccaccaucaucgagagaaacaucaccgagaucguguaccugaccaacaccaccaucgagaaggagcugugccccaagcuggccgaguacagaaacuggagcaagccccagugcgacaucaccggcuucgcccccuucagcaaggacaacagcaucagacugagcgccggcggcgacaucugggugaccagagagcccuacgugagcugcgaccccgacaagugcuaccaguucgcccugggccagggcaccacccugaacaacgugcacagcaacaacaccgugagagacagaacccccuacagaacccugcugaugaacgagcugggcgugcccuuccaccugggcaccaagcaggugugcauggccuggagcagcagcagcugccacgacggcaaggccuggcugcacgugugcaucaccggcgacgacaagaacgccaccgccagcuucaucuacaacggcaagcugguggacagcguggugagcuggagcaaggagauccugagaacccaggagagcgagugcgugugcaucaacggcaccugcaccguggugaugaccgacggcagcgccagcggcaaggccgacaccaagauccuguucaucgaggagggcaagaucgugcacaccagcacccugagcggcagcgcccagcacguggaggagugcagcugcuaccccagauaccccggcgugagaugcgugugcagagacaacuggaagggcagcaacagacccaucguggacaucaacaucaaggaccacagcaucgugagcagcuacgugugcagcggccuggugggcgacacccccagaaagaccgacagcagcagcagcagccacugccuggaccccaacaacgaggagggcggccacggcgugaagggcugggccuucgacgacggcaacgacguguggaugggcagaaccaucaacgagaccagcagacugggcuacgagaccuucaaggugaucgagggcuggagcaaccccaagagcaagcugcagaucaacagacaggugaucguggacagaggcgacagaagcggcuacagcggcaucuucagcguggagggcaagagcugcaucaacagaugcuucuacguggagcugaucagaggcagaaaggaggagaccgccgugcuguggaccagcaacagcaucgugguguucugcggcaccagcggcaccuacggcaccggcagcuggcccgacggcgccgaccugaaccugaugcccaucuga

SEQ ID NO: 185401 - RNA, 1410 nt, Artificial Sequence
  derived and/or modified CDS sequence (opt4) from neuraminidase__InfluenzaA__AHZ40169
augaaccccaaccagaagaucaucaccaucggcagcgugugcaugaccaucggcauggccaaccugauccugcagaucggcaacaucaucagcaucuggaucagccacagcauccagcuggagaaccagagccagaucgagaccugcaaccagagcgugaucaccuacgagaacaacaccugggugaaccagaccuacgugaacaucagcaacaccaacuucgccgccggccagagcguggugagcgugaagcuggccggcaacagcagccugugccccgugagcggcugggccaucuacagcaaggacaacagcgugagaaucggcagcaagggcgacguguucgugaucagagagcccuucaucagcugcagcccccuggagugcagaaccuucuuccugacccagggcgcccugcugaacgacaagcacagcaacggcaccaucaaggacagaagccccuacagaacccugaugagcugccccaucggcgaggugcccagccccuacaacagcagauucgagagcguggccuggagcgccagcgccugccacgacggcaucaacuggcugaccaucggcaucagcggccccgacagcggcgccguggccgugcugaaguacaacggcaucaucaccgacaccaucaagagcuggagaaacaacauccugagaacccaggagagcgagugcgccugcgugaacggcagcugcuucaccaucaugaccgacggccccagcgacggccaggccagcuacaagaucuucagaaucgagaagggcaagaucgugaagagcguggagaugaacgcccccaacuaccacuacgaggagugcagcugcuaccccgacagcagcgagaucaccugcgugugcagagacaacuggcacggcagcaacagacccugggugagcuucaaccagaaccuggaguaccagaucggcuacaucugcagcggcaucuucggcgacaaccccagacccaacgacaagaccggcagcugcggccccgugagcagcaacggcgccaacggcgugaagggcuucagcuucaaguacggcaacggcguguggaucggcagaaccaagagcaucagcagcagaaagggcuucgagaugaucugggaccccaacggcuggaccggcaccgacaacaacuucagcaucaagcaggacaucgugggcaucaacgaguggagcggcuacagcggcagcuucgugcagcaccccgagcugaccggccuggacugcaucagacccugcuucuggguggagcugaucagaggcagacccaaggagaacaccaucuggaccagcggcagcagcaucagcuucugcggcgugaacagcgacaccgugggcuggagcuggcccgacggcgccgagcugcccuucaccaucgacaaguga

SEQ ID NO: 185402 - RNA, 1410 nt, Artificial Sequence
  derived and/or modified CDS sequence (opt4) from neuraminidase__InfluenzaA__AHZ40180
augaaccccaaccagaagaucaucaccaucggcagcgugagccugaccaucagcaccaucugcuucuucaugcagaucaccauccugaucaccaccgugacccugcacuucaagcaguacgaguucaacagcccccccaacaaccaggugaugcugugcgagcccaccaucaucgagagaaacaucaccgagaucguguaccugaccaacaccaccaucgagaaggagaucugccccaagcccgccgaguacagaaacuggagcaagccccagugcggcaucaccggcuucgcccccuucagcaaggacaacagcaucagacugagcgccggcggcgacaucugggugaccagagagcccuacgugagcugcgaccccgacaagugcuaccaguucgcccugggccagggcaccacccugaacaacgugcacagcaacaacaccgugagagacagaacccccuacagaacccugcugaugaacgagcugggcgugcccuuccaccugggcaccaagcaggugugcaucgccuggagcagcagcagcugccacgacggcaaggccuggcugcacgugugcaucaccggcgacgacaagaacgccaccgccagcuucaucuacaacggcagacugguggacagcguggugagcuggagcaaggagauccugagaacccaggagagcgagugcgugugcaucaacggcaccugcaccguggugaugaccgacggcagcgccagcggcaaggccgacaccaagauccuguucaucgaggagggcaagaucgugcacaccagcacccugagcggcagcgcccagcacguggaggagugcagcugcuaccccagauaccccggcgugagaugcgugugcagagacaacuggaagggcagcaacagacccaucguggacaucaacaucaaggaccacagcaucgugagcagcuacgugugcagcggccuggugggcgacacccccagaaagaacgacagcagcagcagcagccacugccuggaccccaacaacgaggagggcggccacggcgugaagggcugggccuucgacgacggcaacgacguguggaugggcagaaccaucaacgagaccagcagacugggcuacgagaccuucaaggugaucgagggcuggagcaaccccaagagcaagcugcagaucaacagacaggugaucguggacagaggcgacagaagcggcuacagcggcaucuucagcguggagggcaagagcugcaucaacagaugcuucuacguggagcugaucagaggcagaaaggaggagaccgaggugcuguggaccagcaacagcaucgugguguucugcggcaccagcggcaccuacggcaccggcagcuggcccgacggcgccgaccugaaccugaugcccaucuga

SEQ ID NO: 185403 - RNA, 1410 nt, Artificial Sequence; identical to SEQ ID NO: 183070
  derived and/or modified CDS sequence (opt4) from neuraminidase__InfluenzaA__AHZ40192

SEQ ID NO: 185404 - RNA, 1410 nt, Artificial Sequence; identical to SEQ ID NO: 182206
  derived and/or modified CDS sequence (opt4) from neuraminidase__InfluenzaA__AHZ40204

SEQ ID NO: 185405 - RNA, 1410 nt, Artificial Sequence; identical to SEQ ID NO: 182206
  derived and/or modified CDS sequence (opt4) from neuraminidase__InfluenzaA__AHZ40216

SEQ ID NO: 185406 - RNA, 1410 nt, Artificial Sequence; identical to SEQ ID NO: 183435
  derived and/or modified CDS sequence (opt4) from neuraminidase__InfluenzaA__AHZ40228

SEQ ID NO: 185407 - RNA, 1410 nt, Artificial Sequence
  derived and/or modified CDS sequence (opt4) from neuraminidase__InfluenzaA__AHZ40240
augaaccccaaccagaagaucaucaccaucggcagcgugagccugaccaucagcaccaucugcuuccugaugcagaucgccauccugaucaccaccgccacccugcacuucaagcaguacgaguucaacagcccccccaacaaccaggugaugcugugcgagcccaccaucaucgagagaaacaucaccgagaucguguaccugaccaacaccaccaucgagaaggagaucugccccaagcccgccgaguacagaaacuggagcaagccccagugcggcaucaccggcuucgcccccuucagcaaggacaacagcaucagacugagcgccggcggcgacaucugggugaccagagagcccuacgugagcugcgaccccgacaagugcuaccaguucgcccugggccagggcaccacccugaacaacgugcacagcaacaacaccgugagagacagaacccccuacagaacccugcugaugaacgagcugggcgugcccuuccaccugggcaccaagcaggugugcaucgccuggagcagcagcagcugccacgacggcaaggccuggcugcacgugugcaucaccggcgacgacaagaacgccaccgccagcuucaucuacaacggcagacugguggacagcguggugagcuggagcaaggagauccugagaacccaggagagcgagugcgugugcaucaacggcaccugcaccguggugaugaccgacggcagcgccagcggcaaggccgacaccaagauccuguucaucgaggagggcaagaucgugcacaccagcacccugagcggcagcgcccagcacguggaggagugcagcugcuaccccagauaccccggcgugagaugcgugugcagagacaacuggaagggcagcaacagacccaucguggacaucaacaucaaggacagaagcaucgugagcagcuacgugugcagcggccuggugggcgacacccccagaaagaacgacagcagcagcagcagccacugccuggaccccaacaacgaggagggcggccacggcgugaagggcugggccuucgacgacggcaacgacguguggaugggcagaaccaucaacgagaccagcagacugggcuacgagaccuucaaggugaucgagggcuggagcaaccccaagagcaagcugcagaucaacagacaggugaucguggacagaggcgacagaagcggcuacagcggcaucuucagcguggagggcaagagcugcaucaacagaugcuucuacguggagcugaucagaggcagaaaggaggagaccgaggugcuguggaccagcaacagcaucgugguguucugcggcaccagcggcaccuacggcaccggcagcuggcccgacggcgccgaccugaaccugaugcccaucuga

SEQ ID NO: 185408 - RNA, 1410 nt, Artificial Sequence
  derived and/or modified CDS sequence (opt4) from neuraminidase__InfluenzaA__AHZ40252
augaaccccaaccagaagaucaucaccaucggcagcgugagccugaccaucagcaccaucugcuucuucaugcagaucgccauccugaucaccaccgugacccugcacuucaagcaguacgaguucaacagcccccccaacaaccaggugaugcugugcgagcccaccaucaucgagagaaacaucaccgagaucguguaccugaccaacaccaccaucgagaaggagaucugccccaagcccgccgaguacagaaacuggagcaagccccagugcggcaucaccggcuucgcccccuucagcaaggacaacagcaucagacugagcgccggcggcgacaucugggugaccagagagcccuacgugagcugcgaccccgacaagugcuaccaguucgcccugggccagggcaccacccugaacaacgugcacagcaacaacaccgugagagacagaacccccuacagaacccugcugaugaacgagcugggcgugcccuuccaccugggcaccaagcaggugugcaucgccuggagcagcagcagcugccacgacggcaaggccuggcugcacgugugcaucaccggcgaggacaagaacgccaccgccagcuucaucuacaacggcagacugguggacagcaucgugagcuggagcaaggagauccugagaacccaggagagcgagugcgugugcaucaacggcaccugcaccguggugaugaccgacggcagcgccagcggcaaggccgacaccaagauccuguucaucgaggagggcaagaucgugcacaccagcacccugagcggcagcgcccagcacguggaggagugcagcugcuaccccagauaccccggcgugagaugcgugugcagagacaacuggaagggcagcaacagacccaucguggacaucaacaucaaggaccacagcaucgugagcagcuacgugugcagcggccuggugggcgacacccccagaaagaacgacagcagcagcagcagccacugccuggaccccaacaacgaggagggcggccacggcgugaagggcugggccuucgacgacggcaacgacguguggaugggcagaaccaucaacgagaccagcagacugggcuacgagaccuucaaggugaucgagggcuggagcaaccccaagagcaagcugcagaucaacagacaggugaucguggacagaggcgacagaagcggcuacagcggcaucuucagcguggagggcaagagcugcaucaacagaugcuucuacguggagcugaucagaggcagaaaggaggagaccgaggugcuguggaccagcaacagcaucgugguguucugcggcaccagcggcaccuacggcaccggcagcuggcccgacggcgccgaccugaaccugaugcccaucuga

SEQ ID NO: 185409 - RNA, 1410 nt, Artificial Sequence; identical to SEQ ID NO: 185154
  derived and/or modified CDS sequence (opt4) from neuraminidase__InfluenzaA__AHZ40264

SEQ ID NO: 185410 - RNA, 1410 nt, Artificial Sequence; identical to SEQ ID NO: 182206
  derived and/or modified CDS sequence (opt4) from neuraminidase__InfluenzaA__AHZ40276

SEQ ID NO: 185411 - RNA, 1410 nt, Artificial Sequence
  derived and/or modified CDS sequence (opt4) from neuraminidase__InfluenzaA__AHZ40288
augaaccccaaccagaagaucaucaccaucggcagcgugagccugaccaucagcaccaucugcuucuucaugcagaucgccauccugaucaccaccgugacccugcacuucaagcaguacgaguucaacagcccccccaacaaccaggugaugcugugcgagcccaccaucaucgagagaaacaucaccgagaucguguaccugaccaacaccaccaucgagaaggagaucugccccaagcuggccgaguacagaaacuggagcaagccccagugcgacaucaccggcuucgcccccuucagcaaggacaacagcaucagacugagcgccggcggcgacaucugggugaccagagagcccuacgugagcugcgaccccgacaagugcuaccaguucgcccugggccagggcaccacccugaacaacgugcacagcaacaacaccgugagagacagaacccccuacagaacccugcugaugaacgagcugggcgugcccuuccaccugggcaccaagcaggugugcaucgccuggagcagcagcagcugccacgacggcaaggccuggcugcacgugugcaucaccggcgacgacaagaacgccaccgccagcuucaucuacaacggcagacugguggacagcgugaucagcuggagcaaggacauccugagaacccaggagagcgagugcgugugcaucaacggcaccugcgccguggugaugaccgacggcagcgccagcggcaaggccgacaccaagauccuguucaucgaggagggcaagaucgugcacaccagcacccugagcggcagcgcccagcacguggaggagugcagcugcuaccccagauaccccggcgugagaugcgugugcagagacaacuggaagggcagcaacagacccaucguggacaucaacaucaaggaccacagcaucgugagcagcuacgugugcagcggccuggugggcgacacccccagaaagaacgacagcagcagcagcggccacugccuggaccccaacaacgaggagggcggccacggcgugaagggcugggccuucgacgacggcaacgacguguggaugggcagaaccaucaacgagaccagcagacugggcuacgagaccuucaaggugaucgagggcuggagcaaccccaagagcaagcugcagaucaacagacaggugaucguggacagaggcaacagaagcggcuacagcggcaucuucagcguggagggcaagaacugcaucaacagaugcuucuacguggagcugaucagaggcagaaaggaggagaccgaggugcuguggaccagcaacagcaucgugguguucugcggcaccagcggcaccuacggcaccggcagcuggcccgacggcgccgaccugaaccugaugcccaucuga

SEQ ID NO: 185412 - RNA, 1410 nt, Artificial Sequence
  derived and/or modified CDS sequence (opt4) from neuraminidase__InfluenzaA__AHZ40312
augaaccccaaccagaagaucaucaccaucggcagcgugagccugaccaucagcaccaucugcuucuucaugcagaucgccauccugaucaccaccgugacccugcacuucaagcaguacgaguucaacuacccccccaacaaccaggugaugcugugcgagcccaccaucaucgagagaaacaucaccgagaucguguaccugaccaacaccaccaucgagaaggagaucugccccaagcccgccgaguacagaaacuggagcaagccccagugcggcaucaccggcuucgcccccuucagcaaggacaacagcaucagacugagcgccggcggcgacaucugggugaccagagagcccuacgugagcugcgaccccgacaagugcuaccaguucgcccugggccagggcaccacccugaacaacgugcacagcaacaacaccgugagagacagaacccccuacagaacccugcugaugaacgagcugggcgugcccuuccaccugggcaccaagcaggugugcaucgccuggagcagcagcagcugccacgacggcaaggccuggcugcacgugugcaucaccggcgacgacaagaacgccaccgccagcuucaucuacaacggcagacugguggacagcguggugagcuggagcaaggagauccugagaacccaggagagcgagugcgugugcaucaacggcaccugcaccguggugaugaccgacggcagcgccagcggcaaggccgacaccaagauccuguucaucgaggagggcaagaucgugcacaccagcacccugagcggcagcgcccagcacguggaggagugcagcugcuaccccagauaccccggcgugagaugcgugugcagagacaacuggaagggcagcaacagacccaucguggacaucaacaucaaggaccacagcguggugagcagcuacgugugcagcggccuggugggcgacacccccagaaagaacgacagcagcagcagcagccacugccuggaccccaacaacgaggagggcggccacggcgugaagggcugggccuucgacgacggcaacgacguguggaugggcagaaccaucaacgagaccagcagacugggcuacgagaccuucaaggugaucgagggcuggagcaaccccaagagcaagcugcagaucaacagacaggugaucguggacagaggcgacagaagcggcuacagcggcaucuucagcguggagggcaagagcugcaucaacagaugcuucuacguggagcugaucagaggcagaaaggaggagaccgaggugcuguggaccagcaacagcaucgugguguucugcggcaccagcggcaccuacggcaccggcagcuggcccgacggcgccgaccugaaccugaugcccaucuga

SEQ ID NO: 185413 - RNA, 1410 nt, Artificial Sequence; identical to SEQ ID NO: 182206
  derived and/or modified CDS sequence (opt4) from neuraminidase__InfluenzaA__AHZ40324

SEQ ID NO: 185414 - RNA, 1410 nt, Artificial Sequence; identical to SEQ ID NO: 182206
  derived and/or modified CDS sequence (opt4) from neuraminidase__InfluenzaA__AHZ40336

SEQ ID NO: 185415 - RNA, 1410 nt, Artificial Sequence; identical to SEQ ID NO: 185389
  derived and/or modified CDS sequence (opt4) from neuraminidase__InfluenzaA__AHZ40348

SEQ ID NO: 185416 - RNA, 1410 nt, Artificial Sequence; identical to SEQ ID NO: 183414
  derived and/or modified CDS sequence (opt4) from neuraminidase__InfluenzaA__AHZ40360

SEQ ID NO: 185417 - RNA, 1410 nt, Artificial Sequence
  derived and/or modified CDS sequence (opt4) from neuraminidase__InfluenzaA__AHZ40372
augaaccccaaccagaagaucaucaccaucggcagcgugagccugaccaucagcaccaucugcuucuucaugcagaucgccauccugaucaccaccgugacccugcacuucaagcaguacgaguucaacagcccccccaacaaccaggugaugcugugcgagcccaccaucaucgagagaaacaucaccgagaucguguaccugaccaacaccaccaucgagaaggagaucugccccaagcccgccgaguacagaaacuggagcaagccccagugcggcaucaccggcuucgcccccuucagcaaggacaacagcaucagacugagcgccggcggcgacaucugggugaccagagagcccuacgugagcugcgaccccgacaagugcuaccaguucgcccugggccagggcaccacccugaacaacgugcacagcaacaacaccgugagagacagaacccccuacagaacccugcugaugaacgagcugggcgugcccuuccaccugggcaccaagcaggugugcaucgccuggagcagcagcagcugccacgacggcaaggccuggcugcacgugugcaucaccggcgacgacaagaacgccaccgccagcuucaucuacaacggcagacugguggacagcguggugagcuggagcaaggagauccugagaacccaggagagcgagugcgugugcaucaacggcaccugcaccguggugaugaccgacggcagcgccagcggcaaggccgacaccaagauccuguucaucgaggagggcaagaucgugcacaccagcacccugagcggcagcgcccagcacguggaggagugcagcugcuaccccagauaccccggcgugagaugcgugugcagagacaacuggaagggcagcaacagacccaucguggacaucaacaucaaggaccacagcaucgugagcagcuacgugugcagcggccuggugggcgacacccccagaaagaacgacagcagcagcagcagccacugccuggaccccaacaacgaggagggcgaccacggcgugaagggcugggccuucgacgacggcaacgacguguggaugggcagaaccaucaacgagaccagcagacugggcuacgagaccuucaaggugaucgagggcuggagcaaccccaagagcaagcugcagaucaacagacaggugaucguggacagaggcgacagaagcggcuacagcggcaucuucagcguggagggcaagagcugcaucaacagaugcuucuacguggagcugaucagaggcagaaaggaggagaccgaggugcuguggaccagcaacagcaucgugguguucugcggcaccagcggcaccuacggcaccggcagcuggcccgacggcgccgaccugaaccugaugcccaucuga

SEQ ID NO: 185418 - RNA, 1410 nt, Artificial Sequence; identical to SEQ ID NO: 183070
  derived and/or modified CDS sequence (opt4) from neuraminidase__InfluenzaA__AHZ40384

SEQ ID NO: 185419 - RNA, 1410 nt, Artificial Sequence; identical to SEQ ID NO: 182206
  derived and/or modified CDS sequence (opt4) from neuraminidase__InfluenzaA__AHZ40396

SEQ ID NO: 185420 - RNA, 1410 nt, Artificial Sequence; identical to SEQ ID NO: 182206
  derived and/or modified CDS sequence (opt4) from neuraminidase__InfluenzaA__AHZ40408

SEQ ID NO: 185421 - RNA, 1410 nt, Artificial Sequence; identical to SEQ ID NO: 182206
  derived and/or modified CDS sequence (opt4) from neuraminidase__InfluenzaA__AHZ40420

SEQ ID NO: 185422 - RNA, 1410 nt, Artificial Sequence
  derived and/or modified CDS sequence (opt4) from neuraminidase__InfluenzaA__AHZ40432
augaaccccaaccagaagaucaucaccaucggcagcgugagccugaccaucagcaccaucugcuucuucaugcagaucgccauccugaucaccaccgugacccugcacuucaagcaguacgaguucaacagcccccccaacaaccaggugaugcugugcgagcccaccaucaucgagagaaacaucaccgagaucguguaccugaccaacaccaccaucgagaaggagaucugccccaagcccgccgaguacagaaacuggagcaagccccagugcgacaucaccggcuucgcccccuucagcaaggacaacagcaucagacugagcgccggcggcgacaucugggugaccagagagcccuacgugagcugcgaccccgacaagugcuaccaguucgcccugggccagggcaccacccugaacaacgugcacagcaacaacaccgugagagacagaacccccuacagaacccugcugaugaacgagcugggcgugcccuuccaccugggcaccaagcaggugugcaucgccuggagcagcagcagcugccacgacggcaaggccuggcugcacgugugcaucaccggcgacgacaagaacgccaccgccagcuucaucuacaacggcagacugguggacagcguggugagcuggagcaaggagauccugagaacccaggagagcgagugcgugugcaucaacggcaccugcaccguggugaugaccgacggcagcgccagcggcaaggccgacaccaagauccuguucaucgaggagggcaagaucgugcacaccagcacccugagcggcagcgcccagcacguggaggagugcagcugcuaccccagauaccccggcgugagaugcgugugcagagacaacuggaagggcagcaacagacccaucaucgacaucaacaucaaggaccacagcaucgugagcagauacgugugcagcggccuggugggcgacacccccagaaagaacgacagcagcagcagcagccacugccuggaccccaacaacgaggagggcggccacggcgugaagggcugggccuucgacgacggcaacgacguguggaugggcagaaccaucaacgagaccagcagacugggcuacgagaccuucaaggugaucgagggcuggagcaaccccaagagcaagcugcagaucaacagacaggugaucguggacagaggcgacagaagcggcuacagcggcaucuucagcguggagggcaagagcugcaucaacagaugcuucuacguggagcugaucagaggcagaaaggaggagaccgaggugcuguggaccagcaacagcaucgugguguucugcggcaccagcggcaccuacggcaccggcagcuggcccgacggcgccgaccugaaccugaugcccaucuga

SEQ ID NO: 185423 - RNA, 1410 nt, Artificial Sequence; identical to SEQ ID NO: 182206
  derived and/or modified CDS sequence (opt4) from neuraminidase__InfluenzaA__AHZ40444

SEQ ID NO: 185424 - RNA, 1410 nt, Artificial Sequence
  derived and/or modified CDS sequence (opt4) from neuraminidase__InfluenzaA__AHZ40456
augaaccccaaccagaagaucaucaccaucggcagcgugagccugaccaucagcaccaucugcuucuucaugcagaucgccauccugaucaccaccgugacccugcacuucaagcaguacgaguucaacagcccccccaacaaccaggugaugcugugcgagcccaccaucaucgagagaaacaucaccgagaucguguaccugaccaacaccaccaucgagaaggagaucugccccaagcccgccgaguacagaaacuggagcaagccccagugcgacaucaccggcuucgcccccuucagcaaggacaacagcaucagacugagcgccggcggcgacaucugggugaccagagagcccuacgugagcugcgaccccgacaagugcuaccaguucgcccugggccagggcaccacccugaacaacaugcacagcaacaacaccgugagagacagaacccccuacagaacccugcugaugaacgagcugggcgugcccuuccaccugggcaccaagcaggugugcaucgccuggagcagcagcagcugccacgacggcaaggccuggcugcacgugugcaucaccggcgacgacaagaacgccaccgccagcuucaucuacaacggcagacugguggacagcguggugagcuggagcaaggagauccugagaacccaggagagcgagugcgugugcaucaacggcaccugcaccguggugaugaccgacggcagcgccagcggcaaggccgacaccaagauccuguucaucgaggagggcaagaucgugcacaccagcacccugagcggcagcgcccagcacguggaggagugcagcugcuaccccagauaccccggcgugagaugcgugugcagagacaacuggaagggcagcaacagacccaucguggacaucaacaucaaggaccacagcaucgugagcagcuacgugugcagcggccuggugggcgacacccccagaaagaacgacagcagcagcagcagccacugccuggaccccaacaacgaggagggcggccacggcgugaagggcugggccuucgacgacggcaacgacguguggaugggcagaaccaucaacgagaccagcagacugggcuacgagaccuucaaggugaucgagggcuggagcaaccccaagagcaagcugcagaucaacagacaggugaucguggacagaggcgacagaagcggcuacagcggcaucuucagcguggagggcaagagcugcaucaacagaugcuucuacguggagcugaucagaggcagaaaggaggagaccgaggugcuguggaccagcaacagcaucgugguguucugcggcaccagcggcaccuacggcaccggcagcuggcccgacggcgccgaccugaaccugaugcccaucuga

SEQ ID NO: 185425 - RNA, 1410 nt, Artificial Sequence
  derived and/or modified CDS sequence (opt4) from neuraminidase__InfluenzaA__AHZ40468
augaaccccaaccagaagaucaucaccaucggcagcgugagccugaccaucagcaccaucugcuucuucaugcagaucgccauccugaucaccaccgugacccugcacuucaagcaguacgaguucaacagcccccccaacaaccaggugaugcugugcgagcccaccaucaucgagagaaacaucaccgagaucguguaccugaccaacaccaccaucgagaaggagaucugccccaagcccgccgaguacagaaacuggagcaagccccagugcggcaucaccggcuucgcccccuucagcaaggacaacagcaucagacugagcgccggcggcgacaucugggugaccagagagcccuacgugagcugcgaccccgacaagugcuaccaguucgcccugggccagggcaccacccugaacaacgugcacagcaacaacaccgugagagacagaacccccuacagaacccugcugaugaacgagcugggcgugcccuuccaccugggcaccaagcaggugugcaucgccuggagcagcagcagcugccacgacggcaaggccuggcugcacgugugcaucaccggcaacgacaagaacgccaccgccagcuucaucuacaacggcagacugguggacagcguggugagcuggagcaaggagauccugagaacccaggagagcgagugcgugugcaucaacggcaccugcaccguggugaugaccgacggcagcgccagcggcaaggccgacaccaagauccuguucaucgaggagggcaagaucgugcacaccagcacccugagcggcagcgcccagcacguggaggagugcagcugcuaccccagauaccccggcgugagaugcgugugcagagacaacuggaagggcagcaacagacccaucguggacaucaacaucaaggaccacagcaucgugagcagcuacgugugcagcggccuggugggcgacacccccagaaagaacgacagcagcagcagcagccacugccuggaccccaacaacgaggagggcggccacggcgugaagggcugggccuucgacgacggcaacgacguguggaugggcagaaccaucaacgagaccagcagacugggcuacgagaccuucaaggugaucgagggcuggagcaaccccaagagcaagcugcagaucaacagacaggugaucguggacagaggcgacagaagcggcuacagcggcaucuucagcguggagggcaagagcugcaucaacagaugcuucuacguggagcugaucagaggcagaaaggaggagaccgaggugcuguggaccagcaacagcaucgugguguucugcggcaccagcggcaccuacggcaccggcagcuggcccgacggcgccgaccugaaccugaugcccaucuga

SEQ ID NO: 185426 - RNA, 1410 nt, Artificial Sequence; identical to SEQ ID NO: 183414
  derived and/or modified CDS sequence (opt4) from neuraminidase__InfluenzaA__AHZ40480

SEQ ID NO: 185427 - RNA, 1410 nt, Artificial Sequence; identical to SEQ ID NO: 184852
  derived and/or modified CDS sequence (opt4) from neuraminidase__InfluenzaA__AHZ40492

SEQ ID NO: 185428 - RNA, 1410 nt, Artificial Sequence; identical to SEQ ID NO: 182206
  derived and/or modified CDS sequence (opt4) from neuraminidase__InfluenzaA__AHZ40503

SEQ ID NO: 185429 - RNA, 1410 nt, Artificial Sequence; identical to SEQ ID NO: 182206
  derived and/or modified CDS sequence (opt4) from neuraminidase__InfluenzaA__AHZ40515

SEQ ID NO: 185430 - RNA, 1410 nt, Artificial Sequence
  derived and/or modified CDS sequence (opt4) from neuraminidase__InfluenzaA__AHZ40527
augaaccccaaccagaagaucaucaccaucggcagcgugagccugaccaucagcaccaugugcuucuucaugcagaucgccauccugaucaccaccgugacccugcacuucaagcaguacgaguucgacagcccccccaacaaccaggugaugcugugcgagcccaccaucaucgagagaaacaucaccgagaucguguaccugaccaacaccaccaucgagaaggagaucugccccaagcccgccgaguacagaaacuggagcaagccccagugcggcaucaccggcuucgcccccuucagcaaggacaacagcaucagacugagcgccggcggcgacaucugggugaccagagagcccuacgugagcugcgaccccgacaagugcuaccaguucgcccugggccagggcaccacccugaacaacgugcacagcaacaacaccgugagagacagaacccccuacagaacccugcugaugaacgagcugggcgugcccuuccaccugggcaccaagcaggugugcaucgccuggagcagcagcagcugccacgacggcaaggccuggcugcacgugugcaucaccggcgacgacaagaacgccaccgccagcuucaucuacaacggcagacugguggacagcguggugagcuggagcaaggagauccugagaacccaggagagcgagugcgugugcaucaacggcaccugcaccguggugaugaccgacggcagcgccagcggcaaggccgacaccaagauccuguucaucgaggagggcaagaucgugcacaccagcacccugagcggcagcgcccagcacguggaggagugcagcugcuaccccagauaccccggcgugagaugcgugugcagagacaacuggaagggcagcaacagacccaucguggacaucaacaucaaggaccacagcaucgugagcagcuacgugugcagcggccuggugggcgacacccccagaaagaacgacagcagcagcagcagccacugccuggaccccaacaacgaggagggcggccacggcgugaagggcugggccuucgacgacggcaacgacguguggaugggcagaaccaucaacgagaccagcagacugggcuacgagaccuucaaggugaucgagggcuggagcaaccccaagagcaagcugcagaucaacagacaggugaucguggacagaggcgacagaagcggcuacagcggcaucuucagcguggagggcaagagcugcaucaacagaugcuucuacguggagcugaucagaggcagaaaggaggagaccgaggugcuguggaccagcaacagcaucgugguguucugcggcaccagcggcaccuacggcaccggcagcuggcccgacggcgccgaccugaaccugaugcccaucuga

SEQ ID NO: 185431 - RNA, 1410 nt, Artificial Sequence
  derived and/or modified CDS sequence (opt4) from neuraminidase__InfluenzaA__AHZ40539
augaaccccaaccagaagaucaucaccaucggcagcgugagccugaccaucagcaccaucugcuucuucaugcagaucgccauccugaucaccaccgugacccugcacuucaagcaguacgaguucaacagcccccccaacaaccaggugaugcugugcgagcccaccaucaucgagagaaacaucaccgagaucguguaccugaccaacaccaccaucgagaaggagaucugccccaagcccgccgaguacagaaacuggagcaagccccagugcggcaucaccggcuucgcccccuucagcaaggacaacagcaucagacugagcgccggcggcgacaucugggugaccagagagcccuacgugagcugcgaccccgacaagugcuaccaguucgcccugggccagggcaccacccugaacaacgugcacagcaacaacaccgugagagacagaacccccuacagaacccugcugaugaacgagcugggcgugcccuuccaccugggcaccaagcaggugugcaucgccuggagcagcagcagcugccacgacggcaaggccuggcugcacgugugcaucaccggcgacgacaagaacgccaccgccagcuucaucuacaacggcagacugguggacagcguggugagcuggagcaaggagauccugagaacccaggagagcgagugcgugugcaucaacggcaccugcaccguggugaugaccgacggcagcgccagcggcaaggccgacaccaagauccuguucaucgaggagggcaagaucgugaacaccagcacccugagcggcagcgcccagcacguggaggagugcagcugcuaccccagauaccccggcgugagaugcgugugcagagacaacuggaagggcagcaacagacccaucguggacaucaacaucaaggaccacagcaucgugagcagcuacgugugcagcggccuggugggcgacacccccagaaagaacgacagcagcagcagcagccacugccuggaccccaacaacgaggagggcggccacggcgugaagggcugggccuucgacgacggcaacgacguguggaugggcagaaccaucaacgagaccagcagacugggcuacgagaccuucaaggugaucgagggcuggagcaaccccaagagcaagcugcagaucaacagacaggugaucguggacagaggcgacagaagcggcuacagcggcaucuucagcguggagggcaagagcugcaucaacagaugcuucuacguggagcugaucagaggcagaaaggaggagaccgaggugcuguggaccagcaacagcaucgugguguucugcggcaccagcggcaccuacggcaccggcagcuggcccgacggcgccgaccugaaccugaugcccaucuga

SEQ ID NO: 185432 - RNA, 1410 nt, Artificial Sequence; identical to SEQ ID NO: 182206
  derived and/or modified CDS sequence (opt4) from neuraminidase__InfluenzaA__AHZ40551

SEQ ID NO: 185433 - RNA, 1410 nt, Artificial Sequence
  derived and/or modified CDS sequence (opt4) from neuraminidase__InfluenzaA__AHZ40563
augaaccccaaccagaagaucaucaccaucggcagcgugagccugaccaucagcaccgugugcuucuucaugcagaucgccauccugaucaccaccgugacccugcacuucaagcaguacgaguucaacagcagccccaacaaccaggugaugcugugcgagcccaccaucaucgagagaaacaucaccgagaucguguaccugaccaacaccaccaucgagaaggagaucugccccaagcccgccgaguacagaaacuggagcaagccccagugcggcaucaccggcuucgcccccuucagcaaggacaacagcaucagacugagcgccggcggcgacaucugggugaccagagagcccuacgugagcugcgaccccgacaagugcuaccaguucgcccugggccagggcaccacccugaacaacgugcacagcaacaacaccgugagagacagaacccccuacagaacccugcugaugaacgagcugggcgugcccuuccaccugggcaccaagcaggugugcaucgccuggagcagcagcagcugccacgacggcaaggccuggcugcacgugugcaucaccggcgacgacaagaacgccaccgccagcuucaucuacaacggcagacugguggacagcguggugagcuggagcaaggagauccugagaacccaggagagcgagugcgugugcaucaacggcaccugcaccguggugaugaccgacggcagcgccagcggcaaggccgacaccaagauccuguucaucgaggagggcaagaucgugcacaccagcacccugagcggcagcgcccagcacguggaggagugcagcugcuaccccagauaccccggcgugagaugcgugugcagagacaacuggaagggcagcaacagacccaucguggacaucaacaucaaggaccacagcaucgugagcagcuacgugugcagcggccuggugggcgacacccccagaaagaacgacagcagcagcagcagccacugccuggaccccaacaacgaggagggcggccacggcgugaagggcugggccuucgacgacggcaacgacguguggaugggcagaaccaucaacgagaccagcagacugggcuacgagaccuucaaggugaucgagggcuggagcaacagcaagagcaagcugcagaucaacagacaggugaucguggacagaggcgacagaagcggcuacagcggcaucuucagcguggagggcaagagcugcaucaacagaugcuucuacguggagcugaucagaggcagaaaggaggagaccgaggugcuguggaccagcaacagcaucgugguguucugcggcaccagcggcaccuacggcaccggcagcuggcccgacggcgccgaccugaaccugaugcccaucuga

SEQ ID NO: 185434 - RNA, 1410 nt, Artificial Sequence
  derived and/or modified CDS sequence (opt4) from neuraminidase__InfluenzaA__AHZ40575
augaaccccaaccagaagaucaucaccaucggcagcgugagccugaccaucagcaccaucugcuucuucaugcagaucgccauccugaucaccaccgugacccugcacuucaagcaguacgaguucaacagcccccccaacaaccaggugaugcugugcgagcccaccaucaucgagagaaacaucaccgagaucguguaccugaccaacaccaccaucgagaaggagaucugccccaagcccgccgaguacagaaacuggagcaagccccagugcggcaucaccggcuucgcccccuucagcaaggacaacagcaucagacugagcgccggcggcgacaucugggugaccagagagcccuacgugagcugcgaccccgacaagugcuaccaguucgcccugggccagggcaccacccugaacaacgugcacagcaacaacaccgugagagacagaacccccuacagaacccugcugaugaacgagcugggcgugcccuuccaccugggcaccaagcaggugugcaucgccuggagcagcagcagcugccacgacggcaaggccuggcugcacgugugcaucaccggcgacgacaagaacgccaccgccagcuucaucuacaacggcagacugguggacagcguggugagcuggagcaaggagauccugagaacccaggagagcgagugcgugugcaucaacggcaccugcaccguggugaugaccgacggcagcgccagcggcaaggccgacaccaagauccuguucaucgaggagggcaagaucgugcacaccagcacccugagcggcagcgcccagcacguggaggagugcagcugcuaccccagauaccccggcgugagaugcgugugcagagacaacuggaagggcagcaacagacccaucguggacaucaacaucaaggaccacagcaucgugagcagcuacgugugcagcggccuggugggcgacacccccagaaagaacgacagcagcagcagcagccacugccuggaccccaacaacgaggagggcggccacggcgugaagggcugggccuucgacgacggcaacgacguguggaugggcagaaccaucaacgagaccagcagacugggcuacgagaccuucaaggugaucgagggcuggagcaaccccaagagcaagcugcagaucagcagacaggugaucguggacagaggcgacagaagcggcuacagcggcaucuucagcguggagggcaagagcugcaucaacagaugcuucuacguggagcugaucagaggcagaaaggaggagaccgaggugcuguggaccagcaacagcaucgugguguucugcggcaccagcggcaccuacggcaccggcagcuggcccgacggcgccgaccugaaccugaugcccaucuga

SEQ ID NO: 185435 - RNA, 1410 nt, Artificial Sequence; identical to SEQ ID NO: 185153
  derived and/or modified CDS sequence (opt4) from neuraminidase__InfluenzaA__AHZ40586

SEQ ID NO: 185436 - RNA, 1410 nt, Artificial Sequence
  derived and/or modified CDS sequence (opt4) from neuraminidase__InfluenzaA__AHZ40598
augaaccccaaccagaagaucaucaccaucggcagcgugugcaugaccaucggcauggccaaccugauccugcagaucggcaacaucaucagcaucuggaucagccacagcauccaggugggcaaccagagccagaucgagaccugcaaccagagcgugaucaccuacgagaacaacaccugggugaaccagaccuacgugaacaucagcaacaccaacuucgccgccggccagcccguggugagcgugaagcuggccggcaacagcagccugugccccgugagcggcugggccaucuacagcaaggacaacagcgugagaaucggcagcaagggcgacguguucgugaucagagagcccuucaucagcugcagcccccuggagugcagaaccuucuuccugacccagggcgcccugcugaacgacaagcacagcaacggcaccaucaaggacagaagccccuacagaacccugaugagcugccccaucggcgaggugcccagccccuacaacagcagauucgagagcguggccuggagcgccagcgccugccacgacggcaucaacuggcugaccaucggcaucagcggccccgacagcggcgccguggccgugcugaaguacaacggcaucaucaccgacaccaucaagagcuggagaaacgacauccugagaacccaggagagcgagugcgccugcgugaacggcagcugcuucaccaucaugaccgacggccccagcgacggccaggccagcuacaagaucuucagaaucgagaagggcaagaucgugaagagcguggagaugaacgcccccaacuaccacuacgaggagugcagcugcuaccccgacagcagcgagaucaccugcgugugcagagacaacuggcacggcagcaacagacccugggugagcuucaaccagaaccuggaguaccagaucggcuacaucugcagcggcaucuucggcgacaaccccagacccaacgacaagaccggcagcugcggccccgugagcagcaacggcgccaacggcgugaagggcuucagcuucaaguacggcaacggcguguggaucggcagaaccaagagcaucagcagcagaaagggcuucgagaugaucugggaccccaacggcuggaccggcaccgacaacaacuucagcaucaagcaggacaucgugggcaucaacgaguggagcggcuacagcggcagcuucgugcagcaccccgagcugaccggccuggacugcaucagacccugcuucuggguggagcugaucagaggcagacccaaggagaacaccaucuggaccagcggcagcagcaucagcuucugcggcgugaacagcgacaccgugggcuggagcuggcccgacggcgccgagcugcccuucaccaucgacaaguga

SEQ ID NO: 185437 - RNA, 1410 nt, Artificial Sequence; identical to SEQ ID NO: 182206
  derived and/or modified CDS sequence (opt4) from neuraminidase__InfluenzaA__AHZ40609

SEQ ID NO: 185438 - RNA, 1410 nt, Artificial Sequence; identical to SEQ ID NO: 183435
  derived and/or modified CDS sequence (opt4) from neuraminidase__InfluenzaA__AHZ40629

SEQ ID NO: 185439 - RNA, 1410 nt, Artificial Sequence; identical to SEQ ID NO: 183417
  derived and/or modified CDS sequence (opt4) from neuraminidase__InfluenzaA__AHZ40641

SEQ ID NO: 185440 - RNA, 1410 nt, Artificial Sequence
  derived and/or modified CDS sequence (opt4) from neuraminidase__InfluenzaA__AHZ40653
augaaccccaaccagaagaucaucaccaucggcagcgugagccugaccaucagcaccaucugcuucuucaugcagaucgccauccugaucaccaccgugacccugcacuucaagcaguacgaguucaacagcccccccaacaaccaggugaugcugugcgagcccaccaucaucgagagaaacaucaccgagaucguguaccugaccaacaccaccaucgagaaggagaucugccccaagcccgccggcuacagaaacuggagcaagccccagugcggcaucaccggcuucgcccccuucagcaaggacaacagcaucagacugagcgccggcggcgacaucugggugaccagagagcccuacgugagcugcgaccccgacaagugcuaccaguucgcccugggccagggcaccacccugaacaacgugcacagcaacaacaccgugagagacagaacccccuacagaacccugcugaugaacgagcugggcgugcccuuccaccugggcaccaagcaggugugcaucgccuggagcagcagcagcugccacgacggcaaggccuggcugcacgugugcaucaccggcgacgacaagaacgccaccgccagcuucaucuacaacggcagacugguggacagcguggugagcuggagcaaggagauccugagaacccaggagagcgagugcgugugcaucaacggcaccugcaccguggugaugaccgacggcagcgccagcggcaaggccgacaccaagauccuguucaucgaggagggcaagaucgugcacaccagcacccugagcggcagcgcccagcacguggaggagugcagcugcuaccccagauaccccggcgugagaugcgugugcagagacaacuggaagggcagcaacagacccaucguggacaucaacaucaaggaccacagcaucgugagcagcuacgugugcagcggccuggugggcgacacccccagaaagaacgacagcagcagcagcagccacugccuggaccccaacaacgaggagggcggccacggcgugaagggcugggccuucgacgacggcaacgacguguggaugggcagaaccaucaacgagaccagcagacugggcuacgagaccuucaaggugaucgagggcuggagcaaccccaagagcaagcugcagaucaacagacaggugaucguggacagaggcgacagaagcggcuacagcggcaucuucagcguggagggcaagagcugcaucaacagaugcuucuacguggagcugaucagaggcagaaaggaggagaccgaggugcuguggaccagcaacagcaucgugguguucugcggcaccagcggcaccuacggcaccggcagcuggcccgacggcgccgaccugaaccugaugcccaucuga

SEQ ID NO: 185441 - RNA, 1410 nt, Artificial Sequence; identical to SEQ ID NO: 183435
  derived and/or modified CDS sequence (opt4) from neuraminidase__InfluenzaA__AHZ40665

SEQ ID NO: 185442 - RNA, 1410 nt, Artificial Sequence; identical to SEQ ID NO: 183435
  derived and/or modified CDS sequence (opt4) from neuraminidase__InfluenzaA__AHZ40677

SEQ ID NO: 185443 - RNA, 1410 nt, Artificial Sequence; identical to SEQ ID NO: 182206
  derived and/or modified CDS sequence (opt4) from neuraminidase__InfluenzaA__AHZ40689

SEQ ID NO: 185444 - RNA, 1410 nt, Artificial Sequence
  derived and/or modified CDS sequence (opt4) from neuraminidase__InfluenzaA__AHZ40713
augaaccccaaccagaagaucaucaccaucggcagcgugagccugaccaucagcaccaucugcuucuucaugcagaucgccauccugaucaccaccgugacccugcacuucaagcaguacgaguucaacagcccccccaacaaccaggugaugcugugcgagcccaccaucaucgagagaaacaucaccgagaucguguaccugaccaacaccaccaucgagaaggagaucugccccaagcccgccgaguacagaaacuggagcaagccccagugcggcaucaccggcuucgcccccuucagcaaggacaacagcaucagacugagcgccggcggcgacaucugggugaccagagagcccuacgugagcugcgaccccgacaagugcuaccaguucgcccugggccagggcaccacccugaacaacgugcacagcaacaacaccgugagagacagaacccccuacagaacccugcugaugaacgagcugggcgugcccuuccaccugggcaccaagcaggugugcaucgccuggagcagcagcagcugccacgacggcaaggccuggcugcacgugugcaucaccggcgacgacaagaacgccaccgccagcuucaucuacaacggcagacugguggacagcguggugagcuggagcaaggagauccugagaacccaggagagcgagugcgugugcaucaacggcaccugcaccguggugaugaccgacggcagcgccagcggcaaggccgacaccaagauccuguucaucgaggagggcaagaucgugcacaccagcacccugagcggcagcgcccagcacguggaggagugcagcugcuaccccagauaccccggcgugagaugcgugugcagagacaacuggaagggcagcaacagacccaucguggacaucaacaucaaggaccacagcaucgugagcagcuacgugugcagcggccuggugggcgacacccccagaaagaacgacagcagcagcagcagccacugccuggaccccaacaacgaggagggcggccacggcgugaagggcugggccuucgacgacggcaacgacguguggaugggcagaaccaucaacgagaccagcagacugggcuacgagaccuucaaggugaucgagggcuggagcaaccccaagagcaagcugcagaucaacagacaggugaucguggacagaggcgacaagagcggcuacagcggcaucuucagcguggagggcaagagcugcaucaacagaugcuucuacguggagcugaucagaggcagaaaggaggagaccgaggugcuguggaccagcaacagcaucgugguguucugcggcaccagcggcaccuacggcaccggcagcuggcccgacggcgccgaccugaaccugaugcccaucuga

SEQ ID NO: 185445 - RNA, 1410 nt, Artificial Sequence
  derived and/or modified CDS sequence (opt4) from neuraminidase__InfluenzaA__AHZ40725
augaaccccaaccagaagaucaucaccaucggcagcgugagccugaccaucagcaccaucugcuucuucaugcagaucgccauccugaucaccaccgugacccugcacuucaagcaguacgaguucaacagcccccccaacaaccaggugaugcugugcgagcccaccaucaucgagagaaacaucaccgagaucguguaccugaccaacaccaccaucgagaaggagaucugccccaagcccgccgaguacagaaacuggagcaagccccagugcggcaucaccggcuucgcccccuucagcaaggacaacagcaucagacugagcgccggcggcgacaucugggugaccagagagcccuacgugagcugcgaccccgacaagugcuaccaguucgcccugggccagggcaccacccugaacaacgugcacagcaacaacaccgugagagacagaacccccuacagaacccugcugaugaacgagcugggcgugcccuuccaccugggcaccaagcaggugugcaucgccuggagcagcagcagcugccacgacggcaaggccuggcugcacgugugcaucaccggcgacgacaagaacgccaccgccagcuucaucuacaacggcagacugguggacagcguggugagcuggagcaaggagauccugagaacccaggagagcgagugcgugugcaucaacggcaccugcaccguggugaugaccgacggcagcgccagcggcaaggccgacaccaagauccuguucaucgaggagggcaagaucgugcacaccagcacccugagcggcagcgcccagcacguggaggagugcagcugcuaccccagauaccccggcgugagaugcgugugcagagacaacuggaagggcagcaacagacccaucguggacaucaacaucaaggaccacagcaucgugagcggcuacgugugcagcggccuggugggcgacacccccagaaagaacgacagcagcagcagcagccacugccuggaccccaacaacgaggagggcggccacggcgugaagggcugggccuucgacgacggcaacgacguguggaugggcagaaccaucaacgagaccagcagacugggcuacgagaccuucaaggugaucgagggcuggagcaaccccaagagcaagcugcagaucaacagacaggugaucguggacagaggcgacagaagcggcuacagcggcaucuucagcguggagggcaagagcugcaucaacagaugcuucuacguggagcugaucagaggcagaaaggaggagaccgaggugcuguggaccagcaacagcaucgugguguucugcggcaccagcggcaccuacggcaccggcagcuggcccgacggcgccgaccugaaccugaugcccaucuga

SEQ ID NO: 185446 - RNA, 1410 nt, Artificial Sequence; identical to SEQ ID NO: 183424
  derived and/or modified CDS sequence (opt4) from neuraminidase__InfluenzaA__AHZ40737

SEQ ID NO: 185447 - RNA, 1410 nt, Artificial Sequence
  derived and/or modified CDS sequence (opt4) from neuraminidase__InfluenzaA__AHZ40749
augaaccccaaccagaagaucaucaccaucggcagcgugagccugaccaucagcaccaucugccuguucaugcagaucgccauccugaucaccaccgugacccugcacuucaagcaguacgaguucaacagcccccccaacaaccaggugaugcugugcgagcccaccaucaucgagagaaacaucaccgagaucguguaccugaccaacaccaccaucgagaaggagaucugccccaagcccgccgaguacagaaacuggagcaagccccagugcggcaucaccggcuucgcccccuucagcaaggacaacagcaucagacugagcgccggcggcgacaucugggugaccagagagcccuacgugagcugcgaccccgacaagugcuaccaguucgcccugggccagggcaccacccugaacaacgugcacagcaacaacaccgugagagacagaacccccuacagaacccugcugaugaacgagcugggcgugcccuuccaccugggcaccaagcaggugugcaucgccuggagcagcagcagcugccacgacggcaaggccuggcugcacgugugcaucaccggcgacgacaagaacgccaccgccagcuucaucuacaacggcagacugguggacagcguggugagcuggagcaaggagauccugagaacccaggagagcgagugcgugugcaucaacggcaccugcaccguggugaugaccgacggcagcgccagcggcaaggccgacaccaagauccuguucaucgaggagggcaagaucgugcacaccagcacccugagcggcagcgcccagcacguggaggagugcagcugcuaccccagauaccccggcgugagaugcgugugcagagacaacuggaagggcagcaacagacccaucguggacaucaacaucaaggaccacagcaucgugagcagcuacgugugcagcggccuggugggcgacacccccagaaagaacgacagcagcagcagcagccacugccuggaccccaacaacgaggagggcggccacggcgugaagggcugggccuucgacgacggcaacgacguguggaugggcagaaccaucaacgagaccagcagacugggcuacgagaccuucaaggugaucgagggcuggagcaaccccaagagcaagcugcagaucaacagacaggugaucguggacagaggcgacagaagcggcuacagcggcaucuucagcguggagggcaagagcugcaucaacagaugcuucuacguggagcugaucagaggcagaaaggaggagaccgaggugcuguggaccagcaacagcaucgugguguucugcggcaccagcggcaccuacggcaccggccccuggcccgacggcgccgaccugaaccugaugcccaucuga

SEQ ID NO: 185448 - RNA, 1410 nt, Artificial Sequence
  derived and/or modified CDS sequence (opt4) from neuraminidase__InfluenzaA__AHZ40761
augaaccccaaccagaagaucaucaccaucggcagcgugagccugaccaucagcaccaucugcuucuucaugcagaucgccauccugaucaccaccgugacccugcacuucaagcaguacgaguucaacagcccccccaacaaccaggugaugcugugcgagcccaccaucaucgagagaaacaucaccgagaucguguaccugaccaacaccaccaucgagaaggagcugugccccaagcuggccgaguacagaaacuggagcaagccccagugcgacaucaccggcuucgcccccuucagcaaggacaacagcaucagacugagcgccggcggcgacaucugggugaccagagagcccuacgugagcugcgaccccgacaagugcuaccaguucgcccugggccagggcaccacccugaacaacgugcacagcaacaacaccgugagagacagaacccccuacagaacccugcugaugaacgagcugggcgugcccuuccaccugggcaccaagcaggugugcauggccuggagcagcagcagcugccacgacggcaaggccuggcugcacgugugcaucaccggcgacgacaagaacgccaccgccagcuucaucuacaacggcaagcugguggacagcguggugagcuggagcaaggagauccugagaacccaggagagcgagugcgugugcaucaacggcaccugcaccguggugaugaccgacggcagcgccagcggcaaggccgacaccaagauccuguucaucgaggagggcaagaucgugcacaccagcacccugagcggcagcgcccagcacguggaggagugcagcugcuaccccagauaccccggcgugagaugcgugugcagagacaacuggaagggcagcaacagacccaucguggacaucaacaucaaggaccacagcaucgugagcagcuacgugugcagcggccuggugggcgacacccccagaaagaccgacagcagcagcagcagccacugccuggaccccaacaacgaggagggcggccacggcgugaagggcugggccuucgacgacggcaacgacguguggaugggcagaaccaucaacgagaccagcagacugggcuacgagaccuucaaggugaucgagggcuggagcaaccccaagagcaagcugcagaucaacagacaggugaucguggacagaggcgacagaagcggcuacagcggcaucuucagcguggagggcaagagcugcaucaacagaugcuucuacguggagcugaucagaggcagaaagaaggagaccgccgugcuguggaccagcaacagcaucgugguguucugcggcaccagcggcaccuacggcaccggcagcuggcccgacggcgccgaccugaaccugaugcccaucuga

SEQ ID NO: 185449 - RNA, 1410 nt, Artificial Sequence; identical to SEQ ID NO: 182206
  derived and/or modified CDS sequence (opt4) from neuraminidase__InfluenzaA__AHZ40773

SEQ ID NO: 185450 - RNA, 1410 nt, Artificial Sequence; identical to SEQ ID NO: 176788
  derived and/or modified CDS sequence (opt4) from neuraminidase__InfluenzaA__AHZ40785

SEQ ID NO: 185451 - RNA, 1410 nt, Artificial Sequence; identical to SEQ ID NO: 176788
  derived and/or modified CDS sequence (opt4) from neuraminidase__InfluenzaA__AHZ40796

SEQ ID NO: 185452 - RNA, 1410 nt, Artificial Sequence; identical to SEQ ID NO: 176788
  derived and/or modified CDS sequence (opt4) from neuraminidase__InfluenzaA__AHZ40807

SEQ ID NO: 185453 - RNA, 1410 nt, Artificial Sequence; identical to SEQ ID NO: 176788
  derived and/or modified CDS sequence (opt4) from neuraminidase__InfluenzaA__AHZ40818

SEQ ID NO: 185454 - RNA, 1410 nt, Artificial Sequence; identical to SEQ ID NO: 176788
  derived and/or modified CDS sequence (opt4) from neuraminidase__InfluenzaA__AHZ40829

SEQ ID NO: 185455 - RNA, 1410 nt, Artificial Sequence; identical to SEQ ID NO: 176788
  derived and/or modified CDS sequence (opt4) from neuraminidase__InfluenzaA__AHZ40840

SEQ ID NO: 185456 - RNA, 1410 nt, Artificial Sequence; identical to SEQ ID NO: 176788
  derived and/or modified CDS sequence (opt4) from neuraminidase__InfluenzaA__AHZ40851

SEQ ID NO: 185457 - RNA, 1410 nt, Artificial Sequence; identical to SEQ ID NO: 176788
  derived and/or modified CDS sequence (opt4) from neuraminidase__InfluenzaA__AHZ40862

SEQ ID NO: 185458 - RNA, 1410 nt, Artificial Sequence; identical to SEQ ID NO: 176788
  derived and/or modified CDS sequence (opt4) from neuraminidase__InfluenzaA__AHZ40873

SEQ ID NO: 185459 - RNA, 1410 nt, Artificial Sequence; identical to SEQ ID NO: 176788
  derived and/or modified CDS sequence (opt4) from neuraminidase__InfluenzaA__AHZ40884

SEQ ID NO: 185460 - RNA, 1410 nt, Artificial Sequence; identical to SEQ ID NO: 176788
  derived and/or modified CDS sequence (opt4) from neuraminidase__InfluenzaA__AHZ40895

SEQ ID NO: 185461 - RNA, 1410 nt, Artificial Sequence; identical to SEQ ID NO: 176788
  derived and/or modified CDS sequence (opt4) from neuraminidase__InfluenzaA__AHZ40906

SEQ ID NO: 185462 - RNA, 1410 nt, Artificial Sequence; identical to SEQ ID NO: 176788
  derived and/or modified CDS sequence (opt4) from neuraminidase__InfluenzaA__AHZ40917

SEQ ID NO: 185463 - RNA, 1410 nt, Artificial Sequence; identical to SEQ ID NO: 176788
  derived and/or modified CDS sequence (opt4) from neuraminidase__InfluenzaA__AHZ40928

SEQ ID NO: 185464 - RNA, 1410 nt, Artificial Sequence; identical to SEQ ID NO: 176788
  derived and/or modified CDS sequence (opt4) from neuraminidase__InfluenzaA__AHZ40939

SEQ ID NO: 185465 - RNA, 1410 nt, Artificial Sequence; identical to SEQ ID NO: 176788
  derived and/or modified CDS sequence (opt4) from neuraminidase__InfluenzaA__AHZ40950

SEQ ID NO: 185466 - RNA, 1410 nt, Artificial Sequence; identical to SEQ ID NO: 176788
  derived and/or modified CDS sequence (opt4) from neuraminidase__InfluenzaA__AHZ40961

SEQ ID NO: 185467 - RNA, 1410 nt, Artificial Sequence; identical to SEQ ID NO: 176788
  derived and/or modified CDS sequence (opt4) from neuraminidase__InfluenzaA__AHZ40972

SEQ ID NO: 185468 - RNA, 1410 nt, Artificial Sequence; identical to SEQ ID NO: 176788
  derived and/or modified CDS sequence (opt4) from neuraminidase__InfluenzaA__AHZ40983

SEQ ID NO: 185469 - RNA, 1410 nt, Artificial Sequence; identical to SEQ ID NO: 176788
  derived and/or modified CDS sequence (opt4) from neuraminidase__InfluenzaA__AHZ40994

SEQ ID NO: 185470 - RNA, 1410 nt, Artificial Sequence; identical to SEQ ID NO: 176788
  derived and/or modified CDS sequence (opt4) from neuraminidase__InfluenzaA__AHZ41005

SEQ ID NO: 185471 - RNA, 1410 nt, Artificial Sequence; identical to SEQ ID NO: 176788
  derived and/or modified CDS sequence (opt4) from neuraminidase__InfluenzaA__AHZ41016

SEQ ID NO: 185472 - RNA, 1410 nt, Artificial Sequence; identical to SEQ ID NO: 176788
  derived and/or modified CDS sequence (opt4) from neuraminidase__InfluenzaA__AHZ41027

SEQ ID NO: 185473 - RNA, 1410 nt, Artificial Sequence; identical to SEQ ID NO: 176788
  derived and/or modified CDS sequence (opt4) from neuraminidase__InfluenzaA__AHZ41049

SEQ ID NO: 185474 - RNA, 1410 nt, Artificial Sequence; identical to SEQ ID NO: 176788
  derived and/or modified CDS sequence (opt4) from neuraminidase__InfluenzaA__AHZ41060

SEQ ID NO: 185475 - RNA, 1410 nt, Artificial Sequence; identical to SEQ ID NO: 176788
  derived and/or modified CDS sequence (opt4) from neuraminidase__InfluenzaA__AHZ41071

SEQ ID NO: 185476 - RNA, 1410 nt, Artificial Sequence; identical to SEQ ID NO: 176788
  derived and/or modified CDS sequence (opt4) from neuraminidase__InfluenzaA__AHZ41082

SEQ ID NO: 185477 - RNA, 1410 nt, Artificial Sequence; identical to SEQ ID NO: 176788
  derived and/or modified CDS sequence (opt4) from neuraminidase__InfluenzaA__AHZ41093

SEQ ID NO: 185478 - RNA, 1410 nt, Artificial Sequence; identical to SEQ ID NO: 176788
  derived and/or modified CDS sequence (opt4) from neuraminidase__InfluenzaA__AHZ41104

SEQ ID NO: 185479 - RNA, 1410 nt, Artificial Sequence; identical to SEQ ID NO: 176788
  derived and/or modified CDS sequence (opt4) from neuraminidase__InfluenzaA__AHZ41115

SEQ ID NO: 185480 - RNA, 1410 nt, Artificial Sequence; identical to SEQ ID NO: 176788
  derived and/or modified CDS sequence (opt4) from neuraminidase__InfluenzaA__AHZ41126

SEQ ID NO: 185481 - RNA, 1410 nt, Artificial Sequence; identical to SEQ ID NO: 176788
  derived and/or modified CDS sequence (opt4) from neuraminidase__InfluenzaA__AHZ41137

SEQ ID NO: 185482 - RNA, 1410 nt, Artificial Sequence; identical to SEQ ID NO: 176788
  derived and/or modified CDS sequence (opt4) from neuraminidase__InfluenzaA__AHZ41148

SEQ ID NO: 185483 - RNA, 1410 nt, Artificial Sequence; identical to SEQ ID NO: 176788
  derived and/or modified CDS sequence (opt4) from neuraminidase__InfluenzaA__AHZ41159

SEQ ID NO: 185484 - RNA, 1410 nt, Artificial Sequence; identical to SEQ ID NO: 176788
  derived and/or modified CDS sequence (opt4) from neuraminidase__InfluenzaA__AHZ41170

SEQ ID NO: 185485 - RNA, 1410 nt, Artificial Sequence; identical to SEQ ID NO: 176788
  derived and/or modified CDS sequence (opt4) from neuraminidase__InfluenzaA__AHZ41181

SEQ ID NO: 185486 - RNA, 1410 nt, Artificial Sequence; identical to SEQ ID NO: 176788
  derived and/or modified CDS sequence (opt4) from neuraminidase__InfluenzaA__AHZ41205

SEQ ID NO: 185487 - RNA, 1410 nt, Artificial Sequence; identical to SEQ ID NO: 176788
  derived and/or modified CDS sequence (opt4) from neuraminidase__InfluenzaA__AHZ41251

SEQ ID NO: 185488 - RNA, 1410 nt, Artificial Sequence; identical to SEQ ID NO: 176788
  derived and/or modified CDS sequence (opt4) from neuraminidase__InfluenzaA__AHZ41266

SEQ ID NO: 185489 - RNA, 1410 nt, Artificial Sequence; identical to SEQ ID NO: 176788
  derived and/or modified CDS sequence (opt4) from neuraminidase__InfluenzaA__AHZ41284

SEQ ID NO: 185490 - RNA, 1410 nt, Artificial Sequence; identical to SEQ ID NO: 176788
  derived and/or modified CDS sequence (opt4) from neuraminidase__InfluenzaA__AHZ41295

SEQ ID NO: 185491 - RNA, 1410 nt, Artificial Sequence; identical to SEQ ID NO: 176788
  derived and/or modified CDS sequence (opt4) from neuraminidase__InfluenzaA__AHZ41306

SEQ ID NO: 185492 - RNA, 1410 nt, Artificial Sequence; identical to SEQ ID NO: 176788
  derived and/or modified CDS sequence (opt4) from neuraminidase__InfluenzaA__AHZ41317

SEQ ID NO: 185493 - RNA, 1410 nt, Artificial Sequence; identical to SEQ ID NO: 176788
  derived and/or modified CDS sequence (opt4) from neuraminidase__InfluenzaA__AHZ41328

SEQ ID NO: 185494 - RNA, 1410 nt, Artificial Sequence; identical to SEQ ID NO: 176788
  derived and/or modified CDS sequence (opt4) from neuraminidase__InfluenzaA__AHZ41339

SEQ ID NO: 185495 - RNA, 1410 nt, Artificial Sequence; identical to SEQ ID NO: 176788
  derived and/or modified CDS sequence (opt4) from neuraminidase__InfluenzaA__AHZ41350

SEQ ID NO: 185496 - RNA, 1410 nt, Artificial Sequence; identical to SEQ ID NO: 176788
  derived and/or modified CDS sequence (opt4) from neuraminidase__InfluenzaA__AHZ41369

SEQ ID NO: 185497 - RNA, 1410 nt, Artificial Sequence; identical to SEQ ID NO: 176788
  derived and/or modified CDS sequence (opt4) from neuraminidase__InfluenzaA__AHZ41380

SEQ ID NO: 185498 - RNA, 1410 nt, Artificial Sequence; identical to SEQ ID NO: 176788
  derived and/or modified CDS sequence (opt4) from neuraminidase__InfluenzaA__AHZ41391

SEQ ID NO: 185499 - RNA, 1410 nt, Artificial Sequence; identical to SEQ ID NO: 176788
  derived and/or modified CDS sequence (opt4) from neuraminidase__InfluenzaA__AHZ41402

SEQ ID NO: 185500 - RNA, 1410 nt, Artificial Sequence; identical to SEQ ID NO: 176788
  derived and/or modified CDS sequence (opt4) from neuraminidase__InfluenzaA__AHZ41413

SEQ ID NO: 185501 - RNA, 1410 nt, Artificial Sequence; identical to SEQ ID NO: 176788
  derived and/or modified CDS sequence (opt4) from neuraminidase__InfluenzaA__AHZ41444

SEQ ID NO: 185502 - RNA, 1410 nt, Artificial Sequence; identical to SEQ ID NO: 176788
  derived and/or modified CDS sequence (opt4) from neuraminidase__InfluenzaA__AHZ41455

SEQ ID NO: 185503 - RNA, 1410 nt, Artificial Sequence; identical to SEQ ID NO: 176788
  derived and/or modified CDS sequence (opt4) from neuraminidase__InfluenzaA__AHZ41476

SEQ ID NO: 185504 - RNA, 1410 nt, Artificial Sequence; identical to SEQ ID NO: 176788
  derived and/or modified CDS sequence (opt4) from neuraminidase__InfluenzaA__AHZ41487

SEQ ID NO: 185505 - RNA, 1410 nt, Artificial Sequence; identical to SEQ ID NO: 176788
  derived and/or modified CDS sequence (opt4) from neuraminidase__InfluenzaA__AHZ41498

SEQ ID NO: 185506 - RNA, 1410 nt, Artificial Sequence; identical to SEQ ID NO: 176788
  derived and/or modified CDS sequence (opt4) from neuraminidase__InfluenzaA__AHZ41509

SEQ ID NO: 185507 - RNA, 1410 nt, Artificial Sequence; identical to SEQ ID NO: 176788
  derived and/or modified CDS sequence (opt4) from neuraminidase__InfluenzaA__AHZ41520

SEQ ID NO: 185508 - RNA, 1410 nt, Artificial Sequence; identical to SEQ ID NO: 176788
  derived and/or modified CDS sequence (opt4) from neuraminidase__InfluenzaA__AHZ41531

SEQ ID NO: 185509 - RNA, 1410 nt, Artificial Sequence; identical to SEQ ID NO: 176788
  derived and/or modified CDS sequence (opt4) from neuraminidase__InfluenzaA__AHZ41542

SEQ ID NO: 185510 - RNA, 1410 nt, Artificial Sequence; identical to SEQ ID NO: 176788
  derived and/or modified CDS sequence (opt4) from neuraminidase__InfluenzaA__AHZ41553

SEQ ID NO: 185511 - RNA, 1410 nt, Artificial Sequence; identical to SEQ ID NO: 176788
  derived and/or modified CDS sequence (opt4) from neuraminidase__InfluenzaA__AHZ41564

SEQ ID NO: 185512 - RNA, 1410 nt, Artificial Sequence; identical to SEQ ID NO: 176788
  derived and/or modified CDS sequence (opt4) from neuraminidase__InfluenzaA__AHZ41586

SEQ ID NO: 185513 - RNA, 1410 nt, Artificial Sequence; identical to SEQ ID NO: 176788
  derived and/or modified CDS sequence (opt4) from neuraminidase__InfluenzaA__AHZ41597

SEQ ID NO: 185514 - RNA, 1410 nt, Artificial Sequence; identical to SEQ ID NO: 176788
  derived and/or modified CDS sequence (opt4) from neuraminidase__InfluenzaA__AHZ41608

SEQ ID NO: 185515 - RNA, 1410 nt, Artificial Sequence; identical to SEQ ID NO: 176788
  derived and/or modified CDS sequence (opt4) from neuraminidase__InfluenzaA__AHZ41619

SEQ ID NO: 185516 - RNA, 1410 nt, Artificial Sequence; identical to SEQ ID NO: 176788
  derived and/or modified CDS sequence (opt4) from neuraminidase__InfluenzaA__AHZ41630

SEQ ID NO: 185517 - RNA, 1410 nt, Artificial Sequence; identical to SEQ ID NO: 176788
  derived and/or modified CDS sequence (opt4) from neuraminidase__InfluenzaA__AHZ41641

SEQ ID NO: 185518 - RNA, 1410 nt, Artificial Sequence; identical to SEQ ID NO: 176788
  derived and/or modified CDS sequence (opt4) from neuraminidase__InfluenzaA__AHZ41652

SEQ ID NO: 185519 - RNA, 1410 nt, Artificial Sequence; identical to SEQ ID NO: 176788
  derived and/or modified CDS sequence (opt4) from neuraminidase__InfluenzaA__AHZ41663

SEQ ID NO: 185520 - RNA, 1410 nt, Artificial Sequence; identical to SEQ ID NO: 176788
  derived and/or modified CDS sequence (opt4) from neuraminidase__InfluenzaA__AHZ41674

SEQ ID NO: 185521 - RNA, 1410 nt, Artificial Sequence; identical to SEQ ID NO: 176788
  derived and/or modified CDS sequence (opt4) from neuraminidase__InfluenzaA__AHZ41685

SEQ ID NO: 185522 - RNA, 1410 nt, Artificial Sequence; identical to SEQ ID NO: 176788
  derived and/or modified CDS sequence (opt4) from neuraminidase__InfluenzaA__AHZ41696

SEQ ID NO: 185523 - RNA, 1410 nt, Artificial Sequence; identical to SEQ ID NO: 176788
  derived and/or modified CDS sequence (opt4) from neuraminidase__InfluenzaA__AHZ41707

SEQ ID NO: 185524 - RNA, 1410 nt, Artificial Sequence; identical to SEQ ID NO: 176788
  derived and/or modified CDS sequence (opt4) from neuraminidase__InfluenzaA__AHZ41718

SEQ ID NO: 185525 - RNA, 1410 nt, Artificial Sequence; identical to SEQ ID NO: 176788
  derived and/or modified CDS sequence (opt4) from neuraminidase__InfluenzaA__AHZ41729

SEQ ID NO: 185526 - RNA, 1410 nt, Artificial Sequence; identical to SEQ ID NO: 176788
  derived and/or modified CDS sequence (opt4) from neuraminidase__InfluenzaA__AHZ41740

SEQ ID NO: 185527 - RNA, 1410 nt, Artificial Sequence; identical to SEQ ID NO: 176788
  derived and/or modified CDS sequence (opt4) from neuraminidase__InfluenzaA__AHZ41751

SEQ ID NO: 185528 - RNA, 1410 nt, Artificial Sequence; identical to SEQ ID NO: 176788
  derived and/or modified CDS sequence (opt4) from neuraminidase__InfluenzaA__AHZ41762

SEQ ID NO: 185529 - RNA, 1410 nt, Artificial Sequence; identical to SEQ ID NO: 183449
  derived and/or modified CDS sequence (opt4) from neuraminidase__InfluenzaA__AHZ42564

SEQ ID NO: 185530 - RNA, 1410 nt, Artificial Sequence; identical to SEQ ID NO: 182206
  derived and/or modified CDS sequence (opt4) from neuraminidase__InfluenzaA__AHZ42575

SEQ ID NO: 185531 - RNA, 1410 nt, Artificial Sequence
  derived and/or modified CDS sequence (opt4) from neuraminidase__InfluenzaA__AHZ42587
augaaccccaaccagaagaucaucaccaucggcagcgugagccugaccaucagcaccaucugcuucuucaugcagaucgccauccugaucaccaccgugacccugcacuucaagcaguacgaguucaacagcccccccaacaaccaggugaugcugugcgagcccaccaucaucgagagaaacaucaccgagaucguguaccugaccaacaccaccaucgagaaggagaugugccccaagcccgccgaguacagaaacuggagcaagccccagugcggcaucaccggcuucgcccccuucagcaaggacaacagcaucagacugagcgccggcggcgacaucugggugaccagagagcccuacgugagcugcgaccccgacaagugcuaccaguucgcccugggccagggcaccacccugaacaacgugcacagcaacaacaccgugagagacagaacccccuacagaacccugcugaugaacgagcugggcgugcccuuccaccugggcaccaagcaggugugcaucgccuggagcagcagcagcugccacgacggcaaggccuggcugcacgugugcaucaccggcgacgacaagaacgccaccgccagcuucaucuacaacggcagacugguggacagcguggugagcuggagcaaggagauccugagaacccaggagagcgagugcgugugcaucaacggcaccugcaccguggugaugaccgacggcagcgccagcggcaaggccgacaccaagauccuguucaucgaggagggcaagaucgugcacaccagcacccugagcggcagcgcccagcacguggaggagugcagcugcuaccccagauaccccggcgugagaugcgugugcagagacaacuggaagggcagcaacagacccaucguggacaucaacaucaaggaccacagcaucgugagcagcuacgugugcagcggccuggugggcgacacccccagaaagaacgacagcagcagcagcagccacugccuggaccccaacaacgaggagggcggccacggcgugaagggcugggccuucgacgacggcaacgacguguggaugggcagaaccaucaacgagaccagcagacugggcuacgagaccuucaaggugaucgagggcuggagcaaccccaagagcaagcugcagaucaacagacaggugaucguggacagaggcgacagaagcggcuacagcggcaucuucagcguggagggcaagagcugcaucaacagaugcuucuacguggagcugaucagaggcagaaaggaggagaccgaggugcuguggaccagcaacagcaucgugguguucugcggcaccagcggcaccuacggcaccggcagcuggcccgacggcgccgaccugaaccugaugcccaucuga

SEQ ID NO: 185532 - RNA, 1413 nt, Artificial Sequence
  derived and/or modified CDS sequence (opt4) from neuraminidase__InfluenzaA__AHZ42599
augaaccccaaccagaagaucaucaccaucggcagcgugagccugaccaucagcaccaucugcuucuucaugcagaucgccauccugaucaccaccgugacccugcacuucaagcaguacgaguucaacagcccccccaagaacaaccaggugaugcugugcgagcccaccaucaucgagagaaacaucaccgagaucguguaccugaccaacaccaccaucgagaaggagaucugccccaagcccgccgaguacagaaacuggagcaagccccagugcggcaucaccggcuucgcccccuucagcaaggacaacagcaucagacugagcgccggcggcgacaucugggugaccagagagcccuacgugagcugcgaccccgacaagugcuaccaguucgcccugggccagggcaccacccugaacaacgugcacagcaacaacaccgugagagacagaacccccuacagaacccugcugaugaacgagcugggcgugcccuuccaccugggcaccaagcaggugugcaucgccuggagcagcagcagcugccacgacggcaaggccuggcugcacgugugcaucaccggcgacgacaagaacgccaccgccagcuucaucuacaacggcagacugguggacagcguggugagcuggagcaaggagauccugagaacccaggagagcgagugcgugugcaucaacggcaccugcaccguggugaugaccgacggcagcgccagcgagaaggccgacaccaagauccuguucaucgaggagggcaagaucgugcacaccagcacccugagcggcagcgcccagcacguggaggagugcagcugcuaccccagauaccccggcgugagaugcgugugcagagacaacuggaagggcagcaacagacccaucguggacaucaacaucaaggaccacagcaucgugagcagcuacgugugcagcggccuggugggcgacacccccagaaagaacgacagcagcagcagcagccacugccuggaccccaacaacgaggagggcggccacggcgugaagggcugggccuucgacgacggcaacgacguguggaugggcagaaccaucaacgagaccagcagacugggcuacgagaccuucaaggugaucgagggcuggagcaaccccaagagcaagcugcagaucaacagacaggugaucguggacagaggcgacagaagcggcuacagcggcaucuucagcguggagggcaagagcugcaucaacagaugcuucuacguggagcugaucagaggcagaaaggaggagaccgaggugcuguggaccagcaacagcaucgugguguucugcggcaccagcggcaccuacggcaccggcagcuggcccgacggcgccgaccugaaccugaugcccaucuga

SEQ ID NO: 185533 - RNA, 1410 nt, Artificial Sequence; identical to SEQ ID NO: 184852
  derived and/or modified CDS sequence (opt4) from neuraminidase__InfluenzaA__AHZ42611

SEQ ID NO: 185534 - RNA, 1410 nt, Artificial Sequence; identical to SEQ ID NO: 182206
  derived and/or modified CDS sequence (opt4) from neuraminidase__InfluenzaA__AHZ42622

SEQ ID NO: 185535 - RNA, 1410 nt, Artificial Sequence; identical to SEQ ID NO: 185393
  derived and/or modified CDS sequence (opt4) from neuraminidase__InfluenzaA__AHZ42634

SEQ ID NO: 185536 - RNA, 1410 nt, Artificial Sequence; identical to SEQ ID NO: 185436
  derived and/or modified CDS sequence (opt4) from neuraminidase__InfluenzaA__AHZ42646

SEQ ID NO: 185537 - RNA, 1410 nt, Artificial Sequence; identical to SEQ ID NO: 182206
  derived and/or modified CDS sequence (opt4) from neuraminidase__InfluenzaA__AHZ42657

SEQ ID NO: 185538 - RNA, 1410 nt, Artificial Sequence; identical to SEQ ID NO: 185153
  derived and/or modified CDS sequence (opt4) from neuraminidase__InfluenzaA__AHZ42669

SEQ ID NO: 185539 - RNA, 1410 nt, Artificial Sequence; identical to SEQ ID NO: 182206
  derived and/or modified CDS sequence (opt4) from neuraminidase__InfluenzaA__AHZ42681

SEQ ID NO: 185540 - RNA, 1410 nt, Artificial Sequence
  derived and/or modified CDS sequence (opt4) from neuraminidase__InfluenzaA__AHZ42693
augaaccccaaccagaagaucaucaccaucggcagcgugugcaugaccaucggcauggccaaccugauccugcagaucggcaacaucaucagcaucuggaucagccacagcauccagcugggcaaccagagccagaucgagaccugcaaccagagcgugaucaccuacgagaacaacaccugggugaaccagaccuacgugaacaucagcaacaccaacuucgccgccggccagagcguggugagcgugaagcuggccggcaacagcagccugugccccgugagcggcugggccaucuacagcaaggacaacagcgugagaaucggcagcaagggcgacguguucgugaucagagagcccuucaucagcugcagcccccuggagugcagaaccuucuuccugacccagggcgcccugcugaacgacaagcacagcaacggcaccaucaaggacagaagccccuacagaacccugaugagcugccccaucggcgaggugcccagccccuacaacagcagauucgagagcguggccuggagcgccagcgccugccacgacggcaucaacuggcugaccaucggcaucagcggccccgacagcggcgccguggccgugcugaaguacaacggcaucaucaccgacaccaucaagagcuggagaaacaacauccugagaacccaggagagcgagugcgccugcgugaacggcagcugcuucaccaucaugaccgacggccccagcgacggccaggccagcuacaagaucuucagaaucgagaagggcaagaucgugaagagcguggagaugaacgcccccaacuaccacuacgaggagugcagcugcuaccccgacagcagcgagaucaccugcgugugcagagacaacuggcacggcagcaacagacccugggugagcuucaaccagaaccuggaguaccagaucggcuacaucugcagcggcaucuucggcgacaaccccagacccaacgacaagaccggcagcugcggccccgugagcagcaacggcgccaacggcgugaagggcuucagcuucaaguacggcaacggcguguggaucggcagaaccaagagcaucagcagcagaaagggcuucgagaugaucugggaccccaacggcuggaccggcaccgacaacaacuucagcaucaagcaggacaucgugggcaucaacgaguggagcggcuacagcggcagcuucgugcagcaccccgagcugaccggcauggacugcaucagacccugcuucuggguggagcugaucagaggcagacccaaggagaacaccaucuggaccagcggcagcaucaucagcuucugcggcgugaacagcgacaccgugggcuggagcuggcccgacggcgccgagcugcccuucaccaucgacaaguga

SEQ ID NO: 185541 - RNA, 1410 nt, Artificial Sequence; identical to SEQ ID NO: 182206
  derived and/or modified CDS sequence (opt4) from neuraminidase__InfluenzaA__AHZ42704

SEQ ID NO: 185542 - RNA, 1410 nt, Artificial Sequence
  derived and/or modified CDS sequence (opt4) from neuraminidase__InfluenzaA__AHZ42716
augaaccccaaccagaagaucaucaccaucggcagcgugagccugaccaucagcaccaucugcuucuucaugcagaucgccauccugaucaccaccgugacccugcacuucaagcaguacgaguucaacagcccccccaacaaccaggugaugcugugcgagcccaccaucaucgagagaaacaucaccgagaucguguaccugaccaacaccaccaucgagaaggagaucugccccaagcccgccgaguacagaaacuggagcaagccccagugcggcaucaccggcuucgcccccuucagcaaggacaacagcaucagacugagcgccggcggcgacaucugggugaccagagagcccuacgugagcugcgaccccgacaagugcuaccaguucgcccugggccagggcaccacccugaacaacgugcacagcaacaacaccgugagagacagaacccccuacagaacccugcugaugaacgagcugggcgugcccuuccaccugggcaccaagcaggugugcaucgccuggagcagcagcagcugccacgacggcaaggccuggcugcacgugugcaucaccggcgacgacaagaacgccaccgccagcuucaucuacaacggcagacugguggacagcguggugagcuggagcaaggagauccugagaacccaggagagcgagugcgugugcaucaacggcaccugcaccguggugaugaccgacggcagcgccagcggcaaggccgacaccaagauccuguucaucgaggagggcaagaucgugcacaccagcacccugagcggcagcgcccagcacguggaggagugcagcugcuaccccagauaccccggcgugagaugcgugugcagagacaacuggaagggcagcaacagacccaucguggacaucaacaucaaggaccacagcaucgugagcagcuacgugugcagcggccuggugggcgacacccccagaaagaacgacagcagcagcagcagccacugccuggaccccaacaacgaggagggcggccacggcgugaagggcugggccuucgacgacggcaacgacguguggaugggcagaaccaucaacgagaccagcagacugggcuacgagaccuucaaggugaucgagggcuggagcaaccccaagagcaaguuccagaucaacagacaggugaucguggacagaggcgacagaagcggcuacagcggcaucuucagcguggagggcaagagcugcaucaacagaugcuucuacguggagcugaucagaggcagaaaggaggagaccgaggugcuguggaccagcaacagcaucgugguguucugcggcaccagcggcaccuacggcaccggcagcuggcccgacggcgccgaccugaaccugaugcccaucuga

SEQ ID NO: 185543 - RNA, 1410 nt, Artificial Sequence; identical to SEQ ID NO: 182206
  derived and/or modified CDS sequence (opt4) from neuraminidase__InfluenzaA__AHZ42728

SEQ ID NO: 185544 - RNA, 1410 nt, Artificial Sequence; identical to SEQ ID NO: 183449
  derived and/or modified CDS sequence (opt4) from neuraminidase__InfluenzaA__AHZ42740

SEQ ID NO: 185545 - RNA, 1410 nt, Artificial Sequence; identical to SEQ ID NO: 183417
  derived and/or modified CDS sequence (opt4) from neuraminidase__InfluenzaA__AHZ42751

SEQ ID NO: 185546 - RNA, 1410 nt, Artificial Sequence
  derived and/or modified CDS sequence (opt4) from neuraminidase__InfluenzaA__AHZ42763
augaaccccaaccagaagaucaucaccaucggcagcgugagccugaccaucagcaccaucugcuucuucaugcagaucgccauccugaucaccaccgugacccugcacuucaagcaguacgaguucaacagcccccccaacaaccaggugaugcugugcgagcccaccaucaucgagagaaacaucaccgagaucguguaccugaccaacaccaccaucgagaaggagaucugccccaagcccgccgaguacagaaacuggagcaagccccagugcgacaucaccggcuucgcccccuucagcaaggacaacagcaucagacugagcgccggcggcgacaucugggugaccagagagcccuacgugagcugcgaccccgacaagugcuaccaguucgcccugggccagggcaccacccugaacaacgugcacagcaacaacaccgugagagacagaacccccuacagaacccugcugaugaacgagcugggcgugcccuuccaccugggcaccaagcaggugugcaucgccuggagcagcagcagcugccacgacggcaaggccuggcugcacgugugcaucaccggcgacgacaagaacgccaccgccagcuucaucuacaacggcagacugguggacagcguggugagcuggagcaaggagauccugagaacccaggagagcgagugcgugugcaucaacggcaccugcaccguggugaugaccgacggcagcgccagcggcaaggccgacaccaagauccuguucaucgaggagggcaagaucguguacaccagcacccugagcggcagcgcccagcacguggaggagugcagcugcuaccccagauaccccggcgugagaugcgugugcagagacaacuggaagggcagcaacagacccaucguggacaucaacaucaaggaccacagcaucgugagcagauacgugugcagcggccuggugggcgacacccccagaaagaacgacagcagcagcagcagccacugccuggaccccaacaacgaggagggcggccacggcgugaagggcugggccuucgacgacggcaacgacguguggaugggcagaaccaucaacgagaccagcagacugggcuacgagaccuucaaggugaucgagggcuggagcaaccccaagagcaagcugcagaucaacagacaggugaucguggacagaggcgacagaagcggcuacagcggcaucuucagcguggagggcaagagcugcaucaacagaugcuucuacguggagcugaucagaggcagaaaggaggagaccgaggugcuguggaccagcaacagcaucgugguguucugcggcaccagcggcaccuacggcaccggcagcuggcccgacggcgccgaccugaaccugaugcccaucuga

SEQ ID NO: 185547 - RNA, 1410 nt, Artificial Sequence; identical to SEQ ID NO: 183435
  derived and/or modified CDS sequence (opt4) from neuraminidase__InfluenzaA__AHZ42775

SEQ ID NO: 185548 - RNA, 1410 nt, Artificial Sequence; identical to SEQ ID NO: 182206
  derived and/or modified CDS sequence (opt4) from neuraminidase__InfluenzaA__AHZ42787

SEQ ID NO: 185549 - RNA, 1410 nt, Artificial Sequence
  derived and/or modified CDS sequence (opt4) from neuraminidase__InfluenzaA__AHZ42799
augaaccccaaccagaagaucaucaccaucggcagcgugagccugaccaucagcaccaucugcuucuucaugcagaucgccauccugaucaccaccgugacccugcacuucaagcaguacgaguucaacagcccccccaacaaccaggugaugcugugcgagcccaccaucaucgagagaaacaucaccgagaucguguaccugaccaacaccaccaucgagaaggagaucugccccaagcccgccgaguacagaaacuggagcaagccccagugcggcaucaccggcuucgcccccuucagcaaggacaacagcaucagacugagcgccggcggcgacaucugggugaccagagagcccuacgugagcugcgaccccgacaagugcuaccaguucgcccugggccagggcaccacccugaacaacgugcacagcaacaacaccgugagagacagaacccccuacagaacccugcugaugaacgagcugggcgugcccuuccaccugggcaccaagcaggugugcaucgccuggagcagcagcagcugccacgacggcaaggccuggcugcacgugugcaucaccggcgacgacaagaacgccaccgccagcuucaucuacaacggcagacugguggacagcguggugagcuggagcaaggagauccugagaacccaggagagcgagugcgugugcaucaacggcaccugcaccguggugaugaccgacggcagcgccagcggcaaggccgacaccaagauccuguucaucgaggagggcaagaucgugcacaccagcacccugagcggcagcgcccagcacguggaggagugcagcugcuaccccagauaccccggcgugagaugcgugugcagagacaacuggaagggcagcaacagacccaucaucgacaucaacaucaaggaccacagcaucgugagcagcuacgugugcagcggccuggugggcgacacccccagaaagaacgacagcagcagcagcagccacugccuggaccccaacaacgaggagggcggccacggcgugaagggcugggccuucgacgacggcaacgacguguggaugggcagaaccaucaacgagaccagcagacugggcuacgagaccuucaaggugaucgagggcuggagcaaccccaagagcaagcugcagaucaacagacaggugaucguggacagaggcgacagaagcggcuacagcggcaucuucagcguggagggcaagagcugcaucaacagaugcuucuacguggagcugaucagaggcagaaaggaggagaccgaggugcuguggaccagcaacagcaucgugguguucugcggcaccagcggcaccuacggcaccggcagcuggcccgacggcgccgaccugaaccugaugcccaucuga

SEQ ID NO: 185550 - RNA, 1410 nt, Artificial Sequence
  derived and/or modified CDS sequence (opt4) from neuraminidase__InfluenzaA__AHZ42811
augaaccccaaccagaagaucaucaccaucggcagcgugagccugaccaucagcaccaucugcuucuucaugcagaucgccauccugaucaccaccgugacccugcacuucaagcaguacgaguucaacagcccccccaacaaccaggugaugcugugcgagcccaccaucaucgagagaaacaucaccgagaucguguaccugaccaacaccaccaucgagaaggagaucugccccaagcccgccgaguacagaaacuggagcaagccccagugcggcaucaccggcuucgcccccuucagcaaggacaacagcaucagacugagcgccggcggcgacaucugggugaccagagagcccuacgugagcugcgaccccgacaagugcuaccaguucgcccugggccagggcaccacccugaacaacgugcacagcaacaacaccgugagagacagaacccccuacagaacccugcugaugaacgagcugggcgugcccuuccaccugggcaccaagcaggugugcaucgccuggagcagcagcagcugccacgacggcaaggccuggcugcacgugugcaucaccggcgacgacaagaacgccaccgccagcuucaucuacaacggcagacugguggacagcguggugagcuggagcaaggagauccugagaacccaggagagcgagugcgugugcaucaacggcaccugcaccguggugaugaccgacggcagcgccagcggcaaggccgacaccaagauccuguucaucgaggagggcaagaucgugcacaccagcacccugagcggcagcgcccagcacguggaggagugcagcugcuaccccagauaccccggcgugagaugcgugugcagagacaacuggaagggcagcaacagacccaucguggacaucaacaucaaggaccacagcaucgugagcagcuacgugugcagcggccuggugggcgacacccccagaaagaacgacagcagcagcagcagccacugccuggaccccaacaacgaggagggcggccacggcgugaagggcugggccuucgacgacggcaacgacguguggaugggcagaaccaucaacgagaccagcagacugggcuacgagaccuucaaggugaucgagggcuggagcaaccccaagagcaagcugcagaucaacagacaggugaucgugggcagaggcgacagaagcggcuacagcggcaucuucagcguggagggcaagagcugcaucaacagaugcuucuacguggagcugaucagaggcagaaaggaggagaccgaggugcuguggaccagcaacagcaucgugguguucugcggcaccagcggcaccuacggcaccggcagcuggcccgacggcgccgaccugaaccugaugcccaucuga

SEQ ID NO: 185551 - RNA, 1410 nt, Artificial Sequence
  derived and/or modified CDS sequence (opt4) from neuraminidase__InfluenzaA__AHZ42823
augaaccccaaccagaagaucaucaccaucggcagcgugugcaugaccaucggcauggccaaccugauccugcagaucggcaacaucaucagcaucuggaucagccacagcauccagcugggcaaccagagccagaucgagaccugcaaccagagcgugaucaccuacgagaacaacaccugggugaaccagaccuacgugaacaucagcaacaccaacuucgccgccgagcagagcguggugagcgugaagcuggccggcaacagcagccugugccccgugagcggcugggccaucuacagcaaggacaacagcgugagaaucggcagcaagggcgacguguucgugaucagagagcccuucaucagcugcagcccccuggagugcagaaccuucuuccugacccagggcgcccugcugaacgacaagcacagcaacggcaccaucaaggacagaagccccuacagaacccugaugagcugccccaucggcgaggugcccagccccuacaacagcagauucgagagcguggccuggagcgccagcgccugccacgacggcaucaacuggcugaccaucggcaucagcggccccgacagcggcgccguggccgugcugaaguacaacggcaucaucaccgacaccaucaagagcuggagaaacaacauccugagaacccaggagagcgagugcgccugcgugaacggcagcugcuucaccaucaugaccgacggccccagcgacggccaggccagcuacaagaucuucagaaucgagaagggcaagaucgugaagagcguggagaugaacgcccccaacuaccacuacgaggagugcagcugcuaccccgacagcagcgagaucaccugcgugugcagagacaacuggcacggcagcaacagacccugggugagcuucaaccagaaccuggaguaccagaucggcuacaucugcagcggcaucuucggcgacaaccccagacccaacgacaagaccggcagcugcggccccgugagcagcaacggcgccaacggcgugaagggcuucagcuucaaguacggcaacggcguguggaucggcagaaccaagagcaucagcagcagaaagggcuucgagaugaucugggaccccaacggcuggaccggcaccgacaacaacuucagcaucaagcaggacaucgugggcaucaacgaguggagcggcuacagcggcagcuucgugcagcaccccgagcugaccggccuggacugcaucagacccugcuucuggguggagcugaucagaggcagacccaaggagaacaccaucuggaccagcggcagcagcaucagcuucugcggcgugaacagcgacaccgugggcuggagcuggcccgacggcgccgagcugcccuucaccaucgacaaguga

SEQ ID NO: 185552 - RNA, 1410 nt, Artificial Sequence
  derived and/or modified CDS sequence (opt4) from neuraminidase__InfluenzaA__AHZ42834
augaaccccaaccagaagaucaucaccaucggcagcgugagccugaccaucagcaccaucugcuucuucaugcagaccgccauccugaucaccaccgugacccugcacuucaagcaguacgaguucaacagcccccccaacaaccaggugaugcugugcgagcccaccaucaucgagagaaacaucaccgagaucguguaccugaccaacaccaccaucgagaaggagaucugccccaagcccgccgaguacagaaacuggagcaagccccagugcggcaucaccggcuucgcccccuucagcaaggacaacagcaucagacugagcgccggcggcgacaucugggugaccagagagcccuacgugagcugcgaccccgacaagugcuaccaguucgcccugggccagggcaccacccugaacaacgugcacagcaacaacaccgugagagacagaacccccuacagaacccugcugaugaacgagcugggcgugcccuuccaccugggcaccaagcaggugugcaucgccuggagcagcagcagcugccacgacggcaaggccuggcugcacgugugcaucaccggcgacgacaagaacgccaccgccagcuucaucuacaacggcagacugguggacagcguggugagcuggagcaaggagauccugagaacccaggagagcgagugcgugugcaucaacggcaccugcaccguggugaugaccgacggcagcgccagcggcaaggccgacaccaagauccuguucaucgaggagggcaagaucgugcacaccagcacccugagcggcagcgcccagcacguggaggagugcagcugcuaccccagauaccccggcgugagaugcgugugcagagacaacuggaagggcagcaacagacccaucguggacaucaacaucaaggaccacagcaucgugagcagcuacgugugcagcggccuggugggcgacacccccagaaagaacgacagcagcagcagcagccacugccuggaccccaacaacgaggagggcggccacggcgugaagggcugggccuucgacgacggcaacgacguguggaugggcagaaccaucaacgagaccagcagacugggcuacgagaccuucaaggugaucgagggcuggagcaaccccaagagcaagcugcagaucaacagacaggugaucguggacagaggcgacagaagcggcuacagcggcaucuucagcguggagggcaagagcugcaucaacagaugcuucuacguggagcugaucagaggcagaaaggaggagaccgaggugcuguggaccagcaacagcaucgugguguucugcggcaccagcggcaccuacggcaccggcagcuggcccgacggcgccgaccugaaccugaugcccaucuga

SEQ ID NO: 185553 - RNA, 1410 nt, Artificial Sequence; identical to SEQ ID NO: 182206
  derived and/or modified CDS sequence (opt4) from neuraminidase__InfluenzaA__AHZ42846

SEQ ID NO: 185554 - RNA, 1410 nt, Artificial Sequence; identical to SEQ ID NO: 182206
  derived and/or modified CDS sequence (opt4) from neuraminidase__InfluenzaA__AHZ42858

SEQ ID NO: 185555 - RNA, 1410 nt, Artificial Sequence; identical to SEQ ID NO: 182206
  derived and/or modified CDS sequence (opt4) from neuraminidase__InfluenzaA__AHZ42870

SEQ ID NO: 185556 - RNA, 1410 nt, Artificial Sequence; identical to SEQ ID NO: 182206
  derived and/or modified CDS sequence (opt4) from neuraminidase__InfluenzaA__AHZ42882

SEQ ID NO: 185557 - RNA, 1410 nt, Artificial Sequence
  derived and/or modified CDS sequence (opt4) from neuraminidase__InfluenzaA__AHZ42894
augaaccccaaccagaagaucaucaccaucggcagcgugagccugaccaucagcaccaucugcuucuucaugcagaucgccauccugaucaccaccgugacccugcacuucaagcaguacgaguucaacagcccccccaacaaccaggugaugcugugcgagcccaccaucaucgagagaaacaucaccgagaucguguaccugaccaacaccaccaucgagaaggagaucugccccaagcccgccgaguacagaaacuggagcaagccccagugcggcaucaccggcuucgcccccuucagcaaggacaacagcaucagacugagcgccggcggcgacaucugggugaccagagagcccuacgugagcugcgaccccgacaagugcuaccaguucgcccugggccagggcaccacccugaacaacgugcacagcaacaacaccgugagagacagaacccccuacagaacccugcugaugaacgagcugggcgugcccuuccaccugggcaccaagcaggugugcaucgccuggagcagcagcagcugccacgacggcaaggccuggcugcacgugugcaucaccggcgacgacaagaacgccaccgccagcuucaucuacaacggcagacugguggacagcguggugagcuggagcaaggagauccugagaacccaggagagcgagugcgugugcaucaacggcaccugcaccguggugaugaccgacggcagcgccagcggcaaggccgacaccaagauccuguucaucgaggagggcaagaucgugcacaccagcacccugagcggcagcgcccagcacguggaggagugcagcugcuaccccagauaccccggcgugagaugcgugugcagagacaacuggaagggcagcaacagacccaucguggacaucaacaucaaggaccacagcaucgugagcagcuacgugugcagcggccuggugggcgacacccccagaaagaacgacagcagcagcagcagccacugccuggaccccaacaacgaggagggcggccacggcgugaagggcugggccuucgacgacggcaacgacguguggaugggcagaaccaucaacgagaccagcagacugggcuacgagaccuucaaggugaucgagggcuggagcaaccccaagagcaagcugcagaucaacagacaggugaucguggacaagggcgacagaagcggcuacagcggcaucuucagcguggagggcaagagcugcaucaacagaugcuucuacguggagcugaucagaggcagaaaggaggagaccgaggugcuguggaccagcaacagcaucgugguguucugcggcaccagcggcaccuacggcaccggcagcuggcccgacggcgccgaccugaaccugaugcccaucuga

SEQ ID NO: 185558 - RNA, 1410 nt, Artificial Sequence; identical to SEQ ID NO: 182206
  derived and/or modified CDS sequence (opt4) from neuraminidase__InfluenzaA__AHZ42906

SEQ ID NO: 185559 - RNA, 1410 nt, Artificial Sequence; identical to SEQ ID NO: 183435
  derived and/or modified CDS sequence (opt4) from neuraminidase__InfluenzaA__AHZ42918

SEQ ID NO: 185560 - RNA, 1398 nt, Artificial Sequence; identical to SEQ ID NO: 183514
  derived and/or modified CDS sequence (opt4) from neuraminidase__InfluenzaA__AHZ59750

SEQ ID NO: 185561 - RNA, 1398 nt, Artificial Sequence; identical to SEQ ID NO: 183514
  derived and/or modified CDS sequence (opt4) from neuraminidase__InfluenzaA__AHZ59762

SEQ ID NO: 185562 - RNA, 1398 nt, Artificial Sequence; identical to SEQ ID NO: 183514
  derived and/or modified CDS sequence (opt4) from neuraminidase__InfluenzaA__AHZ59774

SEQ ID NO: 185563 - RNA, 1398 nt, Artificial Sequence; identical to SEQ ID NO: 183514
  derived and/or modified CDS sequence (opt4) from neuraminidase__InfluenzaA__AHZ59786

SEQ ID NO: 185564 - RNA, 1398 nt, Artificial Sequence; identical to SEQ ID NO: 183514
  derived and/or modified CDS sequence (opt4) from neuraminidase__InfluenzaA__AHZ59798

SEQ ID NO: 185565 - RNA, 1398 nt, Artificial Sequence; identical to SEQ ID NO: 183514
  derived and/or modified CDS sequence (opt4) from neuraminidase__InfluenzaA__AHZ59810

SEQ ID NO: 185566 - RNA, 1398 nt, Artificial Sequence; identical to SEQ ID NO: 183514
  derived and/or modified CDS sequence (opt4) from neuraminidase__InfluenzaA__AHZ59822

SEQ ID NO: 185567 - RNA, 1398 nt, Artificial Sequence; identical to SEQ ID NO: 183514
  derived and/or modified CDS sequence (opt4) from neuraminidase__InfluenzaA__AHZ59834

SEQ ID NO: 185568 - RNA, 1398 nt, Artificial Sequence; identical to SEQ ID NO: 183514
  derived and/or modified CDS sequence (opt4) from neuraminidase__InfluenzaA__AHZ59846

SEQ ID NO: 185569 - RNA, 1398 nt, Artificial Sequence; identical to SEQ ID NO: 183514
  derived and/or modified CDS sequence (opt4) from neuraminidase__InfluenzaA__AHZ59858

SEQ ID NO: 185570 - RNA, 1398 nt, Artificial Sequence; identical to SEQ ID NO: 183514
  derived and/or modified CDS sequence (opt4) from neuraminidase__InfluenzaA__AHZ59870

SEQ ID NO: 185571 - RNA, 1398 nt, Artificial Sequence; identical to SEQ ID NO: 183514
  derived and/or modified CDS sequence (opt4) from neuraminidase__InfluenzaA__AHZ59882

SEQ ID NO: 185572 - RNA, 1398 nt, Artificial Sequence; identical to SEQ ID NO: 183514
  derived and/or modified CDS sequence (opt4) from neuraminidase__InfluenzaA__AHZ59918

SEQ ID NO: 185573 - RNA, 1398 nt, Artificial Sequence; identical to SEQ ID NO: 183514
  derived and/or modified CDS sequence (opt4) from neuraminidase__InfluenzaA__AHZ59930

SEQ ID NO: 185574 - RNA, 1398 nt, Artificial Sequence; identical to SEQ ID NO: 183514
  derived and/or modified CDS sequence (opt4) from neuraminidase__InfluenzaA__AHZ59942

SEQ ID NO: 185575 - RNA, 1398 nt, Artificial Sequence; identical to SEQ ID NO: 183514
  derived and/or modified CDS sequence (opt4) from neuraminidase__InfluenzaA__AHZ59954

SEQ ID NO: 185576 - RNA, 1398 nt, Artificial Sequence; identical to SEQ ID NO: 183514
  derived and/or modified CDS sequence (opt4) from neuraminidase__InfluenzaA__AHZ59966

SEQ ID NO: 185577 - RNA, 1398 nt, Artificial Sequence; identical to SEQ ID NO: 183514
  derived and/or modified CDS sequence (opt4) from neuraminidase__InfluenzaA__AHZ59991

SEQ ID NO: 185578 - RNA, 1398 nt, Artificial Sequence; identical to SEQ ID NO: 183514
  derived and/or modified CDS sequence (opt4) from neuraminidase__InfluenzaA__AHZ60003

SEQ ID NO: 185579 - RNA, 1398 nt, Artificial Sequence; identical to SEQ ID NO: 183514
  derived and/or modified CDS sequence (opt4) from neuraminidase__InfluenzaA__AHZ60015

SEQ ID NO: 185580 - RNA, 1398 nt, Artificial Sequence; identical to SEQ ID NO: 183514
  derived and/or modified CDS sequence (opt4) from neuraminidase__InfluenzaA__AHZ60027

SEQ ID NO: 185581 - RNA, 1398 nt, Artificial Sequence; identical to SEQ ID NO: 183514
  derived and/or modified CDS sequence (opt4) from neuraminidase__InfluenzaA__AHZ60039

SEQ ID NO: 185582 - RNA, 1398 nt, Artificial Sequence; identical to SEQ ID NO: 183514
  derived and/or modified CDS sequence (opt4) from neuraminidase__InfluenzaA__AHZ60051

SEQ ID NO: 185583 - RNA, 1398 nt, Artificial Sequence; identical to SEQ ID NO: 183514
  derived and/or modified CDS sequence (opt4) from neuraminidase__InfluenzaA__AHZ60063

SEQ ID NO: 185584 - RNA, 1398 nt, Artificial Sequence; identical to SEQ ID NO: 183514
  derived and/or modified CDS sequence (opt4) from neuraminidase__InfluenzaA__AHZ60075

SEQ ID NO: 185585 - RNA, 1398 nt, Artificial Sequence; identical to SEQ ID NO: 183514
  derived and/or modified CDS sequence (opt4) from neuraminidase__InfluenzaA__AHZ60087

SEQ ID NO: 185586 - RNA, 1398 nt, Artificial Sequence; identical to SEQ ID NO: 183514
  derived and/or modified CDS sequence (opt4) from neuraminidase__InfluenzaA__AHZ60099

SEQ ID NO: 185587 - RNA, 1410 nt, Artificial Sequence; identical to SEQ ID NO: 182206
  derived and/or modified CDS sequence (opt4) from neuraminidase__InfluenzaA__AHZ60111

SEQ ID NO: 185588 - RNA, 1410 nt, Artificial Sequence; identical to SEQ ID NO: 176462
  derived and/or modified CDS sequence (opt4) from neuraminidase__InfluenzaA__AIA26299

SEQ ID NO: 185589 - RNA, 1374 nt, Artificial Sequence
  derived and/or modified CDS sequence (opt4) from neuraminidase__InfluenzaA__AIC64891
augaaccccaaccagaagaucaucaccaucggcagcgugugcaugaccaucggcauggccaaccugauccugcagaucggcaacaucaucagcaucuggaucagccacagcauccagcugggcaaccagaaccagaucgagaccugcaaccagagcgugaucaccuacgagaacaacaccaacuucgccgccggccagagcguggugagcgugaagcuggccggcaacagcagccugugccccgugagcggcugggccaucuacagcaaggacaacagcgugagaaucggcagcaagggcgacguguucgugaucagagagcccuucaucagcugcagcccccuggagugcagaaccuucuuccugacccagggcgcccugcugaacgacaagcacagcaacggcaccaucaaggacagaagccccuacagaacccugaugagcugccccaucggcgaggugcccagccccuacaacagcagauucgagagcguggccuggagcgccagcgccugccacgacggcaucaacuggcugaccaucggcaucagcggccccgacaacggcgccguggccgugcugaaguacaacggcaucaucaccgacaccaucaagagcuggagaaacaacauccugagaacccaggagagcgagugcgccugcgugaacggcagcugcuucaccgugaugaccgacggccccagcaacggccaggccagcuacaagaucuucagaaucgagaagggcaagaucgugaagagcguggagaugaacgcccccaacuaccacuacgaggagugcagcugcuaccccgacagcagcgagaucaccugcgugugcagagacaacuggcacggcagcaacagacccugggugagcuucaaccagaaccuggaguaccagaucggcuacaucugcagcggcaucuucggcgacaaccccagacccaacgacaagaccggcagcugcggccccgugagcagcaacggcgccaacggcgugaagggcuucagcuucaaguacggcaacggcguguggaucggcagaaccaagagcaucagcagcagaaacggcuucgagaugaucugggaccccaacggcuggaccggcaccgacaacaacuucagcaucaagcaggacaucgugggcaucaacgaguggagcggcuacagcggcagcuucgugcagcaccccgagcugaccggccuggacugcaucagacccugcuucuggguggagcugaucagaggcagacccaaggagaacaccaucuggaccagcggcagcagcaucagcuucugcggcgugaacagcgacaccgugggcuggagcuggcccgacggcgccgagcugcccuucaccaucgacaaguga

SEQ ID NO: 185590 - RNA, 1350 nt, Artificial Sequence
  derived and/or modified CDS sequence (opt4) from neuraminidase__InfluenzaA__AID48084
augaaccccaacaagaagaucaucaccaucggcagcaucugcauggugaccggcauggugagccugaugcugcagaucggcaaccugaucagcaucugggugagccacagcauccacaccggcaaccagcacaaggccgagcccaucagcaacaccaaccugcugaccgagaagaccguggccagcgugaagcuggccggcaacagcagccugugccccaucaacggcugggccguguacagcaaggacaacagcaucagaaucggcagcaagggcgacguguucgugaucagagagcccuucaucagcugcagccaccuggagugcagaaccuucuuccugacccagggcgcccugcugaacgacaagcacagcaacggcaccgugaaggacagaagcccccacagaacccugaugagcugccccgugggcgaggcccccagccccuacaacagcagauucgagagcguggccuggagcgccagcgccugccacgacggcaccagcuggcugaccaucggcaucagcggccccgacaacggcgccguggccgugcugaaguacaacggcaucaucaccgacaccaucaagagcuggagaaacaacauccugagaacccaggagagcgagugcgccugcgugaacggcagcugcuucaccgugaugaccgacggccccagcaacggccaggccagccacaagaucuucaagauggagaagggcaagguggugaagagcguggagcuggacgcccccaacuaccacuacgaggagugcagcugcuaccccgacgccggcgagaucaccugcgugugcagagacaacuggcacggcagcaacagacccugggugagcuucaaccagaaccuggaguaccagaucggcuacaucugcagcggcguguucggcgacaaccccagacccaacgacggcgccggcagcugcggccccgugagcagcaacggcgccuacggcgugaagggcuucagcuucaaguacggcaacggcguguggaucggcagaaccaagagcaccaacagcagaagcggcuucgagaugaucugggaccccaacggcuggaccgagaccgacagcagcuucagcgugaagcaggacaucguggccaucaccgacuggagcggcuacagcggcagcuucgugcagcaccccgagcugaccggccuggacugcaucagacccugcuucuggguggagcugaucagaggcagacccaaggagagcaccaucuggaccagcggcagcagcaucagcuucugcggcgugaacagcgacaccgugggcuggagcuggcccgacggcgccgagcugcccuucaccaucgacaaguga

SEQ ID NO: 185591 - RNA, 1410 nt, Artificial Sequence
  derived and/or modified CDS sequence (opt4) from neuraminidase__InfluenzaA__AID70507
augaaccccaaccagaagaucaucaccaucggcagcgugugcaccaccaucggcauggccaaccugauccugcagaucggcaacaucaucagcaucuggaucagccacagcauccagcugggcaaccagaaccagaucgagaccugcaaccagagcgugaucaccuacgagaacaagaccugggugaaccagaccuacgugaacaucagcaacaccaacuucgccgccggccagagcguggugagcgugaagcuggccggcaacagcagccugugccccgugagcggcugggccaucuacagcaaggacaacagcaucagaaucggcagcaagggcgacguguucgugaucagagagcccuucaucagcugcagcccccuggagugcagaaccuucuuccugacccagggcgcccugcugaacgacaagcacagcaacggcaccaucaaggacagaagccccuacagaacccugaugagcugccccaucggcgaggugcccagccccuacaacagcagauucgagagcguggccuggagcgccagcgccugccacgacggcaucaacuggcugaccaucggcaucagcggccccgacaacggcgccguggccgugcugaaguacaacggcaucaucaccgacaccaucaagagcuggagaaacaacauccugagaacccaggagagcgagugcgccugcgugaacggcagcugcuucaccgugaugaccgacggccccagcgacggccaggccagcuacaagaucuucagaaucgagaagggcaagaucgugaagagcguggagaugaacgcccccaacuaccacuacgaggagugcagcugcuaccccgacagcagcgagaucaccugcgugugcagagacaacuggcacggcagcaacagacccugggugagcuucaaccagaaccuggaguaccagaucggcuacaucugcagcggcaucuucggcgacaaccccagacccaacgacaagaccggcagcugcgaccccgugagcuucaacggcgccaacggcgugaagggcuucagcuucaaguacggcaacggcguguggaucggcagaaccaagagcaucagcagcagaaacggcuucgagaugaucugggaccccaacggcuggaccggcaccgacaacaaguucagcaucaagcaggacaucgugggcaucaacgaguggagcggcuacagcggcagcuucgugcagcaccccgagcugaccggccuggacugcaucagacccugcuucuggguggagcugaucagaggcagacccaaggagaacaccaucuggaccagcggcagcagcaucagcuucugcggcgugaacagcgacaccgugggcugguucuggcccgacggcgccgagcugcccuucaccaucgacaaguga

SEQ ID NO: 185592 - RNA, 1410 nt, Artificial Sequence
  derived and/or modified CDS sequence (opt4) from neuraminidase__InfluenzaA__AID70508
augaaccccaaccagaagaucaucaccaucggcagcgugugcaugaccaucggcauggccaaccugauccugcagaucggcaacaucaucagcaucuggaucagccacagcauccagcugggcaaccagagccagaucgagaccugcaaccagagcgugaucaccuacgagaacaacaccugggugaaccagaccuacgugaacaucagcaacaccaacuucgccgccggccagagcguggugagcgugaagcuggccggcaacagcagccugugccccgugagcggcugggccaucuacagcaaggacaacagcaucagaaucggcagcaagggcgacguguucgugaucagagagcccuucaucagcugcagcccccuggagugcagaaccuucuuccugacccagggcgcccugcugaacgacaagcacagcaacggcaccaucaaggacagaagccccuacagaacccugaugagcugccccaucggcgaggugcccagccccuacaacagcagauucgagagcguggccuggagcgccagcgccugccacgacggcaucaacuggcugaccaucggcaucagcggccccaacaacggcgccguggccgugcugaaguacaacggcaucaucaccgacaccaucaagagcuggagaaacaacauccugagaacccaggagagcgagugcgccugcgugaacggcagcugcuucaccaucaugaccgacggccccagcgacggccaggccagcuacaagaucuucagaaucgagaagggcaagaucgugaagagcguggagaugaacgcccccaacuaccacuacgaggagugcagcugcuaccccgacagcagcgagaucaccugcgugugcagagacaacuggcacggcagcaacagacccugggugagcuucaaccagaaccuggaguaccagaucggcuacaucugcagcggcaucuucggcgacaaccccagacccaacgacaagaccggcagcugcggccccgugagcagcaacggcgccaacggcgugaagggcuucagcuucaaguacggcaacggcguguggaucggcagaaccaagagcaucagcagcagaaagggcuucgagaugaucugggaccccaacggcuggaccggcaccgacaacaacuucagcaucaagcaggacaucgugggcaucaacgaguggagcggcuacagcggcagcuucgugcagcaccccgagcugaccggccuggacugcaucagacccugcuucuggguggagcugaucagaggcagacccaaggagaacaccaucuggaccagcggcagcagcaucagcuucugcggcgugaacagcgacaccgugggcuggagcuggcccgacggcgccgagcugcccuucaccaucgacaaguga

SEQ ID NO: 185593 - RNA, 1410 nt, Artificial Sequence
  derived and/or modified CDS sequence (opt4) from neuraminidase__InfluenzaA__AID70509
augaaccccaaccagaagaucaucaccaucggcagcgugugcaugaccaucggcauggccaaccugauccugcagaucggcaacaucaucagcaucuggaucagccacagcauccagcugggcaaccagagccagaucgagaccugcaaccagagcgugaucaccuacgagaacaacaccugggugaaccagaccuacgugaacaucagcaacaccaacuucgccgccggccagagcguggugagcgugaagcuggccggcaacagcagccugugccccgugagcggcugggccaucuacagcaaggacaacagcaucagaaucggcagcaagggcgacguguucgugaucagagagcccuucaucagcugcagcccccuggagugcagaaccuucuuccugacccagggcgcccugcugaacgacaagcacagcaacggcaccaucaaggacagaagccccuacagaacccugaugagcugccccaucggcgaggugcccagccccuacaacagcagauucgagagcguggccuggagcgccagcgccugccacgacggcaucaacuggcugaccaucggcaucagcggccccgacaacggcgccguggccgugcugaaguacaacggcaucaucaccgacaccaucaagagcuggagaaacaacauccugagaacccaggagagcgagugcgccugcgugaacggcagcugcuucaccaucaugaccgacggccccagcgacggccaggccagcuacaagaucuucagaaucgagaagggcaagaucgugaagagcguggagaugaacgcccccaacuaccacuacgaggagugcagcugcuaccccgacagcagcgagaucaccugcgugugcagagacaacuggcacggcagcaacagacccugggugagcuucaaccagaaccuggaguaccagaucggcuacaucugcagcggcaucuucggcgacaaccccagacccaacgacaagaccggcagcugcggccccgugagcagcaacggcgccaacggcgugaagggcuucagcuucaaguacggcaacggcguguggaucggcagaaccaagagcaucaacagcagaaagggcuucgagaugaucugggaccccaacggcuggaccggcaccgacaacaacuucagcaucaagcaggacaucgugggcaucaacgaguggagcggcuacagcggcagcuucgugcagcaccccgagcugaccggccuggacugcaucagacccugcuucuggguggagcugaucagaggcagacccaaggagaacaccaucuggaccagcggcagcagcaucagcuucugcggcgugaacagcgacaccgugggcuggagcuggcccgacggcgccgagcugcccuucaccaucgacaaguga

SEQ ID NO: 185594 - RNA, 1410 nt, Artificial Sequence
  derived and/or modified CDS sequence (opt4) from neuraminidase__InfluenzaA__AID70510
augaaccccaaccagaagaucaucaccaucggcagcgugugcaucaccaucggcauggccaaccugauccugcagaucggcaacaucaucagcaucuggaucagccacagcauccagcugggcaaccagagccagaucgagaccugcaaccagagcgugaucaccuacgagaacaacaccugggugaaccagaccuacgugaacaucagcaacaccaacuucgccgccggccagagcguggugagcgugaagcuggccggcaacagcagccugugccccgugagcggcugggccaucuacagcaaggacaacagcaucagaaucggcagcaagggcgacguguucgugaucagagagcccuucaucagcugcagcccccuggagugcagaaccuucuuccugacccagggcgcccugcugaacgacaagcacagcaacggcaccaucaaggacagaagccccuacagaacccugaugagcugccccaucggcgaggugcccagccccuacaacagcagauucgagagcguggccuggagcgccagcgccugccacgacggcaucaacuggcugaccaucggcaucagcggccccgacaacggcgccguggccgugcugaaguacaacggcaucaucaccgacaccaucaagagcuggagaaacaacauccugagaacccaggagagcgagugcgccugcgugaacggcagcugcuucaccaucaugaccgacggccccagcgacggccaggccagcuacaagaucuucagaaucgagaagggcaagaucgugaagagcguggagaugaacgcccccaacuaccacuacgaggagugcagcugcuaccccgacagcagcgagaucaccugcgugugcagagacaacuggcacggcagcaacagacccugggugagcuucaaccagaaccuggaguaccagaucggcuacaucugcagcggcaucuucggcgacaaccccagacccaacgacaagaccggcagcugcggccccgugagcagcaacggcgccaacggcgugaagggcuucagcuucaaguacggcaacggcguguggaucggcagaaccaagagcaucagcagcagaaagggcuucgagaugaucugggaccccaacggcuggaccggcaccgacaacaacuucagcaucaagcaggacaucgugggcaucaacgaguggagcggcuacagcggcagcuucgugcagcaccccgagcugaccggccuggacugcaucagacccugcuucuggguggagcugaucagaggcagacccaaggagaacaccaucuggaccagcggcagcagcaucagcuucugcggcgugaacagcgacaccgugggcuggagcuggcccgacggcgccgagcugcccuucaccaucgacaaguga

SEQ ID NO: 185595 - RNA, 1410 nt, Artificial Sequence
  derived and/or modified CDS sequence (opt4) from neuraminidase__InfluenzaA__AID70511
augaaccccaaccagaagaucaucaccaugggcagcguguggaugaccaucggcauggccaaccugauccugcagagcggcaacaucaucagcaucuggaucagccacagcauccagcugagaaaccagagccagaucgagaccugcaaccagagcgugaucaccuacgagaacaacaccugggugaaccagaccuacgugaacaucagcaacaccaacuucgccgccggccagagcguggugagcgugaagcuggccggcaacagcagccugugccccgugagcggcugggccaucuacagcaaggacaacagcaucagaaucggcagcaagggcgacguguucgugaucagagagcccuucaucagcugcagcccccuggagugcagaaccuucuuccugacccagggcgcccugcugaacgacaagcacagcaacggcaccaucaaggacagaagccccuacagaacccugaugagcugccccaucggcgaggugcccagccccuacaacagcagauucgagagcguggccuggagcgccagcgccugccacgacggcaucaacuggcugaccaucggcaucagcggccccgacaacggcgccguggccgugcugaaguacaacggcaucaucaccgacaccaucaagagcuggagaaacaacauccugagaacccaggagagcgagugcgccugcgugaacggcagcugcuucaccaucaugaccgacggccccagcgacggccaggccagcuacaagaucuucagaaucgagaagggcaagaucgugaagagcguggagaugaacgcccccaacuaccacuacgaggagugcagcugcuaccccgacagcagcgagaucaccugcgugugcagagacaacuggcacggcagcaacagacccugggugagcuucaaccagaaccuggaguaccagaucggcuacaucugcagcggcaucuucggcgacaaccccagacccaacgacaagaccggcagcugcggccccgugagcagcaacggcgccaacggcgugaagggcuucagcuucaaguacggcaacggcguguggaucggcagaaccaagagcaucagcagcagaaagggcuucgagaugaucugggaccccaacggcuggaccggcaccgacaacaacuucagcaucaagcaggacaucgugggcaucaacgaguggagcggcuacagcggcagcuucgugcagcaccccgagcugaccggccuggacugcaucagacccugcuucuggguggagcugaucagaggcagacccaaggagaacaccaucuggaccagcggcagcagcaucagcuucugcggcgugaacagcgacaccgugggcuggagcuggcccgacggcgccgagcugcccuucaccaucgacaaguga

SEQ ID NO: 185596 - RNA, 1410 nt, Artificial Sequence
  derived and/or modified CDS sequence (opt4) from neuraminidase__InfluenzaA__AID70512
augaaccccaaccagaagaucaucaccaucggcagcguguggaugaccaucggcauggccaaccugauccugcagaucggcaacaucaucagcaucuggaucagccacagcauccagcugggcaaccagagccagaucgagaccugcaaccagagcgugaucaccuacgagaacaacaccugggugaaccagaccuacgugaacaucagcaacaccaacuucgccgccggccagagcguggugagcgugaagcuggccggcaacagcagccugugccccgugagcggcugggccaucuacagcaaggacaacagcaucagaaucggcagcaagggcgacguguucgugaucagagagcccuucaucagcugcagcccccuggagugcagaaccuucuuccugacccagggcgcccugcugaacgacaagcacagcaacggcaccaucaaggacagaagccccuacagaacccugaugagcugccccaucggcgaggugcccagccccuacaacagcagauucgagagcguggccuggagcgccagcgccugccacgacggcaucaacuggcugaccaucggcaucagcggccccgacaacggcgccguggccgugcugaaguacaacggcaucaucaccgacaccaucaagagcuggagaaacaacauccugagaacccaggagagcgagugcgccugcgugaacggcagcugcuucaccaucaugaccgacggccccagcgacggccaggccagcuacaagaucuucagaaucgagaagggcaagaucgugaagagcguggagaugaaggcccccaacuaccacuacgaggagugcagcugcuaccccgacagcagcgagaucaccugcgugugcagagacaacuggcacggcagcaacagacccugggugagcuucaaccagaaccuggaguaccagaucggcuacaucugcagcggcaucuucggcgacaaccccagacccaacgacaagaccggcagcugcggccccgugagcagcaacggcgccaacggcgugaagggcuucagcuucaaguacggcaacggcguguggaucggcagaaccaagagcaucagcagcagaaagggcuucgagaugaucugggaccccaacggcuggaccggcaccgacaacaacuucagcaucaagcaggacaucaucggcaucaacgaguggagcggcuacagcggcagcuucgugcagcaccccgagcugaccggccuggacugcaucagacccugcuucuggguggagcugaucagaggcagacccaaggagaacaccaucuggaccagcggcagcagcaucagcuucugcggcgugaacagcgacaccgugggcuggagcuggcccgacggcgccgagcugcccuucaccaucgacaaguga

SEQ ID NO: 185597 - RNA, 1410 nt, Artificial Sequence; identical to SEQ ID NO: 180317
  derived and/or modified CDS sequence (opt4) from neuraminidase__InfluenzaA__AID70514

SEQ ID NO: 185598 - RNA, 1410 nt, Artificial Sequence
  derived and/or modified CDS sequence (opt4) from neuraminidase__InfluenzaA__AID70515
augaaccccaaccagaagaucaucaccaucggcagcgugugcaugaccaucggcauggccaaccugauccugcagaucggcaacaucaucagcaucuggaucagccacagcauccagcugagaaaccagagccagaucgagaccugcaaccagagcgugaucaccuacgagaacaacaccugggugaaccagaccuacgugaacaucagcaacaccaacuucgccgccggccagagcguggugagcgugaagcuggccggcaacagcagccugugccccgugagcggcugggccaucuacagcaaggacaacagcaucagaaucggcagcaagggcgacguguucgugaucagagagcccuucaucagcugcagcccccuggagugcagaaccuucuuccugacccagggcgcccugcugaacgacaagcacagcaacggcaccaucaaggacagaagccccuacagaacccugaugagcugccccaucggcgaggugcccagccccuacaacagcagauucgagagcguggccuggagcgccagcgccugccacgacggcaucaacuggcugaccaucggcaucagcggccccgacaacggcgccguggccgugcugaaguacaacggcaucaucaccgacaccaucaagagcuggagaaacaacauccugagaacccaggagagcgagugcgccugcgugaacggcagcugcuucaccaucaugaccgacggccccagcgacggccaggccagcuacaagaucuucagaaucgagaagggcaagaucgugaagagcguggagaugaacgcccccaacuaccacuacgaggagugcagcugcuaccccgacagcagcgagaucaccugcgugugcagagacaacuggcacggcagcaacagacccugggugagcuucaaccagaaccuggaguaccagaucggcuacaucugcagcggcaucuucggcgacaaccccagacccaacgacaagaccggcagcugcggccccgugagcagcaacggcgccaacggcgugaagggcuucagcuucaaguacagcaacggcguguggaucggcagaaccaagagcaucagcagcagaaagggcuucgagaugaucugggaccccaacggcuggaccggcaccgacaacaacuucagcaucaagcaggacaucgugggcaucaacgaguggagcggcuacagcggcagcuucgugcagcaccccgagcugaccggccuggacugcaucagacccugcuucuggguggagcugaucagaggcagacccaaggagaacaccaucuggaccagcggcagcagcaucagcuucugcggcgugaacagcgacaccgugggcuggagcuggcccgacggcgccgagcugcccuucaccaucgacaaguga

SEQ ID NO: 185599 - RNA, 1410 nt, Artificial Sequence; identical to SEQ ID NO: 183218
  derived and/or modified CDS sequence (opt4) from neuraminidase__InfluenzaA__AID70516

SEQ ID NO: 185600 - RNA, 1410 nt, Artificial Sequence
  derived and/or modified CDS sequence (opt4) from neuraminidase__InfluenzaA__AID70517
augaaccccaaccagaagaucaucaccaucggcagcgugugcaugaccaucggcauggccaaccugacccugcagaucggcaacaucaucagcaucuggaucagccacagcauccagcugggcaaccagaaccagaucgagaccugcaaccagagcgugaucaccuacgagaacaacaccugggugaaccagaccuacgugaacaucagcaacaccaacuucgccgccggccagagcguggugagcgugaagcuggccggcaacagcagccugugccccgugagcggcugggccaucuacagcaaggacaacagcaucagaaucggcagcaagggcgacguguucgugaucagagagcccuucaucagcugcagcccccuggagugcagaaccuucuuccugacccagggcgcccugcugaacgacaagcacagcaacggcaccaucaaggacagaagccccuacagaacccugaugagcugccccaucggcgaggugcccagccccuacaacagcagauucgagagcguggccuggagcgccagcgccugccacgacggcaucaacuggcugaccaucggcaucagcggccccgacaacggcgccguggccgugcugaaguacaacggcaucaucaccgacaccaucaagagcuggagaaacaacauccugagaacccaggagagcgagugcgccugcgugaacggcagcugcuucaccaucaugaccgacggccccaacgacggccaggccagcuacaagaucuucagaaucgagaagggcaagaucgugaagagcguggagaugaacgcccccaacuaccacuacgaggagugcagcugcuaccccgacagcagcgagaucaccugcgugugcagagacaacuggcacggcagcaacagacccugggugagcuucaaccagaaccuggaguaccagaucggcuacaucugcagcggcaucuucggcgacaaccccagacccaacgacaagaccggcagcugcggccccgugagcagcaacggcgccaacggcgugaagggcuucagcuucaaguacggcaacggcguguggaucggcagaaccaagagcaucagcagcagaaagggcuucgagaugaucugggaccccaacggcuggaccggcaccgacaacaacuucagcaucaagcaggacaucgugggcaucaacgaguggagcggcuacagcggcagcuucgugcagcaccccgagcugaccggccuggacugcaucagacccugcuucuggguggagcugaucagaggcagacccaaggagaacaccaucuggaccagcggcagcagcaucagcuucugcggcgugaacagcgacaccgugggcuggagcuggcccgacggcgccgagcugcccuucaccaucgacaaguga

SEQ ID NO: 185601 - RNA, 1410 nt, Artificial Sequence
  derived and/or modified CDS sequence (opt4) from neuraminidase__InfluenzaA__AID70518
augaaccccaaccagaagaucaucaccaucggcagcgugugcaugaccaucggcauggccaaccugauccugcagaucggcaacaucaucagcaucuggaucagccacagcauccagcugagaaaccagagccagaucgagaccugcaaccagagcgugaucaccuacgagaacaacaccugggugaaccagaccuacgugaacaucagcaacaccaacuucgccgccggccagagcguggugagcgugaagcuggccggcaacagcagccugugccccgugagcggcugggccaucuacagcaaggacaacagcaucagaaucggcagcaagggcgacguguucgugaucagagagcccuucaucagcugcagcccccuggagugcagaaccuucuuccugacccagggcgcccugcugaacgacaagcacagcaacggcaccaucaaggacagaagccccuacagaacccugaugagcugccccaucggcgagauccccagccccuacaacagcagauucgagagcguggccuggagcgccagcgccugccacgacggcaucaacuggcugaccaucggcaucagcggccccgacaacggcgccguggccgugcugaaguacaacggcaucaucaccgacaccaucaagagcuggagaaacaacauccugagaacccaggagagcgagugcgccugcgugaacggcagcugcuucaccaucaugaccgacggccccagcgacggccaggccagcuacaagaucuucagaaucgagaagggcaagaucgugaagagcguggagaugaacgcccccaacuaccacuacgaggagugcagcugcuaccccgacagcagcgagaucaccugcgugugcagagacaacuggcacggcagcaacagacccugggugagcuucaaccagaaccuggaguaccagaucggcuacaucugcagcggcaucuucggcgacaaccccagacccaacgacaagaccggcagcugcggccccgugagcagcaacggcgccaacggcgugaagggcuucagcuucaaguacggcaacggcguguggaucggcagaaccaagagcaucagcagcagaaagggcuucgagaugaucugggaccccaacggcuggaccggcaccgacaacaacuucagcaucaagcaggacaucgugggcaucaacgaguggagcggcuacagcggcagcuucgugcagcaccccgagcugaccggccuggacugcaucagacccugcuucuggguggagcugaucagaggcagacccaaggagaacaccaucuggaccagcggcagcagcaucagcuucugcggcgugaacagcgacaccgugggcuggagcuggcccgacggcgccgagcugcccuucaccaucgacaaguga

SEQ ID NO: 185602 - RNA, 1410 nt, Artificial Sequence
  derived and/or modified CDS sequence (opt4) from neuraminidase__InfluenzaA__AID70519
augaaccccaaccagaagaucaucaccaucggcagcgugugcaugaccaucggcauggccaaccugauccugcagaucggcaacaucaucagcaucuggaucagccacagcauccagcugggcaaccagagccagaucgagaccugcaaccagagcgugaucaccuacgagaacaacaccugggugaaccagaccuacgugaacaucagcaacaccaacuucgccgccggccagagcguggugagcgugaagcuggccggcaacagcagccugugccccgugagcggcugggccaucuacagcaaggacaacagcaucagaaucggcagcaagggcgacguguucgugaucagagagcccuucaucagcugcagcccccuggagugcagaaccuucuuccugacccagggcgcccugcugaacgacaagcacagcaacggcaccaucaaggacagaagccccuacagaacccugaugagcugccccaucggcgaggugcccagccccuacaacagcagauucgagagcguggccuggagcgccagcgccugccacgacggcaucaacuggcugaccaucggcaucagcggccccgacaacggcgccguggccgugcugaaguacaacggcaucaucaccgacaccaucaagagcuggagaaacaacauccugagaacccaggagagcgagugcgccugcgugaacggcagcugcuucaccaucaugaccgacggccccagcgacggccaggccagcuacaagaucuucagaaucgagaagggcaagaucgugaagagcguggagaugaaggcccccaacuaccacuacgaggagugcagcugcuaccccgacagcagcgagaucaccugcgugugcagagacaacuggcacggcagcaacagacccugggugagcuucaaccagaaccuggaguaccagaucggcuacaucugcagcggcaucuucggcgacaaccccagacccaacgacaagaccggcagcugcggccccgugagcagcaacggcgccaacggcgugaagggcuucagcuucaaguacggcaacggcguguggaucggcagaaccaagagcaucagcagcagaaagggcuucgagaugaucugggaccccaacggcuggaccggcaccgacaacaacuucagcaucaagcaggacaucgugggcaucaacgaguggagcggcuacagcggcagcuucgugcagcaccccgagcugaccggccuggacugcaucagacccugcuucuggguggagcugaucagaggcagacccaaggagaacaccaucuggaccagcggcagcagcaucagcuucugcggcgugaacagcgacaccgugggcuggagcuggcccgacggcgccgagcugcccuucaccaucgacaaguga

SEQ ID NO: 185603 - RNA, 1410 nt, Artificial Sequence
  derived and/or modified CDS sequence (opt4) from neuraminidase__InfluenzaA__AID70520
augaaccccaaccagaagaucaucaccaucggcagcgugugcaugaccaucggcauggccaaccugauccugcagaucggcaacaucaucagcaucuggaucagccacagcauccagcugagaaaccagagccagaucgagaccugcaaccagagcgugaucaccuacgagaacaacaccugggugaaccagaccuacgugaacaucagcaacaccaacuucgccgccggccagagcguggugagcgugaagcuggccggcaacagcagccugugccccgugagcggcugggccaucuacagcaaggacaacagcaucagaaucggcagcaagggcgacguguucgugaucagagagcccuucaucagcugcagcccccuggagugcagaaccuucuuccugacccagggcgcccugcugaacgacaagcacagcaacggcaccaucaaggacagaagccccuacagaacccugaugagcugccccaucggcgaggugcccagccccuacaacagcagauucgagagcguggccuggagcgccagcgccugccacgacggcaucaacuggcugaccaucggcaucagcggccccgacaacggcgccguggccgugcugaaguacaacggcaucaucaccgacaccaucaagagcuggagaaacaacauccugagaacccaggagagcgagugcgccugcgugaacggcagcugcuucaccaucaugaccgacggccccagcgacggccaggccagcuacaagaucuucagaaucgagaagggcaagaucgugaagagcguggagaugaacgcccccaacuaccacuacgaggagugcagcugcuaccccgacagcagcgagaucaccugcgugugcagagacaacuggcacggcagcaacagacccugggugagcuucaaccagaaccuggaguaccagaucggcuacaucugcagcggcaucuucggcgacaaccccagacccaacgacaagaccggcagcugcggccccgugagcagcaacggcgccaacggcgugaagggcuucagcuucaaguacggcaacggcguguggaucggcagaaccaagagcaucagcagcagaaagggcuucgagaugaucugggaccccaacggcuggaccggcaccgacaacaacuucagcaucaagcaggacaucgugggcaucaacgaguggagcggcuacagcggcagcuucgugcagcaccccgagcugaccggccuggacugcaucagacccugcuucuggguggagcugaucagaggcagacccaaggagaacaccaucuggaccagcggcagcagcaucagcuucugcggcgugaacagcggcaccgugggcuggagcuggcccgacggcgccgagcugcccuucaccaucgacaaguga

SEQ ID NO: 185604 - RNA, 1410 nt, Artificial Sequence
  derived and/or modified CDS sequence (opt4) from neuraminidase__InfluenzaA__AID70521
augaaccccaaccagaagaucaucaccaucggcagcgugagccugaccaucagcagaaucugcuucuucaugcagaucgccauccugaucaacaccgugacccugcacuucaagcaguacgaguucaacagcccccccaacaaccaggugaugcugugcgagcccaccaucaucgagagaaacaucaccaagaucguguaccugaccaacaccaccaucgagaaggagaucugccccaagcuggccgaguacagaagcuggagcaagccccagugcgacaucaccggcuucgcccccuucagcaaggacaacagcaucagacugagcgccggcggcgacaucugggugaccagagagcccuacgugagcugcgaccccgacaagugcuuccaguucgcccugggccagggcaccacccugaacaacgugcacagcaacgacaccgugcacgacagaacccccuacagaacccugcugaugaacgagcugggcgugcccuuccaccugggcaccaagcaggugugcaucgccuggagcagcagcagcugccacgacggcaaggccuggcugcacgugugcaucaccggcgacgacaagaacgccaccgccagcaucaucuacaacggcagacugguggacagcaucgugagcuggagcaagaagauccugagaacccaggagagcgagugcgugugcaucaacggcaccugcaccguggugaugaccgacggcagcgccagcggcaaggccgacaccaagauccuguucaucgaggagggcaagaucgugcacaccagcacccugagcggcagcgcccagcacguggaggagugcagcugcuaccccagauaccccggcgugagaugcgugugcagagacaacuggaagggcagcaacagacccaucguggacaucaacaucaaggacuacagcaucgugagcagcuacgugugcagcggcuucgugggcgacacccccagaaagcccgacagaagcagcagcagccacugccuggaccccaacaacgaggagggcggccacggcgugaagggcugggccuucgacgacggcaacgacguguggaugggcagaaccaucagcgagaagagcagacugggcuacgagaccuucaaggugaucggcggcuggagcaaccccaacagcaagagccagaucaacagacaggugaucguggacagaggcaacagaagcggcuacagcggcaucuucagcguggagggcaagagcugcaucaacagaugcuucuacguggagcugaucagaggcagaaaggacgagaccgaggugcuguggaccagcaacagcaucgugguguucugcggcaccagcggcaccuacggcaccggcagcuggcccgacggcgccgacaucaaccugaugcccaucuga

SEQ ID NO: 185605 - RNA, 1410 nt, Artificial Sequence
  derived and/or modified CDS sequence (opt4) from neuraminidase__InfluenzaA__AID70522
augaaccccaaccagaagaucaucaccaucggcagcgugagccugaccaucagcaccaucugcuucuucaugcagaucgccauccugaucaccaccgugacccugcacuucagacaguacgaguucaacagcccccccaacaaccaggugaugcugugcgagcccaccaucaucgagagaaacaucaccgagaucguguaccugaccaacaccaccaucgagaaggagaucugccccaagcuggccgaguacagaaacuggagcaagccccagugcgacaucaccggcuucgcccccuucagcaaggacaacagcaucagacugagcgccggcggcgacaucugggugaccagagagcccuacgugagcugcgaccccgacaagugcuaccaguucgcccugggccagggcaccacccugaacaacgugcacagcaacaacaccgugagagacagaacccccuacagaacccugcugaugaacgagcugggcgugcccuuccaccugggcaccaagcaggugugcaucgccuggagcagcagcagcugccacgacggcaaggccuggcugcacgugugcaucaccggcgacgacaagaacgccaccgccagcuucaucuacaacggcagacugguggacagcguggugagcuggagcaaggagauccugagaacccaggagagcgagugcgugugcaucaacggcaccugcaccguggugaugaccgacggcagcgccagcggcaaggccgacaccaagauccuguucaucgaggagggcaagaucgugcacaccagcacccugagcggcagcgcccagcacguggaggagugcagcugcuaccccagauaccccggcgugagaugcgugugcagagacaacuggaagggcagcaacagacccaucguggacaucaacaucaaggaccacagcaucgugagcagcuacgugugcagcggccuggugggcgacacccccagaaagaacgacagcagcagcagcagccacugccuggaccccaacaacgaggagggcggccacggcgugaagggcugggccuucgacgacggcaacgacguguggaugggcagaaccaucaacgagaccagcagacugggcuacgagaccuucaaggugaucgagggcuggagcaaccccaagagcaagcugcagaucaacagacaggugaucguggacagaggcaacagaagcggcuacagcggcaucuucagcguggagggcaagagcugcaucaacagaugcuucuacguggagcugaucagaggcagaaaggaggagaccgaggugcuguggaccagcaacagcaucgugguguucugcggcaccagcggcaccuacggcaccggcagcuggcccgacggcgccgaccugaaccugaugcccaucuga

SEQ ID NO: 185606 - RNA, 1410 nt, Artificial Sequence
  derived and/or modified CDS sequence (opt4) from neuraminidase__InfluenzaA__AID70523
augaaccccaaccagaagaucaagaccaucggcagcgugagccugaccaacagcaccaucugcaucuucaugcagaucgccauccugaucaccaccgugacccugcacuucaagcaguacgaguucaacagcccccccaacaaccaggugaugcugugcgagcccaccaucaucgagagaaacaucaccgagaucguguaccugaccaacaccaccaucgagaaggagaucugccccaagcuggccgaguacagaaacuggagcaagccccagugcgacaucaccggcuucgcccccuucagcaaggacaacagcaucagacugagcgccggcggcgacaucugggugaccagagagcccuacgugagcugcgaccccgacaagugcuaccaguucgcccugggccagggcaccacccugaacaacgugcacagcaacaacaccgugagagacagaacccccuacagaacccugcugaugaacgagcugggcgugcccuuccaccugggcaccaagcaggugugcaucgccuggagcagcagcagcugccacgacggcaaggccuggcugcacgugugcaucaccggcgacgacaagaacgccaccgccagcuucaucuacaacggcagacugguggacagcguggugagcuggagcaaggagauccugagaacccaggagagcgagugcgugugcaucaacggcaccugcaccguggugaugaccgacggcagcgccagcggcaaggccgacaccaagauccuguucaucgaggagggcaagaucgugcacaccagcacccugagcggcagcgcccagcacguggaggagugcagcugcuaccccagauaccccggcgugagaugcgugugcagagacaacuggaagggcagcaacagacccaucguggacaucaacaucaaggaccacagcaucgugagcagcuacgugugcagcggccuggugggcgacacccccagaaagaacgacagcagcagcagcagccacugccuggaccccaacaacgaggagggcggccacggcgugaagggcugggccuucgacgacggcaacgacguguggaugggcagaaccaucaacgagaccagcagacugggcuacgagaccuucaaggugaucgagggcuggagcaaccccaagagcaagcugcagaucaacagacaguucaucguggacagaggcaacagaagcggcuacagcggcaucuucagcguggagggcaagagcugcaucaacagaugcuucuacguggagcugaucagaggcagaaaggaggagaccgaggugcuguggaccagcaacagcaucgugguguucugcggcaccagcggcaccuacggcaccggcagcuggcccgacggcgccgaccugaaccugaugcccaucuga

SEQ ID NO: 185607 - RNA, 1410 nt, Artificial Sequence
  derived and/or modified CDS sequence (opt4) from neuraminidase__InfluenzaA__AID70524
augaaccccaaccagaagaucaucaccaucggcgccguguggagaaccaucagcaccaucugcuucuucaugcagaucgccuuccugaucaccaccgugacccugcacuucaagcaguacgaguucaacagcccccccaacaaccaggugaugcccugcgagcccaccaucaucgagagaaacaucaccgagaucguguaccugaccaacaccaccaucgagaaggagaucugccccaagcuggccgaguacagaaacuggagcaagccccagugcgacaucaccggcuucgcccccuucagcaaggacaacagcaucagacugagcgccggcggcgacaucugggugaccagagagcccuacgugagcugcgaccccgacaagugcuaccaguucgcccugggccagggcaccacccugaacaacgugcacagcaacaacaccgugagagacagaacccccuacagaacccugcugaugaacgagcugggcgugcccuuccaccugggcaccaagcaggugugcaucgccuggagcagcagcagcugccacgacggcaaggccuggcugcacgugugcaucaccggcgacgacaagaacgccaccgccagcuucaucuacaacggcagacugguggacagcguggugagcuggagcaaggagauccugagaacccaggagagcgagugcgugugcaucaacggcaccugcaccguggugaugaccgacggcagcgccagcggcaaggccgacaccaagauccuguucaucgaggagggcaagaucgugcacaccagcacccugagcggcagcgcccagcacguggaggagugcagcugcuaccccagauaccccggcgugagaugcgugugcagagacaacuggaagggcagcaacagacccaucguggacaucaacaucaaggaccacagcaucgugagcagcuacgugugcagcggccuggugggcgacacccccagaaagaacgacagcagcagcagcagccacugccuggaccccaacaacgaggagggcggccacggcgugaagggcugggccuucgacgacggcaacgacguguggaugggcagaaccaucaacgagaccagcagacugggcuacgagaccuucaaggugaucgagggcuggagcaaccccaagagcaagcugcagaucaacagacaggugaucguggacagaggcaacagaagcggcuacagcggcaucuucagcguggagggcaagagcugcaucaacagaugcuucuacguggagcugaucagaggcagaaaggaggagaccgaggugcuguggaccagcaacagcaucgugguguucugcggcaccagcggcaccuacggcaccggcagcuggcccgacggcgccgaccugaaccugaugcccaucuga

SEQ ID NO: 185608 - RNA, 1410 nt, Artificial Sequence
  derived and/or modified CDS sequence (opt4) from neuraminidase__InfluenzaA__AID70525
augaaccccaaccagaagaucaucaccaucggcagcgugagccugaccaucuggaucaucugcuucuucaugcagaucgccauccugaucaccaccgugacccugcacuucaagcaguacgaguucaacagcccccccaacaaccaggugaugcugugcgagcccaccaucaucgagagaaacaucaccgagaucguguaccugaccaacaccaccaucgagaaggagaucugccccaagcuggccgaguacagaaacuggagcaagccccagugcgacaucaccggcuucgcccccuucagcaaggacaacagcaucagacugagcgccggcggcgacaucugggugaccagagagcccuacgugagcugcgaccccgacaagugcuaccaguucgcccugggccagggcaccacccugaacaacgugcacagcaacaacaccgugagagacagaacccccuacagaacccugcugaugaacgagcugggcgugcccuuccaccugggcaccaagcaggugugcaucgccuggagcagcagcagcugccacgacggcaaggccuggcugcacgugugcaucaccggcgacgacaagaacgccaccgccagcuucaucuacaacggcagacugguggacagcguggugagcuggagcaaggagauccugagaacccaggagagcgagugcgugugcaucaacggcaccugcaccguggugaugaccgacggcagcgccagcggcaaggccgacaccaagauccuguucaucgaggagggcaagaucgugcacaccagcacccugagcggcagcgcccagcacguggaggagugcagcugcuaccccagauaccccggcgugagaugcgugugcagagacaacuggaagggcagcaacagacccaucguggacaucaacaucaaggaccacagcaucgugagcagcuacgugugcagcggccuggugggcgacacccccagaaagaacgacagcagcagcagcagccacugccuggaccccaacaacgaggagggcggccacggcgugaagggcugggccuucgacgacggcaacgacguguggaugggcagaaccaucaacgagaccagcagacugggcuacgagaccuucaaggugaucgagggcuggagcaaccccaagagcaagcugcagaucaacagacaggugaucguggacagaggcaacagaagcggcuacagcggcaucuucagcguggagggcaagagcugcaucaacagaugcuucuacguggagcugaucagaggcagaaaggaggagaccgaggugcuguggaccagcaacagcaucgugguguucugcggcaccagcggcaccuacggcaccggcagcuggcccgacggcgccgaccugaacaucaugcccaucuga

SEQ ID NO: 185609 - RNA, 1410 nt, Artificial Sequence; identical to SEQ ID NO: 179578
  derived and/or modified CDS sequence (opt4) from neuraminidase__InfluenzaA__AID70526

SEQ ID NO: 185610 - RNA, 1410 nt, Artificial Sequence
  derived and/or modified CDS sequence (opt4) from neuraminidase__InfluenzaA__AID70527
augaaccccaaccagaagaucaucaccaucggcagcgugagccugaccauguggaucaucugcuucuucaugcagaucgccauccugaucaccaccgugacccugcacuucaagcaguacgaguucaacagcccccccaacaaccaggugaugcugugcgagcccaccaucaucgagagaaacaucaccgagaucguguaccugaccaacaccaccaucgagaaggagaucugccccaagcuggccgaguacagaaacuggagcaagccccagugcgacaucaccggcuucgcccccuucagcaaggacaacagcaucagacugagcgccggcggcgacaucugggugaccagagagcccuacgugagcugcgaccccgacaagugcuaccaguucgcccugggccagggcaccacccugaacaacgugcacagcaacaacaccgugagagacagaacccccuacagaacccugcugaugaacgagcugggcgugcccuuccaccugggcaccaagcaggugugcaucgccuggagcagcagcagcugccacgacggcaaggccuggcugcacgugugcaucaccggcgacgacaagaacgccaccgccagcuucaucuacaacggcagacugguggacagcguggugagcuggagcaaggagauccugagaacccaggagagcgagugcgugugcaucaacggcaccugcaccguggugaugaccgacggcagcgccagcggcaaggccgacaccaagauccuguucaucgaggagggcaagaucgugcacaccagcacccugagcggcagcgcccagcacguggaggagugcagcugcuaccccagauaccccggcgugagaugcgugugcagagacaacuggaagggcagcaacagacccaucguggacaucaacaucaaggaccacagcaucgugagcagcuacgugugcagcggccuggugggcgacacccccagaaagaacgacagcagcagcagcagccacugccuggaccccaacaacgaggagggcggccacggcgugaagggcugggccuucgacgacggcaacgacguguggaugggcagaaccaucaacgagaccagcagacugggcuacgagaccuucaaggugaucgagggcuggagcaaccccaagagcaagcugcagaucaacagacaggugaucguggacagaggcaacagaagcggcuacagcggcaucuucagcguggagggcaagagcugcaucaacagaugcuucuacguggagcugaucagaggcagaaaggaggagaccgaggugcuguggaccagcaacagcaucgugguguucugcggcaccagcggcaccuacggcaccggcagcuggcccgacggcgccgaccugaaccugaugcccaucuga

SEQ ID NO: 185611 - RNA, 1410 nt, Artificial Sequence
  derived and/or modified CDS sequence (opt4) from neuraminidase__InfluenzaA__AID70528
augaaccccaaccagaagaucaucaccaucggcagcgugagccugagcaucagcaccaucugcuucuucaugcagaucgccauccugaucaccaccgugacccugcacuucaagcaguacgaguucaacagcccccccaacaaccaggugaugcugugcgagcccaccaucaucgagagaaacaucaccgagaucguguaccugaccaacaccaccaucgagaaggagaucugccccaagcuggccgaguacagaaacuggagcaagccccagugcgacaucaccggcuucgcccccuucagcaaggacaacagcaucagacugagcgccggcggcgacaucugggugaccagagagcccuacgugagcugcgaccccgacaagugcuaccaguucgcccugggccagggcaccacccugaacaacgugcacagcaacaacaccgugagagacagaacccccuacagaacccugcugaugaacgagcugggcgugcccuuccaccugggcaccaagcaggugugcaucgccuggagcagcagcagcugccacgacggcaaggccuggcugcacgugugcaucaccggcgacgacaagaacgccaccgccagcuucaucuacaacggcagacugguggacagcguggugagcuggagcaaggagauccugagaacccaggagagcgagugcgugugcaucaacggcaccugcaccguggugaugaccgacggcagcgccagcggcaaggccgacaccaagauccuguucaucgaggagggcaagaucgugcacaccagcacccugagcggcagcgcccagcacguggaggagugcagcugcuaccccagauaccccggcgugagaugcgugugcagagacaacuggaagggcagcaacagacccaucguggacaucaacaucaaggaccacagcaucgugagcagcuacgugugcagcggccuggugggcgacacccccagaaagaacgacagcagcagcagcagccacugccuggaccccaacaacgaggagggcggccacggcgugaagggcugggccuucgacgacggcaacgacguguggaugggcagaaccaucaacgagaccagcagacugggcuacgagaccuucaaggugaucgagggcuggagcaaccccaagagcaagcugcagaucaacagacaggugaucguggacagaggcaacagaagcggcuacagcggcaucuucagcguggagggcaagagcugcaucaacagaugcuucuacguggagcugaucagaggcagaaaggaggagaccgaggugcuguggaccagcaacagcaucgugguguucugcggcaccagcggcaccuacggcaccggcagcuggcccgacggcgccgaccugaaccugaugcccaucuga

SEQ ID NO: 185612 - RNA, 1410 nt, Artificial Sequence; identical to SEQ ID NO: 179578
  derived and/or modified CDS sequence (opt4) from neuraminidase__InfluenzaA__AID70529

SEQ ID NO: 185613 - RNA, 1410 nt, Artificial Sequence
  derived and/or modified CDS sequence (opt4) from neuraminidase__InfluenzaA__AID70530
augaaccccaaccagaagaucaucaccaucggcagcgugagccugaccaucagcaccaucugcuucuucaugcagaucgccauccugaucaccaccgugacccugcacuucaagcaguacgaguucaacagcccccccaacaaccaggugaugcugugcgagcccaccaucaucgagagaaacaucaccgagaucguguaccugaccaacaccaccaucgagaaggagaucugccccaagcuggccgaguacagaaacuggagcaagccccagugcgacaucaccggcuucgcccccuucagcaaggacaacagcaucagacugagcgccggcggcgacaucugggugaccagagagcccuacgugagcugcgaccccgacaagugcuaccaguucgcccugggccagggcaccacccugaacaacgugcacagcaacaacaccgugagagacagaacccccuacagaacccugcugaugaacgagcugggcgugcccuuccaccugggcaccaagcaggugugcaucgccuggagcagcagcagcugccacgacggcaaggccuggcugcacgugugcaucaccggcgacgacaagaacgccaccgccagcuucaucuacaacggcagacugguggacagcguggugagcuggagcaaggagauccugagaacccaggagagcgagugcgugugcaucaacggcaccugcaccguggugaugaccgacggcagcgccagcggcaaggccgacaccaagauccuguucaucgaggagggcaagaucgugcacaccagcacccugagcggcagcgcccagcacguggaggagugcagcugcuaccccagauaccccggcgugagaugcgugugcagagacaacuggaagggcagcaacagacccaucguggacaucaacaucaaggaccacagcaucgugagcagcuacgugugcagcggccuggugggcgacacccccagaaagaacgacagcagcagcagcagccacugccuggaccccaacaacgaggagggcggccacggcgugaagggcugggccuucgacgacggcaacgacguguggaugggcagaaccaucaacgagaccagcagacugggcuacgagaccuucaaggugaucgagggcuggagcaaccccaagagcaagcugcagaucaacagacaggugaucguggacagaggcaacagaagcggcuacagcggcaucuucagcguggagggcaagagcugcaucaacagaugcuucuacguggagcugaucagaggcagaaaggaggagaccgaggugcuguggaccagcaacagcaucgugguguucugcggcaccagcggcaccuacggcaccggcagcuggcccgacggcgccgaccugaacaucaugcccaucuga

SEQ ID NO: 185614 - RNA, 1410 nt, Artificial Sequence; identical to SEQ ID NO: 179578
  derived and/or modified CDS sequence (opt4) from neuraminidase__InfluenzaA__AID70531

SEQ ID NO: 185615 - RNA, 1410 nt, Artificial Sequence
  derived and/or modified CDS sequence (opt4) from neuraminidase__InfluenzaA__AID70532
augaaccccaaccagaagaucaucaccaucggcagcgugagccugaccaucagcaccaucugcuucuucaugcagaucgccauccugaucaccaccgugacccugcacuucaagcaguacgaguucaacagcccccccaacaaccaggugaugcugugcgagcccaccaucaucgagagaaacaucaccgagaucguguaccugaccaacaccaccaucgagaaggagaucugccccaagcuggccgaguacagaaacuggagcaagccccagugcgacaucaccggcuucgcccccuucagcaaggacaacagcaucagacugagcgccggcggcgacaucugggugaccagagagcccuacgugagcugcgaccccgacaagugcuaccaguucgcccugggccagggcaccacccugaacaacgugcacagcaacaacaccgugagagacagaacccccuacagaacccugcugaugaacgagcugggcgugcccuuccaccugggcaccaagcaggugugcaucgccuggagcagcagcagcugccacgacggcaaggccuggcugcacgugugcaucaccggcgacgacaagaacgccaccgccagcuucaucuacaacggcagacugguggacagcguggugagcuggagcaaggagauccugagaacccaggagagcgagugcgugugcaucaacggcaccugcaccguggugaugaccgacggcagcgccagcggcaaggccgacaccaagauccuguucaucgaggagggcaagaucgugcacaccagcacccugagcggcagcgcccagcacguggaggagugcagcugcuaccccagauaccccggcgugagaugcgugugcagagacaacuggaagggcagcaacagacccaucguggacaucaacaucaaggaccacagcaucgugagcagcuacgugugcagcggccuggugggcgacacccccagaaagaacgacagcagcagcagcagccacugccuggaccccaacaacgaggagggcggccacggcgugaagggcugggccuucgacgacggcaacgacguguggaugggcagaaccaucaacgagaccagcagacugggcuacgagacccugaaggugaucgagggcuggagcaaccccaagagcaagcugcagaucaacagacaggugaucguggacagaggcaacagaagcggcuacuacggcaucuucagcguggagggcaagagcugcaucaacagaugcuucuacguggagcugaucuggggcagaaaggaggagaucgaggugcuguggaccagcaacagcaaggugguguucugcggcaccagcggcaccuacggcaccggcagcagccccgacggcgccgaccugaacuucaugcccaucuga

SEQ ID NO: 185616 - RNA, 1410 nt, Artificial Sequence
  derived and/or modified CDS sequence (opt4) from neuraminidase__InfluenzaA__AID70533
augaaccccaaccagaagaucaucaccaucggcagcgugagccuggccaucagcaccaucugcuucuucaugcagaucgccauccugaucaccaccgugacccugcacuucaagcaguacgaguucaacagcccccccaacaaccaggugaugcugugcgagcccaccaucaucgagagaaacaucaccgagaucguguaccugaccaacaccaccaucgagaaggagaucugccccaagcuggccgaguacagaaacuggagcaagccccagugcgacaucaccggcuucgcccccuucagcaaggacaacagcaucagacugagcgccggcggcgacaucugggugaccagagagcccuacgugagcugcgaccccgacaagugcuaccaguucgcccugggccagggcaccacccugaacaacgugcacagcaacaacaccgugagagacagaacccccuacagaacccugcugaugaacgagcugggcgugcccuuccaccugggcaccaagcaggugugcaucgccuggagcagcagcagcugccacgacggcaaggccuggcugcacgugugcaucaccggcgacgacaagaacgccaccgccagcuucaucuacaacggcagacugguggacagcguggugagcuggagcaaggagauccugagaacccaggagagcgagugcgugugcaucaacggcaccugcaccguggugaugaccgacggcagcgccagcggcaaggccgacaccaagauccuguucaucgaggagggcaagaucgugcacaccagcacccugagcggcagcgcccagcacguggaggagugcagcugcuaccccagauaccccggcgugagaugcgugugcagagacaacuggaagggcagcaacagacccaucguggacaucaacaucaaggaccacagcaucgugagcagcuacgugugcagcggccuggugggcgacacccccagaaagaacgacagcagcagcagcagccacugccuggaccccaacaacgaggagggcggccacggcgugaagggcugggccuucgacgacggcaacgacguguggaugggcagaaccaucaacgagaccagcagacugggcuacgagaccuucaaggugaucgagggcuggagcaaccccaagagcaagcugcagaucaacagacaggugaucguggacagaggcaacagaagcggcuacagcggcaucuucagcguggagggcaagagcugcaucaacagaugcuucuacguggagcugaucagaggcagaaaggaggagaccgaggugcuguggaccagcaacagcaucgugguguucugcggcaccagcggcaccuacggcaccggcagcuggcccgacggcgccgaccugaaccugaugcccaucuga

SEQ ID NO: 185617 - RNA, 1410 nt, Artificial Sequence
  derived and/or modified CDS sequence (opt4) from neuraminidase__InfluenzaA__AID70534
augaaccccaaccagaagaucaucaccaucggcagcgugagccugagcaucuacaucaucugcuucuucaugcagaucgccauccugaucaccaccgugacccugcacuucaagcaguacgaguucaacagcccccccaacaaccaggccaugcccugcgagcccaccaucaucgagagaaacaucaccgagaucguguaccugaccaacaccaccaucgagaaggagaucugccccaagcuggccgaguacagaaacuggagcaagccccagugcgacaucaccggcuucgcccccuucagcaaggacaacagcaucagacugagcgccggcggcgacaucugggugaccagagagcccuacgugagcugcgaccccgacaagugcuaccaguucgcccugggccagggcaccacccugaacaacgugcacagcaacaacaccgugagagacagaacccccuacagaacccugcugaugaacgagcugggcgugcccuuccaccugggcaccaagcaggugugcaucgccuggagcagcagcagcugccacgacggcaaggccuggcugcacgugugcaucaccggcgacgacaagaacgccaccgccagcuucaucuacaacggcagacugguggacagcguggugagcuggagcaaggagauccugagaacccaggagagcgagugcgugugcaucaacggcaccugcaccguggugaugaccgacggcagcgccagcggcaaggccgacaccaagauccuguucaucgaggagggcaagaucgugcacaccagcacccugagcggcagcgcccagcacguggaggagugcagcugcuaccccagauaccccggcgugagaugcgugugcagagacaacuggaagggcagcaacagacccaucguggacaucaacaucaaggaccacagcaucgugagcagcuacgugugcagcggccuggugggcgacacccccagaaagaacgacagcagcagcagcagccacugccuggaccccaacaacgaggagggcggccacggcgugaagggcugggccuucgacgacggcaacgacguguggaugggcagaaccaucaacgagaccagcagacugggcuacgagaccuucaaggugaucgagggcuggagcaaccccaagagcaagcugcagaucaacagacaggugaucguggacagaggcaacagaagcggcuacagcggcaucuucagcguggagggcaagagcugcaucaacagaugcuucuacguggagcugaucagaggcagaaaggaggagaccgaggugcuguggaccagcaacagcaucgugguguucugcggcaccagcggcaccuacggcaccggcagcuggcccgacggcgccgaccugaaccugaugcccaucuga

SEQ ID NO: 185618 - RNA, 1410 nt, Artificial Sequence
  derived and/or modified CDS sequence (opt4) from neuraminidase__InfluenzaA__AID70535
augaaccccaaccagaagaucaucaccaucggcagcgugagccuggccaugugcaccaucugcuucuucaugcagaucgccauccugaucaccaccgugacccugcacuucaagcaguacgaguucaacagcccccccaacaaccaggccaugcccugcgagcccaccaucaucgagagaaacaucaccgagaucguguaccugaccaacaccaccaucgagaaggagaucugccccaagcuggccgaguacagaaacuggagcaagccccagugcgacaucaccggcuucgcccccuucagcaaggacaacagcaucagacugagcgccggcggcgacaucugggugaccagagagcccuacgugagcugcgaccccgacaagugcuaccaguucgcccugggccagggcaccacccugaacaacgugcacagcaacaacaccgugagagacagaacccccuacagaacccugcugaugaacgagcugggcgugcccuuccaccugggcaccaagcaggugugcaucgccuggagcagcagcagcugccacgacggcaaggccuggcugcacgugugcaucaccggcgacgacaagaacgccaccgccagcuucaucuacaacggcagacugguggacagcguggugagcuggagcaaggagauccugagaacccaggagagcgagugcgugugcaucaacggcaccugcaccguggugaugaccgacggcagcgccagcggcaaggccgacaccaagauccuguucaucgaggagggcaagaucgugcacaccagcacccugagcggcagcgcccagcacguggaggagugcagcugcuaccccagauaccccggcgugagaugcgugugcagagacaacuggaagggcagcaacagacccaucguggacaucaacaucaaggaccacagcaucgugagcagcuacgugugcagcggccuggugggcgacacccccagaaagaacgacagcagcagcagcagccacugccuggaccccaacaacgaggagggcggccacggcgugaagggcugggccuucgacgacggcaacgacguguggaugggcagaaccaucaacgagaccagcagacugggcuacgagaccuucaaggugaucgagggcuggagcaaccccaagagcaagcugcagaucaacagacaggugaucguggacagaggcaacagaagcggcuacagcggcaucuucagcguggagggcaagagcugcaucaacagaugcuucuacguggagcugaucagaggcagaaaggaggagaccgaggugcuguggaccagcaacagcaucgugguguucugcggcaccagcggcaccuacggcaccggcagcuggcccgacggcgccgaccugaaccugaugcccaucuga

SEQ ID NO: 185619 - RNA, 1410 nt, Artificial Sequence
  derived and/or modified CDS sequence (opt4) from neuraminidase__InfluenzaA__AID70536
augaaccccaaccagaagaucaucaccaucggcagcgugagccugaccaucagcaccgugugcuucuucaugcagaucgccauccugaucaccaccgugacccugcacuucaagcaguacgaguucaacagcccccccaacaaccaggugaugcugugcgagcccaccaucaucgacagaaacaucaccgagaucguguaccugaccaacaccaccaucgagaaggagaucugccccaagcuggccgaguacagaaacuggagcaagccccagugcgacaucaccggcuucgcccccuucagcaaggacaacagcaucagacugagcgccggcggcgacaucugggugaccagagagcccuacgugagcugcgaccccgacaagugcuaccaguucgcccugggccagggcaccacccugaacaacgugcacagcaacaacaccgugagagacagaacccccuacagaacccugcugaugaacgagcugggcgugcccuuccaccugggcaccaagcaggugugcaucgccuggagcagcagcagcugccacgacggcaaggccuggcugcacgugugcaucaccggcgacgacaagaacgccaccgccagcuucaucuacaacggcagacugguggacagcguggugagcuggagcaaggagauccugagaacccaggagagcgagugcgugugcaucaacggcaccugcaccguggugaugaccgacggcagcgccagcggcaaggccgacaccaagauccuguucaucgaggagggcaagaucgugcacaccagcacccugagcggcagcgcccagcacguggaggagugcagcugcuaccccagauaccccggcgugagaugcgugugcagagacaacuggaagggcagcaacagacccaucguggacaucaacaucaaggaccacagcaucgugagcagcuacgugugcagcggccuggugggcgacacccccagaaagaacgacagcagcagcagcagccacugccuggaccccaacaacgaggagggcggccacggcgugaagggcugggccuucgacgacggcaacgacguguggaugggcagaaccaucaacgagaccagcagacugggcuacgagaccuucaaggugaucgagggcuggagcaaccccaagagcaagcugcagaucaacagacaggugaucguggacagaggcaacagaagcggcuacagcggcaucuucagcguggagggcaagagcugcaucaacagaugcuucuacguggagcugaucagaggcagaaaggaggagaccgaggugcuguggaccagcaacagcaucgugguguucugcggcaccagcggcaccuacggcaccggcagcuggcccgacggcgccgaccugaaccugaugcccaucuga

SEQ ID NO: 185620 - RNA, 1410 nt, Artificial Sequence; identical to SEQ ID NO: 179578
  derived and/or modified CDS sequence (opt4) from neuraminidase__InfluenzaA__AID70537

SEQ ID NO: 185621 - RNA, 1410 nt, Artificial Sequence
  derived and/or modified CDS sequence (opt4) from neuraminidase__InfluenzaA__AID70538
augaaccccaaccagaagaagaucaccaucggcgccgugagccugaccaugugcaccgugugcaucuucaugcagaucgccauccugaucaccaccgugacccugcacuucagacaguacgaguucaacagcccccccaacaaccaggugaugcugugcgagcccaccaucaucgagagaaacaucaccgagaucguguaccugaccaacaccaccaucgagaaggagaucugccccaagcuggccgaguacagaaacuggagcaagccccagugcgacaucaccggcuucgcccccuucagcaaggacaacagcaucagacugagcgccggcggcgacaucugggugaccagagagcccuacgugagcugcgaccccgacaagugcuaccaguucgcccugggccagggcaccacccugaacaacgugcacagcaacaacaccgugagagacagaacccccuacagaacccugcugaugaacgagcugggcgugcccuuccaccugggcaccaagcaggugugcaucgccuggagcagcagcagcugccacgacggcaaggccuggcugcacgugugcaucaccggcgacgacaagaacgccaccgccagcuucaucuacaacggcagacugguggacagcguggugagcuggagcaaggagauccugagaacccaggagagcgagugcgugugcaucaacggcaccugcaccguggugaugaccgacggcagcgccagcggcaaggccgacaccaagauccuguucaucgaggagggcaagaucgugcacaccagcacccugagcggcagcgcccagcacguggaggagugcagcugcuaccccagauaccccggcgugagaugcgugugcagagacaacuggaagggcagcaacagacccaucguggacaucaacaucaaggaccacagcaucgugagcagcuacgugugcagcggccuggugggcgacacccccagaaagaacgacagcagcagcagcagccacugccuggaccccaacaacgaggagggcggccacggcgugaagggcugggccuucgacgacggcaacgacguguggaugggcagaaccaucaacgagaccagcagacugggcuacgagaccuucaaggugaucgagggcuggagcaaccccaagagcaagcugcagaucaacagacaggugaucguggacagaggcaacagaagcggcuacagcggcaucuucagcguggagggcaagagcugcaucaacagaugcuucuacguggagcugaucagaggcagaaaggaggagaccgaggugcuguggaccagcaacagcaucgugguguucugcggcaccagcggcaccuacggcaccggcagcuggcccgacggcgccgaccugaaccugaugcccaucuga

SEQ ID NO: 185622 - RNA, 1410 nt, Artificial Sequence
  derived and/or modified CDS sequence (opt4) from neuraminidase__InfluenzaA__AID70539
augaaccccaaccagaagaucaucaccaucggcagcgugagccugaccaucagcaccaucugcuucuucaugcagaucgccauccugaucaccaccgugacccugcacuucaagcaguacgaguucaacagcccccccaacaaccaggugaugcugugcgagcccaccaucaucgagagaaacaucaccgagaucguguaccugaccaacaccaccaucgagaaggagaucugccccaagcuggccgaguacagaaacuggagcaagccccagugcgacaucaccggcuucgcccccuucagcaaggacaacagcaucagacugagcgccggcggcgacaucugggugaccagagagcccuacgugagcugcgaccccgacaagugcuaccaguucgcccugggccagggcaccacccugaacaacgugcacagcaacaacaccgugagagacagaacccccuacagaacccugcugaugaacgagcugggcgugcccuuccaccugggcaccaagcaggugugcaucgccuggagcagcagcagcugccacgacggcaaggccuggcugcacgugugcaucaccggcgacgacaagaacgccaccgccagcuucaucuacaacggcagacugguggacagcguggugagcuggagcaaggagauccugagaacccaggagagcgagugcgugugcaucaacggcaccugcaccguggugaugaccgacggcagcgccagcggcaaggccgacaccaagauccuguucaucgaggagggcaagaucgugcacaccagcacccugagcggcagcgcccagcacguggaggagugcagcugcuaccccagauaccccggcgugagaugcgugugcagagacaacuggaagggcagcaacagacccaucguggacaucaacaucaaggaccacagcaucgugagcagcuacgugugcagcggccuggugggcgacacccccagaaagaacgacagcagcagcagcagccacugccugaaccccaacaacgaggagggcggccacggcgugaagggcugggccuucgacgacggcaacgacguguggaugggcagaaccaucaacgagaccagcagacugggcuacgagaccuucaaggugaucgagggcuggagcaaccccaagagcaagcugcagaucaacagacaggugaucguggacagaggcaacagaagcggcuacagcggcaucuucagcguggagggcaagagcugcaucaacagaugcuucuacguggagcugaucagaggcagaaaggaggagaccgaggugcuguggaccagcaacagcaucgugguguucugcggcaccagcggcaccuacggcaccggcagcuggcccgacggcgccgaccugaaccugaugcccaucuga

SEQ ID NO: 185623 - RNA, 1410 nt, Artificial Sequence; identical to SEQ ID NO: 179578
  derived and/or modified CDS sequence (opt4) from neuraminidase__InfluenzaA__AID70540

SEQ ID NO: 185624 - RNA, 1410 nt, Artificial Sequence; identical to SEQ ID NO: 179578
  derived and/or modified CDS sequence (opt4) from neuraminidase__InfluenzaA__AID70541

SEQ ID NO: 185625 - RNA, 1410 nt, Artificial Sequence
  derived and/or modified CDS sequence (opt4) from neuraminidase__InfluenzaA__AID70633
augaaccccaaccagaagaucaucaccaucggcagcgugugcaugaccaucggcauggccaaccugauccugcagaucggcaacaucaucagcaucugggugagccacagcauccagcugggcaaccagagccagaucgaggccugcaaccagagcgugaucaccuacgagaacaacaccugggugaaccagaccuacgugaacaucagcaacaccaacuucgccgccggccagagcguggugagcgugaagcuggccggcaacagcagccugugccccgugagcggcugggccaucuacagcaaggacaacagcgugagaaucggcagcaagggcgacguguucgugaucagagagcccuucaucagcugcagcccccuggagugcagaaccuucuuccugacccagggcgcccugcugaacgacaagcacagcaacggcaccaucaaggacagaagccccuacagaacccugaugagcugccccaucggcgaggugcccagccccuacaacagcagauucgagagcguggccuggagcgccagcgccugccacgacggcaucaacuggcugaccaucggcaucagcggccccgacagcggcgccguggccgugcugaaguacaacggcaucaucaccgacaccaucaagagcuggagaaacaacauccugagaacccaggagagcgagugcgccugcgugaacggcagcugcuucaccaucaugaccgacggccccagcgacggccaggccagcuacaagaucuucagaaucgagaagggcaagaucgugaagagcguggagaugaacgcccccaacuaccacuacgaggagugcagcugcuaccccgacagcagcgagaucaccugcgugugcagagacaacuggcacggcagcaacagacccugggugagcuucaaccagaaccuggaguaccagaucggcuacaucugcagcggcguguucggcgacaaccccagacccaacgacaagaccggcagcugcggccccgugagcagcaacggcgccaacggcgugaagggcuucagcuucaaguacggcaacggcguguggaucggcagaaccaagagcaucagcagcagaaagggcuucgagaugaucugggaccccaacggcuggaccggcaccgacaacaaguucagcaucaagcaggacaucgugggcaucaacgaguggagcggcuacagcggcagcuucgugcagcaccccgagcugaccggccuggacugcaucagacccugcuucuggguggagcugaucagaggcagacccgaggagaacaccaucuggaccagcggcagcagcaucagcuucugcggcgugaacagcgacaccgugggcuggagcuggcccgacggcgccgagcugcccuucaccaucgacaaguga

SEQ ID NO: 185626 - RNA, 1398 nt, Artificial Sequence
  derived and/or modified CDS sequence (opt4) from neuraminidase__InfluenzaA__AID70635
augaaccccaagcagaagauccugugcaccagcgccaccgccaucaucaucggcgccaucgccgugcugaucggcaucgccaaccugggccugaacaucggccugcaccugaagcccggcugcaacugcagccacagccagcccgagaccaccaacaccagccagaccaucaucaacaacuacuacaacgagaccaacaucaccaacauccagauggaggagagaaccagcagaaacuucaacaaccugaccaagggccugugcaccaucaacagcuggcacaucuacggcaaggacaacgccgugagaaucggcgagagcagcgacgugcuggugaccagagagcccuacgugagcugcgaccccgacgagugcagauucuacgcccugagccagggcaccaccaucagaggcaagcacagcaacggcaccauccacgacggcagccaguacagagcccugaucagcuggccccugagcagcccccccaccguguacaacagcagaguggagugcaucggcuggagcagcaccagcugccacgacggcaagagcagaaugagcaucugcaucagcggccccaacaacaacgccagcgccguggugugguacaacagaagacccguggccgagaucaacaccugggccagaaacauccugagaacccaggagagcgagugcgugugccacaacggcgugugccccgugguguucaccgacggcagcgccaccggccccgccgacaccagaaucuacuacuucaaggagggcaagauccugaagugggagagccugaccggcaccgccaagcacaucgaggagugcagcugcuacggcgagagaaccggcaucaccugcaccugcagagacaacuggcagggcagcaacagacccgugauccagaucgaccccguggccaugacccacaccagccaguacaucugcagccccgugcugaccgacaaccccagacccaacgaccccaacaucggcaagugcaacgaccccuaccccggcaacaacaacaacggcgugaagggcuucagcuaccuggacggcgccaacaccuggcugggcagaaccaucagcaccgccagcagaagcggcuacgagaugcugaaggugcccaacgcccugaccgacgacagaagcaagcccauccagggccagaccaucgugcugaacgccgacuggagcggcuacagcggcagcuucauggacuacugggccgagggcgacugcuacagagccugcuucuacguggagcugaucagaggcagacccaaggaggacaaggugugguggaccagcaacagcaucgugagcaugugcagcagcaccgaguuccugggccaguggaacuggcccgacggcgccaagaucgaguacuuccuguga

SEQ ID NO: 185627 - RNA, 1401 nt, Artificial Sequence
  derived and/or modified CDS sequence (opt4) from neuraminidase__InfluenzaA__AIG44695
augaaccccaaccagaagaucaccgccaucggcagcgugagccugaucaucgccaucaucugccugcugaugcagaucgccauccugaccaccaccaugacccugcacuucagacagaacgagugcagcaaccccagcaacaaccaggugaugcccugcgagcccaucaucaucgagagaaacaccgugcaccugaacagcaccaccaucgagagagagaucugccccaagguggccgaguacaagaacuggagcaagccccagugccagaucaccggcuucgcccccuucagcaaggacaacagcaucagacugagcgccagcggcgacaucugggugaccagagagcccuacgugagcugcagccuggacaagugcuaccaguucgcccugggccagggcaccacccugaagaacaagcacagcaacggcaccacccacgacagaaccccccacagaacccugcugaugaacgagcugggcgugcccuuccaccugggcaccaagcaggugugcaucgccuggagcagcagcagcugcuacgacggcaaggccuggcugcacgugugcgugaccggcgacgacaagaacgccaccgccagcaucaucuacgacggcaugcugguggacagcgugggcagcuggagcaagaacauccugagaacccaggagagcgagugcgugugcaucaacggcaccugcgccguggugaugaccgacggcagcgccagcggcaaggccgacaccagagugcuguucaucagagagggcaagaucaucaacaucagcccccugagcggcagcgcccagcacguggaggagugcagcugcuaccccagauaccccgaggugagaugcgugugcagagacaacuggaagggcagcaacagacccauccuguacaucaacauggccgacuacagcaucgagagcagcuacgugugcagcggccuggugggcgacacccccagaaacgacgacagcagcagcagcagcaacugcagagaccccaacaacgagagaggcgcccccggcgugaagggcugggccuucgacgacggcaacgacguguggaugggcagaaccaucaagaacggcagcagaagcggcuacgagaccuucagaguggugaacggcuggaccauggccaacagcaagagccagaucaacagacaggugaucguggacagcgacggcuggagcggcuacagcggcaucuucagcguggagggcaagaagugcaucaacagaugcuucuacguggagcugaucagaggcagaccccaggagcccagagugugguggaccagcaacagcaucaucguguucugcggcaccagcggcaccuacggcaccggcagcuggcccgacggcgccaacaucaacuucaugcccaucuga

SEQ ID NO: 185628 - RNA, 1410 nt, Artificial Sequence
  derived and/or modified CDS sequence (opt4) from neuraminidase__InfluenzaA__AIJ10793
augaaccccaaccagaagaucaucaccaucggcagcgugagccugaccaucagcaccaucugcuucuucaugcagaucgccauccugaucaccaccgugacccugcacuucaagcaguacgaguucaacagcccccccaacaaccaggugaugcugugcgagcccaccaucaucgagagaaacaucaccgagaucguguaccugaccaacaccaccaucgagaaggagaucugccccaagcuggccgaguacagaaacuggagcaagccccagugcgacaucaccggcuucgcccccuucagcaaggacaacagcaucagacugagcgccggcggcgacaucugggugaccagagagcccuacgugagcugcgaccccgacaagugcuaccaguucgcccugggccagggcaccacccugaacaacgugcacagcaacaacaccgugagagacagaacccccuacagaacccugcugaugaacgagcugggcgugcccuuccaccugggcaccaagcaggugugcaucgccuggagcagcagcagcugccacgacggcaaggccuggcugcacgugugcaucaccggcgacgacaagaacgccaccgccagcuucaucuacaacggcagacugguggacagcguggugagcuggagcaaggagauccugagaacccaggagagcgagugcgugugcaucaacggcaccugcaccguggugaugaccgacggcagcgccagcggcaaggccgacaccaagauccuguucaucgaggagggcaagaucgugcacaccagcacccugagcggcagcgcccagcacguggaggagugcagcugcuaccccagauaccccggcgugagaugcgugugcagagacaacuggaagggcagcaacagacccaucguggacaucaacaucaaggaccacagcaucgugagcagcuacgugugcagcggccuggugggcgacacccccagaaagaacgacagcagcagcagcagccacugccuggaccccaacaacgaggagggcggccacggcgugaagggcugggccuucgacgacggcaacgacguguggaugggcagaaccaucaacgagaccagcagacugggcuacgagaccuucaaggccaucgagggcuggagcaaccccaagagcaagcugcagaccaacagacaggugaucguggacagaggcaacagaagcggcuacagcggcaucuucagcguggagggcaagagcugcaucaacagaugcuucuacguggagcugaucagaggcagaaaggaggagaccgaggugcuguggaccagcaacagcaucgugguguucugcggcaccagcggcaccuacggcaccggcagcuggcccgacggcgccgaccugaaccugaugcccaucuga

SEQ ID NO: 185629 - RNA, 1410 nt, Artificial Sequence; identical to SEQ ID NO: 179578
  derived and/or modified CDS sequence (opt4) from neuraminidase__InfluenzaA__AIJ10794

SEQ ID NO: 185630 - RNA, 1410 nt, Artificial Sequence; identical to SEQ ID NO: 181203
  derived and/or modified CDS sequence (opt4) from neuraminidase__InfluenzaA__AIJ10795

SEQ ID NO: 185631 - RNA, 1410 nt, Artificial Sequence; identical to SEQ ID NO: 181203
  derived and/or modified CDS sequence (opt4) from neuraminidase__InfluenzaA__AIJ10796

SEQ ID NO: 185632 - RNA, 1410 nt, Artificial Sequence
  derived and/or modified CDS sequence (opt4) from neuraminidase__InfluenzaA__AIJ10797
augaaccccaaccagaagaucaucaccaucggcagcgugagccugaccaucagcaccaucugcuucuucaugcagaucgccauccugaucaccaccgugacccugcacuucaagcaguacgaguucaacagcccccccaacaaccaggugaugcugugcgagcccaccaucaucgagagaaacaucaccgagaucguguaccugaccaacaccaccaucgagaaggagaucugccccaagcuggccgaguacagaaacuggagcaagccccagugcgacaucaccggcuucgcccccuucagcaaggacaacagcaucagacugagcgccggcggcgacaucugggugaccagagagcccuacgugagcugcgaccccgacaagugcuaccaguucgcccugggccagggcaccacccugaacaacgugcacagcaacaacaccgugagagacagaacccccuacagaacccugcugaugaacgagcugggcgugcccuuccaccugggcaccaagcaggugugcaucgccuggagcagcagcagcugccacgacggcaaggccuggcugcacgugugcaucaccggcgacgacaagaacgccaccgccagcuucaucuacaacggcaagcugguggacagcguggugagcuggagcaaggagauccugagaacccaggagagcgagugcgugugcaucaacggcaccugcaccguggugaugaccgacggcagcgccagcggcaaggccgacaccaagauccuguucaucgaggagggcaagaucgugcacaccagcacccugagcggcagcgcccagcacguggaggagugcagcugcuaccccagauaccccggcgugagaugcgugugcagagacaacuggaagggcagcaacagacccaucguggacaucaacaucaaggaccacagcaucgugagcagcuacgugugcagcggccuggugggcgacacccccagaaagaacgacagcagcagcagcagccacugccuggaccccaacaacgaggagggcggccacggcgugaagggcugggccuucgacgacggcaacgacguguggaugggcagaaccaucaacgagaccagcagacugggcuacgagaccuucaaggugaucgagggcuggagcaaccccaagagcaagcugcagaucaacagacaggugaucguggacagaggcaacagaagcggcuacagcggcaucuucagcguggaggacaagagcugcaucaacagaugcuucuacguggagcugaucagaggcagaaaggaggagaccgaggugcuguggaccagcaacagcaucgugguguucugcggcaccagcggcaccuacggcaccggcagcuggcccgacggcgccgaccugaaccugaugcccaucuga

SEQ ID NO: 185633 - RNA, 1410 nt, Artificial Sequence
  derived and/or modified CDS sequence (opt4) from neuraminidase__InfluenzaA__AIJ10798
augaaccccaaccagaagaucaucaccaucggcagcgugagccugaccaucagcaccaucugcuucuucaugcagaucgccauccugaucaccaccgugacccugcacuucaagcaguacgaguucaacagcccccccaacaaccaggugaugcugugcgagcccaccaucaucgagagaaacaucaccgagaucguguaccugaccaacaccaccaucgagaaggagaucugccccacccuggccgaguacagaaacuggagcaagccccagugcgacaucaccggcuucgcccccuucagcaaggacaacagcaucagacugagcgccggcggcgacaucugggugaccagagagcccuacgugagcugcgaccccgacaagugcuaccaguucgcccugggccagggcaccacccugaacaacgugcacagcaacaacaccgugagagacagaacccccuacagaacccugcugaugaacgagcugggcgugcccuuccaccugggcaccaagcaggugugcaucgccuggagcagcagcagcugccacgacggcaaggccuggcugcacgugugcaucaccggcgacgacaagaacgccaccgccagcuucaucuacaacggcagacugguggacagcguggugagcuggagcaaggagauccugagaacccaggagagcgagugcgugugcaucaacggcaccugcaccguggugaugaccgacggcagcgccagcggcaaggccgacaccaagauccuguucaucgaggagggcaagaucgugcacaccagcacccugagcggcagcgcccagcacguggaggagugcagcugcuaccccagauaccccggcgugagaugcgugugcagagacaacuggaagggcagcaacagacccaucguggacaucaacaucaaggaccacagcaucgugagcagcuacgugugcagcggccuggugggcgacacccccagaaagaacgacagcagcagcagcagccacugccuggaccccaacaacgaggagggcggccacggcgugaagggcugggccuucgacgacggcaacgacguguggaugggcagaaccaucaacgagaccagcagacugggcuacgagaccuucaaggugaucgagggcuggagcaaccccaagagcaagcugcagaucaacagacaggugaucguggacagaggcaacagaagcggcuacagcggcaucuucagcguggagggcaagagcugcaucaacagaugcuucuacguggagcugaucagaggcagaaaggaggagaccgaggugcuguggaccagcaacagcaucgugguguucugcggcaccagcggcaccuacggcaccggcagcuggcccgacggcgccgaccugaaccugaugcccaucuga

SEQ ID NO: 185634 - RNA, 1410 nt, Artificial Sequence; identical to SEQ ID NO: 181203
  derived and/or modified CDS sequence (opt4) from neuraminidase__InfluenzaA__AIJ10799

SEQ ID NO: 185635 - RNA, 1410 nt, Artificial Sequence
  derived and/or modified CDS sequence (opt4) from neuraminidase__InfluenzaA__AIJ10800
augaaccccaaccagaagaucaucaccaucggcagcgugagccugaccaucagcaccaucugcuucuucaugcagaucgccauccugaucaccaccgugacccugcacuucaagcaguacgaguucaacagcagccccaacaaccaggugaugcugugcgagcccaccaucaucgagagaaacaucaccgagaucguguaccugaccaacaccaccaucgagaaggagaucugccccaagcuggccgaguacagaaacuggagcaagccccagugcgacaucaccggcuucgcccccuucagcaaggacaacagcaucagacugagcgccggcggcgacaucugggugaccagagagcccuacgugagcugcgaccccgacaagugcuaccaguucgcccugggccagggcaccacccugaacaacgugcacagcaacaacaccgugagagacagaacccccuacagaacccugcugaugaacgagcugggcgugcccuuccaccugggcaccaagcaggugugcaucgccuggagcagcagcagcugccacgacggcaaggccuggcugcacgugugcaucaccggcgacgacaagaacgccaccgccagcuucaucuacaacggcaagcugguggacagcguggugagcuggagcaaggagauccugagaacccaggagagcgagugcgugugcaucaacggcaccugcaccguggugaugaccgacggcagcgccagcggcaaggccgacaccaagauccuguucaucgaggagggcaagaucgugcacaccagcacccugagcggcagcgcccagcacguggaggagugcagcugcuaccccagauaccccggcgugagaugcgugugcagagacaacuggaagggcagcaacagacccaucguggacaucaacaucaaggaccacagcaucgugagcagcuacgugugcagcggccuggugggcgacacccccagaaagaacgacagcagcagcagcagccacugccuggaccccaacaacgaggagggcggccacggcgugaagggcugggccuucgacgacggcaacgacguguggaugggcagaaccaucaacgagaccagcagacugggcuacgagaccuucaaggugaucgagggcuggagcaaccccaagagcaagcugcagaucaacagacaggugaucguggacagaggcaacagaagcggcuacagcggcaucuucagcguggagggcaagagcugcaucaacagaugcuucuacguggagcugaucagaggcagaaaggaggagaccgaggugcuguggaccagcaacagcaucgugguguucugcggcaccagcggcaccuacggcaccggcagcuggcccgacggcgccgaccugaaccugaugcccaucuga

SEQ ID NO: 185636 - RNA, 1410 nt, Artificial Sequence; identical to SEQ ID NO: 182206
  derived and/or modified CDS sequence (opt4) from neuraminidase__InfluenzaA__AIJ10801

SEQ ID NO: 185637 - RNA, 1410 nt, Artificial Sequence; identical to SEQ ID NO: 182206
  derived and/or modified CDS sequence (opt4) from neuraminidase__InfluenzaA__AIJ10803

SEQ ID NO: 185638 - RNA, 1410 nt, Artificial Sequence; identical to SEQ ID NO: 182206
  derived and/or modified CDS sequence (opt4) from neuraminidase__InfluenzaA__AIJ10804

SEQ ID NO: 185639 - RNA, 1410 nt, Artificial Sequence; identical to SEQ ID NO: 182206
  derived and/or modified CDS sequence (opt4) from neuraminidase__InfluenzaA__AIJ10805

SEQ ID NO: 185640 - RNA, 1410 nt, Artificial Sequence
  derived and/or modified CDS sequence (opt4) from neuraminidase__InfluenzaA__AIJ10806
augaaccccaaccagaagaucaucaccaucggcagcgugagccugaccaucagcaccaucugcuucuucaugcagaucgccauccugaucaccaccgugacccugcacuucaagcaguacgaguucaacagcccccccaacaaccaggugaugcugugcgagcccaccaucaucgagagaaacaucaccgagaucguguaccugaccaacaccaccaucgagaaggagaucugccccaagcccgccgaguacagaaacuggagcaagccccagugcggcaucaccggcuucgcccccuucagcaaggacaacagcaucagacugagcgccggcggcgacaucugggugaccagagagcccuacgugagcugcgaccccgacaagugcuaccaguucgcccugggccagggcaccacccugaacaacgugcacagcaacaacaccgugagagacagaacccccuacagaacccugcugaugaacgagcugggcgugcccuuccaccugggcaccaagcaggugugcaucgccuggagcagcagcagcugccacgacggcaaggccuggcugcacgugugcaucaccggcgacgacaagaacgccaccgccagcuucaucuacaacggcagacugguggacagcguggugagcuggagcaaggagauccugagaacccaggagagcgagugcgugugcaucaacggcaccugcaccguggugaugaccgacggcagcgccagcggcaaggccgacaccaagauccuguucaucgaggagggcaagaucgugcacaccagcacccugagcggcagcgcccagcacguggaggagugcagcugcuaccccagauaccccggcgugagaugcgugugcagagacaacuggaagggcagcaacagacccaucguggacaucaacaucaaggaccacagcaucgugagcagcuacgugugcagcggccuggugggcgacacccccagaaagaacgacagcagcagcaucagccacugccuggaccccaacaacgaggagggcggccacggcgugaagggcugggccuucgacgacggcaacgacguguggaugggcagaaccaucaacgagaccagcagacugggcuacgagaccuucaaggugaucgagggcuggagcaaccccaagagcaagcugcagaucaacagacaggugaucguggacagaggcgacagaagcggcuacagcggcaucuucagcguggagggcaagagcugcaucaacagaugcuucuacguggagcugaucagaggcagaaaggaggagaccgaggugcuguggaccagcaacagcaucgugguguucugcggcaccagcggcaccuacggcaccggcagcuggcccgacggcgccgaccugaaccugaugcccaucuga

SEQ ID NO: 185641 - RNA, 1410 nt, Artificial Sequence
  derived and/or modified CDS sequence (opt4) from neuraminidase__InfluenzaA__AIJ10807
augaaccccaaccagaagaucaucaccaucggcagcgugagccugaccaucagcaccaucugcuucuucaugcagaucgccauccugaucaccaccgugacccugcacuucaagcaguacgaguucaacagcccccccaacaaccaggugaugcugugcgagcccaccaucaucgagagaaacaucaccgagaucguguaccugaccaacaccaccaucgagaaggagaucugccccaagcccgccgaguacagaaacuggagcaagccccagugcggcaucaccggcuucgcccccuucagcaaggacaacagcaucagacugagcgccggcggcgacaucugggugaccagagaggccuacgugagcugcgaccccgacaagugcuaccaguucgcccugggccagggcaccacccugaacaacgugcacagcaacaacaccgugagagacagaacccccuacagaacccugcugaugaacgagcugggcgugcccuuccaccugggcaccaagcaggugugcaucgccuggagcagcagcagcugccacgacggcaaggccuggcugcacgugugcaucaccggcgacgacaagaacgccaccgccagcuucaucuacaacggcagacugguggacagcguggugagcuggagcaaggagauccugagaacccaggagagcgagugcgugugcaucaacggcaccugcaccguggugaugaccgacggcagcgccagcggcaaggccgacaccaagauccuguucaucgaggagggcaagaucgugcacaccagcacccugagcggcagcgcccagcacguggaggagugcagcugcuaccccagauaccccggcgugagaugcgugugcagagacaacuggaagggcagcaacagacccaucguggacaucaacaucaaggaccacagcaucgugagcagcuacgugugcagcggccuggugggcgacacccccagaaagaacgacagcagcagcagcagccacugccuggaccccaacaacgaggagggcggccacggcgugaagggcugggccuucgacgacggcaacgacguguggaugggcagaaccaucaacgagaccagcagacugggcuacgagaccuucaaggugaucgagggcuggagcaaccccaagagcaagcugcagaucaacagacaggugaucguggacagaggcgacagaagcggcuacagcggcaucuucagcguggagggcaagagcugcaucaacagaugcuucuacguggagcugaucagaggcagaaaggaggagaccgaggugcuguggaccagcaacagcaucgugguguucugcggcaccagcggcaccuacggcaccggcagcuggcccgacggcgccgaccugaaccugaugcccaucuga

SEQ ID NO: 185642 - RNA, 1410 nt, Artificial Sequence
  derived and/or modified CDS sequence (opt4) from neuraminidase__InfluenzaA__AIJ10808
augaaccccaaccagaagaucaucaccaucggcagcgugagccugaccaucagcaccaucugcuucuucaugcagaucgccauccugaucaccaccgugacccugcacuucaagcaguacgaguucaacagcccccccaacaaccaggugaugcugugcgagcccaccaucaucgagagaaacaucaccgagaucguguaccugaccaacaccaccaucgagaaggagaucugccccaagcccgccgaguacagaaacuggagcaagccccagugcggcaucaccggcuucgcccccuucagcaaggacaacagcaucagacugagcgccggcggcgacaucugggugaccagagagcccuacgugagcugcgaccccgacaagugcuaccaguucgcccugggccagggcaccacccugaacaacgugcacagcaacaacaccgugagagacagaacccccuacagaacccugcugaugaacgagcugggcgugcccuuccaccugggcaccaagcaggugugcaucgccuggagcagcagcagcugccacgacggcaaggccuggcugcacgugugcaucaccggcgacgacaagaacgccaccgccagcuucaucuacaacggcagacugguggacagcguggugagcuggagcaaggaggugcugagaacccaggagagcgagugcgugugcaucaacggcaccugcaccguggugaugaccgacggcagcgccagcggcaaggccgacaccaagauccuguucaucgaggagggcaagaucgugcacaccagcacccugagcggcagcgcccagcacguggaggagugcagcugcuaccccagauaccccggcgugagaugcgugugcagagacaacuggaagggcagcaacagacccaucguggacaucaacaucaaggaccacagcaucgugagcagcuacgugugcagcggccuggugggcgacacccccagaaagaacgacagcagcagcagcagccacugccuggaccccaacaacgaggagggcggccacggcgugaagggcugggccuucgacgacggcaacgacguguggaugggcagaaccaucaacgagaccagcagacugggcuacgagaccuucaaggugaucgagggcuggagcaaccccaagagcaagcugcagaucaacagacaggugaucguggacagaggcgacagaagcggcuacagcggcaucuucagcguggagggcaagagcugcaucaacagaugcuucuacguggagcugaucagaggcagaaaggaggagaccgaggugcuguggaccagcaacagcaucgugguguucugcggcaccagcggcaccuacggcaccggcagcuggcccgacggcgccgaccugaaccugaugcccaucuga

SEQ ID NO: 185643 - RNA, 1410 nt, Artificial Sequence; identical to SEQ ID NO: 182206
  derived and/or modified CDS sequence (opt4) from neuraminidase__InfluenzaA__AIJ10809

SEQ ID NO: 185644 - RNA, 1410 nt, Artificial Sequence; identical to SEQ ID NO: 182206
  derived and/or modified CDS sequence (opt4) from neuraminidase__InfluenzaA__AIJ10810

SEQ ID NO: 185645 - RNA, 1410 nt, Artificial Sequence
  derived and/or modified CDS sequence (opt4) from neuraminidase__InfluenzaA__AIJ10812
augaaccccaaccagaagaucaucaccaucggcagcgugagccugaccaucagcaccaucugcuucuucaugcagaucgccauccugaucaccaccgugacccugcacuucaagcaguacgaguucaacagcccccccaacaaccaggugaugcugugcgagcccaccaucauggagagaaacgugaccgagaucguguaccugaccaacaccaccaucgagaaggagaucugccccaagcccgccgaguacagaaacuggagcaagccccagugcggcaucaccggcuucgcccccuucagcaaggacaacagcaucagacugagcgccggcggcgacaucugggugaccagagagcccuacgugagcugcgaccccgacaagugcuaccaguucgcccugggccagggcaccacccugaacaacgugcacagcaacaacaccgugagagacagaacccccuacagaacccugcugaugaacgagcugggcgugcccuuccaccugggcaccaagcaggugugcaucgccuggagcagcagcagcugccacgacggcaaggccuggcugcacgugugcaucaccggcgacgacaagaacgccaccgccagcuucaucuacaacggcagacugguggacagcguggugagcuggagcaaggagauccugagaacccaggagagcgagugcgugugcaucaacggcaccugcaccguggugaugaccgacggcagcgccagcggcaaggccgacaccaagauccuguucaucgaggagggcaagaucgugcacaccagcacccugagcggcagcgcccagcacguggaggagugcagcugcuaccccagauaccccggcgugagaugcgugugcagagacaacuggaagggcagcaacagacccaucguggacaucaacaucaaggaccacagcaucgugagcagcuacgugugcagcggccuggugggcgacacccccagaaagaacgacagcagcagcagcagccacugccuggaccccaacaacgaggagggcggccacggcgugaagggcugggccuucgacgacggcaacgacguguggaugggcagaaccaucaacgagaccagcagacugggcuacgagaccuucaaggugaucgagggcuggagcaaccccaagagcaagcugcagaucaacagacaggugaucguggacagaggcgacagaagcggcuacagcggcaucuucagcguggagggcaagagcugcaucaacagaugcuucuacguggagcugaucagaggcagaaaggaggagaccgaggugcuguggaccagcaacagcaucgugguguucugcggcaccagcggcaccuacggcaccggcagcuggcccgacggcgccgaccugaaccugaugcccaucuga

SEQ ID NO: 185646 - RNA, 1410 nt, Artificial Sequence
  derived and/or modified CDS sequence (opt4) from neuraminidase__InfluenzaA__AIJ10813
augaaccccaaccagaagaucaucaccaucggcagcgugagccugaccaucagcaccaucugcuucuucaugcagaucgccauccugaucaccaccgugacccugcacuucaagcaguacgaguucaacagcccccccaacaaccaggugaugcugugcgagcccaccaucauggagagaaacgugaccgagaucguguaccugaccaacaccaccaucgagaaggagaucugccccaagcccgccgaguacagaaacuggagcaagccccagugcggcaucaccggcuucgcccccuucagcaaggacaacagcaucagacugagcgccggcggcgacaucugggugaccagagagcccuacgugagcugcgaccccgacaagugcuaccaguucgcccugggccagggcaccacccugaacaacgugcacagcaacaaccccgugagagacagaacccccuacagaacccugcugaugaacgagcugggcgugcccuuccaccugggcaccaagcaggugugcaucgccuggagcagcagcagcugccacgacggcaaggccuggcugcacgugugcaucaccggcgacgacaagaacgccaccgccagcuucaucuacaacggcagacugguggacagcguggugagcuggagcaaggagauccugagaacccaggagagcgagugcgugugcaucaacggcaccugcaccguggugaugaccgacggcagcgccagcggcaaggccgacaccaagauccuguucaucgaggagggcaagaucgugcacaccagcacccugagcggcagcgcccagcacguggaggagugcagcugcuaccccagauaccccggcgugagaugcgugugcagagacaacuggaagggcagcaacagacccaucguggacaucaacaucaaggaccacagcaucgugagcagcuacgugugcagcggccuggugggcgacacccccagaaagaacgacagcagcagcagcagccacugccuggaccccaacaacgaggagggcggccacggcgugaagggcugggccuucgacgacggcaacgacguguggaugggcagaaccaucaacgagaccagcagacugggcuacgagaccuucaaggugaucgagggcuggagcaaccccaagagcaagcugcagaucaacagacaggugaucguggacagaggcgacagaagcggcuacagcggcaucuucagcguggagggcaagagcugcaucaacagaugcuucuacguggagcugaucagaggcagaaaggaggagaccgaggugcuguggaccagcaacagcaucgugguguucugcggcaccagcggcaccuacggcaccggcagcuggcccgacggcgccgaccugaaccugaugcccaucuga

SEQ ID NO: 185647 - RNA, 1410 nt, Artificial Sequence
  derived and/or modified CDS sequence (opt4) from neuraminidase__InfluenzaA__AIJ10814
augaaccccaaccagaagaucaucaccaucggcagcgugagccugaccaucagcaccaucugcuucuucaugcagaucgccauccugaucaccaccgugacccugcacuucaagcaguacgaguucaacagcccccccaacaaccaggugaugcugugcgagcccaccaucguggagagaaacaucaccgagaucguguaccugaccaacaccaccaucgagaaggagaucugccccaagcccgccgaguacagaaacuggagcaagccccagugcggcaucaccggcuucgcccccuucagcaaggacaacagcaucagacugagcgccggcggcgacaucugggugaccagagagcccuacgugagcugcgaccccgacaagugcuaccaguucgcccugggccagggcaccacccugaacaacgugcacagcaacaacaccgugagagacagaacccccuacagaacccugcugaugaacgagcugggcgugcccuuccaccugggcaccaagcaggugugcaucgccuggagcagcagcagcugccacgacggcaaggccuggcugcacgugugcaucaccggcgacgacaagaacgccaccgccagcuucaucuacaacggcagacugguggacagcguggugagcuggagcaaggagauccugagaacccaggagagcgagugcgugugcaucaacggcaccugcaccguggugaugaccgacggcagcgccagcggcaaggccgacaccaagauccuguucaucgaggagggcaagaucgugcacaccagcacccugagcggcagcgcccagcacguggaggagugcagcugcuaccccagauaccccggcgugagaugcgugugcagagacaacuggaagggcagcaacagacccaucguggacaucaacaucaaggaccacagcaucgugagcagcuacgugugcagcggccuggugggcgacacccccagaaagaacgacagcagcagcagcagccacugccuggaccccaacaacgaggagggcggccacggcgugaagggcugggccuucgacgacggcaacgacguguggaugggcagaaccaucaacgagaccagcagacugggcuacgagaccuucaaggugaucgagggcuggagcaaccccaagagcaagcugcagaucaacagacaggugaucguggacaagggcgacagaagcggcuacagcggcaucuucagcguggagggcaagagcugcaucaacagaugcuucuacguggagcugaucagaggcagaaaggaggagaccgaggugcuguggaccagcaacagcaucgugguguucugcggcaccagcggcaccuacggcaccggcagcuggcccgacggcgccgaccugaaccugaugcccaucuga

SEQ ID NO: 185648 - RNA, 1410 nt, Artificial Sequence
  derived and/or modified CDS sequence (opt4) from neuraminidase__InfluenzaA__AIJ10815
augaaccccaaccagaagaucaucaccaucggcagcgugagccugaccaucagcaccaucugcuucuucaugcagaucgccauccugaucaccaccgugacccugcacuucaagcaguacgaguucaacagcccccccaacaaccaggugaugcugugcgagcccaccaucaucgagagaaacaucaccgagaucguguaccugaccaacaccaccaucgagaaggagaucugccccaagcccgccgaguacagaaacuggagcaagccccagugcggcaucaccggcuucgcccccuucagcaaggacaacagcaucagacugagcgccggcggcgacaucugggugaccagagagcccuacgugagcugcgaccccgacaagugcuaccaguucgcccugggccagggcaccacccugaacaacgugcacagcaacaacaccgugagagacagaacccccuacagaacccugcugaugaacgagcugggcgugcccuuccaccugggcaccaagcaggugugcaucgccuggagcagcagcagcugccacgacggcaaggccuggcugcacgugugcaucaccggcgacgacaagaacgccaccgccagcuucaucuacaacggcagacugguggacagcguggugagcuggagcaaggagauccugagaacccaggagagcgagugcgugugcaucaacggcaccugcaccguggugaugaccgacggcagcgccagcggcaaggccgacaccaagauccuguucaucgaggagggcaagaucgugcacaccagcacccugagcggcagcgcccagcacguggaggagugcagcugcuaccccagauaccccggcgugagaugcgugugcagagacaacuggaagggcagcaacagacccaucguggacaucaacaucaaggaccacagcaucgugagcagcuacgugugcagcggccuggugggcgacacccccagaaagaacgacagcagcagcagcagccacugccuggaccccaacaacgaggagggcggccacggcgugaagggcugggccuucgacgacggcaacgacguguggaugggcagaaccaucaacgagaccagcagacugggcuacgagaccuucaaggugaucgagggcuggagcaaccccaagagcaagcugcagaucaacagacaggugaucguggacagaggcgacagaagcggcuacagcggcaucuucagcguggagggcaagagcugcaucaacagaugcuucuacguggagcugaucagaggcagaaaggaggagaacgaggugcuguggaccagcaacagcaucgugguguucugcggcaccagcggcaccuacggcaccggcagcuggcccgacggcgccgaccugaaccugaugcccaucuga

SEQ ID NO: 185649 - RNA, 1410 nt, Artificial Sequence
  derived and/or modified CDS sequence (opt4) from neuraminidase__InfluenzaA__AIJ10816
augaaccccaaccagaagaucaucaccaucggcagcgugagccugaccaucagcaccaucugcuucuucaugcagaucgccauccugaucaccaccgugacccugcacuucaagcaguacgaguucaacagcccccccaacaaccaggugaugcugugcgagcccaccaucaucgagagaaacaucaccgagaucguguaccugaccaacaccaccaucgagaaggagaucugccccaagcccgccgaguacagaaacuggagcaagccccagugcggcaucaccggcuucgcccccuucagcaaggacaacagcaucagacugagcgccggcggcgacaucugggugaccagagagcccuacgugagcugcgaccccgacaagugcuaccaguucgcccugggccagggcaccacccugaacaacgugcacagcaacaacaccgugagagacagaacccccuacagaacccugcugaugaacgagcugggcgugcccuuccaccugggcaccaagcaggugugcaucgccuggagcagcagcagcugccacgacggcaaggccuggcugcacgugugcaucaccggcgacgacaagaacgccaccgccagcuucaucuacaacggcagacugguggacagcguggugagcuggagcaaggagauccugagaacccaggagagcgagugcgugugcaucaacggcaccugcaccguggugaugaccgacggcagcgccagcggcaaggccgacaccaagauccuguucaucgaggagggcaagaucgugcacaccagcacccugagcggcagcgcccagcacguggaggagugcagcugcuaccccagauaccccggcgugagaugcgugugcagagacaacuggaagggcagcaacagacccaucguggacaucaacaucaaggaccacagcaucgugagcagcuacgugugcagcggccuggugggcgacacccccagaaagaacgacagcagcagcagcagccacugccuggaccccaacaacgaggagggcggccacggcgugaagggcugggccuucgacgacggcaacgacguguggaugggcagaaccaucaacgagaccagcagacugggcuacgagaccuucaaggugaucgagggcuggagcaaccccaagagcaagcugcagaucaacagacaggugaucguggacagaggcgacagaagcggcuacagcggcaucuucagcguggagggcaagggcugcaucaacagaugcuucuacguggagcugaucagaggcagaaaggaggagaccgaggugcuguggaccagcaacagcaucgugguguucugcggcaccagcggcaccuacggcaccggcagcuggcccgacggcgccgaccugaaccugaugcccaucuga

SEQ ID NO: 185650 - RNA, 1410 nt, Artificial Sequence; identical to SEQ ID NO: 182206
  derived and/or modified CDS sequence (opt4) from neuraminidase__InfluenzaA__AIJ10817

SEQ ID NO: 185651 - RNA, 1410 nt, Artificial Sequence; identical to SEQ ID NO: 182206
  derived and/or modified CDS sequence (opt4) from neuraminidase__InfluenzaA__AIJ10818

SEQ ID NO: 185652 - RNA, 1410 nt, Artificial Sequence
  derived and/or modified CDS sequence (opt4) from neuraminidase__InfluenzaA__AIJ10819
augaaccccaaccagaagaucaucaccaucggcagcgugagccugaccaucagcaccaucugcuucuucaugcagaucgccauccugaucaccaccguggcccugcacuucaagcaguacgaguucaacagcccccccaacaaccaggugaugcugugcgagcccaccaucaucgagagaaacaucaccgagaucguguaccugaccaacaccaccaucgagaaggagaucugccccaagcccgccgaguacagaaacuggagcaagccccagugcggcaucaccggcuucgcccccuucagcaaggacaacagcaucagacugagcgccggcggcgacaucugggugaccagagagcccuacgugagcugcgaccccgacaagugcuaccaguucgcccugggccagggcaccacccugaacaacgugcacagcaacaacaccgugagagacagaacccccuacagaacccugcugaugaacgagcugggcgugcccuuccaccugggcaccaagcaggugugcaucgccuggagcagcagcagcugccacgacggcaaggccuggcugcacgugugcaucaccggcgacgacaagaacgccaccgccagcuucaucuacaacggcagacugguggacagcguggugagcuggagcaaggagauccugagaacccaggagagcgagugcgugugcaucaacggcaccugcaccguggugaugaccgacggcagcgccagcggcaaggccaacaccaagauccuguucaucgaggagggcaagaucgugcacaccagcacccugagcggcagcgcccagcacguggaggagugcagcugcuaccccagauaccccggcgugagaugcgugugcagagacaacuggaagggcagcaacagacccaucguggacaucaacaucaaggaccacagcaucgugagcagcuacgugugcagcggccuggugggcgacacccccagaaagaacgacagcagcagcagcagccacugccuggaccccaacaacgaggagggcggccacggcgugaagggcugggccuucgacgacggcaacgacguguggaugggcagaaccaucaacgagaccagcagacugggcuacgagaccuucaaggugaucgagggcuggagcaaccccaagagcaagcugcagaucaacagacaggugaucguggacagaggcgacagaagcggcuacagcggcaucuucagcguggagggcaagagcugcaucaacagaugcuucuacguggagcugaucagaggcagaaaggaggagaccgaggugcuguggaccagcaacagcaucgugguguucugcggcaccagcggcaccuacggcaccggcagcuggcccgacggcgccgaccugaaccugaugcccaucuga

SEQ ID NO: 185653 - RNA, 1410 nt, Artificial Sequence; identical to SEQ ID NO: 182206
  derived and/or modified CDS sequence (opt4) from neuraminidase__InfluenzaA__AIJ10820

SEQ ID NO: 185654 - RNA, 1410 nt, Artificial Sequence; identical to SEQ ID NO: 182206
  derived and/or modified CDS sequence (opt4) from neuraminidase__InfluenzaA__AIJ10821

SEQ ID NO: 185655 - RNA, 1410 nt, Artificial Sequence
  derived and/or modified CDS sequence (opt4) from neuraminidase__InfluenzaA__AIJ10822
augaaccccaaccagaagaucaucaccaucggcagcgugagccugaccaucagcaccaucugcuucuucaugcagaucgccauccugaucaccaccgugacccugcacuucaagcaguacgaguucaacagcccccccaacaaccaggugaugcugugcgagcccaccaucaucgagagaaacaucaccgagaucguguaccugaccaacaccaccaucgagaaggagaucugccccaagcccgccgaguacagaaacuggagcaagccccagugcggcaucaccggcuucgcccccuucagcaaggacaacagcaucagacugagcgccggcggcgacaucugggugaccagagagcccuacgugagcugcgaccccgacaagugcuaccaguucgcccugggccagggcaccacccugaacaacgugcacagcaacaacaccgugagagacagaacccccuacagaacccugcugaugaacgagcugggcgugcccuuccaccugggcaccaagcaggugugcaucgccuggagcagcagcagcugccacgacggcaaggccuggcugcacgugugcaucaccggcgacgacaagaacgccaccgccagcuucaucuacaacggcagacugguggacagcguggugagcuggagcaaggacauccugagaacccaggagagcgagugcgugugcaucaacggcaccugcaccguggugaugaccgacggcagcgccagcggcaaggccgacaccaagauccuguucaucgaggagggcaagaucgugcacaccagcacccugagcggcagcgcccagcacguggaggagugcagcugcuaccccagauaccccggcgugagaugcgugugcagagacaacuggaagggcagcaacagacccaucguggacaucaacaucaaggaccacagcaucgugagcagcuacgugugcagcggccuggugggcgacacccccagaaagaacgacagcagcagcagcagccacugccuggaccccaacaacgaggagggcggccacggcgugaagggcugggccuucgacgacggcaacgacguguggaugggcagaaccaucaacgagaccagcagacugggcuacgagaccuucaaggugaucgagggcuggagcaaccccaagagcaagcugcagaucaacagacaggugaucguggacagaggcgacagaagcggcuacagcggcaucuucagcguggagggcaagagcugcaucaacagaugcuucuacguggagcugaucagaggcagaaaggaggagaacgaggugcuguggaccagcaacagcaucgugguguucugcggcaccagcggcaccuacggcaccggcagcuggcccgacggcgccgaccugaaccugaugcccaucuga

SEQ ID NO: 185656 - RNA, 1410 nt, Artificial Sequence
  derived and/or modified CDS sequence (opt4) from neuraminidase__InfluenzaA__AIJ10823
augaaccccaaccagaagaucaucaccaucggcagcgugagccugaccaucagcaccaucugcuucuucaugcagaucgccauccugaucaccaccgugacccugcacuucaaccaguacgaguucaacagcccccccaacaaccaggugaugcugugcgagcccaccaucaucgagagaaacaucaccgagaucguguaccugaccaccaccaccaucgagaaggagaucugccccaagcccgccgaguacagaaacuggagcaagccccagugcggcaucaccggcuucgcccccuucagcaaggacaacagcaucagacugagcgccggcggcgacaucugggugaccagagagcccuacgugagcugcgaccccgacaagugcuaccaguucgcccugggccagggcaccacccugaacaacgugcacagcaacaacaccgugagagacagaacccccuucagaacccugcugaugaacgagcugggcgugcccuuccaccugggcaccaagcaggugugcaucgccuggagcagcagcagcugccacgacggcaaggccuggcugcacgugugcaucaccggcgacgacaagaacgccaccgccagcuucaucuacaacggcagacugguggacagcguggugagcuggagcaaggagauccugagaacccaggagagcgagugcgugugcaucaacggcaccugcaccguggugaugaccgacggcagcgccagcggcaaggccgugaccaagauccuguucaucgaggagggcaagaucgugcacaccagcacccugagcggcagcgcccagcacguggaggagugcagcugcuaccccagauaccccggcgugagaugcgugugcagagacaacuggaagggcagcaacagacccaucguggacaucaacaucaaggaccacagcaucgugagcggcuacgugugcagcggccuggugggcgacacccccagaaagaacgacagcagcagcagcagccacugccugaaccccaacaacgaggagggcggccacggcgugaagggcugggccuucgacgacggcaacgacguguggaugggcagaaccaucaacgagaccagcagacugggcuacgagaccuucaaggugaucgagggcuggagcaaccccaagagcaagcugcagaucaacagacaggugaucguggacagaggcgacagaagcggcuacagcggcaucuucagcguggagggcaagagcugcaucaacagaugcuucuacguggagcugaucagaggcagaaaggaggagaccgaggugcuguggaccagcaacagcaucgugguguucugcggcaccagcggcaccuacggcaccggcagcuggcccgacggcgccgaccugaaccugaugcccaucuga

SEQ ID NO: 185657 - RNA, 1410 nt, Artificial Sequence
  derived and/or modified CDS sequence (opt4) from neuraminidase__InfluenzaA__AIJ10824
augaaccccaaccagaagaucaucaccaucggcagcgugagccugaccaucagcaccaucugcuucuucaugcagaucgccauccugaucaccaccgugacccugcacuucaagcaguacgaguucaacagcccccccaacaaccagguggugcugugcgagcccaccaucaucgagagaaacaucaccgagaucguguaccugaccaacaccaccaucgagaaggagaucugccccaagcccgccgaguacagaaacuggagcaagccccagugcggcaucaccggcuucgcccccuucagcaaggacaacagcaucagacugagcgccggcggcgacaucugggugaccagagagcccuacgugagcugcgaccccgacaagugcuaccaguucgcccugggccagggcaccacccugaacaacgugcacagcaacaacaccgugagagacagaacccccuacagaacccugcugaugaacgagcugggcgugcccuuccaccugggcaccaagcaggugugcaucgccuggagcagcagcagcugccacgacggcaaggccuggcugcacgugugcaucaccggcgacgacaagaacgccaccgccagcuucaucuacaacggcagacugguggacagcguggugagcuggagcaaggagauccugagaacccaggagagcgagugcgugugcaucaacggcaccugcaccguggugaugaccgacggcagcgccagcggcaaggccgacaccaagauccuguucaucgaggagggcaagaucgugcacaccagcacccugagcggcagcgcccagcacguggaggagugcagcugcuaccccagauaccccggcgugagaugcgugugcagagacaacuggaagggcagcaacagacccaucguggacaucaacaucaaggaccacagcaucgugagcagcuacgugugcagcggccuggugggcgacacccccagaaagaacgacagcagcagcagcagccacugccuggaccccaacaacgaggagggcggccacggcgugaagggcugggccuucgacgacggcaacgacguguggaugggcagaaccaucaacgagaccagcagacugggcuacgagaccuucaaggugaucgagggcuggagcaaccccaagagcaagcugcagaucaacagacaggugaucguggacagaggcgacagaagcggcuacagcggcaucuucagcguggagggcaagagcugcaucaacagaugcuucuacguggagcugaucagaggcagaaaggaggagaccgaggugcuguggaccagcaacagcaucgugguguucugcggcaccagcggcaccuacggcaccggcagcuggcccgacggcgccgaccugaaccugaugcccaucuga

SEQ ID NO: 185658 - RNA, 1410 nt, Artificial Sequence
  derived and/or modified CDS sequence (opt4) from neuraminidase__InfluenzaA__AIJ10827
augaaccccaaccagaagaucaucaccaucggcagcgugagccugaccaucagcaccaucugcuucuucaugcagaucgccauccugaucaccaccgugacccugcacuucaagcaguacgaguucaacagcccccccaacaaccaggugaugcugugcgagcccaccaucaucgagagaaacaucaccgagaucguguaccugaccaacaccaccaucgagaaggagaucugccccaagcccgccgaguacagaaacuggagcaagccccagugcggcaucaccggcuucgcccccuucagcaaggacaacagcaucagacugagcgccggcggcgacaucugggugaccagagagcccuacgugagcugcgaccccgacaagugcuaccaguucgcccugggccagggcaccacccugaacaacgugcacagcaacaacaccgugagagacagaacccccuacagaacccugcugaugaacgagcugggcgugcccuuccaccugggcaccaagcaggugugcaucgccuggagcagcagcagcugccacgacggcaaggccuggcugcacgugugcaucaccggcgacgacaagaacgccaccgccagcuucaucuacaacggcagacugguggacagcguggugagcuggagcaaggacauccugagaacccaggagagcgagugcgugugcaucaacggcaccugcaccguggugaugaccgacggcagcgccagcggcaaggccgacaccaagauccuguucaucgaggagggcaagaucgugcacaccagcacccugagcggcagcgcccagcacguggaggagugcagcugcuaccccagauaccccggcgugagaugcgugugcagagacaacuggaagggcagcaacagacccaucguggacaucaacaucaaggaccacagcaucgugagcagcuacgugugcagcggccuggugggcgacacccccagaaagaacgacagcagcagcagcagccacugccuggaccccaacaacgaggagggcggccacggcgugaagggcugggccuucgacgacggcaacgacguguggaugggcagaaccaucaacgagaccagcagacugggcuacgagaccuucaaggugaucgagggcuggagcaaccccaagagcaagcugcagaucaacagacaggugaucguggacagaggcgacagaagcggcuacagcggcaucuucagcaucgagggcaagagcugcaucaacagaugcuucuacguggagcugaucagaggcagaaaggaggagaccgaggugcuguggaccagcaacagcaucgugguguucugcggcaccagcggcaccuacggcaccggcagcuggcccgacggcgccgaccugaaccugaugcccaucuga

SEQ ID NO: 185659 - RNA, 1410 nt, Artificial Sequence
  derived and/or modified CDS sequence (opt4) from neuraminidase__InfluenzaA__AIJ10828
augaaccccaaccagaagaucaucaccaucggcagcgugagccugaccaucagcaccaucugcuucuucaugcagaucgccauccugaucaccaccgugacccugcacuucaagcaguacgaguucaacagcccccccaacaaccaggugaugcugugcgagcccaccaucaucgagagaaacaucaccgagaucguguaccugaccaacaccaccaucgagaaggagaucugccccaagcccgccgaguacagaaacuggagcaagccccagugcggcaucaccggcuucgcccccuucagcaaggacaacagcaucagacugagcgccggcggcgacaucugggugaccagagagcccuacgugagcugcgaccccgacaagugcuaccaguucgcccugggccagggcaccacccugaacaacgugcacagcaacaacaccgugagagacagaacccccuacagaacccugcugaugaacgagcugggcgugcccuuccaccugggcaccaagcaggugugcaucgccuggagcagcagcagcugccacgacggcaaggccuggcugcacgugugcaucaccggcgacgacaagaacgccaccgccagcuucaucuacaacggcagacugguggacagcguggugagcuggagcaaggacauccugagaacccaggagagcgagugcgugugcaucaacggcaccugcaccguggugaugaccgacggcagcgccagcggcaaggccgacaccaagauccuguucaucgaggagggcaagaucgugcacaccagcacccugagcggcagcgcccagcacguggaggagugcagcugcuaccccagauaccccggcgugagaugcgugugcagagacaacuggaagggcagcaacagacccaucguggacaucaacaucaaggaccacagcaucgugagcagcuacgugugcagcggccuggugggcgacacccccagaaagaacgacagcagcagcagcagccacugccuggaccccaacaacgaggagggcggccacggcgugaagggcugggccuucgacgacggcaacgacguguggaugggcagaaccaucaacgagaccagcagacugggcuacgagaccuucaaggugaucgagggcuggagcaaccccaagagcaagcugcagaucaacagacaggugaucguggacagaggcgacagaagcggcuacagcggcaucuucagcaucgagggcaagagcugcaucaacagaugcuucuacguggagcugaucagaggcagaaaggaggagaccgaggugguguggaccagcaacagcaucgugguguucugcggcaccagcggcaccuacggcaccggcagcuggcccgacggcgccgaccugaaccugaugcccaucuga

SEQ ID NO: 185660 - RNA, 1410 nt, Artificial Sequence
  derived and/or modified CDS sequence (opt4) from neuraminidase__InfluenzaA__AIJ10829
augaaccccaaccagaagaucaucaccaucggcagcgugagccugaccaucagcaccaucugcuucuucaugcagaucgccauccugaucaccaccgugacccugcacuucaagcaguacgaguucaacagcccccccaacaaccaggugaugcugugcgagcccaccaucaucgagagaaacaucaccgagaucguguaccugaccaacaccaccaucgagaaggagaucugccccaagcccgccgaguacagaaacuggagcaagccccagugcggcaucaccggcuucgcccccuucagcaaggacaacagcaucagacugagcgccggcggcgacaucugggugaccagagagcccuacgugagcugcgaccccgacaacugcuaccaguucgcccugggccagggcaccacccugaacaacgugcacagcaacaacaccgugagagacagaacccccuacagaacccugcugaugaacgagcugggcgugcccuuccaccugggcaccaagcaggugugcaucgccuggagcagcagcagcugccacgacggcaaggccuggcugcacgugugcaucaccggcgacgacaagaacgccaccgccagcuucaucuacaacggcagacugguggacagcguggugagcuggagcaaggacauccugagaacccaggagagcgagugcgugugcaucaacggcaccugcaccguggugaugaccgacggcagcgccagcggcaaggccgacaccaagauccuguucaucgaggagggcaagaucgugcacaccagcacccugagcggcagcgcccagcacguggaggagugcagcugcuaccccagauaccccggcgugagaugcgugugcagagacaacuggaagggcagcaacagacccaucguggacaucaacaucaaggaccacagcaucgugagcagcuacgugugcagcggccuggugggcgacacccccagaaagaacgacagcagcagcagcagccacugccuggaccccaacaacgaggagggcgaccacggcgugaagggcugggccuucgacgacggcaacgacguguggaugggcagaaccaucaacgagaccagcagacugggcuacgagaccuucaaggugaucgagggcuggagcaaccccaagagcaagcugcagaucaacagacaggugaucguggacagaggcgacagaagcggcuacagcggcaucuucagcaucgagggcaagagcugcaucaacagaugcuucuacguggagcugaucagaggcagaaaggaggagaccgaggugcuguggaccagcaacagcaucgugguguucugcggcaccagcggcaccuacggcaccggcagcuggcccgacggcgccgaccugaaccugaugcccaucuga

SEQ ID NO: 185661 - RNA, 1410 nt, Artificial Sequence
  derived and/or modified CDS sequence (opt4) from neuraminidase__InfluenzaA__AIJ10830
augaaccccaaccagaagaucaucaccaucggcagcgugagccugaccaucagcaccaucugcuucuucaugcagaucgccauccugaucaccaccgugacccugcacuucaagcaguacgaguucaacagcccccccaacaaccaggugaugcugugcgagcccaccaucaucgagagaaacaucaccgagaucguguaccugaccaacaccaccaucgagaaggagaucugccccaagcccgccgaguacaagaacuggagcaagccccagugcggcaucaccggcuucgcccccuucagcaaggacaacagcaucagacugagcgccggcggcgacaucugggugaccagagagcccuacgugagcugcgaccccgacaagugcuaccaguucgcccugggccagggcaccacccugaacaacgugcacagcaacaacaccgugagagacagaacccccuacagaacccugcugaugaacgagcugggcgugcccuuccaccugggcaccaagcaggugugcaucgccuggagcagcagcagcugccacgacggcaaggccuggcugcacgugugcaucaccggcgacgacaagaacgccaccgccagcuucaucuacaacggcagacugguggacagcguggugagcuggagcaaggacauccugagaacccaggagagcgagugcgugugcaucaacggcaccugcaccguggugaugaccgacggcagcgccagcggcaaggccgacaccaagauccuguucaucgaggagggcaagaucgugcacaccagcacccugagcggcagcgcccagcacguggaggagugcagcugcuaccccagauaccccggcgugagaugcgugugcagagacaacuggaagggcagcaacagacccaucguggacaucaacaucaaggaccacagcaucgugagcagcuacgugugcagcggccuggugggcgacacccccagaaagaacgacagcagcagcagcagccacugccuggaccccaacaacgaggagggcggccacggcgugaagggcugggccuucgacgacggcaacgacguguggaugggcagaaccaucaacgagaccagcagacugggcuacgagaccuucaaggugaucgagggcuggagcaaccccaagagcaagcugcagaucaacagacaggugaucguggacagaggcgacagaagcggcuacagcggcaucuucagcaucgagggcaagagcugcaucaacagaugcuucuacguggagcugaucagaggcagaaaggaggagaccgaggugcuguggaccagcaacagcaucgugguguucugcggcaccagcggcaccuacggcaccggcagcuggcccgacggcgccgaccugaaccugaugcccaucuga

SEQ ID NO: 185662 - RNA, 1410 nt, Artificial Sequence; identical to SEQ ID NO: 185658
  derived and/or modified CDS sequence (opt4) from neuraminidase__InfluenzaA__AIJ10831

SEQ ID NO: 185663 - RNA, 1410 nt, Artificial Sequence; identical to SEQ ID NO: 185658
  derived and/or modified CDS sequence (opt4) from neuraminidase__InfluenzaA__AIJ10832

SEQ ID NO: 185664 - RNA, 1410 nt, Artificial Sequence
  derived and/or modified CDS sequence (opt4) from neuraminidase__InfluenzaA__AIJ10834
augaaccccaaccagaagaucaucaccaucggcagcgugagccugaccaucagcaccaucugcuucuucaugcagaucgccauccugaucaccaccgugacccugcacuucaagcaguacgaguucaacagcccccccaacaaccaggugaugcugugcgagcccaccaucaucgagagaaacaucaccgagaucguguaccugaccaacaccaccaucgagaaggagaucugccccaagcccgccgaguacagaaacuggagcaagccccagugcggcaucaccggcuucgcccccuucagcaaggacaacagcaucagacugagcgccggcggcgacaucugggugaccagagagcccuacgugagcugcgaccccgacaagugcuaccaguucgcccugggccagggcaccacccugaacaacgugcacagcaacaacaccgugagagacagaacccccuacagaacccugcugaugaacgagcugggcgugcccuuccaccugggcaccaagcaggugugcaucgccuggagcagcagcagcugccacgacggcaaggccuggcugcacgugugcaucaccggcgacgacaagaacgccaccgccagcuucaucuacaacggcagacugguggacagcguggugagcuggagcaaggacauccugagaacccaggagagcgagugcgugugcaucaacggcaccugcaccguggugaugaccgacggcagcgccagcggcaaggccgacaccaagauccuguucaucgaggagggcaagaucgugcacaccagcacccugagcggcagcgcccagcacguggaggagugcagcugcuaccccagauaccccggcgugagaugcgugugcagagacaacuggaagggcagcaacagacccaucguggacaucaacaucaaggaccacagcaucgugagcagcuacgugugcagcggccuggugggcgacacccccagaaagaacgacagcagcagcagcagccacugccuggaccccaacaacgaggagggcggccacggcgugaagggcugggccuucgacgacggcaacgacguguggaugggcagaaccaucaacgagaccagcagacugggcuacgagaccuucaaggugaucgagggcuggagcaaccccaagagcaagcugcagaucaacagacaggugaucguggacagaggcgacagaagcggcuacagcggcaucuucagcaucgagagcaagagcugcaucaacagaugcuucuacguggagcugaucagaggcagaaaggaggagaccgaggugcuguggaccagcaacagcaucgugguguucugcggcaccagcggcaccuacggcaccggcagcuggcccgacggcgccgaccugaaccugaugcccaucuga

SEQ ID NO: 185665 - RNA, 1410 nt, Artificial Sequence
  derived and/or modified CDS sequence (opt4) from neuraminidase__InfluenzaA__AIJ10835
augaaccccaaccagaagaucaucaccaucggcagcgugagccugaccaucagcaccaucugcuucuucaugcagaucgccauccugaucaccaccgugacccugcacuucaagcaguacgaguucaacagcacccccaacaaccaggugaugcugugcgagcccaccaucaucgagagaaacaucaccgagaucguguaccugaccaacaccaccaucgagaaggagaucugccccaagcccgccgaguacagaaacuggagcaagccccagugcggcaucaccggcuucgcccccuucagcaaggacaacagcaucagacugagcgccggcggcgacaucugggugaccagagagcccuacgugagcugcgaccccgacaagugcuaccaguucgcccugggccagggcaccacccugaacaacgugcacagcaacaacaccgugagagacagaacccccuacagaacccugcugaugaacgagcugggcgugcccuuccaccugggcaccaagcaggugugcaucgccuggagcagcagcagcugccacgacggcaaggccuggcugcacgugugcaucaccggcgacgacaagaacgccaccgccagcuucaucuacaacggcagacugguggacagcguggugagcuggagcaaggacauccugagaacccaggagagcgagugcgugugcaucaacggcaccugcaccguggugaugaccgacggcagcgccagcggcaaggccgacaccaagauccuguucaucgaggagggcaagaucgugcacaccagcacccugagcggcagcgcccagcacguggaggagugcagcugcuaccccagauaccccggcgugagaugcgugugcagagacaacuggaagggcagcaacagacccaucguggacaucaacaucaaggaccacagcaucgugagcagcuacgugugcagcggccuggugggcgacacccccagaaagaacgacagcagcagcagcagccacugccuggaccccaacaacgaggagggcggccacggcgugaagggcugggccuucgacgacggcaacgacguguggaugggcagaaccaucaacgagaccagcagacugggcuacgagaccuucaaggugaucgagggcuggagcaaccccaagagcaagcugcagaucaacagacaggugaucguggacagaggcgacagaagcggcuacagcggcaucuucagcaucgagggcaagagcugcaucaacagaugcuucuacguggagcugaucagaggcagaaaggaggagaccgaggugcuguggaccagcaacagcaucgugguguucugcggcaccagcggcaccuacggcaccggcagcuggcccgacggcgccgaccugaaccugaugcccaucuga

SEQ ID NO: 185666 - RNA, 1410 nt, Artificial Sequence; identical to SEQ ID NO: 185658
  derived and/or modified CDS sequence (opt4) from neuraminidase__InfluenzaA__AIJ10836

SEQ ID NO: 185667 - RNA, 1410 nt, Artificial Sequence
  derived and/or modified CDS sequence (opt4) from neuraminidase__InfluenzaA__AIJ10837
augaaccccaaccagaagaucaucaccaucggcagcgugagccugaccaucagcaccaucugcuucuucaugcagaucgccauccugaucaccaccgugacccugcacuucaagcaguacgaguucaacagcccccccaacaaccaggugaugcugugcgagcccaccaucaucgagagaaacaucaccgagaucguguaccugaccaacaccaccaucgagaaggagaucugccccaagcccgccgaguacagaaacuggagcaagccccagugcggcaucaccggcuucgcccccuucagcaaggacaacagcaucagacugagcgccggcggcgacaucugggugaccagagagcccuacgugagcugcgaccccgacaagugcuaccaguucgcccugggccagggcaccacccugaacaacgugcacagcaacaacaccgugagagacagaacccccuacagaacccugcugaugaacgagcugggcgugcccuuccaccugggcaccaagcaggugugcaucgccuggagcagcagcagcugccacgacggcaaggccuggcugcacgugugcaucaccggcgacgacaagaacgccaccgccagcuucaucuacaacggcagacugguggacagcguggugagcuggagcaaggacauccugagaacccaggagagcgagugcgugugcaucaacggcaccugcaccguggugaugaccgacggcagcgccagcggcaaggccgacaccaagauccuguucaucgaggagggcaagaucauccacaccagcacccugagcggcagcgcccagcacguggaggagugcagcugcuaccccagauaccccggcgugagaugcgugugcagagacaacuggaagggcagcaacagacccaucguggacaucaacaucaaggaccacagcaucgugagcagcuacgugugcagcggccuggugggcgacacccccagaaagaacgacagcagcagcagcagccacugccuggaccccaacaacgaggagggcggccacggcgugaagggcugggccuucgacgacggcaacgacguguggaugggcagaaccaucaacgagaccagcagacugggcuacgagaccuucaaggugaucgagggcuggagcaaccccaagagcaagcugcagaucaacagacaggugaucguggacagaggcgacagaagcggcuacagcggcaucuucagcaucgagggcaagagcugcaucaacagaugcuucuacguggagcugaucagaggcagaaaggaggagaccgaggugcuguggaccagcaacagcaucgugguguucugcggcaccagcggcaccuacggcaccggcagcuggcccgacggcgccgaccugaaccugaugcccaucuga

SEQ ID NO: 185668 - RNA, 1410 nt, Artificial Sequence; identical to SEQ ID NO: 185658
  derived and/or modified CDS sequence (opt4) from neuraminidase__InfluenzaA__AIJ10838

SEQ ID NO: 185669 - RNA, 1410 nt, Artificial Sequence
  derived and/or modified CDS sequence (opt4) from neuraminidase__InfluenzaA__AIJ10841
augaaccccaaccagaagaucaucaccaucggcagcgugagccugaccaucagcaccaucugcuucuucaugcagaucgccauccugaucaccaccgugacccugcacuucaagcaguacgaguucaacagcccccccaacaaccaggugaugcugugcgagcccaccaucaucgagagaaacaucaccgagaucguguaccugaccaacaccaccaucgagaaggagaucugccccaagcccgccgaguacagaaacuggagcaagccccagugcggcaucaccggcuucgcccccuucagcaaggacaacagcaucagacugagcgccggcggcgacaucugggugaccagagagcccuacgugagcugcgaccccgacaagugcuaccaguucgcccugggccagggcaccacccugaacaacgugcacagcaacaacaccgugagagacagaacccccuacagaacccugcugaugaacgagcugggcgugcccuuccaccugggcaccaagcaggugugcaucgccuggagcagcagcagcugccacgacggcaaggccuggcugcacgugugcaucaccggcgacgacaagaacgccaccgccagcuucaucuacaacggcagacugguggacagcguggugagcuggagcaaggacauccugagaacccaggagagcgagugcgugugcaucaacggcaccugcaccguggugaugaccgacggcagcgccagcggcgaggccgacaccaagauccuguucaucgaggagggcaagaucgugcacaccagcacccugagcggcagcgcccagcacguggaggagugcagcugcuaccccagauaccccggcgugagaugcgugugcagagacaacuggaagggcagcaacagacccaucguggacaucaacaucaaggaccacagcaucgugagcagcuacgugugcagcggccuggugggcgacacccccagaaagaacgacagcagcagcagcagccacugccuggaccccaacaacgaggagggcggccacggcgugaagggcugggccuucgacgacggcaacgacguguggaugggcagaaccaucaacgagaccagcagacugggcuacgagaccuucaaggugaucgagggcuggagcaaccccaagagcaagcugcagaucaacagacaggugaucguggacagaggcgacagaagcggcuacagcggcaucuucagcaucgagggcaagagcugcaucaacagaugcuucuacguggagcugaucagaggcagaaaggaggagaccgaggugcuguggaccagcaacagcaucgugguguucugcggcaccagcggcaccuacggcaccggcagcuggcccgacggcgccgaccugaaccugaugcccaucuga

SEQ ID NO: 185670 - RNA, 1410 nt, Artificial Sequence
  derived and/or modified CDS sequence (opt4) from neuraminidase__InfluenzaA__AIJ10842
augaaccccaaccagaagaucaucaccaucggcagcgugagccugaccaucagcaccaucugcuucuucaugcagaucgccauccugaucaccaccgugacccugcacuucaagcaguacgaguucaaccccccccccaacaaccaggugaugcugugcgagcccaccaucaucgagagaaacaucaccgagaucguguaccugaccaacaccaccaucgagaaggagaucugccccaagcccgccgaguacagaaacuggagcaagccccagugcggcaucaccggcuucgcccccuucagcaaggacaacagcaucagacugagcgccggcggcgacaucugggugaccagagagcccuacgugagcugcgaccccgacaagugcuaccaguucgcccugggccagggcaccacccugaacaacgugcacagcaacaacaccgugagagacagaacccccuacagaacccugcugaugaacgagcugggcgugcccuuccaccugggcaccaagcaggugugcaucgccuggagcagcagcagcugccacgacggcaaggccuggcugcacgugugcaucaccggcgacgacaagaacgccaccgccagcuucaucuacaacggcagacugguggacagcguggugagcuggagcaaggacauccugagaacccaggagagcgagugcgugugcaucaacggcaccugcaccguggugaugaccgacggcagcgccagcggcaaggccgacaccaagauccuguucaucgaggagggcaagaucgugcacaccagcacccugagcggcagcgcccagcacguggaggagugcagcugcuaccccagauaccccggcgugagaugcgugugcagagacaacuggaagggcagcaacagacccaucguggacaucaacaucaaggaccacagcaucgugagcagcuacgugugcagcggccuggugggcgacacccccagaaagaacgacagcagcagcagcagccacugccuggaccccaacaacgaggagggcggccacggcgugaagggcugggccuucgacgacggcaacgacguguggaugggcagaaccaucaacgagaccagcagacugggcuacgagaccuucaaggugaucgagggcuggagcaaccccaagagcaagcugcagaucaacagacaggugaucguggacagaggcgacagaagcggcuacagcggcaucuucagcaucgagggcaagagcugcaucaacagaugcuucuacguggagcugaucagaggcagaaaggaggagaccgaggugcuguggaccagcaacagcaucgugguguucugcggcaccagcggcaccuacggcaccggcagcuggcccgacggcgccgaccugaaccugaugcccaucuga

SEQ ID NO: 185671 - RNA, 1410 nt, Artificial Sequence; identical to SEQ ID NO: 185658
  derived and/or modified CDS sequence (opt4) from neuraminidase__InfluenzaA__AIJ10843

SEQ ID NO: 185672 - RNA, 1410 nt, Artificial Sequence
  derived and/or modified CDS sequence (opt4) from neuraminidase__InfluenzaA__AIJ10844
augaaccccaaccagaagaucaucaccaucggcagcgugagccugaccaucagcaccaucugcuucuucaugcagaucgccauccugaucaccaccgugacccugcacuucaagcaguacgaguucaacagcccccccaacaaccaggugaugcugugcgagcccaccaucaucgagagaaacaucaccgagaucguguaccugaccaacaccaccaucgagaaggagaucugccccaagcccgccgaguacagaaacuggagcaagccccagugcggcaucaccggcuucgcccccuucagcaaggacaacagcaucagacugagcgccggcggcgacaucugggugaccagagagcccuacgugagcugcgaccccgacaagugcuaccaguucgcccugggccagggcaccacccugaacaacgugcacagcaacaacaccgugagagacagaacccccuucagaacccugcugaugaacgagcugggcgugcccuuccaccugggcaccaagcaggugugcaucgccuggagcagcagcagcugccacgacggcaaggccuggcugcacgugugcaucaccggcgacgacaagaacgccaccgccagcuucaucuacaacggcagacugguggacagcguggugagcuggagcaaggagauccugagaacccaggagagcgagugcgugugcaucaacggcaccugcaccguggugaugaccgacggcagcgccagcggcaaggccgugaccaagauccuguucaucgaggagggcaagaucgugcacaccagcacccugagcggcagcgcccagcacguggaggagugcagcugcuaccccagauaccccggcgugagaugcgugugcagagacaacuggaagggcagcaacagacccaucguggacaucaacaucaaggaccacagcaucgugagcggcuacgugugcagcggccuggugggcgacacccccagaaagaacgacagcagcagcagcggccacugccuggaccccaacaacgaggagggcggccacggcgugaagggcugggccuucgacgacggcaacgacguguggaugggcagaaccaucaacgagaccagcagacugggcuacgagaccuucaaggugaucaagggcuggagcaaccccaagagcaagcugcagaucaacagacaggugaucguggacagaggcgacagaagcggcuacagcggcaucuucagcguggagggcaagagcugcaucaacagaugcuucuacguggagcugaucagaggcagaaaggaggagaccgaggugcuguggaccagcaacagcaucgugguguucugcggcaccagcggcaccuacggcaccggcagcuggcccgacggcgccgaccugaaccugaugcccaucuga

SEQ ID NO: 185673 - RNA, 1410 nt, Artificial Sequence
  derived and/or modified CDS sequence (opt4) from neuraminidase__InfluenzaA__AIJ10845
augaaccccaaccagaagaucaucaccaucggcagcgugagccugaccaucagcaccaucugcuucuucaugcagaucgccauccugaucaccaccgugacccugcacuucaagcaguacgaguucaacagcccccccaacaaccaggugaugcugugcgagcccaccaucaucgagagaaacaucaccgagaucguguaccugaccaacaccaucaucgagaaggagaucugccccaagcccgccgaguacagaaacuggagcaagccccagugcggcaucaccggcuucgcccccuucagcaaggacaacagcaucagacugagcgccggcggcgacaucugggugaccagagagcccuacgugagcugcgaccccgacaagugcuaccaguucgcccugggccagggcaccacccugaacaacgugcacagcaacaacaccgugagagacagaacccccuucagaacccugcugaugaacgagcugggcgugcccuuccaccugggcaccaagcaggugugcaucgccuggagcagcagcagcugccacgacggcaaggccuggcugcacgugugcaucaccggcgacgacaagaacgccaccgccagcuucaucuacaacggcagacugguggacagcguggugagcuggagcaaggagauccugagaacccaggagagcgagugcgugugcaucaacggcaccugcaccguggugaugaccgacggcagcgccagcggcaaggccgugaccaagauccuguucaucgaggagggcaagaucgugcacaccagcacccugagcggcagcgcccagcacguggaggagugcagcugcuaccccagauaccccggcgugagaugcgugugcagagacaacuggaagggcagcaacagacccaucguggacaucaacaucaaggaccacagcaucgugagcggcuacgugugcagcggccuggugggcgacacccccagaaagaacgacagcagcagcagcagccacugccuggaccccaacaacgaggagggcggccacggcgugaagggcugggccuucgacgacggcaacgacguguggaugggcagaaccaucaacgagaccagcagacugggcuacgagaccuucaaggugaucgagggcuggagcaaccccaagagcaagcugcagaucaacagacaggugaucguggacagaggcgacagaagcggcuacagcggcaucuucagcguggagggcaagagcugcaucaacagaugcuucuacguggagcugaucagaggcagaaaggaggagaccgaggugcuguggaccagcaacagcaucgugguguucugcggcaccagcggcaccuacggcaccggcagcuggcccgacggcgccgaccugaaccugaugcccaucuga

SEQ ID NO: 185674 - RNA, 1410 nt, Artificial Sequence
  derived and/or modified CDS sequence (opt4) from neuraminidase__InfluenzaA__AIJ10847
augaaccccaaccagaagaucaucaccaucggcagcgugagccugaccaucagcaccaucugcuucuucaugcagaucgccauccugaucaccaccgugacccugcacuucaagcaguacgaguucaacagcccccccaacaaccaggugaugcugugcgagcccaccaucaucgagagaaacaucaccgagaucguguaccugaccaacaccaccaucgagaaggagaucugccccaagcccgccgaguacagaaacuggagcaagccccagugcggcaucaccggcuucgcccccuucagcaaggacaacagcaucagacugagcgccggcggcgacaucugggugaccagagagcccuacgugagcugcgaccccgacaagugcuaccaguucgcccugggccagggcaccacccugaacaacgugcacagcaacaacaccgugagagacagaacccccuacagaacccugcugaugaacgagcugggcgugcccuuccaccugggcaccaagcaggugugcaucgccuggagcagcagcagcugccacgacggcaaggccuggcugcacgugugcaucaccggcgacgacaagaacgccaccgccagcuucaucuacaacggcagacugguggacagcguggugagcuggagcaaggacauccugagaacccaggagagcgagugcgugugcaucaacggcaccugcaccguggugaugaccgacggcagcgccagcggcaaggccgacaccaagauccuguucaucgaggagggcaagaucgugcacaccagcacccugagcggcagcgcccagcacguggaggagugcagcugcuaccccagauaccccggcgugagaugcgugugcagagacaacuggaagggcagcaacagacccaucguggacaucaacaucaaggaccacagcaucgugagcagcuacgugugcagcggccuggugggcgacacccccagaaagaacgacagcuucagcagcagccacugccuggaccccaacaacgaggagggcggccacggcgugaagggcugggccuucgacgacggcaacgacguguggaugggcagaaccaucaacgagaccagcagacugggcuacgagaccuucaaggugaucgagggcuggagcaaccccaagagcaagcugcagaucaacagacaggugaucguggacagaggcgacagaagcggcuacagcggcaucuucagcaucgagggcaagagcugcaucaacagaugcuucuacguggagcugaucagaggcagaaaggaggagaccgaggugcuguggaccagcaacagcaucgugguguucugcggcaccagcggcaccuacggcaccggcagcuggcccgacggcgccgaccugaaccugaugcccaucuga

SEQ ID NO: 185675 - RNA, 1410 nt, Artificial Sequence; identical to SEQ ID NO: 185658
  derived and/or modified CDS sequence (opt4) from neuraminidase__InfluenzaA__AIJ10848

SEQ ID NO: 185676 - RNA, 1410 nt, Artificial Sequence
  derived and/or modified CDS sequence (opt4) from neuraminidase__InfluenzaA__AIJ10849
augaaccccaaccagaagaucaucaccaucggcagcgugagccugaccaucagcaccaucugcuucuucaugcagaucgccauccugaucaccaccgugacccugcacuucaagcaguacgaguucaacagcccccccaacaaccaggugaugcugugcgagcccaccaucaucgagagaaacaucaccgagaucguguaccugaccaacaccaccaucgagaaggagaucugccccaagcccgccgaguacagaaacuggagcaagccccagugcggcaucaccggcuucgcccccuucagcaaggacaacagcaucagacugagcgccggcggcgacaucugggugaccagagagcccuacgugagcugcgaccccgacaagugcuaccaguucgcccugggccagggcaccacccugaacaacgugcacagcaacaacaccgugagagacagaacccccuucagaacccugcugaugaacgagcugggcgugcccuuccaccugggcaccaagcaggugugcaucgccuggagcagcagcagcugccacgacggcaaggccuggcugcacgugugcaucaccggcgacgacaagaacgccaccgccagcuucaucuacaacggcagacugguggacagcguggugagcuggagcaaggagauccugagaacccaggagagcgagugcgugugcaucaacggcaccugcaccguggugaugaccgacggcagcgccagcggcaaggccgugaccaagauccuguucaucgaggagggcaagaucgugcacaccagcacccugagcggcagcgcccagcacguggaggagugcagcugcuaccccagauaccccggcgugagaugcgugugcagagacaacuggaagggcagcaacagacccaucguggacaucaacaucaaggaccacagcaucgugagcggcuacgugugcagcggccuggugggcgacacccccagaaagaacgacagcagcagcagcagccacugccuggaccccaacaacgaggagggcggccacggcgugaagggcugggccuucgacgacggcaacgacguguggaugggcagaaccaucaacgagaccagcagacugggcuacgagaccuucaaggugaucgagggcuggagcaaccccaagagcaagcugcagaucaacagacaggugaucguggacagaggcgacagaagcggcuacagcggcaucuucagcguggagggcaagagcugcaucaacagaugcuucuacguggagcugaucagaggcagaaaggaggagaccgaggugcuguggaccagcaacagcaucgugguguucugcggcaccagcggcaccuacggcaccggcagcuggcccgacggcgccgaccugaaccugaugcccaucuga

SEQ ID NO: 185677 - RNA, 1410 nt, Artificial Sequence; identical to SEQ ID NO: 185676
  derived and/or modified CDS sequence (opt4) from neuraminidase__InfluenzaA__AIJ10851

SEQ ID NO: 185678 - RNA, 1410 nt, Artificial Sequence; identical to SEQ ID NO: 185676
  derived and/or modified CDS sequence (opt4) from neuraminidase__InfluenzaA__AIJ10852

SEQ ID NO: 185679 - RNA, 1410 nt, Artificial Sequence; identical to SEQ ID NO: 185672
  derived and/or modified CDS sequence (opt4) from neuraminidase__InfluenzaA__AIJ10853

SEQ ID NO: 185680 - RNA, 1410 nt, Artificial Sequence; identical to SEQ ID NO: 185672
  derived and/or modified CDS sequence (opt4) from neuraminidase__InfluenzaA__AIJ10854

SEQ ID NO: 185681 - RNA, 1410 nt, Artificial Sequence
  derived and/or modified CDS sequence (opt4) from neuraminidase__InfluenzaA__AIJ10855
augaaccccaaccagaagaucaucaccaucggcagcgugagccugaccaucagcaccaucugcuucuucaugcagaucgccauccugaucaccaccgugacccugcacuucaagcaguacgaguucaacagcccccccaacaaccaggugaugcugugcgagcccaccaucaucgagagaaacaucaccgagaucguguaccugaccaacaccaccaucgagaaggagaucugccccaagcccgccgaguacagaaacuggagcaagccccagugcggcaucaccggcuucgcccccuucagcaaggacaacagcaucagacugagcgccggcggcgacaucugggugaccagagagcccuacgugagcugcgaccccgacaagugcuaccaguucgcccugggccagggcaccacccugaacaacgugcacagcaacaacaccgugagagacagaacccccuucagaacccugcugaugaacgagcugggcgugcccuuccaccugggcaccaagcaggugugcaucgccuggagcagcagcagcugccacgacggcaaggccuggcugcacgugugcaucaccggcgacgacaagaacgccaccgccagcuucaucuacaacggcagacugguggacagcguggugagcuggagcaaggagauccugagaacccaggagagcgagugcgugugcaucaacggcaccugcaccguggugaugaccgacggcagcgccagcggcaaggccgugaccaagauccuguucaucgaggagggcaagaucgugcacaccagcacccugagcggcagcgcccagcacguggaggagugcagcugcuaccccagauaccccggcgugagaugcgugugcagagacaacuggaagggcagcaacagacccaucguggacaucaacaucaaggaccacagcaucgugagcggcuacgugugcagcggccuggugggcgacacccccagaaagaacgacagcagcagcagcagccacugccuggaccccaacaacgaggagggcgaccacggcgugaagggcugggccuucgacgacggcaacgacguguggaugggcagaaccaucaacgagaccagcagacugggcuacgagaccuucaaggugaucgagggcuggagcaaccccaagagcaagcugcagaucaacagacaggugaucguggacagaggcgacagaagcggcuacagcggcaucuucagcguggagggcaagagcugcaucaacagaugcuucuacguggagcugaucagaggcagaaaggaggagaccgaggugcuguggaccagcaacagcaucgugguguucugcggcaccagcggcaccuacggcaccggcagcuggcccgacggcgccgaccugaaccugaugcccaucuga

SEQ ID NO: 185682 - RNA, 1410 nt, Artificial Sequence
  derived and/or modified CDS sequence (opt4) from neuraminidase__InfluenzaA__AIJ10856
augaaccccaacaagaagaucaucaccaucggcagcgugagccugaccaucagcaccaucugcuucuucaugcagaucgccauccugaucaccaccgugacccugcacuucaagcaguacgaguucaacagcccccccaacaaccaggugaugcugugcgagcccaccaucaucgagagaaacaucaccgagaucguguaccugaccaacaccaccaucgagaaggagaucugccccaagcccgccgaguacagaaacuggagcaagccccagugcggcaucaccggcuucgcccccuucagcaaggacaacagcaucagacugagcgccggcggcgacaucugggugaccagagagcccuacgugagcugcgaccccgacaagugcuaccaguucgcccugggccagggcaccacccugaagaacgugcacagcaacaacaccgugagagacagaacccccuacagaacccugcugaugaacgagcugggcgugcccuuccaccugggcaccaagcaggugugcaucgccuggagcagcagcagcugccacgacggcaaggccuggcugcacgugugcaucaccggcgacgacaagaacgccaccgccagcuucaucuacaacggcagacugguggacagcguggugagcuggagcaaggacauccugagaacccaggagagcgagugcgugugcaucaacggcaccugcaccguggugaugaccgacggcagcgccagcggcaaggccgacaccaagauccuguucaucgaggagggcaagaucgugcacaccagcacccugagcggcagcgcccagcacguggaggagugcagcugcuaccccagauaccccggcgugagaugcgugugcagagacaacuggaagggcagcaacagacccaucguggacaucaacaucaaggaccacagcaucgugagcagcuacgugugcagcggccuggugggcgacacccccagaaagaacgacagcuucagcagcggccacugccuggaccccaacaacgaggagggcggccacggcgugaagggcugggccuucgacgacggcaacgacguguggaugggcagaaccaucaacgagaccagcagacugggcuacgagaccuucaaggugaucgagggcuggagcaaccccaagagcaagcugcagaucaacagacaggugaucguggacagaggcgacagaagcggcuacagcggcaucuucagcaucgagggcaagagcugcaucaacagaugcuucuacguggagcugaucagaggcagaaaggaggagaccgaggugcuguggaccagcaacagcaucgugguguucugcggcaccagcggcaccuacggcaccggcagcuggcccgacggcgccgaccugaaccugaugcccaucuga

SEQ ID NO: 185683 - RNA, 1410 nt, Artificial Sequence; identical to SEQ ID NO: 185658
  derived and/or modified CDS sequence (opt4) from neuraminidase__InfluenzaA__AIJ10857

SEQ ID NO: 185684 - RNA, 1410 nt, Artificial Sequence; identical to SEQ ID NO: 182206
  derived and/or modified CDS sequence (opt4) from neuraminidase__InfluenzaA__AIJ29348

SEQ ID NO: 185685 - RNA, 1410 nt, Artificial Sequence; identical to SEQ ID NO: 182206
  derived and/or modified CDS sequence (opt4) from neuraminidase__InfluenzaA__AIJ29350

SEQ ID NO: 185686 - RNA, 1410 nt, Artificial Sequence
  derived and/or modified CDS sequence (opt4) from neuraminidase__InfluenzaA__AIJ29352
augaaccccaaccagaagaucaucaccaucggcagcgugagccugaccaucagcaccaucugcuucuucaugcagaucgccauccugaucaccaccgugacccugcacuucaagcaguacgaguucaacagcccccccaacaaccaggugaugcugugcgagcccaccaucaucgagagaaacaucaccgagaucguguaccugaccaacaccaccaucgagaaggagaucugccccaagcccgccaaguacagaaacuggagcaagccccagugcggcaucaccggcuucgcccccuucagcaaggacaacagcaucagacugagcgccggcggcgacaucugggugaccagagagcccuacgugagcugcgaccccgacaagugcuaccaguucgcccugggccagggcaccacccugaacaacgugcacagcaacaacaccgugagagacagaacccccuacagaacccugcugaugaacgagcugggcgugcccuuccaccugggcaccaagcaggugugcaucgccuggagcagcagcagcugccacgacggcaaggccuggcugcacgugugcaucaccggcgacgacaagaacgccaccgccagcuucaucuacaacggcagacugguggacagcguggugagcuggagcaaggagauccugagaacccaggagagcgagugcgugugcaucaacggcaccugcaccguggugaugaccgacggcagcgccagcggcaaggccgacaccaagauccuguucaucgaggagggcaagaucgugcacaccagcacccugagcggcagcgcccagcacguggaggagugcagcugcuaccccagauaccccggcgugagaugcgugugcagagacaacuggaagggcagcaacagacccaucguggacaucaacaucaaggaccacagcaucgugagcagcuacgugugcagcggccuggugggcgacacccccagaaagaacgacagcagcagcagcagccacugccuggaccccaacaacgaggagggcggccacggcgugaagggcugggccuucgacgacggcaacgacguguggaugggcagaaccaucaacgagaccagcagacugggcuacgagaccuucaaggugaucgagggcuggagcaaccccaagagcaagcugcagaucaacagacaggugaucguggacagaggcgacagaagcggcuacagcggcaucuucagcguggagggcaagagcugcaucaacagaugcuucuacguggagcugaucagaggcagaaaggaggagaccgaggugcuguggaccagcaacagcaucgugguguucugcggcaccagcggcaccuacggcaccggcagcuggcccgacggcgccgaccugaaccugaugcccaucuga

SEQ ID NO: 185687 - RNA, 1410 nt, Artificial Sequence; identical to SEQ ID NO: 181203
  derived and/or modified CDS sequence (opt4) from neuraminidase__InfluenzaA__AIJ29354

SEQ ID NO: 185688 - RNA, 1410 nt, Artificial Sequence; identical to SEQ ID NO: 182982
  derived and/or modified CDS sequence (opt4) from neuraminidase__InfluenzaA__AIJ29356

SEQ ID NO: 185689 - RNA, 1410 nt, Artificial Sequence; identical to SEQ ID NO: 182982
  derived and/or modified CDS sequence (opt4) from neuraminidase__InfluenzaA__AIJ29358

SEQ ID NO: 185690 - RNA, 1410 nt, Artificial Sequence
  derived and/or modified CDS sequence (opt4) from neuraminidase__InfluenzaA__AIJ29360
augaaccccaaccagaagaucaucaccaucggcagcgugagccugaccaucagcaccaucugcuucuucaugcagaucgccauccugaccaccaccgugacccugcacuucaagcaguacgaguucaacagcccccccaacaaccaggugaugcugugcgagcccaccaucaucgagagaaacaucaccgagaucguguaccugaccaacaccaccaucgagaaggagaucugccccaagcccgccgaguacagaaacuggagcaagccccagugcggcaucaccggcuucgcccccuucagcaaggacaacagcaucagacugagcgccggcggcgacaucugggugaccagagagcccuacgugagcugcgaccccgacaagugcuaccaguucgcccugggccagggcaccacccugaacaacgugcacagcaacaacaccgugagagacagaacccccuacagaacccugcugaugaacgagcugggcgugcccuuccaccugggcaccaagcaggugugcaucgccuggagcagcagcagcugccacgacggcaaggccuggcugcacgugugcaucaccggcgacgacaagaacgccaccgccagcuucaucuacaacggcagacugguggacagcguggugagcuggagcaaggagauccugagaacccaggagagcgagugcgugugcaucaacggcaccugcaccguggugaugaccgacggcagcgccagcggcaaggccgacaccaagauccuguucaucgaggagggcaagaucgugcacaccagcacccugagcggcagcgcccagcacguggaggagugcagcugcuaccccagauaccccggcgugagaugcgugugcagagacaacuggaagggcagcaacagacccaucguggacaucaacaucaaggaccacagcaucgugagcagcuacgugugcagcggccuggugggcgacacccccagaaagaacgacagcagcagcagcagccacugccuggaccccaacaacgaggagggcggccacggcgugaagggcugggccuucgacgacggcaacgacguguggaugggcagaaccaucaacgagaccagcagacugggcuacgagaccuucaaggugaucgagggcuggagcaaccccaagagcaagcugcagaucaacagacaggugaucguggacagaggcgacagaagcggcuacagcggcaucuucagcguggagggcaagagcugcaucaacagaugcuucuacguggagcugaucagaggcagaaaggaggagaccgaggugcuguggaccagcaacagcaucgugguguucugcggcaccagcggcaccuacggcaccggcagcuggcccgacggcgccgaccugaaccugaugcccaucuga

SEQ ID NO: 185691 - RNA, 1410 nt, Artificial Sequence; identical to SEQ ID NO: 182206
  derived and/or modified CDS sequence (opt4) from neuraminidase__InfluenzaA__AIJ29362

SEQ ID NO: 185692 - RNA, 1410 nt, Artificial Sequence
  derived and/or modified CDS sequence (opt4) from neuraminidase__InfluenzaA__AIL93626
augaaccccaaccagaagaucaucaccaucggcagcgugugcaugaccaucggcauggccaaccugauccugcagaucggcaacaucaucagcaucuggaucagccacagcauccagcugggcaaccagagccagaucgaggccugcaaccagagcgugaucaccuacgagaacaacaccuacgugaaccagaccuacgugaacaucagcaacaccaacuucgccgccggcagaagcguggugagcgugaagcuggccggcaacagcagccugugccccgugagcggcugggccaucuacagcaaggacaacagcgugagaaucggcagcaagggcgacguguucgugaucagagagcccuucaucagcugcagcccccuggagugcagaaccuucuuccugacccagggcgcccugcugaacgacaagcacagcaacggcaccaucaaggacagaagccccuacagaacccugaugagcugccccaucggcgaggugcccagccccuacaacagcagauucgagagcguggccuggagcgccagcgccugccacgacggcaucaacuggcugaccaucggcaucagcggccccgacagcggcgccguggccgugcugaaguacaacggcaucaucaccgacaccaucaagagcuggaagaacaacauccugagaacccaggagagcgagugcgccugcgugaacggcagcugcuucaccaucaugaccgacggccccagcgacggccaggccagcuacaagaucuucagaaucgagaagggcaagaucgugaagagcguggagaugaacgcccccaacuaccacuacgaggagugcagcugcuaccccgacagcagcgagaucaccugcgugugcagagacaacuggcacggcagcaacagacccugggugagcuucaaccagaaccuggaguaccagaucggcuacaucugcagcggcguguucggcgacaaccccagacccaacgacaagaccggcagcugcggccccgugcugagcaacggcgccaacggcgugaagggcuucagcuucaaguacggcaacggcguguggaucggcagaaccaagagcaucagcagcagaaagggcuucgagaugaucugggaccccaacggcuggaccggcaccgacaacaacuucagcaucaagcaggacaucgugggcaucaacgaguggagcggcuacagcggcagcuucgugcagcaccccgagcugaccggccuggacugcaucagacccugcuucuggguggagcugaucagaggcagacccaaggagaacaccaucuggaccagcggcagcagcaucagcuucugcggcgugaacagcgacaccgugggcuggagcuggcccgacggcgccgagcugcccuucaccaucgacaaguga

SEQ ID NO: 185693 - RNA, 1410 nt, Artificial Sequence
  derived and/or modified CDS sequence (opt4) from neuraminidase__InfluenzaA__AIL93648
augaaccccaaccagaagaucaucaccaucggcagcgugagccugaccaucagcaccaucugcuucuucaugcagaucgccauccugaucaccaccgugacccugcacuucaagcaguacgaguucaacagcccccccaacaaccaggugaugcugugcgagcccaccaucaucgagagaaacaucaccgagaucguguaccugaccaacaccaccaucgagaaggagaucugccccaagcccgccgaguacagaaacuggagcaagccccagugcggcaucaccggcuucgcccccuucagcaaggacaacagcaucagacugagcgccggcggcgacaucugggugaccagagagcccuacgugagcugcgaccccgacaagugcuaccaguucgcccugggccagggcaccacccugaacaacgugcacagcaacaacaccgugagagacagaacccccuacagaacccugcugaugaacgagcugggcgugcccuuccaccugggcaccaagcaggugugcaucgccuggagcagcagcagcugccacgacggcaaggccuggcugcacgugugcaucaccggcgacgacaagaacgccaccgccagcuucaucuacaacggcagacugguggacagcguggugagcuggagcaaggagauccugagaacccaggagagcgagugcgugugcaucaacggcaccugcaccguggugaugaccgacggcagcgccagcggcaaggccgacaccaagauccuguucaucgaggagggcagaaucgugcacaccagcacccugagcggcagcgcccagcacguggaggagugcagcugcuaccccagauaccccggcgugagaugcgugugcagagacaacuggaagggcagcaacagacccaucguggacaucaacaucaaggaccacagcaucgugagcagcuacgugugcagcggccuggugggcgacacccccagaaagaacgacagcagcagcagcagccacugccuggaccccaacaacgaggagggcggccacggcgugaagggcugggccuucgacgacggcaacgacguguggaugggcagaaccaucaacgagaccagcagacugggcuacgagaccuucaaggugaucgagggcuggagcaaccccaagagcaagcugcagaucaacaagcaggugaucguggacagaggcgacagaagcggcuacagcggcaucuucagcguggagggcaagagcugcaucaacagaugcuucuacguggagcugaucagaggcagaaaggaggagaccgaggugcuguggaccagcaacagcaucgugguguucugcggcaccagcggcaccuacggcaccggcagcuggcccgacggcgccgaccugaaccugaugcccaucuga

SEQ ID NO: 185694 - RNA, 1410 nt, Artificial Sequence; identical to SEQ ID NO: 182206
  derived and/or modified CDS sequence (opt4) from neuraminidase__InfluenzaA__AIL93660

SEQ ID NO: 185695 - RNA, 1410 nt, Artificial Sequence; identical to SEQ ID NO: 182206
  derived and/or modified CDS sequence (opt4) from neuraminidase__InfluenzaA__AIL93672

SEQ ID NO: 185696 - RNA, 1410 nt, Artificial Sequence
  derived and/or modified CDS sequence (opt4) from neuraminidase__InfluenzaA__AIL93684
augaaccccaaccagaagaucaucaccaucggcagcgugugcaugaccaucggcauggccaaccugauccugcagaucggcaacaucaucagcaucuggaucagccacagcauccagcugggcaaccagagccagaucgaggccugcaaccagagcgugaucaccuacgagaacaacaccugggugaaccagaccuacgugaacaucagcaacaccaacagcgccaccggccagagcguggugagcgugaagcuggccggcaacagcagccugugccccgugagcggcugggccaucuacagcaaggacaacagcgugagaaucggcagcaagggcgacguguucgugaucagagagcccuucaucagcugcagcccccuggagugcagaaccuucuuccugacccagggcgcccugcugaacgacaagcacagcaacggcaccaucaaggacagaagccccuacagaacccugaugagcugccccaucggcgaggugcccagccccuacaacagcagauucgagagcguggccuggagcgccagcgccugccacgacggcaucaacuggcugaccaucggcaucagcggccccgacagcggcgccguggccgugcugaaguacaacggcaucaucaccgacaccaucaagagcuggaagaacaacauccugagaacccaggagagcgagugcgccugcgugaacggcagcugcuucaccaucaugaccgacggccccagcgacggccaggccagcuacaagaucuucagaaucgagaagggcaagaucgugaagagcguggagaugaacgcccccaacuaccacuacgaggagugcagcugcuaccccgacagcagcgagaucaccugcgugugcagagacaacuggcacggcagcaacagacccugggugagcuucaaccagaaccuggaguaccagaucggcuacaucugcagcggcguguucggcgacaaccccagacccaacgacaagaccggcagcugcggccccgugcugagcaacggcgccaacggcgugaagggcuucagcuucaaguacggcaacggcguguggaucggcagaaccaagagcaucagcagcagaaagggcuucgagaugaucugggaccccaacggcuggaccggcaccgacaacaacuucagcaucaagcaggacaucgugggcaucaacgaguggagcggcuacagcggcagcuucgugcagcaccccgagcugaccggccuggacugcaucagacccugcuucuggaucgagcugaucagaggcagacccaaggagaacaccaucuggaccagcggcagcagcaucagcuucugcggcgugaacagcgacaccgugggcuggagcuggcccgacggcgccgagcugcccuucaccaucgacaaguga

SEQ ID NO: 185697 - RNA, 1410 nt, Artificial Sequence
  derived and/or modified CDS sequence (opt4) from neuraminidase__InfluenzaA__AIL93719
augaaccccaaccagaagaucaucaccaucggcagcgugagccugaccaucagcaccaucugcuucuucaugcagaucgccauccugaucaccaccgugacccugcacuucaagcaguacgaguucaacagcccccccaacaaccaggugaugcugugcgagcccaccaucaucgagagaaacaucaccgagaucguguaccugaccaacaccaccaucgagaaggagaucugccccaagcccgccgaguacagaaacuggagcaagccccagugcggcaucaccggcuucgcccccuucagcaaggacaacagcaucagacugagcgccggcggcgacaucugggugaccagagagcccuacgugagcugcgaccccgacaagugcuaccaguucgcccugggccagggcaccacccugaacaacgugcacagcaacaacaccgugagagacagaacccccuacagaacccugcugaugaacgagcugggcgugcccuuccaccugggcaccaagcaggugugcaucgccuggagcagcagcagcugccacgacggcaaggccuggcugcacgugugcaucaccggcgacgacaagaacgccaccgccagcuucaucuacaacggcagacugguggacagcguggugagcuggagcaaggagauccugagaacccaggagagcgagugcgugugcaucaacggcaccugcaccguggugaugaccgacggcagcgccagcggcaaggccgacaccaagauccuguucaucgaggagggcaagaucgugcacaccagcacccugagcggcagcgcccagcacguggaggagugcagcugcuaccccagauaccccggcgugagaugcgugugcagagacaacuggaagggcagcaacagacccaucguggacaucaacaucaaggaccacagcaucgugagcagcuacgugugcagcggccuggugggcgacacccccagaaagaacgacagcagcagcagcagccacugccuggaccccaacaacgaggagggcggccacggcgugaagggcugggccuucgacgacggcaacgacguguggaugggcagaaccaucaacgagaccagcagacugggcuacgagaccuucaaggugaucgagggcuggagcaaccccaagagcaagcugcagaucaacaagcaggugaucguggacagaggcgacagaagcggcuacagcggcaucuucagcguggagggcaagagcugcaucaacagaugcuucuacguggagcugaucagaggcagaaaggaggagaccgaggugcuguggaccagcaacagcaucgugguguucugcggcaccagcggcaccuacggcaccggcagcuggcccgacggcgccgaccugaaccugaugcccaucuga

SEQ ID NO: 185698 - RNA, 1410 nt, Artificial Sequence; identical to SEQ ID NO: 185697
  derived and/or modified CDS sequence (opt4) from neuraminidase__InfluenzaA__AIL93743

SEQ ID NO: 185699 - RNA, 1410 nt, Artificial Sequence; identical to SEQ ID NO: 185697
  derived and/or modified CDS sequence (opt4) from neuraminidase__InfluenzaA__AIL93755

SEQ ID NO: 185700 - RNA, 1410 nt, Artificial Sequence; identical to SEQ ID NO: 182206
  derived and/or modified CDS sequence (opt4) from neuraminidase__InfluenzaA__AIL93767

SEQ ID NO: 185701 - RNA, 1410 nt, Artificial Sequence; identical to SEQ ID NO: 182206
  derived and/or modified CDS sequence (opt4) from neuraminidase__InfluenzaA__AIL93779

SEQ ID NO: 185702 - RNA, 1410 nt, Artificial Sequence
  derived and/or modified CDS sequence (opt4) from neuraminidase__InfluenzaA__AIL93791
augaaccccaaccagaagaucaucaccaucggcagcgugagccugaccaucagcaccaucugcuucuucaugcagaucgccauccugaucaccaccgugacccugcacuucaagcaguacaaguucaacagcccccccaacaaccaggugaugcugugcgagcccaccaucaucgagagaaacaucaccgagaucguguaccugaccaacaccaccaucgagaaggagaucugccccaagcccgccgaguacagaaacuggagcaagccccagugcggcaucaccggcuucgcccccuucagcaaggacaacagcaucagacugagcgccggcggcgacaucugggugaccagagagcccuacgugagcugcgaccccgacaagugcuaccaguucgcccugggccagggcaccacccugaacaacgugcacagcaacaacaccgugagagacagaacccccuacagaacccugcugaugaacgagcugggcgugcccuuccaccugggcaccaagcaggugugcaucgccuggagcagcagcagcugccacgacggcaaggccuggcugcacgugugcaucaccggcgacgacaagaacgccaccgccagcuucaucuacaacggcagacugguggacagcguggugagcuggagcaaggagauccugagaacccaggagagcgagugcgugugcaucaacggcaccugcaccguggugaugaccgacggcagcgccagcggcaaggccgacaccaagauccuguucaucgaggagggcaagaucgugcacaccagaacccugagcggcagcgcccagcacguggaggagugcagcugcuaccccagauaccccggcgugagaugcgugugcagagacaacuggaagggcagcaacagacccaucguggacaucaacaucaaggaccacagcaucgugagcagcuacgugugcagcggccuggugggcgacacccccagaaagaacgacagcagcagcagcagccacugccuggaccccaacaacgaggagggcggccacggcgugaagggcugggccuucgacgacggcaacgacguguggaugggcagaaccaucaacgagaccagcagacugggcuacgagaccuucaaggugaucgagggcuggagcaaccccaagagcaagcugcagaucaacaagcaggugaucguggacagaggcgacagaagcggcuacagcggcaucuucagcguggagggcaagagcugcaucaacagaugcuucuacguggagcugaucagaggcagaaaggaggagaccgaggugcuguggaccagcaacagcaucgugguguucugcggcaccagcggcaccuacggcaccggcagcuggcccgacggcgccgaccugaaccugaugcccaucuga

SEQ ID NO: 185703 - RNA, 1410 nt, Artificial Sequence; identical to SEQ ID NO: 185697
  derived and/or modified CDS sequence (opt4) from neuraminidase__InfluenzaA__AIL93803

SEQ ID NO: 185704 - RNA, 1410 nt, Artificial Sequence
  derived and/or modified CDS sequence (opt4) from neuraminidase__InfluenzaA__AIL93815
augaaccccaaccagaagaucaucaccaucggcagcgugagccugaccaucagcaccaucugcuucuucaugcagaucgccauccugaucaccaccgugacccugcacuucaagcaguacgaguucaacagcccccccaacaaccaggugaugcugugcgagcccaccaucaucgagagaaacaucaccgagaucguguaccugaccaacaccaccaucgagaaggagaucugccccaagcccgccgaguacagaaacuggagcaagccccagugcggcaucaccggcuucgcccccuucagcaaggacaacagcaucagacugagcgccggcggcgacaucugggugaccagagagcccuacgugagcugcgaccccgacaagugcuaccaguucgcccugggccagggcaccacccugaacaacgugcacagcaacaacaccgugagagacagaacccccuacagaacccugcugaugaacgagcugggcgugcccuuccaccugggcaccaagcaggugugcaucgccuggagcagcagcagcugccacgacggcaaggccuggcugcacgugugcaucaccggcgacgacaagaacgccaccgccagcuucaucuacaacggcagacugguggacagcguggugagcuggagcaaggagauccugagaacccaggagagcgagugcgugugcaucaacggcaccugcaccguggugaugaccgacggcagcgccagcggcaaggccgacaccaagauccuguucaucgaggagggcaagaucgugcacaccagcacccugagcggcagcgcccagcacguggaggagugcagcugcuaccccagauaccccggcgugagaugcgugugcagagacaacuggaagggcagcaacagacccaucguggacaucaacaucaaggaccacagcaucguguacagcuacgugugcagcggccuggugggcgacacccccagaaagaacgacagcagcagcagcagccacugccugaaccccaacaacgaggagggcggccacggcgugaagggcugggccuucgacgacggcaacgacguguggaugggcagaaccaucaacgagaccagcagacugggcuacgagaccuucaaggugaucgagggcuggagcaaccccaagagcaagcugcagaucaacagacaggugaucguggacagaggcgacagaagcggcuacagcggcaucuucagcguggagggcaagagcugcaucaacagaugcuucuacguggagcugaucagaggcagaaaggaggagaccgaggugcuguggaccagcaacagcaucgugguguucugcggcaccagcggcaccuacggcaccggcagcuggcccgacggcgccgaccugaaccugaugcccaucuga

SEQ ID NO: 185705 - RNA, 1410 nt, Artificial Sequence; identical to SEQ ID NO: 182206
  derived and/or modified CDS sequence (opt4) from neuraminidase__InfluenzaA__AIL93827

SEQ ID NO: 185706 - RNA, 1410 nt, Artificial Sequence
  derived and/or modified CDS sequence (opt4) from neuraminidase__InfluenzaA__AIL93839
augaaccccaaccagaagaucaucaccaucggcagcgugugcaugaccaucggcauggccaaccugauccugcagaucggcaacaucaucagcaucuggaucagccacagcauccagcugggcaaccagagccagaucgaggccugcaaccagagcgugaucaccuacgagaacaacaccugggugaaccagaccuacgugaacaucagcaacaccaacuucgccaccggccagagcguggugagcgugaagcuggccggcaacagcagccugugccccgugagcggcugggccaucuacagcaaggacaacagcgugagaaucggcagcaagggcgacguguucgugaucagagagcccuucaucagcugcagcccccuggagugcagaaccuucuuccugacccagggcgcccugcugaacgacaagcacagcaacggcaccaucaaggacagaagccccuacagaacccugaugagcugccccaucggcgaggugcccagccccuacaacagcagauucgagagcguggccuggagcgccagcgccugccacgacggcaucaacuggcugaccaucggcaucagcggccccgacagcggcgccguggccgugcugaaguacaacggcaucaucaccgacaccaucaagagcuggaagaacaacauccugagaacccaggagagcgagugcgccugcgugaacggcagcugcuucaccaucaugaccgacggccccagcgacggccaggccagcuacaagaucuucagaaucgagaagggcaagaucgugaagagcguggagaugaacgcccccaacuaccacuacgaggagugcagcugcuaccccgacagcagcgagaucaccugcgugugcagagacaacuggcacggcagcaacagacccugggugagcuucaaccagaaccuggaguaccagaucggcuacaucugcagcggcguguucggcgacaaccccagacccaacgacaagaccggcagcugcggccccgugagcagcaacggcgccaacggcgugaagggcuucagcuucaaguacggcaacggcguguggaucggcagaaccaagagcaucagcagcagaaagggcuucgagaugaucugggaccccaacggcuggaccggcaccgacaacaacuucagcaucaagcaggacaucgugggcaucaacgaguggagcggcuacagcggcagcuucgugcagcaccccgagcugaccggccuggacugcaucagacccugcuucuggguggagcugaucagaggcagacccaaggagaacaccaucuggaccagcggcagcagcaucagcuucugcggcgugaacagcgacaccgugggcuggagcuggcccgacggcgccgagcugcccuucaccaucgacaaguga

SEQ ID NO: 185707 - RNA, 1410 nt, Artificial Sequence
  derived and/or modified CDS sequence (opt4) from neuraminidase__InfluenzaA__AIL93850
augaaccccaaccagaagaucaucaccaucggcagcgugugcaugaccaucggcauggccaaccugauccugcagaucggcaacaucaucagcaucuggaucagccacagcauccagcugggcaaccagagccagaucgaggccugcaaccagagcgugaucaccuacgagaacaacaccugggugaaccagaccuacgugaacaucagcaacaccaacuucgccaccggccagagcguggugagcgugaagcuggccggcaacagcagccugugccccgugagcggcugggccaucuacagcaaggacaacagcgugagaaucggcagcaagggcgacguguucgugaucagagagcccuucaucagcugcagcccccuggagugcagaaccuucuuccugacccagggcgcccugcugaacgacaagcacagcaacggcaccaucaaggacagaagccccuacagaacccugaugagcugccccaucggcgaggugcccagccccuacaacagcagauucgagagcguggccuggagcgccagcgccugccacgacggcaucaacuggcugaccaucggcaucagcggccccgacagcggcgccguggccgugcugaaguacaacggcaucaucaccgacaccaucaagagcuggaagaacaacauccugagaacccaggagagcgagugcgccugcgugaacggcagcugcuucaccaucaugaccgacggccccagcgacggccaggccagcuacaagaucuucagaaucgagaagggcaagaucgugaagagcguggagaugaacgcccccaacuaccacuacgaggagugcagcugcuaccccgacagcagcgagaucaccugcgugugcagagacaacuggcacggcagcaacagacccugggugagcuucaaccagaaccuggaguaccagaucggcuacaucugcagcggcguguucggcgacaaccccagacccaacgacaagaccggcagcugcggccccgugagcagcaacggcgccaagggcgugaagggcuucagcuucaaguacggcaacggcguguggaucggcagaaccaagagcaucagcagcagaaagggcuucgagaugaucugggaccccaacggcuggaccggcaccgacaacaacuucagcaucaagcaggacaucgugggcaucaacgaguggagcggcuacagcggcagcuucgugcagcaccccgagcugaccggccuggacugcaucagacccugcuucuggguggagcugaucagaggcagacccaaggagaacaccaucuggaccagcggcagcagcaucagcuucugcggcgugaacagcgacaccgugggcuggagcuggcccgacggcgccgagcugcccuucaccaucgacaaguga

SEQ ID NO: 185708 - RNA, 1410 nt, Artificial Sequence; identical to SEQ ID NO: 185697
  derived and/or modified CDS sequence (opt4) from neuraminidase__InfluenzaA__AIL93861

SEQ ID NO: 185709 - RNA, 1410 nt, Artificial Sequence
  derived and/or modified CDS sequence (opt4) from neuraminidase__InfluenzaA__AIL93885
augaaccccaaccagaagaucaucaccaucggcagcgugagccugaccaucagcaccaucugcuucuucaugcagaucgccauccugaucaccaccgugacccugcacuucaagcaguacgaguucgacagcccccccaacaaccaggugaugcugugcgagcccaccaucaucgagagaaacaucaccgagaucguguaccugaccaacaccaccaucgagaaggagaucugccccaagcccgccgaguacagaaacuggagcaagccccagugcggcaucaccggcuucgcccccuucagcaaggacaacagcaucagacugagcgccggcggcgacaucugggugaccagagagcccuacgugagcugcgaccccgacaagugcuaccaguucgcccugggccagggcaccacccugaacaacgugcacagcaacaacaccgugagagacagaacccccuacagaacccugcugaugaacgagcugggcgugcccuuccaccugggcaccaagcaggugugcaucgccuggagcagcagcagcugccacgacggcaaggccuggcugcacgugugcaucaccggcgacgacaagaacgccaccgccagcuucaucuacaacggcagacugguggacagcguggugagcuggagcaaggagauccugagaacccaggagagcgagugcgugugcaucaacggcaccugcaccguggugaugaccgacggcagcgccagcggcaaggccgacaccaagauccuguucaucgaggagggcaagaucgugcacaccagcacccugagcggcagcgcccagcacguggaggagugcagcugcuaccccagauaccccggcgugagaugcgugugcagagacaacuggaagggcagcaacagacccaucguggacaucaacaucaaggaccacagcaucgugagcagcuacgugugcagcggccuggugggcgacacccccagaaagaacgacagcagcagcagcagccacugccuggaccccaacaacgaggagggcggccacggcgugaagggcugggccuucgacgacggcaacgacguguggaugggcagaaccaucaacgagaccagcagacugggcuacgagaccuucaaggugaucgagggcuggagcaaccccaagagcaagcugcagaucaacagacaggugaucguggacagaggcgacagaagcggcuacagcggcguguucagcguggagggcaagagcugcaucaacagaugcuucuacguggagcugaucagaggcagaaaggaggagaccgaggugcuguggaccagcaacagcaucgugguguucugcggcaccagcggcaccuacggcaccggcagcuggcccgacggcgccgaccugaaccugaugcccaucuga

SEQ ID NO: 185710 - RNA, 1410 nt, Artificial Sequence; identical to SEQ ID NO: 185697
  derived and/or modified CDS sequence (opt4) from neuraminidase__InfluenzaA__AIL93897

SEQ ID NO: 185711 - RNA, 1410 nt, Artificial Sequence
  derived and/or modified CDS sequence (opt4) from neuraminidase__InfluenzaA__AIL93909
augaaccccaaccagaagaucaucaccaucggcagcgugugcaugaccaucggcauggccaaccugauccugcagaucggcaacaucaucagcaucuggaucagccacagcauccagcugggcaaccagagccagaucgagaccugcaaccagagcgugaucaccuacgagaacaacaccugggugaaccagaccuacgugaacaucagcaacaccaacuucgccgccggccagagcguggugagcgugaagcuggccggcaacagcagccugugccccgugagcggcugggccaucuacagcaaggacaacagcaucagaaucggcagcaagggcgacguguucgugaucagagagcccuucaucagcugcagcccccuggagugcagaaccuucuuccugacccagggcgcccugcugaacgacaagcacagcaacggcaccaucaaggacagaagccccuacagaacccugaugagcugccccaucggcgaggugcccagccccuacaacagcagauucgagagcguggccuggagcgccagcgccugccacgacggcaucaacuggcugaccaucggcaucagcggccccgacagcggcgccguggccgugcugaaguacaacggcaucaucaccgacaccaucaagagcuggagaaacaacauccugagaacccaggagagcgagugcgugugcgugaacggcagcugcuucaccaucaugaccgacggccccagcgacggccaggccagcuacaagaucuucagaaucgagaagggcaagaucgugaagagcguggagaugaacgcccccaacuaccacuacgaggagugcagcugcuaccccgacagcagcgagaucaccugcgugugcagagacaacuggcacggcagcaacagacccugggugagcuucaaccagaaccuggaguaccagaucggcuacaucugcagcggcaucuucggcgacaaccccagacccaacgacaagaccggcagcugcggccccgugagcagcaacggcgccaacggcgugaagggcuucagcuucaaguacggcaacggcguguggaucggcagaaccaagagcaucagcagcagaaagggcuucgagaugaucugggaccccaacggcuggaccggcaccgacaacaacuucagcaucaagcaggacaucgugggcaucaacgaguggagcggcuacagcggcagcuucgugcagcaccccgagcugaccggccuggacugcaucagacccugcuucuggguggagcugaucagaggcagacccaaggagaacaccaucuggaccagcggcagcagcaucagcuucugcggcgugaacagcgacaccgugggcuggagcuggcccgacggcgccgagcugcccuucaccaucgacaaguga

SEQ ID NO: 185712 - RNA, 1410 nt, Artificial Sequence; identical to SEQ ID NO: 185697
  derived and/or modified CDS sequence (opt4) from neuraminidase__InfluenzaA__AIL93920

SEQ ID NO: 185713 - RNA, 1410 nt, Artificial Sequence
  derived and/or modified CDS sequence (opt4) from neuraminidase__InfluenzaA__AIL93943
augaaccccaaccagaagaucaucaccaucggcagcgugugcaugaccaucggcauggccaaccugauccugcagaucggcaacaucaucagcaucugggugagccacagcauccagcugggcaaccagagccagaucgagaccugcaaccagagcgugaucaccuacgagaacaacaccugggugaaccagaccuacgugaacaucagcaacaccaacuucgccgccggccagagcguggugagcgugaagcuggccggcaacagcagccugugccccgugagcggcugggccaucuacagcaaggacaacagcgugagaaucggcagcaagggcgacguguucgugaucagagagcccuucaucagcugcagccccagcgagugcagaaccuucuuccugacccagggcgcccugcugaacgacaagcacagcaacggcaccaucaaggacagaagccccuacagaacccugaugagcugccccaucggcgaggugcccagccccuacaacagcagauucgagagcguggccuggagcgccagcgccugccacgacggcaucaacuggcugaccaucggcaucagcggccccgacagcggcgccguggccgugcugaaguacaacggcaucaucaccgacaccaucaagagcuggagaaacaacauccugagaacccaggagagcgagugcgccugcgugaacggcagcugcuucaccaucaugaccgacggccccagcgacggccaggccagcuacaagaucuucagaaucgagaagggcaagaucgugaagagcguggagaugaacgcccccaacuaccacuacgaggagugcagcugcuaccccgacagcagcgagaucaccugcgugugcagagacaacuggcacggcagcaacagacccugggugagcuucaaccagaaccuggaguaccagaucggcuacaucugcagcggcguguucggcgacaaccccagacccaacgacaagaccggcagcugcggccccgugagcagcaacggcgccaacggcgugaagggcuucagcuucaaguacggcaacggcguguggaucggcagaaccaagagcaucagcagcagaaagggcuucgagaugaucugggaccccaacggcuggaccggcaccgacaacaacuucagcaucaagcaggacaucgugggcaucaaggaguggagcggcuacagcggcagcuucgugcagcaccccgagcugaccggccuggacugcaucagacccugcuucuggguggagcugaucagaggcagacccgaggagaacaccaucuggaccagcggcagcagcaucagcuucugcggcgugaacagcgacaccgugggcuggagcuggcccgacggcgccgagcugcccuucaccaucgacaaguga

SEQ ID NO: 185714 - RNA, 1410 nt, Artificial Sequence; identical to SEQ ID NO: 185697
  derived and/or modified CDS sequence (opt4) from neuraminidase__InfluenzaA__AIL93954

SEQ ID NO: 185715 - RNA, 1410 nt, Artificial Sequence; identical to SEQ ID NO: 185697
  derived and/or modified CDS sequence (opt4) from neuraminidase__InfluenzaA__AIL93966

SEQ ID NO: 185716 - RNA, 1410 nt, Artificial Sequence
  derived and/or modified CDS sequence (opt4) from neuraminidase__InfluenzaA__AIL93978
augaaccccaaccagaagaucaucaccaucggcagcgugagccugaccaucagcaccaucugccuguucaugcagaucgccauccugaucaccaccgugacccugcacuucaagcaguacgaguucaacagcccccccaacaaccaggugaugcugugcgagcccaccaucaucgagagaaacaucaccgagaucguguaccugaccaacaccaccaucgagaaggagaucugccccaagcccgccgaguacagaaacuggagcaagccccagugcggcaucaccggcuucgcccccuucagcaaggacaacagcaucagacugagcgccggcggcgacaucugggugaccagagagcccuacgugagcugcgaccccgacaagugcuaccaguucgcccugggccagggcaccacccugaacaacgugcacagcaacaacaccgugagagacagaacccccuacagaacccugcugaugaacgagcugggcgugcccuuccaccugggcaccaagcaggugugcaucgccuggagcagcagcagcugccacgacggcaaggccuggcugcacgugugcaucaccggcgacgacaagaacgccaccgccagcuucaucuacaacggcagacugguggacagcguggugagcuggagcaaggagauccugagaacccaggagagcgagugcgugugcaucaacggcaccugcaccguggugaugaccgacggcagcgccagcggcaaggccgacaccaagauccuguucaucgaggagggcaagaucgugcacaccagcacccugagcggcagcgcccagcacguggaggagugcagcugcuaccccagauaccccggcgugagaugcgugugcagagacaacuggaagggcagcaacagacccaucguggacaucaacaucaaggaccacagcaucgugagcagcuacgugugcagcggccuggugggcgacacccccagaaagaacgacagcagcagcagcagccacugccuggaccccaacaacgaggagggcggccacggcgugaagggcugggccuucgacgacggcaacgacguguggaugggcagaaccaucaacgagaccagcagacugggcuacgagaccuucaaggugaucgagggcuggagcaaccccaagagcaagcugcagaucaacagacaggugaucguggacagaggcgacagaagcggcuacagcggcaucuucagcguggagggcaagagcugcaucaacagaugcuucuacguggagcugaucagaggcagaaaggaggagaccgaggugcuguggaccagcaacagcaucgugguguucugcggcaccagcggcaccuacggcaccggcagcuggcccgacggcgccgaccugaaccugaugcccaucuga

SEQ ID NO: 185717 - RNA, 1410 nt, Artificial Sequence; identical to SEQ ID NO: 185706
  derived and/or modified CDS sequence (opt4) from neuraminidase__InfluenzaA__AIL93990

SEQ ID NO: 185718 - RNA, 1410 nt, Artificial Sequence; identical to SEQ ID NO: 182206
  derived and/or modified CDS sequence (opt4) from neuraminidase__InfluenzaA__AIL94001

SEQ ID NO: 185719 - RNA, 1410 nt, Artificial Sequence; identical to SEQ ID NO: 185697
  derived and/or modified CDS sequence (opt4) from neuraminidase__InfluenzaA__AIL94013

SEQ ID NO: 185720 - RNA, 1410 nt, Artificial Sequence; identical to SEQ ID NO: 185697
  derived and/or modified CDS sequence (opt4) from neuraminidase__InfluenzaA__AIL94025

SEQ ID NO: 185721 - RNA, 1410 nt, Artificial Sequence; identical to SEQ ID NO: 185697
  derived and/or modified CDS sequence (opt4) from neuraminidase__InfluenzaA__AIL94037

SEQ ID NO: 185722 - RNA, 1410 nt, Artificial Sequence; identical to SEQ ID NO: 185697
  derived and/or modified CDS sequence (opt4) from neuraminidase__InfluenzaA__AIL94049

SEQ ID NO: 185723 - RNA, 1410 nt, Artificial Sequence; identical to SEQ ID NO: 185706
  derived and/or modified CDS sequence (opt4) from neuraminidase__InfluenzaA__AIL94061

SEQ ID NO: 185724 - RNA, 1410 nt, Artificial Sequence
  derived and/or modified CDS sequence (opt4) from neuraminidase__InfluenzaA__AIL94072
augaaccccaaccagaagaucaucaccaucggcagcgugugcaugaccaucggcauggccaaccugauccugcagaucggcaacaucaucagcaucuggaucagccacagcauccagcugggcaaccagagccagaucgaggccugcaaccagagcgugaucaccuacgagaacaacaccugggugaaccagaccuacgugaacaucagcaacaccaacuucgccaccggccagagcguggugagcgugaagcuggccggcaacagcagccugugccccgugagcggcugggccaucuacagcaaggacaacagcgugagaaucggcagcaagggcgacguguucgugaucagagagcccuucaucagcugcagcccccuggagugcagaaccuucuuccugacccagggcgcccugcugaacgacaagcacagcaacggcaccaucaaggacagaagccccuacagaacccugaugagcugccccaucggcgaggugcccagccccuacaacagcagauucgagagcguggccuggagcgccagcgccugccacgacggcaucaacuggcugaccaucggcaucagcggccccgacagcggcgccguggccgugcugaaguacaacggcaucaucaccgacaccaucaagagcuggaagaacaacauccugagaacccaggagagcgagugcgccugcgugaacggcagcugcuucaccaucaugaccgacggccccagcgacggccaggccagcuacaagaucuucagaaucgagaagggcaagaucgugaagagcguggagaugaacgcccccaacuaccacuacgaggagugcagcugcuaccccgacagcagcgagaucaccugcgugugcagagacaacuggcacggcagcaacagacccugggugagcuucaaccagaaccuggaguaccagaucggcuacaucugcagcggcguguucggcgacaaccccagacccaacgacaagaccggcagcugcggccccgugcugagcaacggcgccaacggcgugaagggcuucagcuucaaguacggcaacggcguguggaucggcagaaccaagagcaucagcagcagaaagggcuucgagaugaucugggaccccaacggcuggaccggcaccgacaacaacuucagcaucaagcaggacaucgugggcaucaacgaguggagcggcuacagcggcagcuucgugcagcaccccgagcugaccggccuggacugcaucagacccugcuucuggaucgagcugaucagaggcagacccaaggagaacaccaucuggaccagcggcagcagcaucagcuucugcggcgugaacagcgacaccgugggcuggagcuggcccgacggcgccgagcugcccuucaccaucgacaaguga

SEQ ID NO: 185725 - RNA, 1410 nt, Artificial Sequence; identical to SEQ ID NO: 185706
  derived and/or modified CDS sequence (opt4) from neuraminidase__InfluenzaA__AIL94083

SEQ ID NO: 185726 - RNA, 1410 nt, Artificial Sequence; identical to SEQ ID NO: 185697
  derived and/or modified CDS sequence (opt4) from neuraminidase__InfluenzaA__AIL94238

SEQ ID NO: 185727 - RNA, 1410 nt, Artificial Sequence
  derived and/or modified CDS sequence (opt4) from neuraminidase__InfluenzaA__AIL94250
augaaccccaaccagaagaucaucaccaucggcagcgugugcaugaccaucggcauggccaaccugauccugcagaucggcaacaucaucagcaucuggaucagccacagcauccagcugggcaaccagagccagaucgaggccugcaaccagagcgugaucaccuacgagaacaacaccugggugaaccagaccuacgugaacaucagcaacaccaacuucgccgccggccagagcguggugagcgugaagcuggccggcaacagcagccugugccccgugagcggcugggccaucuacagcaaggacaacagcgugagaaucggcagcaagggcgacguguucgugaucagagagcccuucaucagcugcagcccccuggagugcagaaccuucuuccugacccagggcgcccugcugaacgacaagcacagcaacggcaccaucaaggacagaagccccuacagaacccugaugagcugccccaucggcgaggugcccagccccuacaacagcagauucgagagcguggccuggagcgccagcgccugccacgacggcaucaacuggcugaccaucggcaucagcggccccgacagcggcgccguggccgugcugaaguacaacggcaucaucaccgacaccaucaagagcuggaagaacaacauccugagaacccaggagagcgagugcgccugcgugaacggcagcugcuucaccaucaugaccgacggccccaacgacggccaggccagcuacaagaucuucagaaucgagaagggcaagaucgugaagagcguggagaugaacgcccccaacuaccacuacgaggagugcagcugcuaccccgacagcagcgagaucaccugcgugugcagagacaacuggcacggcagcaacagacccugggugagcuucaaccagaaccuggaguaccagaucggcuacaucugcagcggcguguucggcgacaaccccagacccaacgacaagaccggcagcugcggccccgugagcagcaacggcgccaacggcgugaagggcuucagcuucaaguacggcaacggcguguggaucggcagaaccaagagcaucagcagcagaaagggcuucgagaugaucugggaccccaacggcuggaccggcaccgacaacaacuucagcaucaagcaggacaucgugggcaucaacgaguggagcggcuacagcggcagcuucgugcagcaccccgagcugaccggccuggacugcaucagacccugcuucuggguggagcugaucagaggcagacccaaggagaacaccaucuggaccagcggcagcagcaucagcuucugcggcgugaacagcgacaccgugggcuggagcuggcccgacggcgccgagcugcccuucaccaucgacaaguga

SEQ ID NO: 185728 - RNA, 1410 nt, Artificial Sequence; identical to SEQ ID NO: 182206
  derived and/or modified CDS sequence (opt4) from neuraminidase__InfluenzaA__AIL94261

SEQ ID NO: 185729 - RNA, 1410 nt, Artificial Sequence; identical to SEQ ID NO: 182206
  derived and/or modified CDS sequence (opt4) from neuraminidase__InfluenzaA__AIL94273

SEQ ID NO: 185730 - RNA, 1410 nt, Artificial Sequence; identical to SEQ ID NO: 182206
  derived and/or modified CDS sequence (opt4) from neuraminidase__InfluenzaA__AIL94285

SEQ ID NO: 185731 - RNA, 1410 nt, Artificial Sequence
  derived and/or modified CDS sequence (opt4) from neuraminidase__InfluenzaA__AIL94297
augaaccccaaccagaagaucaucaccaucggcagcgugagccugaccaucagcaccaucugcuucuucaugcagaucgccauccugaucaccaccgugacccugcacuucaagcaguacgaguucaacagcccccccaacaaccaggugaugcugugcgagcccaccaucaucgagagaaacaucaccgagaucguguaccugaccaacaccaccaucgagaaggagaucugccccaagcccgccgaguacagaaacuggagcaagccccagugcggcaucaccggcuucgcccccuucagcaaggacaacagcaucagacugagcgccggcggcgacaucugggugaccagagagcccuacgugagcugcgaccccgacaagugcuaccaguucgcccugggccagggcaccacccugaacaacgugcacagcaacaacaccgugagagacagaacccccuacagaacccugcugaugaacgagcugggcgugcccuuccaccugggcaccaagcaggugugcaucgccuggagcagcagcagcugccacgacggcaaggccuggcugcacgugugcaucaccggcgacgacaagaacgccaccgccagcuucaucuacaacggcagacugguggacagcguggugagcuggagcaaggagauccugagaacccaggagagcgagugcgugugcaucaacggcaccugcaccguggugaugaccgacggcagcgccagcggcaaggccgacaccaagauccuguucaucgaggagggcaagaucgugcacaccagaacccugagcggcagcgcccagcacguggaggagugcagcugcuaccccagauaccccggcgugagaugcgugugcagagacaacuggaagggcagcaacagacccaucguggacaucaacaucaaggaccacagcaucgugagcagcuacgugugcagcggccuggugggcgacacccccagaaagaacgacagcagcagcagcagccacugccuggaccccaacaacgaggagggcggccacggcgugaagggcugggccuucgacgacggcaacgacguguggaugggcagaaccaucaacgagaccagcagacugggcuacgagaccuucaaggugaucgagggcuggagcaaccccaagagcaagcugcagaucaacaagcaggugaucguggacagaggcgacagaagcggcuacagcggcaucuucagcguggagggcaagagcugcaucaacagaugcuucuacguggagcugaucagaggcagaaaggaggagaccgaggugcuguggaccagcaacagcaucgugguguucugcggcaccagcggcaccuacggcaccggcagcuggcccgacggcgccgaccugaaccugaugcccaucuga

SEQ ID NO: 185732 - RNA, 1410 nt, Artificial Sequence; identical to SEQ ID NO: 185697
  derived and/or modified CDS sequence (opt4) from neuraminidase__InfluenzaA__AIL94309

SEQ ID NO: 185733 - RNA, 1410 nt, Artificial Sequence; identical to SEQ ID NO: 185716
  derived and/or modified CDS sequence (opt4) from neuraminidase__InfluenzaA__AIL94321

SEQ ID NO: 185734 - RNA, 1410 nt, Artificial Sequence; identical to SEQ ID NO: 182206
  derived and/or modified CDS sequence (opt4) from neuraminidase__InfluenzaA__AIL94368

SEQ ID NO: 185735 - RNA, 1410 nt, Artificial Sequence
  derived and/or modified CDS sequence (opt4) from neuraminidase__InfluenzaA__AIL94380
augaaccccaaccagaagaucaucaccaucggcagcgugagccugaccaucagcaccaucugcuucuucaugcagaucgccauccugaucaccaccgugacccugcacuucaagcaguacgaguucaacagcccccccaacaaccaggugaugcugugcgagcccaccaucaucgagagaaacaucaccgagaucguguaccugaccaacaccaccaucgagaaggagaucugccccaagcccgccgaguacagaaacuggagcaagccccagugcggcaucaccggcuucgcccccuucagcaaggacaacagcaucagacugagcgccggcggcgacaucugggugaccagagagcccuacgugagcugcgaccccgacaagugcuaccaguucgcccugggccagggcaccacccugaacaacgugcacagcaacaacaccgugagagacagaacccccuacagaacccugcugaugaacgagcugggcgugcccuuccaccugggcaccaagcaggugugcaucgccuggagcagcagcagcugccacgacggcaaggccuggcugcacgugugcaucaccggcgacgacaagaacgccaccgccagcuucaucuacaacggcagacugguggacagcguggugagcuggagcaaggagauccugagaacccaggagagcgagugcgugugcaucaacggcaccugcaccguggugaugaccgacggcagcgccagcggcaaggccgacaccaagauccuguucaucgaggagggcaagaucgugcacaccagcacccugagcggcagcgcccagcacguggaggagugcagcugcuaccccagauaccccggcgugagaugcgugugcagagacaacuggaagggcagcaacagacccgugguggacaucaacaucaaggaccacagcaucgugagcagcuacgugugcagcggccuggugggcgacacccccagaaagaacgacagcagcagcagcagccacugccuggaccccaacaacgaggagggcggccacggcgugaagggcugggccuucgacgacggcaacgacguguggaugggcagaaccaucaacgagaccagcagacugggcuacgagaccuucaaggugaucgagggcuggagcaaccccaagagcaagcugcagaucaacaagcaggugaucguggacagaggcgacagaagcggcuacagcggcaucuucagcguggagggcaagagcugcaucaacagaugcuucuacguggagcugaucagaggcagaaaggaggagaccgaggugcuguggaccagcaacagcaucgugguguucugcggcaccagcggcaccuacggcaccggcagcuggcccgacggcgccgaccugaaccugaugcccaucuga

SEQ ID NO: 185736 - RNA, 1410 nt, Artificial Sequence
  derived and/or modified CDS sequence (opt4) from neuraminidase__InfluenzaA__AIL94392
augaaccccaaccagaagaucaucaccaucggcagcgugugcaugaccaucggcauggccaaccugauccugcagaucggcaacaucaucagcaucuggaucagccacagcauccagcugggcaaccagagccagaucgaggccugcaaccagagcgugaucaccuacgagaacaacaccugggugaaccagaccuacgugaacaucagcaacaccaacuucgccgccggccagagcguggugagcgugaagcuggccggcaacagcagccugugccccgugagcggcugggccaucuacagcaaggacaacagcgugagaaucggcagcaagggcgacguguucgugaucagagagcccuucaucagcugcagcccccuggagugcagaaccuucuuccugacccagggcgcccugcugaacgacaagcacagcaacggcaccaucaaggacagaagccccuacagaacccugaugagcugccccaucggcgaggugcccagccccuacaacagcagauucgagagcguggccuggagcgccagcgccugccacgacggcaucaacuggcugaccaucggcaucagcggccccgacagcggcgccguggccgugcugaaguacaacggcaucaucaccgacaccaucaagagcuggaagaacaacauccugagaacccaggagagcgagugcgccugcgugaacggcagcugcuucaccaucaugaccgacggccccagcgacggccaggccagcuacaagaucuucagaaucgagaagggcaagaucgugaagagcguggagaugaacgcccccaacuaccacuacgaggagugcagcugcuaccccgacagcagcgagaucaccugcgugugcagagacaacuggcacggcagcaacagacccugggugagcuucaaccagaaccuggaguaccagaucggcuacaucugcagcggcguguucggcgacaaccccagacccaacgacaagaccggcagcugcggccccgugagcagcaacggcgccaacggcgugaagggcuucagcuucaaguacggcaacggcguguggaucggcagaaccaagagcaucagcagcagaaagggcuucgagaugaucugggaccccaacggcuggaccggcaccgacaacaacuucagcaucaagcaggacaucgugggcaucaacgaguggagcggcuacagcggcagcuucgugcagcaccccgagcugaccggccuggacugcaucagacccugcuucuggguggagcugaucagaggcagacccaaggagaacaccaucuggaccagcggcagcagcaucagcuucugcggcgugaacagcgacaccgugggcuggagcuggcccgacggcgccgagcugcccuucaccaucgacaaguga

SEQ ID NO: 185737 - RNA, 1410 nt, Artificial Sequence
  derived and/or modified CDS sequence (opt4) from neuraminidase__InfluenzaA__AIL94403
augaaccccaaccagaagaucaucaccaucggcagcgugugcaugaccaucggcauggccaaccugauccugcagaucggcaacaucaucagcaucuggaucagccacagcauccagcugggcaaccagagccagaucgaggccugcaaccagagcgugaucaccuacgagaacaacaccugggugaaccagaccuacgugaacaucagcaacaccaacuucgccgccggccagagcguggugagcgugaagcuggccggcaacagcagccugugccccgugagcggcugggccaucuacagcaaggacaacagcgugagaaucggcagcaagggcgacguguucgugaucagagagcccuucaucagcugcagcccccuggagugcagaaccuucuuccugacccagggcgcccugcugaacgacaagcacagcaacggcaccaucaaggacagaagccccuacagaacccugaugagcugccccaucggcgaggugcccagccccuacaacagcagauucgagagcguggccuggagcgccagcgccugccacgacggcaucaacuggcugaccaucggcaucagcggccccgacagcggcgccguggccgugcugaaguacaacggcaucaucaccgacaccaucaagagcuggaagaacaacauccugagaacccaggagagcgagugcgccugcgugaacggcagcugcuucaccaucaugaccgacggccccagcgacggccaggccagcuacaagaucuucagaaucgagaagggcaagaucgugaagagcguggagaugaacgcccccaacuaccacuacgaggagugcagcugcuaccccgacagcagcgagaucaccugcgugugcagagacaacuggcacggcagcaacagacccugggugagcuucaaccagaaccuggaguaccagaucggcuacaucugcagcggcguguucggcgacaaccccagacccaacgacaagaccggcagcugcgaccccgugagcagcaacggcgccaacggcgugaagggcuucagcuucaaguacggcaacggcguguggaucggcagaaccaagagcaucagcagcagaaagggcuucgagaugaucugggaccccaacggcuggaccggcaccgacaacaacuucagcaucaagcaggacaucgugggcaucaacgaguggagcggcuacagcggcagcuucgugcagcaccccgagcugaccggccuggacugcaucagacccugcuucuggguggagcugaucagaggcagacccaaggagaacaccaucuggaccagcggcagcagcaucagcuucugcggcgugaacagcgacaccgugggcuggagcuggcccgacggcgccgagcugcccuucaccaucgacaaguga

SEQ ID NO: 185738 - RNA, 1410 nt, Artificial Sequence; identical to SEQ ID NO: 182206
  derived and/or modified CDS sequence (opt4) from neuraminidase__InfluenzaA__AIL94426

SEQ ID NO: 185739 - RNA, 1410 nt, Artificial Sequence
  derived and/or modified CDS sequence (opt4) from neuraminidase__InfluenzaA__AIL94438
augaaccccaaccagaagaucaucaccaucggcagcgugugcaugaccaucggcauggccaaccugauccugcagaucggcaacaucaucagcaucuggaucagccacagcauccagcugggcaaccagagccagaucgaggccugcaaccagagcgugaucaccuacgagaacaacaccugggugaaccagaccuacgugaacaucagcaacaccaacuucgccaccggccagagcguggugagcgugaagcuggccggcaacagcagccugugccccgugagcggcugggccaucuacagcaaggacaacagcgugagaaucggcagcaagggcgacguguucgugaucagagagcccuucaucagcugcagcccccuggagugcagaaccuucuuccugacccagggcgcccugcugaacgacaagcacagcaacggcaccaucaaggacagaagccccuacagaacccugaugagcugccccaucggcgaggugcccagccccuacaacagcagauucgagagcguggccuggagcgccagcgccugccacgacggcaucaacuggcugaccaucggcaucagcggccccgacagcggcgccguggccgugcugaaguacaacggcaucaucaccgacaccaucaagagcuggaagaacaacauccugagaacccaggagagcgagugcgccugcgugaacggcagcugcuucaccaucaugaccgacggccccagcgacggccaggccagcuacaagaucuucagaaucgagaagggcaagaucgugaagagcguggagaugaacgcccccaacuaccacuacgaggagugcagcugcuaccccgacagcagcgagaucaccugcgugugcagagacaacuggcacggcagcaacagacccugggugagcuucaaccagaaccuggaguaccagaucggcuacaucugcagcggcguguucggcgacaaccccagacccaacgacaagaccggcagcugcggccccgugagcagcaacggcgccaacggcgugaagggcuucagcuucaaguacggcaacggcguguggaucggcagaaccaagagcgugagcagcagaaagggcuucgagaugaucugggaccccaacggcuggaccggcaccgacaacaacuucagcaucaagcaggacaucgugggcaucaacgaguggagcggcuacagcggcagcuucgugcagcaccccgagcugaccggccuggacugcaucagacccugcuucuggguggagcugaucagaggcagacccaaggagaacaccaucuggaccagcggcagcagcaucagcuucugcggcgugaacagcgacaccgugggcuggagcuggcccgacggcgccgagcugcccuucaccaucgacaaguga

SEQ ID NO: 185740 - RNA, 1410 nt, Artificial Sequence
  derived and/or modified CDS sequence (opt4) from neuraminidase__InfluenzaA__AIL94449
augaaccccaaccagaagaucaucaccaucggcagcgugagccugaccaucagcaccaucugcuucuucaugcagaucgccauccugaucaccaccgugacccugcacuucaagcaguacgaguucaacagcccccccaacaaccaggugaugcugugcgagcccaccaucaucgagagaaacaucaccgagaucguguaccugaccaacaccaccaucgagaaggagaucugccccaagcccgccaaguacagaaacuggagcaagccccagugcggcaucaccggcuucgcccccuucagcaaggacaacagcaucagacugagcgccggcggcgacaucugggugaccagagagcccuacgugagcugcgaccccgacaagugcuaccaguucgcccugggccagggcaccacccugaacaacgugcacagcaacaacaccgugagagacagaacccccuacagaacccugcugaugaacgagcugggcgugcccuuccaccugggcaccaagcaggugugcaucgccuggagcagcagcagcugccacgacggcaaggccuggcugcacgugugcaucaccggcgacgacaagaacgccaccgccagcuucaucuacaacggcagacugguggacagcguggugagcuggagcaaggagauccugagaacccaggagagcgagugcgugugcaucaacggcaccugcaccguggugaugaccgacggcagcgccagcggcaaggccgacaccaagauccuguucaucgaggagggcaagaucgugcacaccagcacccugagcggcagcgcccagcacguggaggagugcagcugcuaccccagauaccccggcgugagaugcgugugcagagacaacuggaagggcagcaacagacccaucguggacaucaacaucaaggaccacagcaucguguacagcuacgugugcagcggccuggugggcgacacccccagaaagaacgacagcagcagcagcagccacugccugaaccccaacaacgaggagggcggccacggcgugaagggcugggccuucgacgacggcaacgacguguggaugggcagaaccaucaacgagaccagcagacugggcuacgagaccuucaaggugaucgagggcuggagcaaccccaagagcaagcugcagaucaacagacaggugaucguggacagaggcgacagaagcggcuacagcggcaucuucagcguggagggcaagagcugcaucaacagaugcuucuacguggagcugaucagaggcagaaaggaggagaccgaggugcuguggaccagcaacagcaucgugguguucugcggcaccagcggcaccuacggcaccggcagcuggcccgacggcgccgaccugaaccugaugcccaucuga

SEQ ID NO: 185741 - RNA, 1410 nt, Artificial Sequence; identical to SEQ ID NO: 185735
  derived and/or modified CDS sequence (opt4) from neuraminidase__InfluenzaA__AIL94461

SEQ ID NO: 185742 - RNA, 1410 nt, Artificial Sequence
  derived and/or modified CDS sequence (opt4) from neuraminidase__InfluenzaA__AIL94473
augaaccccaaccagaagaucaucaccaucggcagcgugugcaugaccaucggcauggccaaccugauccugcagaucggcaacaucaucagcaucugggugggccacagcauccagcugggcaaccagagccagaucgagaccugcaaccagagcgugaucaccuacgagaacaacaccugggugaaccagaccuacgugaacaucagcaacaccaacuucgccgccggccagagcguggugcccgugaagcuggccggcaacagcagccugugccccgugagcggcugggccaucuacagcaaggacaacagcgugagaaucggcagcaagggcgacguguucgugaucagagagcccuucaucagcugcagcccccuggagugcagaaccuucuuccugacccagggcgcccugcugaacgacaagcacagcaacggcaccaucaaggacagaagccccuacagaacccugaugagcugccccaucggcgaggugcccagccccuacaacagcagauucgagagcguggccuggagcgccagcgccugccacgacggcaucaacuggcugaccaucggcaucagcggccccgacagcggcgccguggccgugcugaaguacaacggcaucaucaccgacaccaucaagagcuggagaaacaacauccugagaacccaggagagcgagugcgccugcgugaacggcagcugcuucaccaucaugaccgacggccccagcgacggccaggccagcuacaagaucuucagaaucgagaagggcaagaucgugaagagcguggagaugaacacccccaacuaccacuacgaggagugcagcugcuaccccgacagcagcgagaucaccugcgugugcagagacaacuggcacggcagcaacagacccugggugagcuucaaccagaaccuggaguaccagaucggcuacaucugcagcggcguguucggcgacaaccccagacccaacgacaagaccggcagcugcggccccgugagcagcaacggcgccaacggcgugaagggcuucagcuucaaguacggcaacggcguguggaucggcagaaccaagagcaucagcagcagaaagggcuucgagaugaucugggaccccaacggcuggaccggcaccgacaacaacuucagcaucaagcaggacaucgugggcaucaaggaguggagcggcuacagcggcagcuucgugcagcaccccgagcugaccggccuggacugcaucagacccugcuucuggguggagcugaucagaggcagacccgaggagaacaccaucuggaccagcggcagcagcaucagcuucugcggcgugaacagcgacaucgugggcuggagcuggcccgacggcgccgagcugcccuucaccaucgacaaguga

SEQ ID NO: 185743 - RNA, 1410 nt, Artificial Sequence; identical to SEQ ID NO: 184796
  derived and/or modified CDS sequence (opt4) from neuraminidase__InfluenzaA__AIL94484

SEQ ID NO: 185744 - RNA, 1410 nt, Artificial Sequence; identical to SEQ ID NO: 185706
  derived and/or modified CDS sequence (opt4) from neuraminidase__InfluenzaA__AIL94507

SEQ ID NO: 185745 - RNA, 1410 nt, Artificial Sequence
  derived and/or modified CDS sequence (opt4) from neuraminidase__InfluenzaA__AIL94518
augaaccccaaccagaagaucaucaccaucggcagcgugagccugaccaucagcaccaucugcuucuucaugcagaucgccauccugaucaccaccgugacccugcacuucaagcaguacgaguucaacagcccccccaacaaccaggugaugcugugcgagcccaccaucaucgagagaaacaucaccgagaucguguaccugaccaacaccaccaucgagaaggagaucugccccaagcccgccgaguacagaaacuggagcaagccccagugcggcaucaccggcuucgcccccuucagcaaggacaacagcaucagacugagcgccggcggcgacaucugggugaccagagagcccuacgugagcugcgaccccgacaagugcuaccaguucgcccugggccagggcaccacccugaacaacgugcacagcaacaacaccgugagagacagaacccccuacagaacccugcugaugaacgagcugggcgugcccuuccaccugggcaccaagcaggugugcaucgccuggagcagcagcagcugccacgacggcaaggccuggcugcacgugugcaucaccggcgacgacaagaacgccaccgccagcuucaucuacaacggcagacugguggacagcguggugagcuggagcaaggagauccugagaacccaggagagcgagugcgugugcaucaacggcaccugcaccguggugaugaccgacggcagcgccagcggcaaggccgacaccaagauccuguucaucgaggagggcaagaucgugcacaccagcacccugagcggcagcgcccagcacguggaggagugcagcugcuaccccagauaccccggcgugagaugcgugugcagagacaacuggaagggcagcaacagacccaucguggacaucaacaucaaggaccacagcaucgugagcagcuacgugugcagcggccuggugggcgacacccccagaaagaacgacagcagcagcagcagccacugccuggaccccaacaacgaggagggcggccacggcgugaagggcugggccuucgacgacggcaacgacguguggaugggcagaaccaucaacgagaccagcagacugggcuacgagaccuucaaggugaucgagggcuggagcaaccccaagagcaagcugcagaucaacaagcaggugaucguggacagaggcgacagaagcggcuacagcggcaucuucagcguggagggcaagagcugcaucaacagaugcuucuacguggagcugaucagaggcagaaaggaggagaccgaggugcuguggaccagcaacagcaucgugguguucugcggcaccagcggcaccuacggcaccggcagcuggcccgacggcgccgaccugagccugaugcccaucuga

SEQ ID NO: 185746 - RNA, 1410 nt, Artificial Sequence
  derived and/or modified CDS sequence (opt4) from neuraminidase__InfluenzaA__AIL94530
augaaccccaaccagaagaucaucaccaucggcagcgugagccugaccaucagcaccaucugcuucuucaugcagaucgccauccugaucaccaccgugacccugcacuucaagcaguacgaguucaacagcccccccaacaaccaggugaugcugugcgagcccaccaucaucgagagaaacaucaccgagaucguguaccugaccaacaccaccaucgagaaggagaucugccccaagcccgccgaguacagaaacuggagcaagccccagugcggcaucaccggcuucgcccccuucagcaaggacaacagcaucagacugagcgccggcggcgacaucugggugaccagagagcccuacgugagcugcgaccccgacaagugcuaccaguucgcccugggccagggcaccacccugaacaacgugcacagcaacaacaccgugagagacagaacccccuacagaacccugcugaugaacgagcugggcgugcccuuccaccugggcaccaagcaggugugcaucgccuggagcagcagcagcugccacgacggcaaggccuggcugcacgugugcaucaccggcgacgacaagaacgccaccgccagcuucaucuacaacggcagacugguggacagcguggugagcuggagcaaggagauccugagaacccaggagagcgagugcgugugcaucaacggcaccugcaccguggugaugaccgacggcagcgccagcggcaaggccgacaccaagauccuguucaucgaggagggcaagaucgugcacaccagcacccugagcggcagcgcccagcacguggaggagugcagcugcuaccccagauaccccggcgugagaugcgugugcagagacaacuggaagggcagcaacagacccaucguggacaucaacaucaaggaccacagcaucgugagcagcuacgugugcagcggccuggugggcgacacccccagaaagaacgacagcagcagcagcagccacugccugaaccccaacaacgaggagggcggccacggcgugaagggcugggccuucgacgacggcaacgacguguggaugggcagaaccaucaacgagaccagcagacugggcuacgagaccuucaaggugaucgagggcuggagcaaccccaagagcaagcugcagaucaacagacaggugaucguggacagaggcgacagaagcggcuacagcggcaucuucagcguggagggcaagagcugcaucaacagaugcuucuacguggagcugaucagaggcagaaaggaggagaccgaggugcuguggaccagcaacagcaucgugguguucugcggcaccagcggcaccuacggcaccggcagcuggcccgacggcgccgaccugaaccugaugcccaucuga

SEQ ID NO: 185747 - RNA, 1410 nt, Artificial Sequence; identical to SEQ ID NO: 185736
  derived and/or modified CDS sequence (opt4) from neuraminidase__InfluenzaA__AIL94542

SEQ ID NO: 185748 - RNA, 1410 nt, Artificial Sequence; identical to SEQ ID NO: 185706
  derived and/or modified CDS sequence (opt4) from neuraminidase__InfluenzaA__AIL94553

SEQ ID NO: 185749 - RNA, 1410 nt, Artificial Sequence; identical to SEQ ID NO: 185697
  derived and/or modified CDS sequence (opt4) from neuraminidase__InfluenzaA__AIL94564

SEQ ID NO: 185750 - RNA, 1410 nt, Artificial Sequence; identical to SEQ ID NO: 185706
  derived and/or modified CDS sequence (opt4) from neuraminidase__InfluenzaA__AIL94576

SEQ ID NO: 185751 - RNA, 1410 nt, Artificial Sequence
  derived and/or modified CDS sequence (opt4) from neuraminidase__InfluenzaA__AIL94587
augaaccccaaccagaagaucaucaccaucggcagcgugugcaugaccaucggcauggccaaccugauccugcagaucggcaacaucaucagcaucuggaucagccacagcauccagcugggcaaccagagccagaucgaggccugcaaccagagcgugaucaccuacgagaacaacaccugggugaaccagaccuacgugaacaucagcaacaccaacuucgccgccggccagagcguggugagcgugaagcuggccggcaacagcagccugugccccgugagcggcugggccaucuacagcaaggacaacagcgugagaaucggcagcaagggcgacguguucgugaucagagagcccuucaucagcugcagcccccuggagugcagaaccuucuuccugacccagggcgcccugcugaacgacaagcacagcaacggcaccaucaaggacagaagccccuacagaacccugaugagcugccccaucggcgaggugcccagccccuacaacagcagauucgagagcguggccuggagcgccagcgccugccacgacggcaucaacuggcugaccaucggcaucagcggccccgacagcggcgccguggccgugcugaaguacaacggcaucaucaccgacaccaucaagagcuggaagaacaacauccugagaacccaggagagcgagugcgccugcgugaacggcagcugcuucaccaucaugaccgacggccccagcgacggccaggccagcuacaagaucuucagaaucgagaagggcaagaucgugaagagcguggagauggacgcccccaacuaccacuacgaggagugcagcugcuaccccgacagcagcgagaucaccugcgugugcagagacaacuggcacggcagcaacagacccugggugagcuucaaccagaaccuggaguaccagaucggcuacaucugcagcggcguguucggcgacaaccccagacccaacgacaagaccggcagcugcggccccgugagcagcaacggcgccaacggcgugaagggcuucagcuucaaguacggcaacggcguguggaucggcagaaccaagagcaucagcagcagaaagggcuucgagaugaucugggaccccaacggcuggaacggcaccgacaacaacuucagcaucaagcaggacaucgugggcaucaacgaguggagcggcuacagcggcagcuucgugcagcaccccgagcugaccggccuggacugcaucagacccugcuucuggguggagcugaucagaggcagacccaaggagaacaccaucuggaccggcggcagcagcaucagcuucugcggcgugaacagcgacaccgugggcuggagcuggcccgacggcgccgagcugcccuucaccaucgacaaguga

SEQ ID NO: 185752 - RNA, 1410 nt, Artificial Sequence; identical to SEQ ID NO: 185736
  derived and/or modified CDS sequence (opt4) from neuraminidase__InfluenzaA__AIL94598

SEQ ID NO: 185753 - RNA, 1410 nt, Artificial Sequence
  derived and/or modified CDS sequence (opt4) from neuraminidase__InfluenzaA__AIL94609
augaaccccaaccagaagaucaucaccaucggcagcgugagccugaccaucagcaccaucugccuguucaugcagaucgccauccugaucaccaccgugacccugcacuucaagcaguacgaguucaacagcccccccaacaaccaggugaugcugugcgagcccaccaucaucgagagaaacaucaccgagaucguguaccugaccaacaccaccaucgagaaggagaucugccccaagcccgccgaguacagaaacuggagcaagccccagugcggcaucaccggcuucgcccccuucagcaaggacaacagcaucagacugagcgccggcggcgacaucugggugaccagagagcccuacgugagcugcgaccccgacaagugcuaccaguucgcccugggccagggcaccacccugaacaacgugcacagcaacaacaccgugagagacagaacccccuacagaacccugcugaugagcgagcugggcgugcccuuccaccugggcaccaagcaggugugcaucgccuggagcagcagcagcugccacgacggcaaggccuggcugcacgugugcaucaccggcgacgacaagaacgccaccgccagcuucaucuacaacggcagacugguggacagcguggugagcuggagcaaggagauccugagaacccaggagagcgagugcgugugcaucaacggcaccugcaccguggugaugaccgacggcagcgccagcggcaaggccgacaccaagauccuguucaucgaggagggcaagaucgugcacaccagcacccugagcggcagcgcccagcacguggaggagugcagcugcuacccccuguaccccggcgugagaugcgugugcagagacaacuggaagggcagcaacagacccaucguggacaucaacaucaaggaccacagcaucgugagcagcuacgugugcagcggccuggugggcgacacccccagaaagaacgacagcagcagcagcagccacugccuggaccccaacaacgaggagggcggccacggcgugaagggcugggccuucgacgacggcaacgacguguggaugggcagaaccaucaacgagaccagcagacugggcuacgagaccuucaaggugaucgagggcuggagcaaccccaagagcaagcugcagaucaacagacaggugaucguggacagaggcgacagaagcggcuacagcggcaucuucagcguggagggcaagagcugcaucaacagaugcuucuacguggagcugaucagaggcagaaaggaggagaccgaggugcuguggaccagcaacagcaucgugguguucugcggcaccagcggcaccuacggcaccggcagcuggcccgacggcgccgaccugaaccugaugcccaucuga

SEQ ID NO: 185754 - RNA, 1410 nt, Artificial Sequence
  derived and/or modified CDS sequence (opt4) from neuraminidase__InfluenzaA__AIL94621
augaaccccaaccagaagaucaucaccaucggcagcgugugcaugaccaucggcauggccaaccugauccugcagaucggcaacaucaucagcaucuggaucagccacagcauccagcugggcaaccagagccagaucgaggccugcaaccagagcgugaucaccuacgagaacaacaccugggugaaccagaccuacgugaacaucagcaacaccaacuucgccgccggccagagcguggugcccgugaagcuggccggcaacagcagccugugccccgugagcggcugggccaucuacagcaaggacaacagcgugagaaucggcagcaagggcgacguguucgugaucagagagcccuucaucagcugcagcccccuggagugcagaaccuucuuccugacccagggcgcccugcugaacgacaagcacagcaacggcaccaucaaggacagaagccccuacagaacccugaugagcugccccaucggcgaggugcccagccccuacaacagcagauucgagagcguggccuggagcgccagcgccugccacgacggcaucaacuggcugaccaucggcaucagcggccccgacagcggcgccguggccgugcugaaguacaacggcaucaucaccgacaccaucaagagcuggaagaacaacauccugagaacccaggagagcgagugcgccugcgugaacggcagcugcuucaccaucaugaccgacggccccagcgacggccaggccagcuacaagaucuucagaaucgagaagggcaagaucgugaagagcguggagaugaacgcccccaacuaccacuacgaggagugcagcugcuaccccgacagcagcgagaucaccugcgugugcagagacaacuggcacggcagcaacagacccugggugagcuucaaccagaaccuggaguaccagaucggcuacaucugcagcggcguguucggcgacaaccccagacccaacgacaagaccggcagcugcggccccgugagcagcaacggcgccaacggcgugaagggcuucagcuucaaguacggcaacggcguguggaucggcagaaccaagagcaucagcagcagaaagggcuucgagaugaucugggaccccaacggcuggaccggcaccgacaacgacuucagcaucaagcaggacaucgugggcaucaacgaguggagcggcuacagcggcagcuucgugcagcaccccgagcugaccggccuggacugcaucagacccugcuucuggguggagcugaucagaggcagacccaaggagaacaccaucuggaccagcggcagcagcaucagcuucugcggcgugaacagcgacaccgugggcuggagcuggcccgacggcgccgagcugcccuucaccaucgacaaguga

SEQ ID NO: 185755 - RNA, 1410 nt, Artificial Sequence; identical to SEQ ID NO: 185706
  derived and/or modified CDS sequence (opt4) from neuraminidase__InfluenzaA__AIL94632

SEQ ID NO: 185756 - RNA, 1410 nt, Artificial Sequence; identical to SEQ ID NO: 182206
  derived and/or modified CDS sequence (opt4) from neuraminidase__InfluenzaA__AIL94643

SEQ ID NO: 185757 - RNA, 1410 nt, Artificial Sequence
  derived and/or modified CDS sequence (opt4) from neuraminidase__InfluenzaA__AIL94655
augaaccccaaccagaagaucaucaccaucggcagcgugugcaugaccaucggcauggccaaccugauccugcagaucggcaacaucaucagcaucuggaucagccacagcauccagcugggcaaccagagccagaucgagaccugcaaccagagcgugaucaccuacgagaacaacaccugggugaaccagaccuacgugaacaucagcaacaccaacuucgccgccggccagagcguggugagcgugaagcuggccggcaacagcagccugugccccgugagcggcugggccaucuacagcaaggacaacagcaucagaaucggcagcaagggcgacguguucgugaucagagagcccuucaucagcugcagcccccuggagugcagaaccuucuuccugacccagggcgcccugcugaacgacaagcacagcaacggcaccaucaaggacagaagccccuacagaacccugaugagcugccccaucggcgaggugcccagccccuacaacagcagauucgagagcguggccuggagcgccagcgccugccacgacggcaucaacuggcugaccaucggcaucagcggccccgacagcggcgccguggccgugcugaaguacaacggcaucaucaccgacaccaucaagagcuggagaaacaacauccugagaacccaggagagcgagugcgccugcgugaacggcagcugcuucaccaucaugaccgacggccccagcgacggccaggccagcuacaagaucuucagaaucgagaagggcaagaucgugaagagcguggagaugaacgcccccaacuaccacuacgaggagugcagcugcuaccccgacagcagcgagaucaccugcgugugcagagacaacuggcacggcagcaacagacccugggugagcuucaaccagaaccuggaguaccagaucggcuacaucugcagcggcaucuucggcgacaaccccagacccaacgacaagaccggcagcugcggccccgugagcagcaacggcgccaacggcgugaagggcuucagcuucaaguacggcaacggcguguggaucggcagaaccaagagcaucagcagcagaaagggcuucgagaugaucugggaccccaacggcuggaccggcaccgacaacaacuucagcaucaagcaggacaucgugggcaucaacgaguggagcggcuacagcggcagcuucgugcagcaccccgagcugaccggccuggacugcaucagacccugcuucuggguggagcugaucagaggcagacccaaggagaacaccaucuggaccagcggcagcagcaucagcuucugcggcgugaacagcgacaccgugggcuggagcuggcccgacggcgccgagcugcccuucaccaucgacaaguga

SEQ ID NO: 185758 - RNA, 1410 nt, Artificial Sequence
  derived and/or modified CDS sequence (opt4) from neuraminidase__InfluenzaA__AIL94677
augaaccccaaccagaagaucaucaccaucggcagcgugugcaugaccaucggcauggccaaccugauccugcagaucggcaacaucaucagcaucuggaucagccacagcauccagcugggcaaccagagccagaucgaggccugcaaccagagcgugaucaccuacgagaacaacaccugggugaaccagaccuacgugaacaucagcaacaccaacuucgccgccggccagagcguggugcccgugaagcuggccggcaacagcagccugugccccgugagcggcugggccaucuacagcaaggacaacagcgugagaaucggcagcaagggcgacguguucgugaucagagagcccuucaucagcugcagcccccuggagugcagaaccuucuuccugacccagggcgcccugcugaacgacaagcacagcaacggcaccaucaaggacagaagccccuacagaacccugaugagcugccccaucggcgaggugcccagccccuacaacagcagauucgagagcguggccuggagcgccagcgccugccacgacggcaucaacuggcugaccaucggcaucagcggccccgacagcggcgccguggccgugcugaaguacaacggcaucaucaccgacaccaucaagagcuggaagaacaacauccugagaacccaggagagcgagugcgccugcgugaacggcagcugcuucaccaucaugaccgacggccccagcgacggccaggccagcuacaagaucuucagaaucgagaagggcaagaucgugaagagcguggagaugaacgcccccaacuaccacuacgaggagugcagcugcuaccccgacagcagcgagaucaccugcgugugcagagacaacuggcacggcagcaacagacccugggugagcuucaaccagaaccuggaguaccagaucggcuacaucugcagcggcguguucggcgacaaccccagacccaacgacaagaccggcagcugcggccccgugagcagcaacggcgccaacggcgugaagggcuucagcuucaaguacggcaacggcguguggaucggcagaaccaagagcaucagcagcagaaagggcuucgagaugaucugggaccccaacggcuggaccggcaccgacaacaacuucagcaucaagcaggacaucgugggcaucaacgaguggagcggcuacagcggcagcuucgugcagcaccccgagcugaccggccuggacugcaucagacccugcuucuggguggagcugaucagaggcagacccaaggagaacaccaucuggaccagcggcagcagcaucagcuucugcggcgugaacagcgacaccgugggcuggagcuggcccgacggcgccgagcugcccuucaccaucgacaaguga

SEQ ID NO: 185759 - RNA, 1410 nt, Artificial Sequence; identical to SEQ ID NO: 185697
  derived and/or modified CDS sequence (opt4) from neuraminidase__InfluenzaA__AIL94688

SEQ ID NO: 185760 - RNA, 1410 nt, Artificial Sequence
  derived and/or modified CDS sequence (opt4) from neuraminidase__InfluenzaA__AIL94700
augaaccccaaccagaagaucaucaccaucggcagcgugagccugaccaucagcaccaucugcuucuucaugcagaucgccauccugaucaccaucgugacccugcacuucaagcaguacgaguucaacagcccccccaacaaccaggugaugcugugcgagcccaccaucaucgagagaaacaucaccgagaucguguaccugaccaacaccaccaucgagaaggagaucugccccaagcccgccgaguacagaaacuggagcaagccccagugcggcaucaccggcuucgcccccuucagcaaggacaacagcaucagacugagcgccggcggcgacaucugggugaccagagagcccuacgugagcugcgaccccgacaagugcuaccaguucgcccugggccagggcaccacccugaacaacgugcacagcaacaacaccgugagagacagaacccccuacagaacccugcugaugaacgagcugggcgugcccuuccaccugggcaccaagcaggugugcaucgccuggagcagcagcagcugccacgacggcaaggccuggcugcacgugugcaucaccggcgacgacaagaacgccaccgccagcuucaucuacaacggcagacugguggacagcguggugagcuggagcaaggagauccugagaacccaggagagcgagugcgugugcaucaacggcaccugcaccguggugaugaccgacggcagcgccagcggcaaggccgacaccaagauccuguucaucgaggagggcaagaucgugcacaucagcacccugagcggcagcgcccagcacguggaggagugcagcugcuaccccagauaccccggcgugagaugcgugugcagagacaacuggaagggcagcaacagacccaucguggacaucaacaucgaggaccacagcaucgugagcagcuacgugugcagcggccuggugggcgacacccccagaaagaacgacagcagcagcagcagccacugccuggaccccaacaacgaggagggcggccacggcgugaagggcugggccuucgacgacggcaacgacguguggaugggcagaaccaucaacgagaccagcagacugggcuacgagaccuucaaggugaucgagggcuggagcaaccccaagagcaagcugcagaucaacagacaggugaucguggacagaggcgacagaagcggcuacagcggcaucuucagcguggagggcaagagcugcaucaacagaugcuucuacguggagcugaucagaggcagaaaggaggagaccgaggugcuguggaccagcaacagcaucgugguguucugcggcaccagcggcaccuacggcaccggcagcuggcccgacggcgccgaccugaaccugaugcccaucuga

SEQ ID NO: 185761 - RNA, 1410 nt, Artificial Sequence; identical to SEQ ID NO: 185706
  derived and/or modified CDS sequence (opt4) from neuraminidase__InfluenzaA__AIL94712

SEQ ID NO: 185762 - RNA, 1410 nt, Artificial Sequence; identical to SEQ ID NO: 185736
  derived and/or modified CDS sequence (opt4) from neuraminidase__InfluenzaA__AIL94723

SEQ ID NO: 185763 - RNA, 1410 nt, Artificial Sequence
  derived and/or modified CDS sequence (opt4) from neuraminidase__InfluenzaA__AIL94734
augaaccccaaccagaagaucaucaccaucggcagcgugagccugaccaucagcaccaucugcuucuucaugcagaucgccauccugaucaccaccgugacccugcacuucaagcaguacgaguucaacagcccccccaacaaccaggugaugcugugcgagcccaccaucaucgagagaaacaucaccgagaucguguaccugaccaacaccaccaucgagaaggagaucugccccaagcccgccgaguacagaaacuggagcaagccccagugcggcaucaccggcuucgcccccuucagcaaggacaacagcaucagacugagcgccggcggcgacaucugggugaccagagagcccuacgugagcugcgaccccgacaagugcuaccaguucgcccugggccagggcaccacccugaacaacgagcacagcaacaacaccgugagagacagaacccccuacagaacccugcugaugaacgagcugggcgugcccuuccaccugggcaccaagcaggugugcaucgccuggagcagcagcagcugccacgacggcaaggccuggcugcacgugugcaucaccggcgacgacaagaacgccaccgccagcuucaucuacaacggcagacugguggacagcguggugagcuggagcaaggagauccugagaacccaggagagcgagugcgugugcaucaacggcaccugcaccguggugaugaccgacggcagcgccagcggcaaggccgacaccaagauccuguucaucgaggagggcaagaucgugcacaucagcacccugagcggcagcgcccagcacguggaggagugcagcugcuaccccagauaccccggcgugagaugcgugugcagagacaacuggaagggcagcaacagacccaucguggacaucaacaucaaggaccacagcaucgugagcagcuacgugugcagcggccuggugggcgacacccccagaaagaacgacagcagcagcagcagccacugccuggaccccaacaacgaggagggcggccacggcgugaagggcugggccuucgacgacggcaacgacguguggaugggcagaaccaucaacgagaccagcagacugggcuacgagaccuucaaggugaucgagggcuggagcaaccccaagagcaagcugcagaucaacagacaggugaucguggacagaggcgacagaagcggcuacagcggcaucuucagcguggagggcaagagcugcaucaacagaugcuucuacguggagcugaucagaggcagaaaggaggagaccgaggugcuguggaccagcaacagcaucgugguguucugcggcaccagcggcaccuacggcaccggcagcuggcccgacggcgccgaccugaaccugaugcccaucuga

SEQ ID NO: 185764 - RNA, 1410 nt, Artificial Sequence; identical to SEQ ID NO: 185706
  derived and/or modified CDS sequence (opt4) from neuraminidase__InfluenzaA__AIL94746

SEQ ID NO: 185765 - RNA, 1410 nt, Artificial Sequence; identical to SEQ ID NO: 185736
  derived and/or modified CDS sequence (opt4) from neuraminidase__InfluenzaA__AIL94757

SEQ ID NO: 185766 - RNA, 1410 nt, Artificial Sequence; identical to SEQ ID NO: 185697
  derived and/or modified CDS sequence (opt4) from neuraminidase__InfluenzaA__AIL94768

SEQ ID NO: 185767 - RNA, 1410 nt, Artificial Sequence; identical to SEQ ID NO: 182206
  derived and/or modified CDS sequence (opt4) from neuraminidase__InfluenzaA__AIL94780

SEQ ID NO: 185768 - RNA, 1410 nt, Artificial Sequence; identical to SEQ ID NO: 185736
  derived and/or modified CDS sequence (opt4) from neuraminidase__InfluenzaA__AIL94803

SEQ ID NO: 185769 - RNA, 1410 nt, Artificial Sequence; identical to SEQ ID NO: 185716
  derived and/or modified CDS sequence (opt4) from neuraminidase__InfluenzaA__AIL94814

SEQ ID NO: 185770 - RNA, 1410 nt, Artificial Sequence
  derived and/or modified CDS sequence (opt4) from neuraminidase__InfluenzaA__AIL94826
augaaccccaaccagaagaucaucaccaucggcagcgugagccugaccaucagcaccaucugcuucuucaugcagaucgccauccugaucaccaccgugacccugcacuucaagcaguacgaguucaacagccugcccaacaaccaggugaugcugugcgagcccaccaucaucgagagaaacaucaccgagaucguguaccugaccaacaccaccaucgagaaggagaucugccccaagcccgccgaguacagaaacuggagcaagccccagugcggcaucaccggcuucgcccccuucagcaaggacaacagcaucagacugagcgccggcggcgacaucugggugaccagagagcccuacgugagcugcgaccccgacaagugcuaccaguucgcccugggccagggcaccacccugaacaacgugcacagcaacaacaccgccagagacagaacccccuacagaacccugcugaugaacgagcugggcgugcccuuccaccugggcaccaagcaggugugcaucgccuggagcagcagcagcugccacgacggcaaggccuggcugcacgugugcaucaccggcgacgacaagaacgccaccgccagcuucaucuacaacggcagacugguggacagcguggugagcuggagcaaggagauccugagaacccaggagagcgagugcgugugcaucaacggcaccugcaccguggugaugaccgacggcagcgccagcggcaaggccgacaccaagauccuguucaucgaggagggcaagaucgugcacaccagcacccugagcggcagcgcccagcacguggaggagugcagcugcuaccccagauaccccggcgugagaugcgugugcagagacaacuggaagggcagcaacagacccaucguggacaucaacaucaaggaccacagcaucgugagcagcuacgugugcagcggccuggugggcgacacccccagaaagaacgacagcagcagcagcagccacugccugaaccccaacaacgaggagggcggccacggcgugaagggcugggccuucgacgacggcaacgacguguggaugggcagaaccaucaacgagaccagcagacugggcuacgagaccuucaaggugaucgagggcuggagcaaccccaagagcaagcugcagaucaacagacaggugaucguggacagaggcgacagaagcggcuacagcggcaucuucagcguggagggcaagagcugcaucaacagaugcuucuacguggagcugaucagaggcagaaaggaggagaccgaggugcuguggaccagcaacagcaucgugguguucugcggcaccagcggcaccuacggcaccggcagcuggcccgacggcgccgaccugaaccugaugcccaucuga

SEQ ID NO: 185771 - RNA, 1410 nt, Artificial Sequence
  derived and/or modified CDS sequence (opt4) from neuraminidase__InfluenzaA__AIL94850
augaaccccaaccagaagaucaucaccaucggcagcgugagccugaccaucagcaccaucugcuucuucaugcagaucgccauccugaucaccaccgugacccugcacuucaagcaguacgaguucaacagcccccccaacaaccaggugaugcuguucgagcccaccaucaucgagagaaacaucaccgagaucguguaccugaccaacaccaccaucgagaaggagaucugccccaagcuggccgaguacagaaacuggagcaagccccagugcgacaucaccggcuucgcccccuucagcaaggacaacagcaucagacugagcgccggcggcgacaucugggugaccagagagcccuacgugagcugcgaccccgacaagugcuaccaguucgcccugggccagggcaccacccugaacaacgugcacagcaacgacaccgugagagacagaacccccuacagaacccugcugaugaacgagcugggcgugcccuuccaccugggcaccaagcaggugugcaucgccuggagcagcagcagcugccacgacggcaaggccuggcugcacgugugcaucaccggcgacgacaagaacgccaccgccagcuucaucuacaacggcagacugguggacagcaucgugagcuggagcaaggagauccugagaacccaggagagcgagugcgugugcaucaacggcaccugcaccguggugaugaccgacggcagcgccagcggcaaggccgacaccaagauccuguucaucaaggagggcaagaucgugcacaccagcacccugagcggcagcgcccagcacguggaggagugcagcugcuaccccagauaccccggcgugagaugcgugugcagagacaacuggaagggcagcaacagacccaucguggacaucaacaucaaggaccacagcaucgugagcagcuacgugugcagcggccuggugggcgacacccccagaaagaacgacagcagcagcagcagccacugccuggaccccaacagcgaggagggcggccacggcgugaagggcugggccuucgacgacggcaacgacguguggaugggcagaaccaucagcgagaagagcagacugggcuacgagaccuucaaggugaucgagggcuggagcaaccccaagagcaaguuccagaucaacagacaggugaucguggacagaggcaacagaagcggcuacagcggcaucuucagcguggagggcaagagcugcaucaacagaugcuucuacguggagcugaucagaggcagaaaggaggagaccgaggugcuguggaccagcaacagcaucgugguguucugcggcaccagcggcaccuacggcaccggcagcuggcccgacggcgccgaccugaaccugaugcccaucuga

SEQ ID NO: 185772 - RNA, 1410 nt, Artificial Sequence; identical to SEQ ID NO: 179470
  derived and/or modified CDS sequence (opt4) from neuraminidase__InfluenzaA__AIL94862

SEQ ID NO: 185773 - RNA, 1410 nt, Artificial Sequence; identical to SEQ ID NO: 179470
  derived and/or modified CDS sequence (opt4) from neuraminidase__InfluenzaA__AIL94874

SEQ ID NO: 185774 - RNA, 1410 nt, Artificial Sequence
  derived and/or modified CDS sequence (opt4) from neuraminidase__InfluenzaA__AIL94886
augaaccccaaccagaagaucaucaccaucggcagcgugugcaugaccaucggcauggccaaccugaugcugcagaucggcaacaucaucagcaucuggaucagccacagcauccagcugggcaacaagaaccagaucgagaccugcaaccagagcgugaucaccuacgagaacaacaccugggugaaccagaccuacgugaacaucagcaacaccaacuucgccgccggccagagcguggugagcgugaagaucgccggcaacagcagccugugccccgugagcggcugggccaucuacagcaaggacaacagcaucagaaucggcagcaagggcgacguguucgugaucagagagcccuucaucagcugcagcccccuggagugcagaaccuucuuccugacccagggcgcccugcugaacgacaagcacagcaacggcaccaucaaggacagaagccccuacagaacccugaugagcugccccaucggcgaggugcccagccccuacaacagcagauucgagagcguggccuggagcgccagcgccugccacgacggcaucaacuggcugaccaucggcaucagcggccccgacgacggcgccguggccgugcugaaguacaacggcaucaucaccgacaccaucaagagcuggagaaacaacauccugagaacccaggagagcgagugcgccugcgugaacggcagcugcuucaccaucaugaccgacggccccagcgacggccaggccagcuacaagaucuucagaaucgagaagggcaagaucgugaagagcguggagaugaacgcccccaacuaccacuacgaggagugcagcugcuaccccgacagcagcgagaucaccugcgugugcagagacaacuggcacggcagcaacagacccugggugagcuucaaccagaaccuggaguaccagaucggcuacaucugcagcggcaucuucggcgacaaccccagaccccacgacaagaccggcagcugcggccccgugagcagcaacggcgccaacggcgugaagggcuucagcuucaaguacggcaacggcguguggaucggcagaaccaagagcaucagcagcagaaagggcuucgagaugaucugggaccccaacggcuggaccggcaccgacaacaacuucagcaucaagcaggacaucgugggcaucaacgaguggagcggcuacagcggcagcuucgugcagcaccccgagcugaccggccuggacugcaucagacccugcuucuggguggagcugaucagaggcagacccaaggagaacaccaucuggaccagcggcagcagcaucagcuucugcggcgugaacagcgacaccgugggcuggagcuggcccgacggcgccgagcugcccuucaccaucgacaaguga

SEQ ID NO: 185775 - RNA, 1410 nt, Artificial Sequence; identical to SEQ ID NO: 182982
  derived and/or modified CDS sequence (opt4) from neuraminidase__InfluenzaA__AIL94897

SEQ ID NO: 185776 - RNA, 1410 nt, Artificial Sequence; identical to SEQ ID NO: 185770
  derived and/or modified CDS sequence (opt4) from neuraminidase__InfluenzaA__AIL94909

SEQ ID NO: 185777 - RNA, 1410 nt, Artificial Sequence; identical to SEQ ID NO: 182206
  derived and/or modified CDS sequence (opt4) from neuraminidase__InfluenzaA__AIL94921

SEQ ID NO: 185778 - RNA, 1410 nt, Artificial Sequence; identical to SEQ ID NO: 182206
  derived and/or modified CDS sequence (opt4) from neuraminidase__InfluenzaA__AIL94933

SEQ ID NO: 185779 - RNA, 1410 nt, Artificial Sequence; identical to SEQ ID NO: 185697
  derived and/or modified CDS sequence (opt4) from neuraminidase__InfluenzaA__AIL94945

SEQ ID NO: 185780 - RNA, 1410 nt, Artificial Sequence
  derived and/or modified CDS sequence (opt4) from neuraminidase__InfluenzaA__AIL94957
augaaccccaaccagaagaucaucaccaucggcagcgugugcaugaccaucggcauggccaaccugauccugcagaucggcaacaucaucagcaucuggaucagccacagcauccagcugggcaaccagagccagaucgaggccugcaaccagagcgugaucaccuacgagaacaacaccugggugaaccagaccuacgugaacaucagcaacaccaacuucgccgccggccagagcguggugagcgugaagcuggccggcaacagcagccugugccccgugagcggcugggccaucuacagcaaggacaacagcgugagaaucggcagcaagggcgacguguucgugaucagagagcccuucaucagcugcagcccccuggagugcagaaccuucuuccugacccagggcgcccugcugaacgacaagcacagcaacggcaccaucaaggacagaagccccuacagaacccugaugagcugccccaucggcgaggugcccagccccuacaacagcagauucgagagcguggccuggagcgccagcgccugccacgacggcaucaacuggcugaccaucggcaucagcggccccgacagcggcgccguggccgugcugaaguacaacggcaucaucaccgacaccaucaagagcuggaagaacaacauccugagaacccaggagagcgagugcgccugcgugaacggcagcugcuucaccaucaugaccgacggccccagcgacggccaggccagcuacaagaucuucagaaucgagaagggcaagaucgugaagagcguggagauggacgcccccaacuaccacuacgaggagugcagcugcuaccccgacagcagcgagaucaccugcgugugcagagacaacuggcacggcagcaacagacccugggugagcuucaaccagaaccuggaguaccagaucggcuacaucugcagcggcguguucggcgacaaccccagacccaacgacaagaccggcagcugcggccccgugagcagcaacggcgccaacggcgugaagggcuucagcuucaaguacggcaacggcguguggaucggcagaaccaagagcaucagcagcagaaagggcuucgagaugaucugggaccccaacggcuggaacggcaccgacaacaacuucagcaucaagcaggacaucgugggcaucaacgaguggagcggcuacagcggcagcuucgugcagcaccccgagcugaccggccuggacugcaucagacccugcuucuggguggagcugaucagaggcagacccaaggagaacaccaucuggaccagcggcagcagcaucagcuucugcggcgugaacagcgacaccgugggcuggagcuggcccgacggcgccgagcugcccuucaccaucgacaaguga

SEQ ID NO: 185781 - RNA, 1410 nt, Artificial Sequence; identical to SEQ ID NO: 185770
  derived and/or modified CDS sequence (opt4) from neuraminidase__InfluenzaA__AIL94968

SEQ ID NO: 185782 - RNA, 1410 nt, Artificial Sequence
  derived and/or modified CDS sequence (opt4) from neuraminidase__InfluenzaA__AIM55840
augaaccccaaccagaagaucaucaccaucggcagcgugugcaugaccaucggcauggccaaccugauccugcagaucggcaacaucaucagcaucuggaucagccacagcauccaggugggcaaccagagccagaucgagaucugcaaccagagcgugaucaccuacgagaacaacaccugggugaaccagaccuacgugaacaucagcaacaccaacuucgccgccggccagcccguggugagcgugaagcuggccggcaacagcagccugugccccgugagcggcugggccaucuacagcaaggacaacagcgugagaaucggcagcaagggcgacguguucgugaucagagagcccuucaucagcugcagcccccuggagugcagaaccuucuuccugacccagggcgcccugcugaacgacaagcacagcaacggcaccaucaaggacagaagccccuacagaacccugaugagcugccccaucggcgaggugcccagccccuacaacagcagauucgagagcguggccuggagcgccagcgccugccacgacggcaucaacuggcugaccaucggcaucagcggccccgacagcggcgccguggccgugcugaaguacaacggcaucaucaccgacaccaucaagagcuggagaaacgacauccugagaacccaggagagcgagugcgccugcgugaacggcagcugcuucaccaucaugaccgacggccccagcgacggccaggccagcuacaagaucuucagaaucgagaagggcaagaucgugaagagcguggagaugaacgcccccaacuaccacuucgaggagugcagcugcuaccccgacagcagcgagaucaccugcgugugcagagacaacuggcacggcagcaacagacccugggugagcuucaaccagaaccuggaguaccagaucggcuacaucugcagcggcaucuucggcgacaaccccagacccaacgacaagaccggcagcugcggccccgugagcagcaacggcgccaacggcgugaagggcuucagcuucaaguacggcaacggcguguggaucggcagaaccaagagcaucagcagcagaaagggcuucgagaugaucugggaccccaacggcuggaccggcaccgacaacaacuucagcaucaagcaggacaucgugggcaucaacgaguggagcggcuacagcggcagcuucgugcagcaccccgagcugaccggccuggacugcaucagacccugcuucuggguggagcugaucagaggcagacccaaggagaacaccaucuggaccagcggcagcagcaucagcuucugcggcgugaacagcgacaccgugggcuggagcuggcccgacggcgccgagcugcccuucaccaucgacaaguga

SEQ ID NO: 185783 - RNA, 1410 nt, Artificial Sequence
  derived and/or modified CDS sequence (opt4) from neuraminidase__InfluenzaA__AIM55851
augaaccccaaccagaagaucaucaccaucggcagcgugugcaugaccaucggcauggccaaccugauccugcagaucggcaacaucaucagcaucugggugagccacagcauccagcugggcaaccagagccagaucgagaccugcaaccagagcgugaucaccuacgagaacaacaccugggugaaccagaccuacgugaacaucagcaacaccaacuucgccgccggccagagcguggugcccgugaagcuggccggcaacagcagccugugccccgugagcggcugggccaucuacagcaaggacaacagcgugagaaucggcagcaagggcgacguguucgugaucagagagcccuucaucagcugcagcccccuggagugcagaaccuucuuccugacccagggcgcccugcugaacgacaagcacagcaacggcaccaucaaggacagaagccccuacagaacccugaugagcugccccaucggcgaggugcccagccccuacaacagcagauucgagagcguggccuggagcgccagcgccugccacgacggcaucaacuggcugaccaucggcaucagcggccccgacagcggcgccguggccgugcugaaguacaacggcaucaucaccgacaccaucaagagcuggagaaacaacauccugagaacccaggagagcgagugcgccugcgugaacggcagcugcuucaccaucaugaccgacggccccagcgacggccaggccagcuacaagaucuucagaaucgagaagggcagaaucgugaagagcguggagaugaacgcccccaacuaccacuacgaggagugcagcugcuaccccgacagcagcgagaucaccugcgugugcagagacaacuggcacggcagcaacagacccugggugagcuucaaccagaaccuggaguaccagaucggcuacaucugcagcggcguguucggcgacaaccccagacccaacgacaagaccggcagcugcggccccgugagcagcaacggcgccaacggcgugaagggcuucagcuucaaguacggcaacggcguguggaucggcagaaccaagagcaucagcagcagaaagggcuucgagaugaucugggaccccaacggcuggaccggcaccgacaacaaguucagcaucaagcaggacaucgugggcaucaacgaguggagcggcuacagcggcagcuucgugcagcaccccgagcugaccggccuggacugcaucagacccugcuucuggguggagcugaucagaggcagacccgaggagaacaccaucuggaccagcggcagcagcaucagcuucugcggcgugaagagcgacaccgugggcuggagcuggcccgacggcgccgagcugcccuucaccaucgacaaguga

SEQ ID NO: 185784 - RNA, 1410 nt, Artificial Sequence
  derived and/or modified CDS sequence (opt4) from neuraminidase__InfluenzaA__AIM55862
augaaccccaaccagaagaucaucaccaucggcagcgugugcaugaccaucggcauggccaaccugauccugcagaucggcaacaucaucagcaucugggugagccacagcauccagcugggcaaccagagccagaucgagaccugcaaccagagcgugaucaccuacgagaacaacaccugggugaaccagaccuacgugaacaucagcaacaccaacuucgccgccggccagagcguggugcccgugaagcuggccggcaacagcagccugugccccgugagcggcugggccaucuacagcaaggacaacagcgugagaaucggcagcaagggcgacguguucgugaucagagagcccuucaucagcugcagcccccuggagugcagaaccuucuuccugacccagggcgcccugcugaacgacaagcacagcaacggcaccaucaaggacagaagccccuacagaacccugaugagcugccccaucggcgaggugcccagccccuacaacagcagauucgagagcguggccuggagcgccagcgccugccacgacggcaucaacuggcugaccaucggcaucagcggccccgacagcggcgccguggccgugcugaaguacaacggcaucaucaccgacaccaucaagagcuggagaaacaacauccugagaacccaggagagcgagugcgccugcgugaacggcagcugcuucaccaucaugaccgacggccccagcgacggccaggccagcuacaagaucuucaagaucgagaagggcaagaucgugaagagcguggagaugaacgcccccaacuaccacuacgaggagugcagcugcuaccccgacagcagcgagaucaccugcgugugcagagacaacuggcacggcagcaacagacccugggugagcuucaaccagaaccuggaguaccagaucggcuacaucugcagcggcguguucggcgacaaccccagacccaacgacaagaccggcagcugcggccccgugagcagcaacggcgccaacggcgugaagggcuucagcuucaaguacggcaacggcguguggaucggcagaaccaagagcaucagcagcagaaagggcuucgagaugaucugggaccccaacggcuggaacggcaccgacaacaacuucagcaucaagcaggacaucgugggcaucaaggaguggagcggcuacagcggcagcuucgugcagcaccccgagcugaccggccuggacugcaucagacccugcuucuggguggagcugaucagaggcagacccgaggagaacaccaucuggaccagcggcagcagcaucagcuucugcggcgugaacagcgacaccgugggcuggagcuggcccgacggcgccgagcugcccuucaccaucgacaaguga

SEQ ID NO: 185785 - RNA, 1410 nt, Artificial Sequence
  derived and/or modified CDS sequence (opt4) from neuraminidase__InfluenzaA__AIM55873
augaaccccaaccagaagaucaucaccaucggcagcgugugcaugaccaucggcauggccaaccugauccugcagaucggcaacaucaucagcaucugggugagccacagcauccagcugggcaaccagagccagaucgagaccugcaaccagagcgugaucaccuacgagaacaacaccugggugaaccagaccuacgugaacaucagcaacaccaacuucgccgccggccagagcguggugcccgugaagcuggccggcaacagcagccugugccccgugagcggcugggccaucuacagcaaggacaacagcgugagaaucggcagcaagggcgacguguucgugaucagagagcccuucaucagcugcagcccccuggagugcagaaccuucuuccugacccagggcgcccugcugaacgacaagcacagcaacggcaccaucaaggacagaagccccuacagaacccugaugagcugccccaucggcgaggugcccagccccuacaacagcagauucgagagcguggccuggagcgccagcgccugccacgacggcaucaacuggcugaccaucggcaucagcggccccgacagcggcgccguggccgugcugaaguacaacggcaucaucaccgacaccaucaagagcuggagaaacaacauccugagaacccaggagagcgagugcgccugcgugaacggcagcugcuucaccaucaugaccgacggccccagcgacggccaggccagcuacaagaucuucagaaucgagaagggcaagaucgugaagagcguggagaugaacgcccccaacuaccacuacgaggagugcagcugcuaccccgacagcagcgagaucaccugcgugugcagagacaacuggcacggcagcaacagacccugggugagcuucaaccagaaccuggaguaccagaucggcuacaucugcagcggcguguucggcgacaaccccagacccaacgacaagaccggcagcugcggccccgugagcagcaacggcgccaacggcgugaagggcuucagcuucaaguacggcaacggcguguggaucggcagaaccaagagcaucagcagcagaaagggcuucgagaugaucugggaccccaacggcuggaccggcaccgacaacaacuucagcaucaagcaggacaucgugggcaucaaggaguggagcggcuacagcggcagcuucgugcagcaccccgagcugaccggccuggacugcaucagacccugcuucuggguggagcugaucagaggcagacccgaggagaacaccaucuggaccagcggcagcagcaucagcuucugcggcgugaacagcgacaccgugggcuggagcuggcccgacggcgccgagcugcccuucaccaucgacaaguga

SEQ ID NO: 185786 - RNA, 1410 nt, Artificial Sequence; identical to SEQ ID NO: 185785
  derived and/or modified CDS sequence (opt4) from neuraminidase__InfluenzaA__AIM55884

SEQ ID NO: 185787 - RNA, 1410 nt, Artificial Sequence; identical to SEQ ID NO: 185785
  derived and/or modified CDS sequence (opt4) from neuraminidase__InfluenzaA__AIM55918

SEQ ID NO: 185788 - RNA, 1410 nt, Artificial Sequence
  derived and/or modified CDS sequence (opt4) from neuraminidase__InfluenzaA__AIM55929
augaaccccaaccagaagaucaucaccaucggcagcgugugcaugaccaucggcauggccaaccugauccugcagaucggcaacaucaucagcaucugggugagccacagcauccagcugggcaaccagagccagaucgagaccugcaaccagagcgugaucaccuacgagaacaacaccugggugaaccagaccuacgugaacaucagcaacaccaacuucgccgccggccagagcguggugagcgugaagcuggccggcaacagcagccugugccccgugagcggcugggccaucuacagcaaggacaacagcgugagaaucggcagcaagggcgacguguucgugaucagagagcccuucaucagcugcagcccccuggagugcagaaccuucuuccugacccagggcgcccugcugaacgacaagcacagcaacggcaccaucaaggacagaagccccuacagaacccugaugagcugccccaccggcgaggugcccagccccuacaacagcagauucgagagcguggccuggagcgccagcgccugccacgacggcaucaacuggcugaccaucggcaucagcggccccgacagcggcgccguggccgugcugaaguacaacggcaucaucaccgacaccaucaagagcuggagaaacaacauccugagaacccaggagagcgagugcgccugcgugaacggcagcugcuucaccaucaugaccgacggccccagcgacggccaggccagcuacaagaucuucagaaucgagaagggcaagaucgugaagagcguggagaugaacgcccccaacuaccacuacgaggagugcagcugcuaccccgacagcagcgagaucaccugcgugugcagagacaacuggcacggcagcaacagacccugggugagcuucaaccagaaccuggaguaccagaucggcuacaucugcagcggcguguucggcgacaaccccagacccaacgacaagaccggcagcugcggccccgugagcagcaacggcgccaacggcgugaagggcuucagcuucaaguacggcaacggcguguggaucggcagaaccaagagcaucagcagcagaaagggcuucgagaugaucugggaccccaacggcuggaccggcaccgacaacaacuucagcaucaagcaggacaucgugggcaucaaggaguggagcggcuacagcggcagcuucgugcagcaccccgagcugaccggccuggacugcaucagacccugcuucuggguggagcugaucagaggcagacccgaggagaacaccaucuggaccagcggcagcagcaucagcuucugcggcgugaacagcgacaccgugggcuggagcuggcccgacggcgccgagcugcccuucaccaucgacaaguga

SEQ ID NO: 185789 - RNA, 1410 nt, Artificial Sequence
  derived and/or modified CDS sequence (opt4) from neuraminidase__InfluenzaA__AIM55940
augaaccccaaccagaagaucaucaccaucggcagcgugugcaugaccaucggcauggccaaccugauccugcagaucggcaacaucaucagcaucugggugagccacagcauccagcugggcaaccagagccagaucgagaccugcaaccagagcgugaucaccuacgagaacaacaccugggugaaccagaccuacgugaacaucagcagcaccaacuucgccgccggccagagcguggugcccgugaagcuggccggcaacagcagccugugccccgugagcggcugggccaucuacagcaaggacaacagcgugagaaucggcagcaagggcgacguguucgugaucagagagcccuucaucagcugcagcccccuggagugcagaaccuucuuccugacccagggcgcccugcugaacgacaagcacagcaacggcaccaucaaggacagaagccccuacagaacccugaugagcugccccaucggcgaggugcccagccccuacaacagcagauucgagagcguggccuggagcgccagcgccugccacgacggcaucaacuggcugaccaucggcaucagcggccccgacagcggcgccguggccgugcugaaguacaacggcaucaucaccgacaccaucaagagcuggagaaacaacauccugagaacccaggagagcgagugcgccugcgugaacggcagcugcuucaccaucaugaccgacggccccagcgacggccaggccagcuacaagaucuucagaaucgagaagggcaagaucgugaagagcguggagaugaacgcccccaacuaccacuacgaggagugcagcugcuaccccgacagcagcgagaucaccugcgugugcagagacaacuggcacggcagcaacagacccugggugagcuucaaccagaaccuggaguaccagaucggcuacaucugcagcggcguguucggcgacaaccccagacccaacgacaagaccggcagcugcggccccgugagcagcaacggcgccaacggcgugaagggcuucagcuucaaguacggcaacggcguguggaucggcagaaccaagagcaucagcagcagaaagggcuucgagaugaucugggaccccaacggcuggaccggcaccgacaacaacuucagcaucaagcaggacaucgugggcaucaaggaguggagcggcuacagcggcagcuucgugcagcaccccgagcugaccggccuggacugcaucagacccugcuucuggguggagcugaucagaggcagacccgaggagaacaccaucuggaccagcggcagcagcaucagcuucugcggcgugaacagcgacaccgugggcuggagcuggcccgacggcgccgagcugcccuucaccaucgacaaguga

SEQ ID NO: 185790 - RNA, 1410 nt, Artificial Sequence
  derived and/or modified CDS sequence (opt4) from neuraminidase__InfluenzaA__AIM55965
augaaccccaaccagaagaucaucaccaucggcagcgugugcaugaccaucggcauggccaaccugauccugcagaucggcaacaucaucagcaucugggugagccacagcauccagcugggcaaccagagccagaucgagaccugcaaccagagcgugaucaccuacgagaacaacaccugggugaaccagaccuacgugaacaucagcaacaccaacuucgccgccggccagagcguggugcccgugaagcuggccggcaacagcagccugugccccgugagcggcugggccaucuacagcaaggacaacagcgugagaaucggcagcaagggcgacguguucgugaucagagagcccuucaucagcugcagcccccuggagugcagaaccuucuuccugacccagggcgcccugcugaacgacaagcacagcaacggcaccaucaaggacagaagccccuacagaacccugaugagcugccccaucggcgaggugcccagccccuacaacagcagauucgagagcguggccuggagcgccagcgccugccacgacggcaucaacuggcugaccaucggcaucagcggccccgacagcggcgccguggccgugcugaaguacaacggcaucaucaccgacaccaucaagagcuggagaaacaacauccugagaacccaggagagcgagugcgccugcgugaacggcagcugcuucaccaucaugaccgacggccccagcgacggccaggccagcuacaagaucuucagaaucgagaagggcaagaucgugaagagcguggagaugaacgcccccaacuaccacuacgaggagugcagcugcuaccccgacagcagcgagaucaccugcgugugcagagacaacuggcacggcagcaacagacccugggugagcuucaaccagaaccuggaguaccagaucggcuacaucugcagcggcguguucggcgacaaccccagacccaacgacaagaccggcagcugcggccccgugagcagcaacggcgccaacggcgugaagggcuucagcuucaaguacggcaacggcguguggaucggcagaaccaagagcaucagcagcagaaagggcuucgagaugaucugggaccccaacggcuggaccggcaccgacaacaacuucagcaucaagcaggacaucgugggcaucaaggaguggagcggcuacagcggcagcuucgugcagcaccccgagcugaccggccuggacugcaucagacccugcuucuggguggagcugaucagaggcagacccgaggagaacaccaucuggaccagcggcagcagcaucagcuucugcggcgugaacagcgacgccgugggcuggagcuggcccgacggcgccgagcugcccuucaccaucgacaaguga

SEQ ID NO: 185791 - RNA, 1410 nt, Artificial Sequence
  derived and/or modified CDS sequence (opt4) from neuraminidase__InfluenzaA__AIM55976
augaaccccaaccagaagaucaucaccaucggcagcgugugcaugaccaucggcauggccaaccugauccugcagaucggcaacaucaucagcaucugggugagccacagcauccagcugggcaaccagagccagaucgagaccugcaaccagagcgugaucaccuacgagaacaacaccugggugaaccagaccuacgugaacaucagcaacaccaacuucgccgccggccagagcguggugagcgugaagcuggccggcaacagcagccugugccccgugagcggcugggccaucuacagcaaggacaacagcgugagaaucggcagcaagggcgacguguucgugaucagagagcccuucaucagcugcagcccccuggagugcagaaccuucuuccugacccagggcgcccugcugaacgacaagcacagcaacggcaccaucaaggacagaagccccuacagaacccugaugagcugccccaucggcgaggugcccagccccuacaacagcagauucgagagcguggccuggagcgccagcgccugccacgacggcaucaacuggcugaccaucggcaucagcggccccgacagcggcgccguggccgugcugaaguacaacggcaucaucaccgacaccaucaagagcuggagaaacaacauccugagaacccaggagagcgagugcgccugcgugaacggcagcugcuucaccaucaugaccgacggccccagcgacggccaggccagcuacaagaucuucagaaucgagaagggcaagaucgugaagagcguggagaugaacgcccccaacuaccacuacgaggagugcagcugcuaccccgacagcagcgagaucaccugcgugugcagagacaacuggcacggcagcaacagacccugggugagcuucaaccagaaccuggaguaccagaucggcuacaucugcagcggcguguucggcgacaaccccagacccaacgacaagaccggcagcugcggccccgugagcagcaacggcgccaacggcgugaagggcuucagcuucaaguacggcaacggcguguggaucggcagaaccaagagcaucagcagcagaaagggcuucgagaugaucugggaccccaacggcuggaccggcaccgacaacaacuucagcaucaagcaggacaucgugggcaucaaggaguggagcggcuacagcggcagcuucgugcagcaccccgagcugaccggccuggacugcaucagacccugcuucuggguggagcugaucagaggcagacccgaggagaacaccaucuggaccagcggcagcagcaucagcuucugcggcgugaacagcgacaccgugggcuggagcuggcccgacggcgccgagcugcccuucaccaucgacaaguga

SEQ ID NO: 185792 - RNA, 1410 nt, Artificial Sequence
  derived and/or modified CDS sequence (opt4) from neuraminidase__InfluenzaA__AIM55987
augaaccccaaccagaagaucaucaccaucggcagcgugugcaugaccaucggcauggccaaccugauccugcagaucggcaacaucaucagcaucugggugagccacagcauccagcugggcaaccagagccagaucgagaccugcaaccagagcgugaucaccuacgagaacaacaccugggugaaccagaccuacgugaacaucagcaacaccaacuucgccgccggccagagcguggugagcgugaagcuggccggcaacagcagccugugccccgugagcggcugggccaucuacagcaaggacaacagcgugagaaucggcagcaagggcgacguguucgugaucagagagcccuucaucagcugcagcccccuggagugcagaaccuucuuccugacccagggcgcccugcugaacgacaagcacagcaacggcaccaucaaggacagaagccccuacagaacccugaugagcugccccaccggcgaggugcccagccccuacaacagcagauucgagagcguggccuggagcgccagcgccugccacgacggcaucaacuggcugaccaucggcaucagcggccccgacagcggcgccguggccgugcugaaguacaacggcaucaucaccgacaccaucaagagcuggagaaacaacauccugagaacccaggagagcgagugcgccugcgugaacggcagcugcuucaccaucaugaccgacggccccagcgacggccaggccagcuacaagaucuucagaaucgagaagggcaagaucgugaagagcguggagaugaacgcccccaacuaccacuacgaggagugcagcugcuaccccgacagcagcgagaucaccugcgugugcagagacaacuggcacggcagcaacagacccugggugagcuucaaccagaaccuggaguaccagaucggcuacaucugcagcggcguguucggcgacaaccccagacccaacgacaagaccggcagcugcggccccgugagcagcaacggcgccaacggcgugaagggcuucagcuucaaguacggcaacggcguguggaucggcagaaccaagagcaucagcagcagaaagggcuucgagaugaucugggaccccaacggcuggaccggcaccgacaacaacuucagcaucaagcaggacaucgugggcaucaaggaguggagcggcuacagcggcagcuucgugcagcaccccgagcugaccggccuggacugcaucagacccugcuucuggguggagcugaucagaggcagacccgaggagaacaccaucuggaccagcggcagcagcaucagcuucugcggcgugaacagcgacaccguggacuggagcuggcccgacggcgccgagcugcccuucaccaucgacaaguga

SEQ ID NO: 185793 - RNA, 1410 nt, Artificial Sequence
  derived and/or modified CDS sequence (opt4) from neuraminidase__InfluenzaA__AIM55998
augaaccccaaccagaagaucaucaccaucggcagcgugugcaugaccaucggcauggccaaccugauccugcagaucggcaacaccaucagcaucugggugagccacagcauccagcugggcaaccagagccagaucgagaccugcaaccagagcgugaucaccuacgagaacaacaccugggugaaccagaccuacgugaacaucagcaacaccaacuucgccgccggccagagcguggugcccgugaagcuggccggcaacagcagccugugccccgugagcggcugggccaucuacagcaaggacaacagcgugagaaucggcagcaagggcgacguguucgugaucagagagcccuucaucagcugcagcccccuggagugcagaaccuucuuccugacccagggcgcccugcugaacgacaagcacagcaacggcaccaucaaggacagaagccccuacagaacccugaugagcugccccaucggcgaggugcccagccccuacaacagcagauucgagagcguggccuggagcgccagcgccugccacgacggcaucaacuggcugaccaucggcaucagcggccccgacagcggcgccguggccgugcugaaguacaacggcaucaucaccgacaccaucaagagcuggagaaacaacauccugagaacccaggagagcgagugcgccugcgugaacggcagcugcuucaccaucaugaccgacggccccagcgacggccaggccagcuacaagaucuucagaaucgagaagggcaagaucgugaagagcguggagaugaacgcccccaacuaccacuacgaggagugcagcugcuaccccgacagcagcgagaucaccugcgugugcagagacaacuggcacggcagcaacagacccugggugagcuucaaccagaaccuggaguaccagaucggcuacaucugcagcggcguguucggcgacaaccccagacccaacgacaagaccggcagcugcggccccgugagcagcaacggcgccaacggcgugaagggcuucagcuucaaguacggcaacggcguguggaucggcagaaccaagagcaucagcagcagaaagggcuucgagaugaucugggaccccaacggcuggaccggcaccgacaacaaguucagcaucaagcaggacaucgugggcaucaacgaguggagcggcuacagcggcagcuucgugcagcaccccgagcugaccggccuggacugcaucagacccugcuucuggguggagcugaucagaggcagacccgaggagaacaccaucuggaccagcggcagcagcaucagcuucugcggcgugaagagcgacaccgugggcuggagcuggcccgacggcgccgagcugcccuucaccaucgacaaguga

SEQ ID NO: 185794 - RNA, 1410 nt, Artificial Sequence; identical to SEQ ID NO: 185791
  derived and/or modified CDS sequence (opt4) from neuraminidase__InfluenzaA__AIM56009

SEQ ID NO: 185795 - RNA, 1410 nt, Artificial Sequence; identical to SEQ ID NO: 185791
  derived and/or modified CDS sequence (opt4) from neuraminidase__InfluenzaA__AIM56020

SEQ ID NO: 185796 - RNA, 1410 nt, Artificial Sequence; identical to SEQ ID NO: 185791
  derived and/or modified CDS sequence (opt4) from neuraminidase__InfluenzaA__AIM56031

SEQ ID NO: 185797 - RNA, 1410 nt, Artificial Sequence
  derived and/or modified CDS sequence (opt4) from neuraminidase__InfluenzaA__AIM56042
augaaccccaaccagaagaucaucaccaucggcagcgugugcaugaccaucggcauggccaaccugauccugcagaucggcaacaucaucagcaucugggugagccacagcauccagcugggcaaccagagccagaucgagaccugcaaccagagcgugaucaccuacgagaacaacaccugggugaaccagaccuacgugaacaucagcaacaccaacuucgccgccggccagagcguggugcccgugaagcuggccggcaacagcagccugugccccgugagcggcugggccaucuacagcaaggacaacagcgugagaaucggcagcaagggcgacguguucgugaucagagagcccuucaucagcugcagcccccuggagugcagaaccuucuuccugacccagggcgcccugcugaacgacaagcacagcaacggcaccaucaaggacagaagccccuacagaacccugaugagcugccccaucggcgaggugcccagccccuacaacagcagauucgagagcguggccuggagcgccagcgccugccacgacggcaucaacuggcugaccaucggcaucagcggccccgacagcggcgccguggccgugcugaaguacaacggcaucaucaccgacaccaucaagagcuggagaaacaacauccugagaacccaggagagcgagugcgccugcgugaacggcagcugcuucaccaucaugaccgacggccccagcaacggccaggccagcuacaagaucuucagaaucgagaagggcaagaucgugaagagcguggagaugaacgcccccaacuaccacuacgaggagugcagcugcuaccccgacagcagcgagaucaccugcgugugcagagacaacuggcacggcagcaacagacccugggugagcuucaaccagaaccuggaguaccagaucggcuacaucugcagcggcguguucggcgacaaccccagacccaacgacaagaccggcagcugcggccccgugagcagcaacggcgccaacggcgugaagggcuucagcuucaaguacggcaacggcguguggaucggcagaaccaagagcaucagcagcagaaagggcuucgagaugaucugggaccccaacggcuggaccggcaccgacaacaacuucagcaucaagcaggacaucgugggcaucaaggaguggagcggcuacagcggcagcuucgugcagcaccccgagcugaccggccuggacugcaucagacccugcuucuggguggagcugaucagaggcagacccgaggagaacaccaucuggaccagcggcagcagcaucagcuucugcggcgugaacagcgacaccgugggcuggagcuggcccgacggcgccgagcugcccuucaccaucgacaaguga

SEQ ID NO: 185798 - RNA, 1410 nt, Artificial Sequence
  derived and/or modified CDS sequence (opt4) from neuraminidase__InfluenzaA__AIM56053
augaaccccaaccagaagaucaucaccaucggcagcgugugcaugaccaucggcauggccaaccugauccugcagaucggcaacaucaucagcaucugggugagccacagcauccagcugggcaaccagagccagaucgagaccugcaaccagagcgugaucaccuacgagaacaacaccugggugaaccagaccuacgugaacaucagcaacaccaacuucgccgccggccagagcguggugagcgugaagcuggccggcaacagcagccugugccccgugagcggcugggccaucuacagcaaggacaacagcgugagaaucggcagcaagggcgacguguucgugaucagagagcccuucaucagcugcagcccccuggagugcagaaccuucuuccugacccagggcgcccugcugaacgacaagcacagcaacggcaccaucaaggacagaagccccuacagaacccugaugagcugccccaucggcgaggugcccagccccuacaacagcagauucgagagcguggccuggagcgccagcgccugccacgacggcaucaacuggcugaccaucggcaucagcggccccgacagcggcgccguggccgugcugaaguacaacggcaucaucaccgacaccaucaagagcuggagaaacaacauccugagaacccaggagagcgagugcgccugcgugaacggcagcugcuucaccaucaugaccgacggccccagcgacgagcaggccagcuacaagaucuucagaaucgagaagggcaagaucgugaagagcguggagaugaacgcccccaacuaccacuacgaggagugcagcugcuaccccgacagcagcgagaucaccugcgugugcagagacaacuggcacggcagcaacagacccugggugagcuucaaccagaaccuggaguaccagaucggcuacaucugcagcggcguguucggcgacaaccccagacccaacgacaagaccggcagcugcggccccgugagcagcaacggcgccaacggcgugaagggcuucagcuucaaguacggcaacggcguguggaucggcagaaccaagagcaucagcagcagaaagggcuucgagaugaucugggaccccaacggcuggaccggcaccgacaacaacuucagcaucaagcaggacaucgugggcaucaaggaguggagcggcuacagcggcagcuucgugcagcaccccgagcugaccggccuggacugcaucagacccugcuucuggguggagcugaucagaggcagacccgaggagaacaccaucuggaccagcggcagcagcaucagcuucugcggcgugaacagcgacaccgugggcuggagcuggcccgacggcgccgagcugcccuucaccaucgacaaguga

SEQ ID NO: 185799 - RNA, 1410 nt, Artificial Sequence
  derived and/or modified CDS sequence (opt4) from neuraminidase__InfluenzaA__AIM56064
augaaccccaaccagaagaucaucaccaucggcagcgugugcaugaccaucggcauggccaaccugauccugcagaucggcaacaucaucagcaucugggugagccacagcauccagcugggcaaccagagccagaucgagaccugcaaccagagcgugaucaccuacgagaacaacaccugggugaaccagaccuacgugaacaucagcaacaccaacuucgccgccggccagagcguggugcccgugaagcuggccggcaacagcagccugugccccgugagcggcugggccaucuacagcaaggacaacagcgugagaaucggcagcaagggcgacguguucgugaucagagagcccuucaucagcugcagcccccuggagugcagaaccuucuuccugacccagggcgcccugcugaacgacaagcacagcaacggcaccaucaaggacagaagccccuacagaacccugaugagcugccccaucggcgaggugcccagccccuacaacagcagauucgagagcguggccuggagcgccagcgccugccacgacggcaucaacuggcugaccaucggcaucagcggccccgacagcggcgccguggccgugcugaaguacaacggcaucaucaccgacaccaucaagagcuggagaaacaacauccugagaacccaggagagcgagugcgccugcgugaacggcagcugcuucaccaucaugaccgacggccccagcgacggccaggccagcuacaagaucuucagaaucgagaagggcaagaucgugaagagcguggagaugaacgcccccaacuaccacuacgaggagugcagcugcuaccccgacagcagcgagaucaccugcgugugcagagacaacuggcacggcagcaacagacccugggugagcuucaaccagaaccuggaguaccagaucggcuacaucugcagcggcguguucggcgacaaccccagacccaacgacaagaccggcagcugcggccccgugagcagcaacggcgccaacggcgugaagggcuucagcuucaaguacggcaacggcguguggaucggcagaaccaagagcaucagcagcagaaagggcuucgagaugaucugggaccccaacggcuggaccggcaccgacaacaacuucagcaucaagcaggacaucgugggcaucaaggaguggagcggcuacagcggcagcuucgugcagcaccccgagcugaccggccuggacugcaucagacccugcuucuggguggagcuggugagaggcagacccgaggagaacaccaucuggaccagcggcagcagcaucagcuucugcggcgugaacagcgacaccgugggcuggagcuggcccgacggcgccgagcugcccuucaccaucgacaaguga

SEQ ID NO: 185800 - RNA, 1410 nt, Artificial Sequence
  derived and/or modified CDS sequence (opt4) from neuraminidase__InfluenzaA__AIM56086
augaaccccaaccagaagaucaucaccaucggcagcgugugcaugaccaucggcauggccaaccugauccugcagaucggcaacaucaucagcaucugggugagccacagcauccagcugggcaaccagagccacaucgagaccugcaaccagagcgugaucaccuacgagaacaacaccugggugaaccagaccuacgugaacaucagcaacaccaacuucgccgccggccagagcguggugcccgugaagcuggccggcaacagcagccugugccccgugagcggcugggccaucuacagcaaggacaacagcgugagaaucggcagcaagggcgacguguucgugaucagagagcccuucaucagcugcagcccccuggagugcagaaccuucuuccugacccagggcgcccugcugaacgacaagcacagcaacggcaccaucaaggacagaagccccuacagaacccugaugagcugccccaucggcgaggugcccagccccuacaacagcagauucgagagcguggccuggagcgccagcgccugccacgacggcaucaacuggcugaccaucggcaucagcggccccgacaacggcgccguggccgugcugaaguacaacggcaucaucaccgacaccaucaagagcuggagaaacaacauccugagaacccaggagagcgagugcgccugcgugaacggcagcugcuucaccaucaugaccgacggccccagcgacggccaggccagcuacaagaucuucagaaucgagaagggcaagaucgugaagagcguggagaugaacgcccccaacuaccacuacgaggagugcagcugcuaccccgacagcagcgagaucaccugcgugugcagagacaacuggcacggcagcaacagacccugggugagcuucaaccagaaccuggaguaccagaucggcuacaucugcagcggcguguucggcgacaaccccagacccaacgacaagaccggcagcugcggccccgugaccagcaacggcgccaacggcgugaagggcuucagcuucaaguacggcaacggcguguggaucggcagaaccaagagcaucagcagcagaaagggcuucgagaugaucugggaccccaacggcuggaccggcaccgacaacaacuucagcaucaagcaggacaucaucggcaucaaggaguggagcggcuacagcggcagcuucgugcagcaccccgagcugaccggccuggacugcaucagacccugcuucuggguggagcugaucagaggcagacccgaggagaacaccaucuggaccagcggcagcagcaucagcuucugcggcgugaacagcgacaccgugggcuggagcuggcccgacggcgccgagcugcccuucaccaucgacaaguga

SEQ ID NO: 185801 - RNA, 1410 nt, Artificial Sequence
  derived and/or modified CDS sequence (opt4) from neuraminidase__InfluenzaA__AIM56097
augaaccccaaccagaagaucaucaccaucggcagcgugugcaugaccaucggcauggccaaccugauccugcagaucggcaacaucaucagcaucugggugagccacagcauccagcugggcaaccagagccagaucgagaccugcaaccagagcgugaucaccuacgagaacaacaccugggugaaccagaccuacgugaacaucagcaacaccaacuucgccgccgagcagagcguggugagcgugaagcuggccggcaacagcagccugugccccgugagcggcugggccaucuacagcaaggacaacagcgugagaaucggcagcaagggcgacguguucgugaucagagagcccuucaucagcugcagcccccuggagugcagaaccuucuuccugacccagggcgcccugcugaacgacaagcacagcaacggcaccaucaaggacagaagccccuacagaacccugaugagcugccccaucggcgaggugcccagccccuacaacagcagauucgagagcguggccuggagcgccagcgccugccacgacggcaucaacuggcugaccaucggcaucagcggccccgacagcggcgccguggccgugcugaaguacaacggcaucaucaccgacaccaucaagagcuggagaaacaacauccugagaacccaggagagcgagugcgccugcgugaacggcagcugcuucaccaucaugaccgacggccccagcgacggccaggccagcuacaagaucuucagaaucgagaagggcaagaucgugaagagcguggagaugaacgcccccaacuaccacuacgaggagugcagcugcuaccccgacagcagcgagaucaccugcgugugcagagacaacuggcacggcagcaacagacccugggugagcuucaaccagaaccuggaguaccagaucggcuacaucugcagcggcguguucggcgacaaccccagacccaacgacaagaccggcagcugcggccccgugagcagcaacggcgccaacggcgugaagggcuucagcuucaaguacggcaacggcguguggaucggcagaaccaagagcaucagcagcagaaagggcuucgagaugaucugggaccccaacggcuggaccggcaccgacaacaacuucagcaucaagcaggacaucgugggcaucaaggaguggagcggcuacagcggcagcuucgugcagcaccccgagcugaccggccuggacugcaucagacccugcuucuggguggagcugaucagaggcagacccgaggagaacaccaucuggaccagcggcagcagcaucagcuucugcggcgugaacagcgacaccgugggcuggagcuggcccgacggcgccgagcugcccuucaccaucgacaaguga

SEQ ID NO: 185802 - RNA, 1410 nt, Artificial Sequence
  derived and/or modified CDS sequence (opt4) from neuraminidase__InfluenzaA__AIM56108
augaaccccaaccagaagaucaucaccaucggcagcgugugcaugaccaucggcauggccaaccugauccugcagaucggcaacaucaucagcaucugggugagccacagcauccagcugggcaaccagagccagaucgagaccugcaaccagagcgugaucaccuacgagaacaacaccuggaucaaccagaccuacgugaacaucagcaacaccaacuucgccgccggccagagcguggugcccgugaagcuggccggcaacagcagccugugccccgugagcggcugggccaucuacagcaaggacaacagcgugagaaucggcagcaagggcgacguguucgugaucagagagcccuucaucagcugcagcccccuggagugcagaaccuucuuccugacccagggcgcccugcugaacgacaagcacagcaacggcaccaucaaggacagaagccccuacagaacccugaugagcugccccaucggcgaggugcccagccccuacaacagcagauucgagagcguggccuggagcgccagcgccugccacgacggcaucaacuggcugaccaucggcaucagcggccccgacagcggcgccguggccgugcugaaguacaacggcaucaucaccgacaccaucaagagcuggagaaacaacauccugagaacccaggagagcgagugcgccugcgugaacggcagcugcuucaccaucaugaccgacggccccagcgacggccaggccagcuacaagaucuucagaaucgagaagggcaagaucgugaagagcguggagaugaacgcccccaacuaccacuacgaggagugcagcugcuaccccgacagcagcgagaucaccugcgugugcagagacaacuggcacggcagcaacagacccugggugagcuucaaccagaaccuggaguaccagaucggcuacaucugcagcggcguguucggcgacaaccccagacccaacgacaagaccggcagcugcggccccgugagcagcaacggcgccaacggcgugaagggcuucagcuucaaguacggcaacggcguguggaucggcagaaccaagagcaucagcagcagaaagggcuucgagaugaucugggaccccaacggcuggaccggcaccgacaacaacuucagcaucaagcaggacaucgugggcaucaaggaguggagcggcuacagcggcagcuucgugcagcaccccgagcugaccggccuggacugcaucagacccugcuucuggguggagcugaucagaggcagacccgaggagaacaccaucuggaccagcggcagcagcaucagcuucugcggcgugaacagcgacaccgugggcuggagcuggcccgacggcgccgagcugcccuucaccaucgacaaguga

SEQ ID NO: 185803 - RNA, 1410 nt, Artificial Sequence
  derived and/or modified CDS sequence (opt4) from neuraminidase__InfluenzaA__AIM56119
augaaccccaaccagaagaucaucaccaucggcagcgugugcaugaccaucggcauggccaaccugauccugcagaucggcaacaucaucagcaucugggugagccacagcauccagaucggcaaccagagccagaucgagaccugcaaccagagcgugaucaccuacgagaacaacaccugggugaaccagaccuacgugaacaucagcaacaccaacuucgccgccggccagagcguggugagcgugaagcuggccggcaacagcagccugugccccgugagcggcugggccaucuacagcaaggacaacagcgugagaaucggcagcaagggcgacguguucgugaucagagagcccuucaucagcugcagcccccuggagugcagaaccuucuuccugacccagggcgcccugcugaacgacaagcacagcaacggcaccaucaaggacagaagccccuacagaacccugaugagcugccccaucggcgaggugcccagccccuacaacagcagauucgagagcguggccuggagcgccagcgccugccacgacggcaucaacuggcugaccaucggcaucagcggccccgacagcggcgccguggccgugcugaaguacaacggcaucaucaccgacaccaucaagagcuggagaaacaacauccugagaacccaggagagcgagugcgccugcgugaacggcagcugcuucaccaucaugaccgacggccccagcgacggccaggccagcuacaagaucuucagaaucgagaagggcaagaucgugaagagcguggagaugaacgcccccaacuaccacuacgaggagugcagcugcuaccccgacagcagcgagaucaccugcgugugcagagacaacuggcacggcagcaacagacccugggugagcuucaaccagaaccuggaguaccagaucggcuacaucugcagcggcguguucggcgacaaccccagacccaacgacaagaccggcagcugcggccccgugagcagcaacggcgccaacggcgugaagggcuucagcuucaaguacggcaacggcguguggaucggcagaaccaagagcaucagcagcagaaagggcuucgagaugaucugggaccccaacggcuggaccggcaccgacaacaaguucagcaucaagcaggacaucgugggcaucaacgaguggagcggcuacagcggcagcuucgugcagcaccccgagcugaccggccuggacugcaucagacccugcuucuggguggagcugaucagaggcagacccgaggagaacaccaucuggaccagcggcagcagcaucagcuucugcggcgugaacagcgacaccgugggcuggagcuggcccgacggcgccgagcugcccuucaccaucgacaaguga

SEQ ID NO: 185804 - RNA, 1410 nt, Artificial Sequence
  derived and/or modified CDS sequence (opt4) from neuraminidase__InfluenzaA__AIM56130
augaaccccaaccagaagaucaucaccaucggcagcgugugcaugaccaucggcauggccaaccugauccugcagaucggcaacaucaucagcaucugggugagccacagcauccagcugggcaaccagagccagaucgagaccugcaaccagagcgugaucaccuacgagaacaacaccugggugaaccagaccuacgugaacaucagcaacaccaacuucgccgccggccagagcguggugcccgugaagcuggccggcaacagcagccugugccccgugagcggcugggccaucuacagcaaggacaacagcgugagaaucggcagcaagggcgacguguucgugaucagagagcccuucaucagcugcagcccccuggagugcagaaccuucuuccugacccagggcgcccugcugaacgacaagcacagcaacggcaccaucaaggacagaagccccuacagaacccugaugagcugccccaucggcgaggugcccagccccuacaacagcagauucgagagcguggccuggagcgccagcgccugccacgacggcaucaacuggcugaccaucggcaucagcggccccgacagcggcgccguggccgugcugaaguacaacggcaucaucaccgacaccaucaagagcuggagaaacaacauccugagaacccaggagagcgagugcgccugcgugaacggcagcugcuucaccaucaugaccgacggccccagcgacggccaggccagcuacaagaucuucagaaucgagaagggcaagaucgugaagagcguggagaugaacgcccccaacuaccacuacgaggagugcagcugcuaccccgacagcagcgagaucaccugcgugugcagagacaacuggcacggcagcaacagacccugggugagcuucaaccagaaccuggaguaccagaucggcuacaucugcagcggcguguucggcgacaaccccagacccaacgacaagaccggcagcugcggccccgugagcagcaacggcgccaacggcgugaagggcuucagcuucaaguacggcaacggcguguggaucggcagaaccaagagcaucagcagcagaaagggcuucgagaugaucugggaccccaacggcuggaccggcaccgacaacaaguucagcaucaagcaggacaucgugggcaucaacgaguggagcggcuacagcggcagcuucgugcagcaccccgagcugaccggccuggacugcaucagacccugcuucuggguggagcugaucagaggcagacccgaggagaacaccaucuggaccagcggcagcagcaucagcuucugcggcgugaagagcgacaccgugggcuggagcuggcccgacggcgccgagcugcccuucaccaucgacaaguga

SEQ ID NO: 185805 - RNA, 1410 nt, Artificial Sequence
  derived and/or modified CDS sequence (opt4) from neuraminidase__InfluenzaA__AIM56141
augaaccccaaccagaagaucaucaccaucggcagcgugugcaugaccaucggcauggccaaccugauccugcagaucggcaacaucaucagcaucugggugagccacagcauccagcugggcaaccagagccagaucgagaccugcaaccagagcgugaucaucuacgagaacaacaccugggugaaccagaccuacgugaacaucagcaacaccaacuucgccgccggccagagcguggugagcgugaagcuggccggcaacagcagccugugccccgugagcggcugggccaucuacagcaaggacaacagcgugagaaucggcagcaagggcgacguguucgugaucagagagcccuucaucagcugcagcccccuggagugcagaaccuucuuccugacccagggcgcccugcugaacgacaagcacagcaacggcaccaucaaggacagaagccccuacagaacccugaugagcugccccaucggcgaggugcccagccccuacaacagcagauucgagagcguggccuggagcgccagcgccugccacgacggcaucaacuggcugaccaucggcaucagcggccccgacagcggcgccguggccgugcugaaguacaacggcaucaucaccgacaccaucaagagcuggagaaacaacauccugagaacccaggagagcgagugcgccugcgugaacggcagcugcuucaccaucaugaccgacggccccagcgacggccaggccagcuacaagaucuucagaaucgagaagggcaagaucgugaagagcguggagaugaacgcccccaacuaccacuacgaggagugcagcugcuaccccgacagcagcgagaucaccugcgugugcagagacaacuggcacggcagcaacagacccugggugagcuucaaccagaaccuggaguaccagaucggcuacaucugcagcggcguguucggcgacaaccccagacccaacgacaagaccggcagcugcggccccgugagcagcaacggcgccaacggcgugaagggcuucagcuucaaguacggcaacggcguguggaucggcagaaccaagagcaucagcagcagaaagggcuucgagaugaucugggaccccaacggcuggaccggcaccgacaacaacuucagcaucaagcaggacaucgugggcaucaaggaguggagcggcuacagcggcagcuucgugcagcaccccgagcugaccggccuggacugcaucagacccugcuucuggguggagcugaucagaggcagacccgaggagaacaccaucuggaccagcggcagcagcaucagcuucugcggcgugaacagcgacaccgugggcuggagcuggcccgacggcgccgagcugcccuucaccaucgacaaguga

SEQ ID NO: 185806 - RNA, 1410 nt, Artificial Sequence; identical to SEQ ID NO: 185791
  derived and/or modified CDS sequence (opt4) from neuraminidase__InfluenzaA__AIM56152

SEQ ID NO: 185807 - RNA, 1410 nt, Artificial Sequence
  derived and/or modified CDS sequence (opt4) from neuraminidase__InfluenzaA__AIM56163
augaaccccaaccagaagaucaucaccaucggcagcgugugcaugaccaucggcauggccaaccugauccugcagaucggcaacaucaucagcaucugggugagccacagcauccagcugggcaaccagagccacaucgagaccugcaaccagagcgugaucaccuacgagaacaacaccugggugaaccagaccuacgugaacaucagcaacaccaacuucgccgccggccagagcguggugcccgugaagcuggccggcaacagcagccugugccccgugagcggcugggccaucuacagcaaggacaacagcgugagaaucggcagcaagggcgacguguucgugaucagagagcccuucaucagcugcagcccccuggagugcagaaccuucuuccugacccagggcgcccugcugaacgacaagcacagcaacggcaccaucaaggacagaagccccuacagaacccugaugagcugccccaucggcgaggugcccagccccuacaacagcagauucgagagcguggccuggagcgccagcgccugccacgacggcaucaacuggcugaccaucggcaucagcggccccgacaacggcgccguggccgugcugaaguacaacggcaucaucaccgacaccaucaagagcuggagaaacaacauccugagaacccaggagagcgagugcgccugcgugaacggcagcugcuucaccaucaugaccgacggccccagcgacggccaggccagcuacaagaucuucagaaucgagaagggcaagaucgugaagagcguggagaugaacgcccccaacuaccacuacgaggagugcagcugcuaccccgacagcagcgagaucaccugcgugugcagagacaacuggcacggcagcaacagacccugggugagcuucaaccagaaccuggaguaccagaucggcuacaucugcagcggcguguucggcgacaaccccagacccaacgacaagaccggcagcugcggccccgugaccagcaacggcgccaacggcgugaagggcuucagcuucaaguacggcaacggcguguggaucggcagaaccaagagcaucagcagcagaaagggcuucgagaugaucugggaccccaacggcuggaccggcaccgacaacaacuucagcaucaagcaggacaucgugggcaucaaggaguggagcggcuacagcggcagcuucgugcagcaccccgagcugaccggccuggacugcaucagacccugcuucuggguggagcugaucagaggcagacccgaggagaacaccaucuggaccagcggcagcagcaucagcuucugcggcgugaacagcgacaccgugggcuggagcuggcccgacggcgccgagcugcccuucaccaucgacaaguga

SEQ ID NO: 185808 - RNA, 1410 nt, Artificial Sequence
  derived and/or modified CDS sequence (opt4) from neuraminidase__InfluenzaA__AIM56174
augaaccccaaccagaagaucaucaccaucggcagcgugugcaugaccaucggcauggccaaccugauccugcagaucggcaacaucaucagcaucugggugagccacagcauccagcugggcaaccagagccagaucgagaccugcaaccagagcgugaucaccuacgagaacaacaccugggugaaccagaccuacgugaacaucagcaacaccaacuucgccgccggccagagcguggugcccgugaagcuggccggcaacagcagccugugccccgugagcggcugggccaucuacagcaaggacaacagcgugagaaucggcagcaagggcgacguguucgugaucagagagcccuucaucagcugcagcccccuggagugcagaaccuucuuccugacccagggcgcccugcugaacgacaagcacagcaacggcaccaucaaggacagaagccccuacagaacccugaugagcugccccaucggcgaggugcccagccccuacaacagcagauucgagagcguggccuggagcgccagcgccugccacgacggcaucaacuggcugaccaucggcaucagcggccccgacagcggcgccguggccgugcugaaguacaacggcaucaucaccgacaccaucaagagcuggagaaacaacauccugagaacccaggagagcgagugcgccugcgugaacggcagcugcuucaccaucaugaccgacggccccagcgacggccaggccagcuacaagaucuucagaaucgagaagggcaagaucgugaagagcguggagaugaacgcccccaacuaccacuacgaggagugcagcugcuaccccgacagcagcgagaucaccugcgugugcagagacaacuggcacggcagcaacagacccugggugagcuucaaccagaaccuggaguaccagaucggcuacaucugcagcggcguguucggcgacaaccccagacccaacgacaagaccggcagcugcggccccgugagcagcaacggcgccaacggcgugaagggcuucagcuucaaguacggcaacggcguguggaucggcagaaccaagagcaucagcagcagaaagggcuucgagaugaucugggaccccaacggcuggaccggcaccgacaacaacuucagcaucaagcaggacaucgugggcaucaaggaguggagcggcuacagcggcagcuucgugcagcaccccgagcugaccggccuggacugcaucagacccugcuucuggguggagcugaucagaggcagacccgaggagaacaccaucuggaccagcggcagcagcaucagcuucugcggcgugaacagcgacaccgugggcuggagcuggcccgacggcgccgagcugcccuucaccguggacaaguga

SEQ ID NO: 185809 - RNA, 1410 nt, Artificial Sequence; identical to SEQ ID NO: 185804
  derived and/or modified CDS sequence (opt4) from neuraminidase__InfluenzaA__AIM56185

SEQ ID NO: 185810 - RNA, 1410 nt, Artificial Sequence; identical to SEQ ID NO: 185803
  derived and/or modified CDS sequence (opt4) from neuraminidase__InfluenzaA__AIM56196

SEQ ID NO: 185811 - RNA, 1410 nt, Artificial Sequence; identical to SEQ ID NO: 185785
  derived and/or modified CDS sequence (opt4) from neuraminidase__InfluenzaA__AIM56207

SEQ ID NO: 185812 - RNA, 1410 nt, Artificial Sequence
  derived and/or modified CDS sequence (opt4) from neuraminidase__InfluenzaA__AIM56229
augaaccccaaccagaagaucaucaccaucggcagcgugugcaugaccaucggcauggccaaccugauccugcagaucggcaacaccaucagcaucugggugagccacagcauccagaucggcaaccagagccagaucgagaccugcaaccagagcgugaucaccuacgagaacaacaccugggugaaccagaccuacgugaacaucagcaacaccaacuucgccgccggccagagcguggugagcgugaagcuggccggcaacagcagccugugccccgugagcggcugggccaucuacagcaaggacaacagcgugagaaucggcagcaagggcgacguguucgugaucagagagcccuucaucagcugcagcccccuggagugcagaaccuucuuccugacccagggcgcccugcugaacgacaagcacagcaacggcaccaucaaggacagaagccccuacagaacccugaugagcugccccaucggcgaggugcccagccccuacaacagcagauucgagagcguggccuggagcgccagcgccugccacgacggcaucaacuggcugaccaucggcaucagcggccccgacagcggcgccguggccgugcugaaguacaacggcaucaucaccgacaccaucaagagcuggagaaacaacauccugagaacccaggagagcgagugcgccugcgugaacggcagcugcuucaccaucaugaccgacggccccagcgacggccacgccagcuacaagaucuucagaaucgagaagggcaagaucgugaagagcguggagaugaacgcccccaacuaccacuacgaggagugcagcugcuaccccgacagcagcgagaucaccugcgugugcagagacaacuggcacggcagcaacagacccugggugagcuucaaccagaaccuggaguaccagaucggcuacaucugcagcggcguguucggcgacaaccccagacccaacgacaagaccggcagcugcggccccgugagcagcaacggcgccaacggcgugaagggcuucagcuucaaguacggcaacggcguguggaucggcagaaccaagagcaucagcagcagaaagggcuucgagaugaucugggaccccaacggcuggaccggcaccgacaacaaguucagcaucaagcaggacaucgugggcaucaacgaguggagcggcuacagcggcagcuucgugcagcaccccgagcugaccggccuggacugcaucagacccugcuucuggguggagcugaucagaggcagacccgaggagaacaccaucuggaccagcggcagcagcaucagcuucugcggcgugaacagcgacaccgugggcuggagcuggcccgacggcgccgagcugcccuucaccaucgacaaguga

SEQ ID NO: 185813 - RNA, 1410 nt, Artificial Sequence
  derived and/or modified CDS sequence (opt4) from neuraminidase__InfluenzaA__AIM56240
augaaccccaaccagaagaucaucaccaucggcagcgugugcaugaccaucggcauggccaaccugauccugcagaucggcaacaucaucagcaucuggaucagccacagcauccaggugggcaaccagagccagaucgagaccugcaaccagagcgugaucaccuacgagaacaacaccugggugaaccagaccuacgugaacaucagcaacaccaacuucgccgccggccagcccguggugagcgugaagcuggccggcaacagcagccugugcagcgugagcggcugggccaucuacagcaaggacaacagcgugagaaucggcagcaagggcgacguguucgugaucagagagcccuucaucagcugcagcccccuggagugcagaaccuucuuccugacccagggcgcccugcugaacgacaagcacagcaacggcaccaucaaggacagaagccccuacagaacccugaugagcugccccaucggcgaggugcccagccccuacaacagcagauucgagagcguggccuggagcgccagcgccugccacgacggcaucaacuggcugaccaucggcaucagcggccccgacagcggcgccguggccgugcugaaguacaacggcaucaucaccgacaccaucaagagcuggagaaacgacauccugagaacccaggagagcgagugcgccugcgugaacggcagcugcuucaccaucaugaccgacggccccagcgacggccaggccagcuacaagaucuucagaaucgagaagggcaagaucgugaagagcguggagaugaacgcccccaacuaccacuacgaggagugcagcugcuaccccgacagcagcgagaucaccugcgugugcagagacaacuggcacggcagcaacagacccugggugagcuucaaccagaaccuggaguaccagaucggcuacaucugcagcggcaucuucggcgacaaccccagacccaacgacaagaccggcagcugcggccccgugagcagcaacggcgccaacggcgugaagggcuucagcuucaaguacggcaacggcguguggaucggcagaaccaagagcaucagcagcagaaagggcuucgagaugaucugggaccccaacggcuggaccggcaccgacaacaacuucagcaucaagcaggacaucgugggcaucaacgaguggagcggcuacagcggcagcuucgugcagcaccccgagcugaccggccuggacugcaucagacccugcuucuggguggagcugaucagaggcagacccaaggagaacaccaucuggaccagcggcagcagcaucagcuucugcggcgugaacagcgacaccgugggcuggagcuggcccgacggcgccgagcugcccuucaccaucgacaaguga

SEQ ID NO: 185814 - RNA, 1410 nt, Artificial Sequence
  derived and/or modified CDS sequence (opt4) from neuraminidase__InfluenzaA__AIM56251
augaaccccaaccagaagaucaucaccaucggcagcgugugcaugaccaucggcauggccaaccugauccugcagaucggcaacaucaucagcaucugggugagccacagcauccagcugggcaaccagagccacaucgagaccugcaaccagagcgugaucaccuacgagaacaacaccugggugaaccagaccuacgugaacaucagcaacaccaacuucgccgccggccagagcguggugcccgugaagcuggccggcaacagcagccugugccccgugagcggcugggccaucuacagcaaggacaacagcgugagaaucggcagcaagggcgacguguucgugaucagagagcccuucaucagcugcagcccccuggagugcagaaccuucuuccugacccagggcgcccugcugaacgacaagcacagcaacggcaccaucaaggacagaagccccuacagaacccugaugagcugccccaucggcgaggugcccagccccuacaacagcagauucgagagcguggccuggagcgccagcgccugccacgacggcaucaacuggcugaccaucggcaucagcggccccgacagcggcgccguggccgugcugaaguacaacggcaucaucaccgacaccaucaagagcuggagaaacaacauccugagaacccaggagagcgagugcgccugcgugaacggcagcugcuucaccaucaugaccgacggccccagcgacggccaggccagcuacaagaucuucagaaucgagaagggcaagaucgugaagagcguggagaugaacgcccccaacuaccacuacgaggagugcagcugcuaccccgacagcagcgagaucaccugcgugugcagagacaacuggcacggcagcaacagacccugggugagcuucaaccagaaccuggaguaccagaucggcuacaucugcagcggcguguucggcgacaaccccagacccaacgacaagaccggcagcugcggccccgugagcagcaacggcgccaacggcgugaagggcuucagcuucaaguacggcaacggcguguggaucggcagaaccaagagcaucagcagcagaaagggcuucgagaugaucugggaccccaacggcuggaccggcaccgacaacaacuucagcaucaagcaggacaucgugggcaucaaggaguggagcggcuacagcggcagcuucgugcagcaccccgagcugaccggccuggacugcaucagacccugcuucuggguggagcugaucagaggcagacccgaggagaacaccaucuggaccagcggcagcagcaucagcuucugcggcgugaacagcgacaccgugggcuggagcuggcccgacggcgccgagcugcccuucaccaucgacaaguga

SEQ ID NO: 185815 - RNA, 1410 nt, Artificial Sequence; identical to SEQ ID NO: 185814
  derived and/or modified CDS sequence (opt4) from neuraminidase__InfluenzaA__AIM56262

SEQ ID NO: 185816 - RNA, 1410 nt, Artificial Sequence; identical to SEQ ID NO: 185785
  derived and/or modified CDS sequence (opt4) from neuraminidase__InfluenzaA__AIM56273

SEQ ID NO: 185817 - RNA, 1410 nt, Artificial Sequence
  derived and/or modified CDS sequence (opt4) from neuraminidase__InfluenzaA__AIM56284
augaaccccaaccagaagaucaucaccaucggcagcgugugcaucaccaucggcauggccaaccugauccugcagaucggcaacaucaucagcaucugggugagccacagcauccagaucggcaaccagagccagaucgagaccugcaaccagagcgugaucaccuacgagaacaacaccugggugaaccagaccuacgugaacaucagcaacaccaacuucgccgccggccagagcguggugagcgugaagcuggccggcaacagcagccugugccccgugagcggcugggccaucuacagcaaggacaacagcgugagaaucggcagcaagggcgacguguucgugaucagagagcccuucaucagcugcagcccccuggagugcagaaccuucuuccugacccagggcgcccugcugaacgacaagcacagcaacggcaccaucaaggacagaagccccuacagaacccugaugagcugccccaucggcgaggugcccagccccuacaacagcagauucgagagcguggccuggagcgccagcgccugccacgacggcaucaacuggcugaccaucggcaucagcggccccgacagcggcgccguggccgugcugaaguacaacggcaucaucaccgacaccaucaagagcuggagaaacaacauccugagaacccaggagagcgagugcgccugcgugaacggcagcugcuucaccaucaugaccgacggccccagcgacggccaggccagcuacaagaucuucagaaucgagaagggcaagaucgugaagagcguggagaugaacgcccccaacuaccacuacgaggagugcagcugcuaccccgacagcagcgagaucaccugcgugugcagagacaacuggcacggcagcaacagacccugggugagcuucaaccagaaccuggaguaccagaucggcuacaucugcagcggcguguucggcgacaaccccagacccaacgacaagaccggcagcugcggccccgugagcagcaacggcgccaacggcgugaagggcuucagcuucaaguacggcaacggcguguggaucggcagaaccaagagcaucagcagcagaaagggcuucgagaugaucugggaccccaacggcuggaccggcaccgacaacaaguucagcaucaagcaggacguggugggcaucaacgaguggagcggcuacagcggcagcuucgugcagcaccccgagcugaccggccuggacugcaucagacccugcuucuggguggagcugaucagaggcagacccgaggagaacaccaucuggaccagcggcagcagcaucagcuucugcggcgugaacagcgacaccgugggcuggagcuggcccgacggcgccgagcugcccuucaccaucgacaaguga

SEQ ID NO: 185818 - RNA, 1410 nt, Artificial Sequence; identical to SEQ ID NO: 185785
  derived and/or modified CDS sequence (opt4) from neuraminidase__InfluenzaA__AIM56295

SEQ ID NO: 185819 - RNA, 1410 nt, Artificial Sequence; identical to SEQ ID NO: 185785
  derived and/or modified CDS sequence (opt4) from neuraminidase__InfluenzaA__AIM56306

SEQ ID NO: 185820 - RNA, 1410 nt, Artificial Sequence; identical to SEQ ID NO: 185785
  derived and/or modified CDS sequence (opt4) from neuraminidase__InfluenzaA__AIM56317

SEQ ID NO: 185821 - RNA, 1410 nt, Artificial Sequence; identical to SEQ ID NO: 185804
  derived and/or modified CDS sequence (opt4) from neuraminidase__InfluenzaA__AIM56339

SEQ ID NO: 185822 - RNA, 1410 nt, Artificial Sequence
  derived and/or modified CDS sequence (opt4) from neuraminidase__InfluenzaA__AIM56350
augaaccccaaccagaagaucaucaccaucggcagcgugugcaugaccaucggcauggccaaccugauccugcagaucggcaacaucaucagcaucugggugagccacagcauccagcugggcaaccagagccagaucgagaccugcaaccagagcgugaucaccuacgagaacaacaccugggugaaccagaccuacgugaacaucagcaacaccaacuucgccgccggccagagcguggugcccgugaagcuggccggcaacagcagccugugccccgugagcggcugggccaucuacagcaaggacaacagcgugagaaucggcagcaagggcgacguguucgugaucagagagcccuucaucagcugcagcccccuggagugcagaaccuucuuccugacccagggcgcccugcugaacgacaagcacagcaacggcaccaucaaggacagaagccccuacagaacccugaugagcugccccaucggcgaggugcccagccccuacaacagcagauucgagagcguggccuggagcgccagcgccugccacgacggcaucaacuggcugaccaucggcaucagcggccccgacagcggcgccguggccgugcugaaguacaacggcaucaucaccgacaccaucaagagcuggagaaacaacauccugagaacccaggagagcgagugcgccugcgugaacggcagcugcuucaccaucaugaccgacggccccagcgacggccaggccagcuacaagaucuucagaaucgagaagggcaagaucgugaagagcguggagaugaacgcccccaacuaccacuacgaggagugcagcugcuaccccgacagcagcgagaucaccugcgugugcagagacaacuggcacggcagcaacagacccugggugagcuucaaccagaaccuggaguaccagaucggcuacaucugcagcggcguguucggcgacaaccccagacccaacgacaagaccggcagcugcggccccgugagcagcaacggcgccaacggcgugaagggcuucagcuucaaguacggcaacggcguguggaucggcagaaccaagagcaucagcagcagaaagggcuucgagaugaucugggaccccaacggcuggaccggcaccgacaacaacuucagcaucaagcaggacaucgugggcaucaaggaguggagcggcuacagcggcagcuucgugcagcaccccgagcugaccggccuggacugcaucagacccugcuucuggguggagcugaucagaggcagacccgaggagaacaccaucuggaccagcggcagcagcaucagcuucugcggcaucaacagcgacaccgugggcuggagcuggcccgacggcgccgagcugcccuucaccaucgacaaguga

SEQ ID NO: 185823 - RNA, 1410 nt, Artificial Sequence; identical to SEQ ID NO: 185814
  derived and/or modified CDS sequence (opt4) from neuraminidase__InfluenzaA__AIM56361

SEQ ID NO: 185824 - RNA, 1410 nt, Artificial Sequence; identical to SEQ ID NO: 185785
  derived and/or modified CDS sequence (opt4) from neuraminidase__InfluenzaA__AIM56372

SEQ ID NO: 185825 - RNA, 1410 nt, Artificial Sequence; identical to SEQ ID NO: 185814
  derived and/or modified CDS sequence (opt4) from neuraminidase__InfluenzaA__AIM56383

SEQ ID NO: 185826 - RNA, 1410 nt, Artificial Sequence
  derived and/or modified CDS sequence (opt4) from neuraminidase__InfluenzaA__AIM56394
augaaccccaaccagaagaucaucaccaucggcagcgugugcaugaccaucggcauggccaaccugauccugcagaucggcaacaucaucagcaucugggugagccacagcauccagaucggcaaccagagccagaucgagaccugcaaccagagcgugaucaccuacgagaacaacaccugggugaaccagaccuacgugaacaucagcaacaccaacuucgccgccggccagagcguggugagcgugaagcuggccggcaacagcagccugugccccgugagcggcugggccaucuacagcaaggacaacagcgugagaaucggcagcaagggcgacguguucgugaucagagagcccuucaucagcugcagcccccuggagugcagaaccuucuuccugacccagggcgcccugcugaacgacaagcacagcaacggcaccaucaaggacagaagccccuacagaacccugaugagcugccccaucggcgaggugcccagccccuacaacagcagauucgagagcguggccuggagcgccagcgccugccacgacggcaucaacuggcugaccaucggcaucagcggccccgacagcggcgccguggccgugcugaaguacaacggcaucaucaccgacaccaucaagagcuggagaaacaacauccugagaacccaggagagcgagugcgccugcgugaacggcagcugcuucaccaucaugaccgacggccccagcgacggccaggccagcuacaagaucuucagaaucgagaagggcaagaucgugaagagcguggagaugaacgcccccaacuaccacuacgaggagugcagcugcuaccccgacagcagcgagaucaccugcgugugcagagacaacuggcacggcagcaacagacccugggugagcuucaaccagaaccuggaguaccagaucggcuacaucugcagcggcaucuucggcgacaaccccagacccaacgacaagaccggcagcugcggccccgugagcagcaacggcgccaacggcgugaagggcuucagcuucaaguacggcaacggcguguggaucggcagaaccaagagcaucagcagcagaaagggcuucgagaugaucugggaccccaacggcuggaccggcaccgacaacaaguucagcaucaagcaggacaucgugggcaucaacgaguggagcggcuacagcggcagcuucgugcagcaccccgagcugaccggccuggacugcaucagacccugcuucuggguggagcugaucagaggcagacccgaggagaacaccaucuggaccagcggcagcagcaucagcuucugcggcgugaacagcgacaccgugggcuggagcuggcccgacggcgccgagcugcccuucaccaucgacaaguga

SEQ ID NO: 185827 - RNA, 1410 nt, Artificial Sequence; identical to SEQ ID NO: 185803
  derived and/or modified CDS sequence (opt4) from neuraminidase__InfluenzaA__AIM56405

SEQ ID NO: 185828 - RNA, 1410 nt, Artificial Sequence
  derived and/or modified CDS sequence (opt4) from neuraminidase__InfluenzaA__AIM56416
augaaccccaaccagaagaucaucaccaucggcagcgugugcaugaccaucggcauggccaaccugauccugcagaucggcaacaucaucagcaucugggugagccacagcauccagcugggcaaccagagccacaucgagaccugcaaccagagcgugaucaccuacgagaacaacaccugggugaaccagaccuacgugaacaucagcaacaucaacuucgccgccggccagagcguggugcccgugaagcuggccggcaacagcagccugugccccgugagcggcugggccaucuacagcaaggacaacagcgugagaaucggcagcaagggcgacguguucgugaucagagagcccuucaucagcugcagcccccuggagugcagaaccuucuuccugacccagggcgcccugcugaacgacaagcacagcaacggcaccaucaaggacagaagccccuacagaacccugaugagcugccccaucggcgaggugcccagccccuacaacagcagauucgagagcguggccuggagcgccagcgccugccacgacggcaucaacuggcugaccaucggcaucagcggccccgacaacggcgccguggccgugcugaaguacaacggcaucaucaccgacaccaucaagagcuggagaaacaacauccugagaacccaggagagcgagugcgccugcgugaacggcagcugcuucaccaucaugaccgacggccccagcgacggccaggccagcuacaagaucuucagaaucgagaagggcaagaucgugaagagcguggagaugaacgcccccaacuaccacuacgaggagugcagcugcuaccccgacagcagcgagaucaccugcgugugcagagacaacuggcacggcagcaacagacccugggugagcuucaaccagaaccuggaguaccagaucggcuacaucugcagcggcguguucggcgacaaccccagacccaacgacaagaccggcagcugcggccccgugaccagcaacggcgccaacggcgugaagggcuucagcuucaaguacggcaacggcguguggaucggcagaaccaagagcaucagcagcagaaagggcuucgagaugaucugggaccccaacggcuggaccggcaccgacaacaacuucagcaucaagcaggacaucgugggcaucaaggaguggagcggcuacagcggcagcuucgugcagcaccccgagcugaccggccuggacugcaucagacccugcuucuggguggagcugaucagaggcagacccgaggagaacaccaucuggaccagcggcagcagcaucagcuucugcggcgugaacagcgacaccgugggcuggagcuggcccgacggcgccgagcugcccuucaccaucgacaaguga

SEQ ID NO: 185829 - RNA, 1410 nt, Artificial Sequence; identical to SEQ ID NO: 185803
  derived and/or modified CDS sequence (opt4) from neuraminidase__InfluenzaA__AIM56428

SEQ ID NO: 185830 - RNA, 1410 nt, Artificial Sequence; identical to SEQ ID NO: 185785
  derived and/or modified CDS sequence (opt4) from neuraminidase__InfluenzaA__AIM56439

SEQ ID NO: 185831 - RNA, 1410 nt, Artificial Sequence
  derived and/or modified CDS sequence (opt4) from neuraminidase__InfluenzaA__AIM56450
augaaccccaaccagaagaucaucaccaucggcagcgugugcaugaccaucggcauggccaaccugauccugcagaucggcaacaucaucagcaucuggaucagccacagcauccaggugggcaaccagagccagaucgagaccugcaaccagagcgugaucaccuacgagaacaacaccugggugaaccagaccuacgugaacaucagcaacaccaacuucgccgccggccagcccguggugagcgugaagcuggccggcaacagcagccugugccccgugagcggcugggccaucuacagcaaggacaacagcgugagagugggcagcaagggcgacguguucgugaucagagagcccuucaucagcugcagcccccuggagugcagaaccuucuuccugacccagggcgcccugcugaacgacaagcacagcaacggcaccaucaaggacagaagccccuacagaacccugaugagcugccccaucggcgaggugcccagccccuacaacagcagauucgagagcguggccuggagcgccagcgccugccacgacggcaucaacuggcugaccaucggcaucagcggccccgacagcggcgccguggccgugcugaaguacaacggcaucaucaccgacaccaucaagagcuggagaaacgacauccugagaacccaggagagcgagugcgccugcgugaacggcagcugcuucaccaucaugaccgacggccccagcgacggccaggccagcuacaagaucuucagaaucgagaagggcaagaucgugaagagcguggagaugaacgcccccaacuaccacuacgaggagugcagcugcuaccccgacagcagcgagaucaccugcgugugcagagacaacuggcacggcagcaacagacccugggugagcuucaaccagaaccuggaguacaagaucggcuacaucugcagcggcaucuucggcgacaaccccagacccaacgacaagaccggcagcugcggccccgugagcagcaacggcgccaacggcgugaagggcuucagcuucaaguacggcaacggcguguggaucggcagaaccaagagcaucagcagcagaaagggcuucgagaugaucugggaccccaacggcuggaccggcaccgacaacaacuucagcgugaagcaggacaucgugggcaucaacgaguggagcggcuacagcggcagcuucgugcagcaccccgagcugaccggccuggacugcaucagacccugcuucuggguggagcugaucagaggcagacccaaggagaacaccaucuggaccagcggcagcagcaucagcuucugcggcgugaacagcgacaccgugggcuggagcuggcccgacggcgccgagcugcccuucaccaucgacaaguga

SEQ ID NO: 185832 - RNA, 1410 nt, Artificial Sequence
  derived and/or modified CDS sequence (opt4) from neuraminidase__InfluenzaA__AIM56461
augaaccccaaccagaagaucaucaccaucggcagcgugugcaugaccaucggcauggccaaccugauccugcagaucggcaacaucaucagcaucugggugagccacagcauccagaucggcaaccagagccagaucgagaccugcaaccagagcgugaucaccuacgagaacaacaccugggugaaccagaccuacgugaacaucagcaacaccaacuucgccgccggccagagcguggugagcgugaagcuggccggcaacagcagccugugccccgugagcggcugggccaucuacagcaaggacaacagcgugagaaucggcagcaagggcgacguguucgugaucagagagcccuucaucagcugcagcccccuggagugcagaaccuucuuccugacccagggcgcccugcugaacgacaagcacagcaacggcaccaucaaggacagaagccccuacagaacccugaugagcugccccaucggcgaggugcccagccccuacaacagcagauucgagagcguggccuggagcgccagcgccugccacgacggcaucaacuggcugaccaucggcaucagcggccccgacagcggcgccguggccgugcugaaguacaacggcaucaucaccgacaccaucaagagcuggaagaacaacauccugagaacccaggagagcgagugcgccugcgugaacggcagcugcuucaccaucaugaccgacggccccagcgacggccaggccagcuacaagaucuucagaaucgagaagggcaagaucgugaagagcguggagaugaacgcccccaacuaccacuacgaggagugcagcugcuaccccgacagcagcgagaucaccugcgugugcagagacaacuggcacggcagcaacagacccugggugagcuucaaccagaaccuggaguaccagaucggcuacaucugcagcggcguguucggcgacaaccccagacccaacgacaagaccggcagcugcggccccgugagcagcaacggcgccaacggcgugaagggcuucagcuucaaguacggcaacggcguguggaucggcagaaccaagagcaucagcagcagaaagggcuucgagaugaucugggaccccaacggcuggaccggcaccgacaacaaguucagcaucaagcaggacaucgugggcgugaacgaguggagcggcuacagcggcagcuucgugcagcaccccgagcugaccggccuggacugcaucagacccugcuucuggguggagcugaucagaggcagacccgaggagaacaccaucuggaccagcggcagcagcaucagcuucugcggcgugaacagcgacaccgugggcuggagcuggcccgacggcgccgagcugcccuucaccaucgacaaguga

SEQ ID NO: 185833 - RNA, 1410 nt, Artificial Sequence
  derived and/or modified CDS sequence (opt4) from neuraminidase__InfluenzaA__AIM56472
augaaccccaaccagaagaucaucaccaucggcagcgugugcaugaccaucggcauggccaaccugauccugcagaucggcaacaucaucagcaucugggugagccacagcauccagaucggcaaccagagccagaucgagaccugcaaccagagcgugaucaccuacgagaacaacaccugggugaaccagaccuacgugaacaucagcaacaccaacuucgccgccggccagagcguggugagcgugaagcuggccggcaacagcagccugugccccgugagcggcugggccaucuacagcaaggacaacagcgugagaaucggcagcaagggcgacguguucgugaucagagagcccuucaucagcugcagcccccuggagugcagaaccuucuuccugacccagggcgcccugcugaacgacaagcacagcaacggcaccaucaaggacagaagccccuacagaacccugaugagcugccccaucggcgaggugcccagccccuacaacagcagauucgagagcguggccuggagcgccagcgccugcaacgacggcaucaacuggcugaccaucggcaucagcggccccgacagcggcgccguggccgugcugaaguacaacggcaucaucaccgacaccaucaagagcuggagaaacaacauccugagaacccaggagagcgagugcgccugcgugaacggcagcugcuucaccaucaugaccgacggccccagcgacggccaggccagcuacaagaucuucagaaucgagaagggcaagaucgugaagagcguggagaugaacgcccccaacuaccacuacgaggagugcagcugcuaccccgacagcagcgagaucaccugcgugugcagagacaacuggcacggcagcaacagacccugggugagcuucaaccagaaccuggaguaccagaucggcuacaucugcagcggcguguucggcgacaaccccagacccaacgacaagaccggcagcugcggccccgugagcagcaacggcgccaacggcgugaagggcuucagcuucaaguacggcaacggcguguggaucggcagaaccaagagcaucagcagcagaaagggcuucgagaugaucugggaccccaacggcuggaccggcaccgacaacaaguucagcaucaagcaggacaucgugggcaucaacgaguggagcggcuacagcggcagcuucgugcagcaccccgagcugaccggccuggacugcaucagacccugcuucuggguggagcugaucagaggcagacccgaggagaacaccaucuggaccagcggcagcagcaucagcuucugcggcgugaacagcgacaccgugggcuggagcuggcccgacggcgccgagcugcccuucaccaucgacaaguga

SEQ ID NO: 185834 - RNA, 1410 nt, Artificial Sequence; identical to SEQ ID NO: 185791
  derived and/or modified CDS sequence (opt4) from neuraminidase__InfluenzaA__AIM56483

SEQ ID NO: 185835 - RNA, 1410 nt, Artificial Sequence; identical to SEQ ID NO: 185814
  derived and/or modified CDS sequence (opt4) from neuraminidase__InfluenzaA__AIM56494

SEQ ID NO: 185836 - RNA, 1410 nt, Artificial Sequence; identical to SEQ ID NO: 185804
  derived and/or modified CDS sequence (opt4) from neuraminidase__InfluenzaA__AIM56505

SEQ ID NO: 185837 - RNA, 1410 nt, Artificial Sequence; identical to SEQ ID NO: 185803
  derived and/or modified CDS sequence (opt4) from neuraminidase__InfluenzaA__AIM56516

SEQ ID NO: 185838 - RNA, 1410 nt, Artificial Sequence
  derived and/or modified CDS sequence (opt4) from neuraminidase__InfluenzaA__AIM56527
augaaccccaaccagaagaucaucaccaucggcagcgugugcaugaccaucggcauggccaaccugauccugcagaucggcaacaucaucagcaucugggugagccacagcauccagcugggcaaccagagccagaucgagaccugcaaccagagcgugaucaccuacgagaacaacaccugggugaaccagaccuacgugaacaucagcaacaccaacuucgccgccgagcagagcguggugagcgugaagcuggccggcaacagcagccugugccccgugagcggcugggccaucuacagcaaggacaacagcgugagaaucggcagcaagggcgacguguucgugaucagagagcccuucaucagcugcagcccccuggagugcagaaccuucuuccugacccagggcgcccugcugaacgacaagcacagcaacggcaccaucaaggacagaagccccuacagaacccugaugagcugccccaucggcgaggugcccagccccuacaacagcagauucgagagcguggccuggagcgccagcgccugccacgacggcaucaacuggcugaccaucggcaucagcggccccgacagcggcgccguggccgugcugaaguacaacggcaucaucaccgacaccaucaagagcuggagaaacaacauccugagaacccaggagagcgagugcgccugcgugaacggcagcugcuucaccaucaugaccgacggccccagcgacggccaggccagcuacaagaucuucagaaucgagaagggcaagaucgugaagagcguggagaugaacgcccccaacuaccacuacgaggagugcagcugcuaccccgacagcagcgagaucaccugcgugugcagagacaacuggcacggcagcaacagacccugggugagcuucaaccagaaccuggaguaccagaucggcuacaucugcagcggcgugcugggcgacaaccccagacccaacgacaagaccggcagcugcggccccgugagcagcaacggcgccaacggcgugaagggcuucagcuucaaguacggcaacggcguguggaucggcagaaccaagagcaucagcagcagaaagggcuucgagauggugugggaccccaacggcuggaccggcaccgacaacaacuucagcaucaagcaggacaucgugggcaucaaggaguggagcggcuacagcggcagcuucgugcagcaccccgagcugaccggccuggacugcaucagacccugcuucuggguggagcugaucagaggcagacccgaggagaacaccaucuggaccagcggcagcagcaucagcuucugcggcgugaacagcgacaccgugggcuggagcuggcccgacggcgccgagcugcccuucaccaucgacaaguga

SEQ ID NO: 185839 - RNA, 1410 nt, Artificial Sequence; identical to SEQ ID NO: 185785
  derived and/or modified CDS sequence (opt4) from neuraminidase__InfluenzaA__AIM56538

SEQ ID NO: 185840 - RNA, 1410 nt, Artificial Sequence
  derived and/or modified CDS sequence (opt4) from neuraminidase__InfluenzaA__AIM56549
augaaccccaaccagaagaucaucaccaucggcagcgugugcaugaccaucggcauggccaaccugauccugcagaucggcaacaucaucagcaucugggugagccacagcauccagaucggcaaccagagccagaucgagaccugcaaccagagcgugaucaccuacgagaacaacaccugggugaaccagaccuacgugaacaucagcaacaccaacuucgccgccggccagagcguggugagcgugaagcuggccggcaacagcagccugugccccgugagcggcugggccaucuacagcaaggacaacagcgugagaaucggcagcaagggcgacguguucgugaucagagagcccuucaucagcugcagcccccuggagugcagaaccuucuuccugacccagggcgcccugcugaacgacaagcacagcaacggcaccaucaaggacagaagccccuacagaacccugaugagcugccccaucggcgaggugcccagccccuacaacagcagauucgagagcguggccuggagcgccagcgccugccacgacggcaucaacuggcugaccaucggcaucagcggccccgacagcggcgccguggccgugcugaaguacaacggcaucaucaccgacaccaucaagagcuggagaaacaacauccugagaacccaggagagcgagugcgccugcgugaacggcagcugcuucaccaucaugaccgacggccccagcgacggccaggccagcuacaagaucuucagaaucgagaagggcaagaucgugaagagcguggagaugaacgcccccaacuaccacuacgaggagugcagcugcuaccccgacagcagcgaggugaccugcgugugcagagacaacuggcacggcagcaacagacccugggugagcuucaaccagaaccuggaguaccagaucggcuacaucugcagcggcguguucggcgacaaccccagacccaacgacaagaccggcagcugcggccccgugagcagcaacggcgccaacggcgugaagggcuucagcuucaaguacggcaacggcguguggaucggcagaaccaagagcaucagcagcagaaagggcuucgagaugaucugggaccccaacggcuggaccggcaccgacaacaaguucagcaucaagcaggacaucgugggcaucaacgaguggagcggcuacagcggcagcuucgugcagcaccccgagcugaccggccuggacugcaucagacccugcuucuggguggagcugaucagaggcagacccgaggagaacaccaucuggaccagcggcagcagcaucagcuucugcggcgugaacagcgacaccgugggcuggagcuggcccgacggcgccgagcugcccuucaccaucgacaaguga

SEQ ID NO: 185841 - RNA, 1410 nt, Artificial Sequence
  derived and/or modified CDS sequence (opt4) from neuraminidase__InfluenzaA__AIM56560
augaaccccaaccagaagaucaucaccaucggcagcgugugcaugaccaucggcauggccaaccugauccugcagaucggcaacaucaucagcaucugggugagccacagcauccagcugggcaaccagagccacaucgagaccugcaaccagagcgugaucaccuacgagaacaacaccugggugaaccagaccuacgugaacaucagcaacaccaacuucgccgccggccagagcguggugcccgugaagcuggccggcaacagcagccugugccccgugagcggcugggccauccacagcaaggacaacagcgugagaaucggcagcaagggcgacguguucgugaucagagagcccuucaucagcugcagcccccuggagugcagaaccuucuuccugacccagggcgcccugcugaacgacaagcacagcaacggcaccaucaaggacagaagccccuacagaacccugaugagcugccccaucggcgaggugcccagccccuacaacagcagauucgagagcguggccuggagcgccagcgccugccacgacggcaucaacuggcugaccaucggcaucagcggccccgacaacggcgccguggccgugcugaaguacaacggcaucaucaccgacaccaucaagagcuggagaaacaacauccugagaacccaggagagcgagugcgccugcgugaacggcagcugcuucaccaucaugaccgacggccccagcgacggccaggccagcuacaagaucuucagaaucgagaagggcaagaucgugaagagcguggagaugaacgcccccaacuaccacuacgaggagugcagcugcuaccccgacagcagcgagaucaccugcgugugcagagacaacuggcacggcagcaacagacccugggugagcuucaaccagaaccuggaguaccagaucggcuacaucugcagcggcguguucggcgacaaccccagacccaacgacaagaccggcagcugcggccccgugaccagcaacggcgccaacggcgugaagggcuucagcuucaaguacggcaacggcguguggaucggcagaaccaagagcaucagcagcagaaagggcuucgagaugaucugggaccccaacggcuggaccggcaccgacaacaacuucagcaucaagcaggacaucgugggcaucaaggaguggagcggcuacagcggcagcuucgugcagcaccccgagcugaccggccuggacugcaucagacccugcuucuggguggagcugaucagaggcagacccgaggagaacaccaucuggaccagcggcagcagcaucagcuucugcggcgugaacagcgacaccgugggcuggagcuggcccgacggcgccgagcugcccuucaccaucgacaaguga

SEQ ID NO: 185842 - RNA, 1410 nt, Artificial Sequence; identical to SEQ ID NO: 185791
  derived and/or modified CDS sequence (opt4) from neuraminidase__InfluenzaA__AIM56571

SEQ ID NO: 185843 - RNA, 1410 nt, Artificial Sequence
  derived and/or modified CDS sequence (opt4) from neuraminidase__InfluenzaA__AIM56582
augaaccccaaccagaagaucaucaccaucggcagcgugugcaucaccaucggcauggccaaccugauccugcagaucggcaacaucaucagcaucugggugagccacagcauccagcugggcaaccagagccagaucgagaccugcaaccagagcgugaucaccuacgagaacaacaccugggugaaccagaccuacgugaacaucagcaacaccaacuucgccgccggccagagcguggugagcgugaagcuggccggcaacagcagccugugccccgugagcggcugggccaucuacagcaaggacaacagcgugagaaucggcagcaagggcgacguguucgugaucagagagcccuucaucagcugcagcccccuggagugcagaaccuucuuccugacccagggcgcccugcugaacgacaagcacagcaacggcaccaucaaggacagaagccccuacagaacccugaugagcugccccaucggcgaggugcccagccccuacaacagcagauucgagagcguggccuggagcgccagcgccugccacgacggcaucaacuggcugaccaucggcaucagcggccccgacagcggcgccguggccgugcugaaguacaacggcaucaucaccgacaccaucaagagcuggagaaacaacauccugagaacccaggagagcgagugcgccugcgugaacggcagcugcuucaccaucaugaccgacggccccagcgacggccaggccagcuacaagaucuucagaaucgagaagggcaagaucgugaagagcguggagaugaacgcccccaacuaccacuacgaggagugcagcugcuaccccgacagcagcgagaucaccugcgugugcagagacaacuggcacggcagcaacagacccugggugagcuucaaccagaaccuggaguaccagaucggcuacaucugcagcggcguguucggcgacaaccccagacccaacgacaagaccggcagcugcggccccgugagcagcaacggcgccaacggcgugaagggcuucagcuucaaguacggcaacggcguguggaucggcagaaccaagagcaucagcagcagaaagggcuucgagaugaucugggaccccaacggcuggaccggcaccgacaacaacuucagcaucaagcaggacaucgugggcaucaaggaguggagcggcuacagcggcagcuucgugcagcaccccgagcugaccggccuggacugcaucagacccugcuucuggguggagcugaucagaggcagacccgaggagaacaccaucuggaccagcggcagcagcaucagcuucugcggcgugaacagcgacaccgugggcuggagcuggcccgacggcgccgagcugcccuucaccaucgacaaguga

SEQ ID NO: 185844 - RNA, 1410 nt, Artificial Sequence
  derived and/or modified CDS sequence (opt4) from neuraminidase__InfluenzaA__AIM56593
augaaccccaaccagaagaucaucaccaucggcagcgugugcaugaccaucggcauggccaaccugauccugcagaucggcaacaucaucagcaucugggugagccacagcauccagcugggcaaccagagccagaucgagaccugcaaccagagcgugaucaccuacgagaacaacaccugggugaaccagaccuacgugaacaucagcaacaccaacuucgccgccgagcagagcguggugagcgugaagcuggccggcaacagcagccugugccccgugagcggcugggccaucuacagcaaggacaacagcgugagaaucggcagcaagggcgacguguucgugaucagagagcccuucaucagcugcagcccccuggagugcagaaccuucuuccugacccagggcgcccugcugaacgacaagcacagcaacggcaccaucaaggacagaagccccuacagaacccugaugagcugccccaucggcgaggugcccagccccuacaacagcagauucgagagcguggccuggagcgccagcgccugccacgacggcaucaacuggcugaccaucggcaucagcggccccgacagcggcgccguggccgugcugaaguacaacggcaucaucaccgacaccaucaagagcuggagaaacaacauccugagaacccaggagagcgagugcgccugcgugaacggcagcugcuucaccaucaugaccgacggccccagcgacggccaggccagcuacaagaucuucagaaucgagaagggcaagaucgugaagagcguggagaugaacgcccccaacuaccacuacgaggagugcagcugcuaccccgacagcagcgagaucaccugcgugugcagagacaacuggcacggcagcaacagacccugggugagcuucaaccagaaccuggaguaccagaucggcuacaucugcagcggcgugcugggcgacaaccccagacccaacgacaagaccggcagcugcggccccgugagcagcaacggcgccaacggcgugaagggcuucagcuucaaguacggcaacggcguguggaucggcagaaccaagagcaucagcagcagaaagggcuucgagaugaucugggaccccaacggcuggaccgagaccgacaacaacuucagcaucaagcaggacaucgugggcaucaaggaguggagcggcuacagcggcagcuucgugcagcaccccgagcugaccggccuggacugcaucagacccugcuucuggguggagcugaucagaggcagacccgaggagaacaccaucuggaccagcggcagcagcaucagcuucugcggcgugaacagcgacaccgugggcuggagcuggcccgacggcgccgagcugcccuucaccaucgacaaguga

SEQ ID NO: 185845 - RNA, 1410 nt, Artificial Sequence
  derived and/or modified CDS sequence (opt4) from neuraminidase__InfluenzaA__AIM56604
augaaccccaaccagaagaucaucaccaucggcagcgugugcaugaccaucggcauggccaaccugauccugcagaucggcaacaucaucagcaucugggugagccacagcauccagaucggcaaccagagccagaucgagaccugcaaccagagcgugaucaccuacgagaacaacaccugggugaaccagaccuacgugaacaucagcaacaucaacuucgccgccggccagagcguggugagcgugaagcuggccggcaacagcagccugugccccgugagcggcugggccaucuacagcaaggacaacagcgugagaaucggcagcaagggcgacguguucgugaucagagagcccuucaucagcugcagcccccuggagugcagaaccuucuuccugacccagggcgcccugcugaacgacaagcacagcaacggcaccaucaaggacagaagccccuacagaacccugaugagcugccccaucggcgaggugcccagccccuacaacagcagauucgagagcguggccuggagcgccagcgccugccacgacggcaucaacuggcugaccaucggcaucagcggccccgacagcggcgccguggccgugcugaaguacaacggcaucaucaccgacaccaucaagagcuggagaaacaacauccugagaacccaggagagcgagugcgccugcgugaacggcagcugcuucaccaucaugaccgacggccccagcgacggccaggccagcuacaagaucuucagaaucgagaagggcaagaucgugaagagcguggagaugaacgcccccaacuaccacuacgaggagugcagcugcuaccccgacagcagcgagaucaccugcgugugcagagacaacuggcacggcagcaacagacccugggugagcuucaaccagaaccuggaguaccagaucggcuacaucugcagcggcguguucggcgacaaccccagacccaacgacaagaccggcagcugcggccccgugagcagcaacggcgccaacggcgugaagggcuucagcuucaaguacggcaacggcguguggaucggcagaaccaagagcaucagcagcagaaagggcuucgagaugaucugggaccccaacggcuggaccggcaccgacaacaaguucagcaucaagcaggacaucgugggcaucaacgaguggagcggcuacagcggcagcuucgugcagcaccccgagcugaccggccuggacugcaucagacccugcuucuggguggagcugaucagaggcagacccgaggagaacaccaucuggaccagcggcagcagcaucagcuucugcggcgugaacagcgacaccgugggcuggagcuggcccgacggcgccgagcugcccuucaccaucgacaaguga

SEQ ID NO: 185846 - RNA, 1410 nt, Artificial Sequence
  derived and/or modified CDS sequence (opt4) from neuraminidase__InfluenzaA__AIM56615
augaaccccaaccagaagaucaucaccaucggcagcgugugcaugaccaucggcauggccaaccugauccugcagaucggcaacaucaucagcaucugggugagccacagcauccagaucggcaaccagagccagaucgagaccugcaaccagagcgugaucaccuacgagaacaacaccugggugaaccagaccuacguggacaucagcaacaccaacuucgccgccggccagagcguggugagcgugaagcuggccggcaacagcagccugugccccgugagcggcugggccaucuacagcaaggacaacagcgugagaaucggcagcaagggcgacguguucgugaucagagagcccuucaucagcugcagcccccuggagugcagaaccuucuuccugacccagggcgcccugcugaacgacaagcacagcaacggcaccaucaaggacagaagccccuacagaacccugaugagcugccccaucggcgaggugcccagccccuacaacagcagauucgagagcguggccuggagcgccagcgccugccacgacggcaucaacuggcugaccaucggcaucagcggccccgacagcggcgccguggccgugcugaaguacaacggcaucaucaccgacaccaucaagagcuggagaaacaacauccugagaacccaggagagcgagugcgccugcgugaacggcagcugcuucaccaucaugaccgacggccccagcgacggccaggccagcuacaagaucuucagaaucgagaagggcaagaucgugaagagcguggagaugaacgcccccaacuaccacuacgaggagugcagcugcuaccccgacagcagcgagaucaccugcgugugcagagacaacuggcacggcagcaacagacccugggugagcuucaaccagaaccuggaguaccagaucggcuacaucugcagcggcguguucggcgacaaccccagacccaacgacaagaccggcagcugcggccccgugagcagcaacggcgccaacggcgugaagggcuucagcuucaaguacagcaacggcguguggaucggcagaaccaagagcaucagcagcagaaagggcuucgagaugaucugggaccccaacggcuggaccggcaccgacaacaaguucagcaucaagcaggacaucgugggcaucaacgaguggagcggcuacagcggcagcuucgugcagcaccccgagcugaccggccuggacugcaucagacccugcuucuggguggagcugaucagaggcagacccgaggagaacaccaucuggaccagcggcagcagcaucagcuucugcggcgugaacagcgacaccgugggcuggagcuggcccgacggcgccgagcugcccuucaccaucgacaaguga

SEQ ID NO: 185847 - RNA, 1410 nt, Artificial Sequence; identical to SEQ ID NO: 185840
  derived and/or modified CDS sequence (opt4) from neuraminidase__InfluenzaA__AIM56626

SEQ ID NO: 185848 - RNA, 1410 nt, Artificial Sequence; identical to SEQ ID NO: 185785
  derived and/or modified CDS sequence (opt4) from neuraminidase__InfluenzaA__AIM56637

SEQ ID NO: 185849 - RNA, 1410 nt, Artificial Sequence; identical to SEQ ID NO: 185791
  derived and/or modified CDS sequence (opt4) from neuraminidase__InfluenzaA__AIM56648

SEQ ID NO: 185850 - RNA, 1410 nt, Artificial Sequence
  derived and/or modified CDS sequence (opt4) from neuraminidase__InfluenzaA__AIM56659
augaaccccaaccagaagaucaucaccaucggcagcgugugcaugaccaucggcauggccaaccugauccugcagaucggcaacaucaucagcaucugggugagccacagcauccagcugggcaaccagagccacaucgagaccugcaaccagagcgugaucaccuacgagaacaacaccugggugaaccagaccuacgugaacaucagcaacaccaacuucgccgccggccagagcguggugcccgugaagcuggccggcaacagcagccugugccccgugagcggcugggccaucuacagcaaggacaacagcgugagaaucggcagcaagggcgacguguucgugaucagagagcccuucaucagcugcagcccccuggagugcagaaccuucuuccugacccagggcgcccugcugaacgacaagcacagcaacggcaccaucaaggacagaagccccuacagaacccugaugagcugccccaucggcgaggugcccagccccuacaacagcagauucgagagcguggccuggagcgccagcgccugccacgacggcaucaacuggcugaccaucggcaucagcggccccgacagcggcgccguggccgugcugaaguacaacggcaucaucaccgacaccaucaagagcuggagaaacaacauccugagaacccaggagagcgagugcgccugcgugaacggcagcugcuucaccaucaugaccgacggccccagcgacggccaggccagcuacaagaucuucagaaucgagaagggcaagaucgugaagagcguggagaugaacgcccccaacuaccacuacgaggagugcagcugcuaccccgacagcagcgagaucaccugcgugugcagagacaacuggcacggcagcaacagacccugggugagcuucaaccagaaccuggaguaccagaucggcuacaucugcagcggcguguucggcgacaaccccagacccaacgacaagaucggcagcugcggccccgugagcagcaacggcgccaacggcgugaagggcuucagcuucaaguacggcaacggcguguggaucggcagaaccaagagcaucagcagcagaaagggcuucgagaugaucugggaccccaacggcuggaccggcaccgacaacaacuucagcaucaagcaggacaucgugggcaucaaggaguggagcggcuacagcggcagcuucgugcagcaccccgagcugaccggccuggacugcaucagacccugcuucuggguggagcugaucagaggcagacccgaggagaagaccaucuggaccagcggcagcagcaucagcuucugcggcgugaacagcgacaccgugggcuggagcuggcccgacggcgccgagcugcccuucaccaucgacaaguga

SEQ ID NO: 185851 - RNA, 1410 nt, Artificial Sequence
  derived and/or modified CDS sequence (opt4) from neuraminidase__InfluenzaA__AIM56670
augaaccccaaccagaagaucaucaccaucggcagcgugugcaugaccaucggcauggccaaccugauccugcagaucggcaacaccaucagcaucugggugagccacagcauccagaucggcaaccagagccagaucgagaccugcaaccagagcgugaucaccuacgagaacaacaccugggugaaccagaccuacgugaacaucagcaacaccaacuucgccgccggccagagcguggugagcgugaagcuggccggcaacagcagccugugccccgugagcggcugggccaucuacagcaaggacaacagcgugagaaucggcagcaagggcgacguguucgugaucagagagcccuucaucagcugcagcccccuggagugcagaaccuucuuccugacccagggcgcccugcugaacgacaagcacagcaacggcaccaucaaggacagaagccccuacagaacccugaugagcugccccaucggcgaggugcccagccccuacaacagcagauucgagagcguggccuggagcgccagcgccugccacgacggcaucaacuggcugaccaucggcaucagcggccccgacagcggcgccguggccgugcugaaguacaacggcaucaucaccgacaccaucaagagcuggagaaacaacauccugagaacccaggagagcgagugcgccugcgugaacggcagcugcuucaccaucaugaccgacggccccagcgacggccaggccagcuacaagaucuucagaaucgagaagggcaagaucgugaagagcguggagaugaacgcccccaacuaccacuacgaggagugcagcugcuaccccgacagcagcgagaucaccugcgugugcagagacaacuggcacggcagcaacagacccugggugagcuucaaccagaaccuggaguaccagaucggcuacaucugcagcggcguguucggcgacaaccccagacccaacgacaagaccggcagcugcggccccgugagcagcaacggcgccaacggcgugaagggcuucagcuucaaguacggcaacggcguguggaucggcagaaccaagagcaucagcagcagaaagggcuucgagaugaucugggaccccaacggcuggaccggcaccgacaacaaguucagcaucaagcaggacaucgugggcaucaacgaguggagcggcuacagcggcagcuucgugcagcaccccgagcugaccggccuggacugcaucagacccugcuucuggguggagcugaucagaggcagacccgaggagaacaccaucuggaccagcggcagcagcaucagcuucugcggcgugaacagcgacaccgugggcuggagcuggcccgacggcgccgagcugcccuucaccaucgacaaguga

SEQ ID NO: 185852 - RNA, 1410 nt, Artificial Sequence; identical to SEQ ID NO: 185803
  derived and/or modified CDS sequence (opt4) from neuraminidase__InfluenzaA__AIM56703

SEQ ID NO: 185853 - RNA, 1410 nt, Artificial Sequence
  derived and/or modified CDS sequence (opt4) from neuraminidase__InfluenzaA__AIM56714
augaaccccaaccagaagaucaucaccaucggcagcgugugcaugaccaucggcauggccaaccugauccugcagaucggcaacaucaucagcaucugggugagccacagcauccagaucggcaaccagagccagaucgagaccugcaaccagagcgugaucaccuacgagaacaacaccugggugaaccagaccuacgugaacaucagcaacaccaacuucgccgccggccagagcguggugagcgugaagcuggccggcaacagcagccugugccccgugagcggcugggccaucuacagcaaggacaacagcgugagaaucggcagcaagggcgacguguucgugaucagagagcccuucaucagcugcagcccccuggagugcagaaccuucuuccugacccagggcgcccugcugaacgacaagcacagcaacggcaccaucaaggacagaagccccuacagaacccugaugagcugccccaucggcgaggugcccagccccuacaacagcagauucgagagcguggccuggagcgccagcgccugccacgacggcaucaacuggcugaccaucggcaucagcggccccgacagcggcgccguggccgugcugaaguacaacggcaucaucaccgacaccaucaagagcuggagaaacaacauccugagaacccaggagagcgagugcgccugcgugaacggcagcugcuucaccaucaugaccgacggccccagcgacggccaggccagcuacaagaucuucagaaucgagaagggcaagaucgugaagagcguggagaugaacgcccccaacuaccacuacgaggagugcagcugcuaccccgacagcagcgagaucaccugcgugugcagagacaacuggcacggcagcaacagacccugggugagcuucaaccagaaccuggaguaccagaucggcuacaucugcagcggcguguucggcgacaaccccagacccaacgacaagaccggcagcugcggccccgugcccagcaacggcgccaacggcgugaagggcuucagcuucaaguacggcaacggcguguggaucggcagaaccaagagcaucagcagcagaaagggcuucgagaugaucugggaccccaacggcuggaccggcaccgacaacaaguucagcaucaagcaggacaucgugggcaucaacgaguggagcggcuacagcggcagcuucgugcagcaccccgagcugaccggccuggacugcaucagacccugcuucuggguggagcugaucagaggcagacccgaggagaacaccaucuggaccagcggcagcagcaucagcuucugcggcgugaacagcgacaccgugggcuggagcuggcccgacggcgccgagcugcccuucaccaucgacaaguga

SEQ ID NO: 185854 - RNA, 1410 nt, Artificial Sequence
  derived and/or modified CDS sequence (opt4) from neuraminidase__InfluenzaA__AIM56725
augaaccccaaccagaagaucaucaccaucggcagcgugugcaugaccaucggcauggccaaccugauccugcagaucggcaacaucaucagcaucugggugagccacagcauccagaucggcaaccagagccagaucgagaccugcaaccagagcgugaucaccuacgagaacaacaccugggugaaccagaccuacgugaacaucagcaacaccaacuucgccgccggccagagcguggugagcgugaagcuggccggcaacagcagccugugccccgugagcggcugggccaucuacagcaaggacaacagcgugagaaucggcagcaagggcgacguguucgugaucagagagcccuucaucagcugcagcccccuggagugcagaaccuucuuccugacccagggcgcccugcugaacgacaagcacagcaacggcaccaucaaggacagaagccccuacagaacccugaugagcugccccaucggcgaggugcccagccccuacaacagcagauucgagagcguggccuggagcgccagcgccugccacgacggcaucaacuggcugaccaucggcaucagcggccccgacagcggcgccguggccgugcugaaguacaacggcaucaucaccgacaccaucaagagcuggagaaacaacauccugagaacccaggagagcgagugcgccugcgugaacggcagcugcuucaccaucaugaccgacggccccagcgacggccaggccagcuacaagaucuucagaaucgagaagggcaagaucgugaagagcguggagaugaacgcccccaacuaccacuacgaggagugcagcugcuaccccgacagcagcgaggugaccugcgugugcagagacaacuggcacggcagcaacagacccugggugagcuucaaccagaaccuggaguaccagaucggcuacaucugcagcggcaucuucggcgacaaccccagacccaacgacaagaccggcagcugcggccccgugagcagcaacggcgccaacggcgugaagggcuucagcuucaaguacggcaacggcguguggaucggcagaaccaagagcaucagcagcagaaagggcuucgagaugaucugggaccccaacggcuggaccggcaccgacaacaaguucagcaucaagcaggacaucgugggcaucaacgaguggagcggcuacagcggcagcuucgugcagcaccccgagcugaccggccuggacugcaucagacccugcuucuggguggagcugaucagaggcagacccgaggagaacaccaucuggaccagcggcagcagcaucagcuucugcggcgugaacagcgacaccgugggcuggagcuggcccgacggcgccgagcugcccuucaccaucgacaaguga

SEQ ID NO: 185855 - RNA, 1410 nt, Artificial Sequence; identical to SEQ ID NO: 185803
  derived and/or modified CDS sequence (opt4) from neuraminidase__InfluenzaA__AIM56736

SEQ ID NO: 185856 - RNA, 1410 nt, Artificial Sequence
  derived and/or modified CDS sequence (opt4) from neuraminidase__InfluenzaA__AIM56747
augaaccccaaccagaagaucaucaccaucggcagcgugugcaugaccaucggcauggccaaccugauccugcagaucggcaacaucaucagcaucugggugagccacagcauccagaucggcaaccagagccagaucgagaccugcaaccagagcgugaucaccuacgagaacaacaccugggugaaccagaccuacgugaacaucagcaacaccaacuucgccgccggccagagcguggugagcgugaagcuggccggcaacagcagccugugccccgugagcggcugggccaucuacagcaaggacaacagcgugagaaucggcagcaagggcgacguguucgugaucagagagcccuucaucagcugcagcagccuggagugcagaaccuucuuccugacccagggcgcccugcugaacgacaagcacagcaacggcaccaucaaggacagaagccccuacagaacccugaugagcugccccaucggcgaggugcccagccccuacaacagcagauucgagagcguggccuggagcgccagcgccugccacgacggcaucaacuggcugaccaucggcaucagcggccccgacagcggcgccguggccgugcugaaguacaacggcaucaucaccgacaccaucaagagcuggagaaacaacauccugagaacccaggagagcgagugcgccugcgugaacggcagcugcuucaccaucaugaccgacggccccagcgacggccaggccagcuacaagaucuucagaaucgagaagggcaagaucgugaagagcguggagaugaacgcccccaacuaccacuacgaggagugcagcugcuaccccgacagcagcgagaucaccugcgugugcagagacaacuggcacggcagcaacagacccugggugagcuucaaccagaaccuggaguaccagaucggcuacaucugcagcggcguguucggcgacaaccccagacccaacgacaagaccggcagcugcggccccgugagcagcaacggcgccaacggcgugaagggcuucagcuucaaguacggcaacggcguguggaucggcagaaccaagagcaucagcagcagaaagggcuucgagaugaucugggaccccaacggcuggaccggcaccgacaacaaguucagcaucaagcaggacaucgugggcaucaacgaguggagcggcuacagcggcagcuucgugcagcaccccgagcugaccggccuggacugcaucagacccugcuucuggguggagcugaucagaggcagacccgaggagaacaccaucuggaccagcggcagcagcaucagcuucugcggcgugaacagcgacaccgugggcuggagcuggcccgacggcgccgagcugcccuucaccaucgacaaguga

SEQ ID NO: 185857 - RNA, 1410 nt, Artificial Sequence; identical to SEQ ID NO: 185840
  derived and/or modified CDS sequence (opt4) from neuraminidase__InfluenzaA__AIM56758

SEQ ID NO: 185858 - RNA, 1410 nt, Artificial Sequence; identical to SEQ ID NO: 185803
  derived and/or modified CDS sequence (opt4) from neuraminidase__InfluenzaA__AIM56769

SEQ ID NO: 185859 - RNA, 1410 nt, Artificial Sequence
  derived and/or modified CDS sequence (opt4) from neuraminidase__InfluenzaA__AIM56780
augaaccccaaccagaagaucaucaccaucggcagcgugugcaugaccaucggcauggccaaccugauccugcagaucggcaacaucaucagcaucugggugagccacagcauccagcugggcaaccagagccagaucggcaccugcaaccagagcgugaucaccuacgagaacaacaccugggugaaccagaccuacgugaacaucagcaacaccaacuucgccgccggccagagcguggugagcgugaagcuggccggcaacagcagccugugccccgugagcggcugggccaucuacagcaaggacaacagcgugagaaucggcagcaagggcgacguguucgugaucagagagcccuucaucagcugcagcccccuggagugcagaaccuucuuccugacccagggcgcccugcugaacgacaagcacagcaacggcaccaucaaggacagaagccccuacagaacccugaugagcugccccaucggcgaggugcccagccccuacaacagcagauucgagagcguggccuggagcgccagcgccugccacgacggcaucaacuggcugaccaucggcaucagcggccccgacagcggcgccguggccgugcugaaguacaacggcaucaucaccgacaccaucaagagcuggagaaacaacauccugagaacccaggagagcgagugcgccugcgugaacggcagcugcuucaccaucaugaccgacggccccagcgacggccaggccagcuacaagaucuucagaaucgagaagggcaagaucaucaagagcguggagaugaacgcccccaacuaccacuacgaggagugcagcugcuaccccgacagcagcgagaucaccugcgugugcagagacaacuggcacggcagcaacagacccugggugagcuucaaccagaaccuggaguaccagaucggcuacaucugcagcggcguguucggcgacaaccccagacccaacgacaagaccggcagcugcggccccgugagcagcaacggcgccaacggcgugaagggcuucagcuucaaguacggcaacggcguguggaucggcagaaccaagagcaucagcagcagaaagggcuucgagaugaucugggaccccaacggcuggaccggcaccgacaacaaguucagcaucaagcaggacaucgugggcauccacgaguggagcggcuacagcggcagcuucgugcagcaccccgagcugaccggccuggacugcaucagacccugcuucuggguggagcugaucagaggcagacccgaggagaacaccaucuggaccagcggcagcagcaucagcuucugcggcgugaacagcgacaccgugggcuggagcuggcccgacggcgccgagcugcccuucaccaucgacaaguga

SEQ ID NO: 185860 - RNA, 1410 nt, Artificial Sequence
  derived and/or modified CDS sequence (opt4) from neuraminidase__InfluenzaA__AIM56791
augaaccccaaccagaagaucaucaccaucggcagcgugugcaugaccaucggcauggccaaccugauccugcagaucggcaacaucaucagcaucugggugagccacagcauccagcugggcaaccagagccagaucgagaccugcaaccagagcgugaucaccuacgagaacaacaccugggugaaccagaccuacgugaacaucagcaacaccaacuucgccgccggccagagcguggugagcgugaagcuggccggcaacagcagccugugccccgugagcggcugggccaucuacagcaaggacaacagcgugagaaucggcagcaagggcgacguguucgugaucagagagcccuucaucagcugcagcccccuggagugcagaaccuucuuccugacccagggcgcccugcugaacgacaagcacagcaacggcaccaucaaggacagaagccccuacagaacccugaugagcugccccaucggcgaggugcccagccccuacaacagcagauucgagagcguggccuggagcgccagcgccugccacgacggcaucagcuggcugaccaucggcaucagcggccccgacagcggcgccguggccgugcugaaguacaacggcaucaucaccgacaccaucaagagcuggagaaacaacauccugagaacccaggagagcgagugcgccugcgugaacggcagcugcuucaccaucaugaccgacggccccagcgacggccaggccagcuacaagaucuucagaaucgagaagggcaagaucgugaagagcguggagaugaacgcccccaacuaccacuacgaggagugcagcugcuaccccgacagcagcgagaucaccugcgugugcagagacaacuggcacggcagcaacagacccugggugagcuucaaccagaaccuggaguaccagaucggcuacaucugcagcggcguguucggcgacaaccccagacccaacgacaagaccggcagcugcggccccgugagcagcaacggcgccaacggcgugaagggcuucagcuucaaguacggcaacggcguguggaucggcagaaccaagagcaucagcagcagaaagggcuucgagaugaucugggaccccaacggcuggaccggcaccgacaacaacuucagcaucaagcaggacaucgugggcaucaaggaguggagcggcuacagcggcagcuucgugcagcaccccgagcugaccggccuggacugcaucagacccugcuucuggguggagcugaucagaggcagacccgaggagaacaccaucuggaccagcggcagcagcaucagcuucugcggcgugaacagcgacaccgugggcuggagcuggcccgacggcgccgagcugcccuucaccaucgacaaguga

SEQ ID NO: 185861 - RNA, 1410 nt, Artificial Sequence
  derived and/or modified CDS sequence (opt4) from neuraminidase__InfluenzaA__AIM56813
augaaccccaaccagaagaucaucaccaucggcagcgugugcaugaccaucggcauggccaaccugauccugcagaucggcaacaucaucagcaucugggugagccacagcauccagaucggcaaccagagccagaucgagaccugcaaccagagcgugaucaccuacgagaacaacaccugggugaaccagaccuacgugaacaucagcaacaccaacuucgccgccggccagagcguggugagcgugaagcuggccggcaacagcagccugugccccgugagcggcugggccaucuacagcaaggacaacagcgugagaaucggcagcaagggcgacguguucgugaucagagagcccuucaucagcugcagcccccuggagugcagaaccuucuuccugacccagggcgcccugcugaacgacaagcacagcaacggcaccaucaaggacagaagccccuacagaacccugaugagcugccccaucggcgaggugcccagccccuacaacagcaaguucgagagcguggccuggagcgccagcgccugccacgacggcaucaacuggcugaccaucggcaucagcggccccgacaacggcgccguggccgugcugaaguacaacggcaucaucaccgacaccaucaagagcuggagaaacaacauccugagaacccaggagagcgagugcgccugcgugaacggcagcugcuucaccaucaugaccgacggccccagcgacggccaggccagcuacaagaucuucagaaucgagaagggcaagaucgugaagagcguggagaugaacgcccccaacuaccacuacgaggagugcagcugcuaccccgacagcagcgagaucaccugcgugugcagagacaacuggcacggcagcaacagacccugggugagcuucaaccagaaccuggaguaccagaucggcuacaucugcagcggcguguucggcgacaaccccagacccaacgacaagaccggcagcugcggccccgugagcagcaacggcgccaacggcgugaagggcuucagcuucaaguacggcaacggcguguggaucggcagaaccaagagcaucagcagcagaaagggcuucgagaugaucugggaccccaacggcuggaccggcaccgacaacaaguucagcaucaagcaggacaucgugggcaucaacgaguggagcggcuacagcggcagcuucgugcagcaccccgagcugaccggccuggacugcaucagacccugcuucuggguggagcugaucagaggcagacccgaggagaacaccaucuggaccagcggcagcagcaucagcuucugcggcgugaacagcgacaccgugggcuggagcuggcccgacggcgccgagcugcccuucaccaucgacaaguga

SEQ ID NO: 185862 - RNA, 1410 nt, Artificial Sequence
  derived and/or modified CDS sequence (opt4) from neuraminidase__InfluenzaA__AIM56824
augaaccccaaccagaagaucaucaccaucggcagcgugugcaugaccaucggcauggccaaccugauccugcagaucggcaacaucaucagcaucugggugagccacagcauccagaucggcaaccagagccagaucgagaccugcaaccagagcgugaucaccuacgagaacaacaccugggugaaccagaccuacgugaacaucagcaacaccaacuucgccgccggccagagcguggugagcgugaagcuggccggcaacagcagccugugccccgugagcggcugggccaucuacagcaaggacaacagcgugagaaucggcagcaagggcgacguguucgugaucagagagcccuucaucagcugcagcccccuggagugcagaaccuucuuccugacccagggcgcccugcugaacgacaagcacagcaacggcaccaucaaggacagaagccccuacagaacccugaugagcugccccaucggcgaggugcccagccccuacaacagcagauucgagagcguggccuggagcgccagcgccugccacgacggcaucaacuggcugaccaucggcaucagcggccccgacagcggcgccguggccgugcugaaguacaacggcaucaucaccgacaccaucaagagcuggagaaacaacauccugagaacccaggagagcgagugcgccugcgugaacggcagcugcuucaccaucaugaccgacggccccagcgacggccaggccagcuacaagaucuucagaaucgagaagggcaagaucgugaagagcguggagaugaacgcccccaacuaccacuacgaggagugcagcugcuaccccgacagcagcgagaucaccugcgugugcagagacaacuggcacggcagcaacagacccugggugagcuucaaccagaaccuggaguaccagaucggcuacaucugcagcggcguguucggcgacaaccccagacccaacgacaagaccggcagcugcggccccgugcccagcaacggcgccaacggcgugaagggcuucagcuucaaguacagcaacggcguguggaucggcagaaccaagagcaucagcagcagaaagggcuucgagaugaucugggaccccaacggcuggaccggcaccgacaacaaguucagcaucaagcaggacaucgugggcaucaacgaguggagcggcuacagcggcagcuucgugcagcaccccgagcugaccggccuggacugcaucagacccugcuucuggguggagcugaucagaggcagacccgaggagaacaccaucuggaccagcggcagcagcaucagcuucugcggcgugaacagcgacaccgugggcuggagcuggcccgacggcgccgagcugcccuucaccaucgacaaguga

SEQ ID NO: 185863 - RNA, 1398 nt, Artificial Sequence
  derived and/or modified CDS sequence (opt4) from neuraminidase__InfluenzaA__AIN76385
augaaccccaaccagaagauccugugcaccagcgccaccgccaucaucaucggcgccaucgccgugcugaucggcaucgccaaccugggccugaacaucggccugcaccugaagcccggcugcaacugcagccacagccagcccggcaccaccaacaccagccagaccaucaucaacaacuacuacaacgagaccaacaucaccaacauccagauggaggagagaaccagcagaaacuucaacagccugaccaagggccugugcaccaucaacagcuggcacaucuacggcaaggacaacgccgugagaaucggcgagagcagcgacgugcuggugaccagagagcccuacgugagcugcgaccccgacgagugcagauucuacgcccugagccagggcaccaccaucagaggcaagcacagcaacggcaccauccacgacagaagccaguacagagcccugaucagcuggccccugagcagcccccccaccguguacaacagcagaguggagugcaucggcuggagcagcaccagcugccacgacggcaagagcagaaugagcaucugcaucagcggccccaacaacaacgccagcgccguggugugguacaacagaagacccguggccgagaucaacaccugggccagaaacauccugagaacccaggagagcgagugcgugugccacaacggcaucugccccaucguguucaccgacggcagcgccaccggccccgccgacaccagaaucuacuacuucaaggagggcaagauccugaagugggagagccugaccggcaccgccaagcacaucgaggagugcagcugcuacggcgagagaaccggcaucaccugcaccugcaaggacaacuggcagggcagcaacagacccgugauccagaucgaccccguggccaugacccacaccagccaguacaucugcagccccgugcugaccgacacccccagacccaacgaccccaacaucggcaagugcaacgaccccuaccccggcaacaacaacaacggcgugaagggcuucagcuaccuggacggcgccaacaccuggcugggcagaaccaucagcaccgccagcagaagcggcuacgagaugcugaaggugcccaacgcccugaccgacgacagaagcaagcccauccagggccagaccaucgugcugaacgccgacuggagcggcuacagcggcagcuucauggacuacugggccgagggcgacugcuacagagccugcuucuacguggagcugaucagaggcagacccaaggaggacaaggugugguggaccagcaacagcaucgugagcaugugcagcagcaccgaguuccugggccaguggaacuggcccgacggcgccagaaucgaguacuuccuguga

SEQ ID NO: 185864 - RNA, 1410 nt, Artificial Sequence; identical to SEQ ID NO: 174147
  derived and/or modified CDS sequence (opt4) from neuraminidase__InfluenzaA__AIP93105

SEQ ID NO: 185865 - RNA, 1410 nt, Artificial Sequence
  derived and/or modified CDS sequence (opt4) from neuraminidase__InfluenzaA__AIP93117
augaaccccaaccagaagaucaucaccaucggcagcgugagccugaccaucgccaccgugugcuuccugaugcagaucgccauccuggccaccaccgugacccugcacuucaagcagcacgagugcgacagccccgccagcaaccaggugaugcccugcgagcccaucaucaucgagagaaacaucaccgagaucguguaccugaacaacaccaccaucgagaaggagaucugccccgaggugguggaguacagaaacuggagcaagccccagugccagaucaccggcuucgcccccuucagcaaggacaacagcaucagacugagcgccggcggcgacaucugggugaccagagagcccuacgugagcugcgaccccggcaagugcuaccaguucgcccugggccagggcaccacccuggacaacaagcacagcaacggcaccauccacgacagaaucccccacagaacccugcugaugaacgagcugggcgugcccuuccaccugggcaccaagcaggugugcguggccuggagcagcagcagcugccacgacggcaaggccuggcugcacgugugcgugaccggcgacgacagaaacgccaccgccagcuucaucuacgacggcagacugguggacagcaucggcagcuggagccagaacauccugagaacccaggagagcgagugcgugugcaucaacggcaccugcaccguggugaugaccgacggcagcgccagcggcagagccgacaccagaauccuguucaucaaggagggcaagaucgugcacaucagcccccugagcggcagcgcccagcacaucgaggagugcagcugcuaccccagauaccccgacgugagaugcaucugcagagacaacuggaagggcagcaacagacccgugaucgacaucaacauggaggacuacagcaucgacagcagcuacgugugcagcggccuggugggcgacacccccagaaacgacgacagcagcagcaacagcaacugcagagaccccaacaacgagagaggcaaccccggcgugaagggcugggccuucgacaacggcgacgacguguggaugggcagaaccaucagcaaggaccugagaagcggcuacgagaccuucaaggugaucggcggcuggagcacccccaacagcaagagccaggugaacagacaggugaucguggacaacaacaacuggagcggcuacagcggcaucuucagcguggagggcaagagcugcaucaacagaugcuucuacguggagcugaucagaggcagaccccaggagaccagagugugguggaccagcaacagcaucgugguguucugcggcaccagcggcaccuacggcaccggcagcuggcccgacggcgccaacaucaacuucaugcccaucuga

SEQ ID NO: 185866 - RNA, 1410 nt, Artificial Sequence
  derived and/or modified CDS sequence (opt4) from neuraminidase__InfluenzaA__AIR93973
augaaccccaaccagaagaucaucaccaucggcagcgugugcaugaccaucggcauggccaaccugauccugcagaucggcaacaucaucagcaucuggaucagccacagcauccagcugggcagcagaaaccagaucgaggccugcaaccagagcgugaucaccuacgagaacaacaccugggugaaccagaccuacgugaacaucagcaacaccaacuucgccgccggccagagcguggugcccgugaagcuggccggcaacagcagccugugccccgugagcggcugggccaucuacagcaaggacaacagcaucagaaucggcagcaagggcgacguguucgugaucagagagcccuucaucagcugcagcccccuggagugcagaaccuucuuccugacccagggcgcccugcugaacgacaagcacagcaacggcaccaucaaggacagaagccccuacagaacccugaugagcugccccaucggcgaggugcccagccccuacaacagcagauucgagagcguggccuggagcgccagcgccugccacgacggcaucaacuggcugaccaucggcaucagcggccccgacaacggcgccguggccgugcugaaguacaacggcaucaucaccgacaccaucaagagcuggagaaacaacauccugagaacccaggagagcgagugcgugugcgugaacggcagcugcuucaccgugaugaccgacggccccagcaacggccaggccagcuacaagaucuucagaaucgagaagggcaagaucgugaagagcguggagaugaacgcccccaacuaccacuacgaggagugcagcugcuaccccgacagcagcgagaucaccugcgugugcagagacaacuggcacggcagcaacagacccugggugagcuucaaccagaaccuggaguaccagaucggcuacaucugcagcggcaucuucggcgacaaccccagacccaacgacaagaccggcagcugcggccccgugagcagcaacggcgccaacggcgugaagggcuucagcuucaaguacggcaacggcguguggaucggcagaaccaagagcaucagcagcagaaacggcuucgagaugaucugggaccccaacggcuggaccgagaccgacaacaacuucagcaucaagcaggacaucgugggcaucaacgaguggagcggcuacagcggcagcuucgugcagcaccccgagcugaccggccuggacugcaucagacccugcuucuggguggagcugaucagaggcagacccaaggagaacaccaucuggaccagcggcagcagcaucagcuucugcggcgugaacagcaacaccgugggcuggagcuggcccgacggcgccgagcugcccuucaccaucgacaaguga

SEQ ID NO: 185867 - RNA, 1410 nt, Artificial Sequence
  derived and/or modified CDS sequence (opt4) from neuraminidase__InfluenzaA__AIR93984
augaaccccaaccagaagaucaucaccaucggcagcgugugcaugaccaucggcauggccaaccugauccugcagaucggcaacaucaucagcaucuggaucagccacagcauccagcugggcaaccagaaccagaucgagaccugcaaccagagcgugaucaccuacgagaacaacaccugggugaaccagaccuacgugaacaucagcaacaccaacuucgccgccggccagagcguggugagcgugaagcuggccggcaacagcagccugugccccgugagcggcugggccaucuacagcaaggacaacagcaucagaaucggcagcaagggcgacguguucgugaucagagagcccuucaucagcugcagcccccuggagugcagaaccuucuuccugacccagggcgcccugcugaacgacaagcacagcaacggcaccaucaaggacagaagccccuacagaacccugaugagcugccccaucggcgaggugcccagccccuacaacagcagauucgagagcguggccuggagcgccagcgccugccacgacggcaucaacuggcugaccaucggcaucagcggccccgacaacggcgccguggccgugcugaaguacaacggcaucaucaccgacaccaucaagagcuggagaaacaacauccugagaacccaggagagcgagugcgccugcgugaacggcagcugcuucaccgugaugaccgacggccccagcaacggccaggccagcuacaagaucuucagaaucgagaagggcaagaucgugaagagcguggagaucaacgcccccaacuaccacuacgaggagugcagcugcuaccccgacagcagcgagaucaccugcgugugcagagacaacuggcacggcagcaacagacccugggugagcuucaaccagaaccuggaguaccagaucggcuacaucugcagcggcaucuucggcgacaaccccagacccaacgacaagaccggcagcugcggccccgugagcagcaacggcgccaacggcgugaagggcuucagcuucaaguacggcaacggcguguggaucggcagaaccaagagcaucagcagcagaaacggcuucgagaugaucugggaccccaacggcuggaccggcaccgacaacaacuucagcaucaagcaggacaucgugggcaucaacgaguggagcggcuacagcggcagcuucgugcagcaccccgagcugaccggccugggcugcaucagacccugcuucuggguggagcugaucagaggcagacccaaggagaacaccaucuggaccagcggcagcagcaucagcuucugcggcgugaacagcgacaccgugggcuggagcuggcccgacggcgccgagcugcccuucaccaucgacaaguga

SEQ ID NO: 185868 - RNA, 1410 nt, Artificial Sequence
  derived and/or modified CDS sequence (opt4) from neuraminidase__InfluenzaA__AIR93995
augaaccccaaccagaagaucaucaucaucggcagcgugugcaugaccaucggcauggccaaccugauccugcagaucggcaacaucaucagcaucuggaucagccacagcauccagcugggcaaccagaaccagaucgagaccugcaaccagagcgugaucaccuacgagaacaacaccugggugaaccagaccuacgugaacaucagcaacaccaacuucgccgccggccagagcguggugcccgugaagcuggccggcaacagcagccugugccccgugagcggcugggccaucuacagcaaggacaacagcaucagaaucggcagcaagggcgacguguucgugaucagagagcccuucaucagcugcagcccccuggagugcagaaccuucuuccugacccagggcgcccugcugaacgacaagcacagcaacggcaccaucaaggacagaagccccuacagaacccugaugagcugccccaucggcgaggugcccagccccuacaacagcagauucgagagcguggccuggagcgccagcgccugccacgacggcaucaacuggcugaccaucggcaucagcggccccgacaacggcgccguggccgugcugaaguacaacggcaucaucaccgacaccaucaagagcuggaagaacaacauccugagaacccaggagagcgagugcgugugcgugaacggcagcugcuucaccgugaugaccgacggccccagcaacggccaggccagcuacaagaucuucagaaucgagaagggcaagaucgugaagagcguggagaugaacgcccccaacuaccacuacgaggagugcagcugcuaccccgacagcagcgagaucaccugcgugugcagagacaacuggcacggcagcaacagacccugggugagcuucaaccagaaccuggaguaccagaucggcuacaucugcagcggcguguucggcgacaaccccagacccaacgacaagaccggcagcugcggccccgugagcagcaacggcgccaacggcgugaagggcuucagcuucaaguacggcaacggcguguggaucggcagaaccaagagcaucagcagcagaaacggcuucgagaugaucugggaccccaacggcuggaccggcaccgacaacaacuucagcaucaagcaggacaucaucggcaucaacgaguggagcggcuacagcggcagcuucgugcagcaccccgagcugaccggcauggacugcaucagacccugcuucuggguggagcugaucagaggcagacccaaggagaacaccaucuggaccagcggcagcagcaucagcuucugcggcgugaacagcgacaccgugggcuggagcuggcccgacggcgccgagcugcccuucaccaucgacaaguga

SEQ ID NO: 185869 - RNA, 1401 nt, Artificial Sequence
  derived and/or modified CDS sequence (opt4) from neuraminidase__InfluenzaA__AIR94118
augaaccccaaccagaagaucaucgccaucggcagcgugagccugaucaucgccaucaucugccugcugaugcagaucgccauccugaccaccaccaugacccugcacuucagacagaacgagugcaacaacagcagcaacaaccaggugaugcccugcgagcccaucaucaucgagagaaacaccgugcaccugaacagcaccaccaucgagagagagaucugccccaagguggccgaguacaagaacuggagcaagccccagugccagaucaccggcuucgcccccuucagcaaggacaacagcaucagacugagcgccggcggcgacaucugggugaccagagagcccuacgugagcugcagccuggacaagugcuaccaguucgcccugggccagggcaccacccugaagaacaagcacagcaacggcaccacccacgacagaaccccccacagaacccugcugaugaacgagcugggcgugcccuuccaccugggcaccaagcaggugugcaucgccuggagcagcagcagcugcuacgacggcaaggccuggcugcacaucugcgugaccggcgacgacaagaacgccaccgccagcaucaucuacaacggcaugcugguggacagcaucggcagcuggagcaagaacauccugagaacccaggagagcgagugcgugugcaucaacggcaccugcgccguggugaugaccgacggcagcgccagcggcaaggccgacaccagagugcuguucaucaaggagggcaagaucaucaacaucagcccccugagcggcagcgcccagcacguggaggagugcagcugcuaccccagauaccccgaggugagaugcgugugcagagacaacuggaagggcagcaacagacccauccuguacaucaacauggccgacuacagcaucgagagcagcuacgugugcagcggccuggugggcgacacccccagaaacgacgacagcagcagcagcagcaacugcaaggaccccaacagcgagagaggcgcccccggcgugaagggcugggccuucgacgacggcaacgacguguggaugggcagaaccaucaagaacggcagcagaagcggcuacgagaccuucagaguggugaacggcuggaccguggccaacagcaagagccaggugaacagacaggugaucguggacagcgacgacuggagcggcuacagcggcaucuucagcguggagggcaagaagugcaucaacagaugcuucuacguggagcugaucagaggcagaccccaggagcccagagugugguggaccagcaacagcaucaucguguucugcggcaccagcggcaccuacggcaccggcagcuggcccgacggcgccaacaucaacuucaugcccaucuga

SEQ ID NO: 185870 - RNA, 1410 nt, Artificial Sequence
  derived and/or modified CDS sequence (opt4) from neuraminidase__InfluenzaA__AIT38335
augaaccccaaccagaagaucaucaccaucggcagcgugagccugaccaucgccaccaucugcuuccugaugcagaucgccauccuggugaccaccgugacccugcacuucaagcaguacgagugcaacagcccccccaccaaccaggugaugcugugcgagcccaccaucaucgagagaaacaucaccgagaucguguaccugaccaacaccaccaucgagaaggagaucugccccaagcugguggaguacagaaacuggagcaagccccagugcaagaucaccggcuucgcccccuucagcaaggacaacagcaucagacugagcgccggcggcgacaucugggugaccagagagcccuacgugagcugcgaccccgacaagugcuaccaguucgcccugggccagggcaccacccugaacaacagacacagcaacgacaccgugcacgacagaacccccuacagaacccugcugaugaacgagcugggcauccccuuccaccugggcaccaagcaggugugcaucgccuggagcagcagcagcugccacgacggcaaggccuggcugcacgugugcgugaccggccacgacgagaacgccaccgccagcuucaucuacgacggcagacugguggacagcaucgugagcuggagcaagagaauccugagaacccaggagagcgagugcgugugcaucgacggcaccugcaccguggugaugaccgacggcagcgccagcggcagagccgacaccagaauccuguucaucaaggagggcaagaucauccacaucagccagcugagcggcagcgcccagcacguggaggagugcagcugcuaccccagauaccccggcgugagaugcgugugcagagacaacuggaagggcagcaacagacccaucguggacaucaacgugaaggacuacagcaucaacagcagcuacgugugcagcggccuggugggcgacacccccagaaagaacgacagcuucagcagcagcuacugccugaaccccaacaacgaggagggcggccacggcgugaagggcugggccuucgacgacggcgacgacguguggaugggcagaaccaucaacgagaagcugagaagcggcuacgagaccuucaaggugaucaagggcuggagcaagcccaacagcaagcugcagaucaacagacaggugaucguggacagaggcaacagaagcggcuacagcggcaucuucagcguggagggcaagggcugcaucaacagaugcuucuacguggagcugaucagaggcagaaagcaggagaccgaggugugguggaccagcaacagcaucgugguguucugcggcaccagcggcaccuacggcaccggcagcuggcccgacggcgccaacaucaaccugaugcccaucuga

SEQ ID NO: 185871 - RNA, 1410 nt, Artificial Sequence
  derived and/or modified CDS sequence (opt4) from neuraminidase__InfluenzaA__AIT38346
augaaccccaaccagaagaucaucaccaucggcagcaucagccugaccaucgccaccaucugcuuccugcugcagguggccauccuggugaccaccgugacccugcacuucaagcaguucgagugcaaccccacccccaacaaccaggugaugcugugcgagcccaccgugaucgagagaaacaucaccaagaucguguaccugaccaacaccaccguggagaaggagaucugccccaagcccgccgaguacagaaacuggagcaagccccagugcaagaucaccggcuucgcccccuucagcaaggacaacagcaucagacugagcgccggcggcgacaucugggugaccagagagcccuacgugagcugcgcccccaacaagugcuaccaguucgcccugggccagggcaccacccugaacaacagacacagcaacgacaccgugcacgacagaacccccuacagaacccugcugaugaacgagcugggcauccccuuccaccugggcaccaagcaggugugcaucgccuggagcagcagcagcugccacgacggcaaggccuggcugcacgugugcgugaccggccacgacaagaacgccaccgccagcuucaucuacgacggcagacugguggacagcaucggcagcuggagcaagaacauccugagaacccaggagagcgagugcgugugcaucaacggcaccugcaccguggugaugaccgacggcagcgccagcggcagagccgacaccaagauccuguucaucaaggagggcaagaucauccacaucagccagcugagcggcagcgcccagcacguggaggagugcagcugcuaccccagauaccccggcgugagaugcgugugcagagacaacuggaagggcagcaacagacccaucguggacaucaacgugagagacuacagcaucgugagcagcuacgugugcagcggccuggugggcgacacccccagaaagaacgacagcuucagcagcagccacugccugaaccccaacaacgaggagggcggccacggcgugaagggcugggccuucgacgacggcgacgacguguggaugggcagaaccaucagcgagaagcugagaagcggcuacgagaccuucaaggugaucaagggcuggagcaagcccaacagcaagcugcagaucaacagacaggugaucguggacagaggcaacagaagcggcuacagcggcaucuucagcguggagggcaagagcugcaucaacagaugcuucuacguggagcugaucagaggcagaaagcaggagaccgaggugugguggaccagcaacagcaucgugguguucugcggcaccagcggcaccuacggcaccggcagcuggcccgacggcgccgacaucaaccugaugcccaucuga

SEQ ID NO: 185872 - RNA, 1410 nt, Artificial Sequence
  derived and/or modified CDS sequence (opt4) from neuraminidase__InfluenzaA__AIT38361
augaaccccaaccagaagaucaucaccaucggcagcaucagccugaccaucgccaccaucugcuuccugaugcagguggccauccuggugaccaccgugacccugcacuucaagcaguacgagugcaacagcacccccaacaaccaggugaugcugugcgagcccaccgugaucgagagaaacaucaccaagaucguguaccugaccaacaccaccguggugaaggaggugugccccaagcccgccgaguacagaaacuggagcaagccccagugcaagaucaccggcuucgcccccuucagcaaggacaacagcaucagacugagcgccggcggcgacaucugggugaccagagagcccuacgugagcugcgcccccaacaagugcuaccaguucgcccugggccagggcaccacccugaacaacagacacagcaacgacaccgugcacgacagaacccccuacagaacccugcugaugaacgagcugggcauccccuuccaccugggcaccaagcaggugugcaucgccuggagcagcagcagcugcuacgacggcaaggccuggcugcacgugugcgugaccggccacgacaagaacgccaccgccagcuucaucuacgacggcagacugguggacagcaucggcagcuggagcaagaacauccugagaacccaggagagcgagugcgugugcaucaacggcaccugcaccguggugaugaccgacggcagcgccagcggcagagccgacaccaagauccuguucaucaaggagggcaagaucauccacaucagccagcugagcggcagcgcccagcacguggaggagugcagcugcuaccccagauaccccggcgugagaugcgugugcagagacaacuggaagggcagcaacagacccaucguggacaucaacaugagagacuacagcaucgugagcagcuacgugugcagcggccuggugggcgacacccccagagagaacgacagcuucagcagcagccacugccugaaccccaacaacgaggagggcggccacggcgugaagggcugggccuucgacgacggcgacgacguguggaugggcagaaccaucagcgagaagcugagaagcggcuacgagaccuucaaggugaucaagggcuggagcaagcccaacagcaagcugcagaucaacagacaggugaucguggacagaggcaacagaagcggcuacagcggcaucuucagcguggagggcaagagcugcaucaacagaugcuucuacguggagcugaucagaggcagaaagcaggagaccgaggugugguggaccagcaacagcaucgugguguucugcggcaccagcggcaccuacggcaccggcagcuggcccgacggcgccgacaucaaccugaugcccaucuga

SEQ ID NO: 185873 - RNA, 1410 nt, Artificial Sequence
  derived and/or modified CDS sequence (opt4) from neuraminidase__InfluenzaA__AIT38375
augaaccccaaccagaagaucaucaccaucggcagcgugugcaugaccaucggcauggugaaccugauccugcagaucggcaacaucaucagcaucuggaucagccacagcauccagcugggcaaccagaaccagaucgagaucugcaaccagagcgugaucaccuacgagaacaacaccugggugaaccagaccuacgugaacaucagcaacaccaacuucgccgccggccagagcguggugcccgugaagcuggccggcaacagcagccugugcagcgugagcggcugggccaucuacagcaaggacaacagcaucagaaucggcagcaagggcgacguguucgugaucagagagcccuucaucagcugcagcccccuggagugcagaaccuucuuccugacccagggcgcccugcugaacgacaagcacagcaacggcaccaucaaggacagaagccccuacagaacccugaugagcugccccaucggcgaggugcccagccccuacaacagcagauucgagagcguggccuggagcgccagcgccugccacgacggcaucaacuggcugaccaucggcaucagcggccccgacaacggcgccguggccgugcugaaguacaacggcaucaucaccgacaccaucaagagcuggagaaacaacauccugagaacccaggagagcgagugcgccugcgugaacggcagcugcuucaccgugaugaccgacggccccagcgacggccaggccagcuacaagaucuucagaaucgagaagggcaagaucgugaagagcguggagaugaacgcccccaacuaccacuacgaggagugcagcugcuaccccgacagcagcgagaucaccugcgugugcagagacaacuggcacggcagcaacagacccugggugagcuucaaccagaaccuggaguaccagaucggcuacaucugcagcggcaucuucggcgacaaccccagacccaacgacaagaccggcagcugcggccccgugagcagcaacggcgccaacggcgugaagggcuucagcuucaaguacggcaacggcguguggaucggcagaaccaagagcaucagcagcagaaacggcuucgagaugaucugggaccccaacggcuggaccggcaccgacaacaacuucagcaucaagcaggacaucgugggcaucaacgaguggagcggcuacagcggcagcuucgugcagcaccccgagcugaccggccuggacugcaucagacccugcuucuggguggagcugaucagaggcagacccaaggagaacaccaucuggaccagcggcagcagcaucagcuucugcggcgugaacagcgacaccgugggcuggagcuggcccgacggcgccgagcugcccuucaccaucgacaaguga

SEQ ID NO: 185874 - RNA, 1410 nt, Artificial Sequence
  derived and/or modified CDS sequence (opt4) from neuraminidase__InfluenzaA__AIT93148
augaaccccaaccagaagaucaucaccaucggcagcgugugcaugaccaucggcauggccaaccugauccugcagaucggcaacaucaucagcaucugggugagccacagcauccagcugggcaaccagagccagaucgagaccugcaaccagagcgugaucaccuacgagaacaacaccugggugaaccagaccuacgugaacaucagcaacaccaacuucgccgccggccagagcguggugagcgugaagcuggccggcaacagcagccugugccccgugagcggcugggccaucuacagcaaggacaacagcgugagaaucggcagcaagggcgacguguucgugaucagagagcccuucaucagcugcagcccccuggagugcagaaccuucuuccugacccagggcgcccugcugaacgacaagcacagcaacggcaccaucaaggacagaagccccuacagaacccugaugagcugccccaucggcgaggugcccagccccuacaacagcagauucgagagcguggccuggagcgccagcgccugccacgacggcaucaacuggcugaccaucggcaucagcggccccgacagcggcgccguggccgugcugaaguacaacggcaucaucaccgacaccaucaagagcuggagaaacaacauccugagaacccaggagagcgagugcgccugcgugaacggcagcugcuucaccaucaugaccgacggccccagcgacggccaggccagcuacaagaucuucagaaucgagaagggcaagaucgugaagagcguggagaugaacgcccccaacuaccacuacgaggagugcagcugcuaccccgacagcagcgagaucaccugcgugugcagagacaacuggcacggcagcaacagacccugggugagcuucaaccagaaccuggaguaccagaucggcuacaucugcagcggcguguucggcgacaaccccagacccaacgacaagaccggcagcugcggccccgugagcagcaacggcgccaacggcgugaagggcuucagcuucaaguacggcaacggcguguggaucggcagaaccaagagcaucagcagcagaaagggcuucgagaugaucugggaccccaacggcuggaccggcaccgacaacaaguucagcaucaagcaggacaucgugggcaucaacgaguggagcggcuacagcggcagcuucgugcagcaccccgagcugaccggccuggacugcaucagacccugcuucuggguggagcugaucagaggcagacccgaggagaacaccaucuggaccagcggcagcagcaucagcuucugcggcgugaacagcgacaccgugggcuggagcuggcccgacggcgccgagcugcccuucaccaucgacaaguga

SEQ ID NO: 185875 - RNA, 1410 nt, Artificial Sequence; identical to SEQ ID NO: 178700
  derived and/or modified CDS sequence (opt4) from neuraminidase__InfluenzaA__AIU39701

SEQ ID NO: 185876 - RNA, 1410 nt, Artificial Sequence; identical to SEQ ID NO: 176798
  derived and/or modified CDS sequence (opt4) from neuraminidase__InfluenzaA__AIU39703

SEQ ID NO: 185877 - RNA, 1410 nt, Artificial Sequence
  derived and/or modified CDS sequence (opt4) from neuraminidase__InfluenzaA__AIU39705
augaaccccaaccagaagaucaucaccaucggcagcgugugcaugaccaucggcauggccaaccugauccugcagaucggcaacaucaucagcaucuggaucagccacagcauccagcugggcaaccagagccagaucgagaccugcaaccagagcgugaucaccuacgagaacaacaccugggugaaccagaccuacgugaacaucagcaacaccaacuucgccgccggccagagcguggugagcgugaagcuggccggcaacagcagccugugccccgugagcggcugggccaucuacagcaaggacaacagcaucagaaucggcagcaagggcgacguguucgugaucagagagcccuucaucagcugcagcccccuggagugcagaaccuucuuccugacccagggcgcccugcugaacgacaagcacagcaacggcaccaucaaggacagaagccccuacagaacccugaugagcugccccaucggcgaggugcccagccccuacaacagcagauucgagagcguggccuggagcgccagcgccugccacgacggcaucaacuggcugaccaucggcaucagcggccccgacaacggcgccguggccgugcugaaguacaacggcaucaucaccgacaccaucaagagcuggagaaacaacauccugagaacccaggagagcgagugcgccugcgugaacggcagcugcuucaccgugaugaccgacggccccagcgacggccaggccagcuacaagaucuucagaaucgagaagggcaagaucgugaagagcguggagaugaacgcccccaacuaccacuacgaggagugcagcugcuaccccgacagcagcgagaucaccugcgugugcagagacaacuggcacggcagcaacagacccugggugagcuucaaccagaaccuggaguaccagaucggcuacaucugcagcggcaucuucggcgacaaccccagacccaacgacaacaccggcagcugcggccccgugagcagcaacggcgccaacggcgugaagggcuucagcuucaaguacggcaacggcguguggaucggcagaaccaagagcaucagcagcagaaacggcuucgagaugaucugggaccccaacggcuggaccggcaccgacaacaacuucagcaucaagcaggacaucgugggcaucaacgaguggagcggcuacagcggcagcuucgugcagcaccccgagcugaccggccuggacugcaucagacccugcuucuggguggagcugaucagaggcagacccaaggagaacaccaucuggaccagcggcagcagcaucagcuucugcggcgugaacagcgacaccgugggcuggagcuggcccgacggcgccgagcugcccuucaccaucgacaaguga

SEQ ID NO: 185878 - RNA, 1413 nt, Artificial Sequence
  derived and/or modified CDS sequence (opt4) from neuraminidase__InfluenzaA__AIU46611
augaaccccaaccagaagaucaccugcaucagcgccaccggcaugacccugagcguggugagcaugcugaucggcaucgccaaccugggccugaacaucggccugcacuacaaggugggcgacagcaccaacaucaacauccccaacaugaacgagaccagccccaccaccaccaucaucaacaaccacccccagaacaacuucaccaacaucaccaacaucaucgugaccagaaacgaggagggccaccugcugaaccugaccaagccccugugcgaggugaacagcuggcacauccugagcaaggacaacgccaucagaaucggcgaggacgcccacaucaucgugaccagagagcccuaccugagcugcgacccccagggcugcagaauguucgcccugagccagggcaccacccugagaggcaagcacgccaacggcaccauccacgacagaagccccuucagagcccuggugagcugggagaugggccaggcccccagccccuacaacaccagaguggagugcaucggcuggagcagcaccagcugccacgacggcaucagcagaaugagcaucugcaucagcggccccaacaacaacgccagcgccguggugugguacggcggcagacccgugaccgagauccccagcugggccggcaacauccugagaacccaggagagcgagugcgugugccacggcggcaucugccccguggugaugaccgacggccccgccaacaacagagccgagaccaagaucaucuacuucaaggagggcaagaucaagaagaucgaggagcugaagggcgacgcccagcacaucgaggagugcagcugcuacggcgccagcgagaugaucaagugcaucugcagagacaacuggaagggcgccaacagacccgugaucaccaucgaccccgagaugaugacccacaccagcaaguaccugugcagcaagauccugaccgacaccagcagacccaacgaccccaccaacggcaacugcgaggcccccaucaccggcggcagccccgaccccggcgugaagggcuucgccuuccuggacggcgagaacagcuggcugggcagaaccaucagcaaggacagcagaagcggcuacgagaugcugaaggugcccaacgccgagaccgacacccagagcggcgccaucagccaccagaucaucgugaacaaccagaacuggagcggcuacagcggcgccuucaucgacuacugggccaacaaggagugcuucaaccccugcuucuacguggagcugaucagaggcagacccaaggagagcagcgugcuguggaccagcaacagcaucguggcccugugcggcagcaaggagagacugggcagcuggagcuggcacgacggcgccgagaucaucuacuucaaguga

SEQ ID NO: 185879 - RNA, 1410 nt, Artificial Sequence
  derived and/or modified CDS sequence (opt4) from neuraminidase__InfluenzaA__AIV09221
augaaccccaaccagaagaucaucaccaucggcagcgugugcaugaccaucggcauggccaaccugauccugcagaucggcaacaucaccagcaucuggaucagccacagcauccagaucggcaacagaaaccagaucgaggccugcaaccagagcgugaucaccuacgagaacaacaccugggugaaccagaccuacgugaacaucagcaacaccaacuucgccgugggccagagcguggugcccgugaagcuggccggcaacagcagccugugccccgugagcggcugggccaucuacagcaaggacaacagcaucagaaucggcagcaagggcgacguguucgugaucagagagcccuucaucagcugcagcccccuggagugcagaaccuucuuccugacccagggcgcccugcugaacgacaagcacagcaacggcaccaucaaggacagaagccccuacagaacccugaugagcugccccaucggcgaggugcccagccccuacaacagcagauucgagagcguggccuggagcgccagcgccugccacgacggcaucaacuggcugaccaucggcaucagcggccccgacaacggcgccguggccgugcugaaguacaacggcaucaucaccgacaccaucaagagcuggagaaacaacauccugagaacccaggagagcgagugcgugugcgugaacggcagcugcuucaccgugaugaccgacggccccagcaacggccaggccagcuacaagaucuucagaaucgagaagggcaagaucgugaagagcguggagaugaacgcccccaacuaccacuacgaggagugcagcugcuaccccgacagcagcgagaucaccugcgugugcagagacaacuggcacggcagcaacagacccugggugagcuucaaccagaaccuggaguaccagaucggcuacaucugcagcggcaucuucggcgacaaccccagacccaacgacaagaccggcagcugcggccccgugcccagcaacggcgccaacggcgugaagggcuucagcuucaaguacggcaacggcguguggaucggcagaaccaagagcaucagcagcagaaacggcuucgagaugaucugggaccccaacggcuggaccgagaccgacaacgacuucagcaucaagcaggacaucgugggcaucaacgaguggagcggcuacagcggcagcuucgugcagcaccccgagcugaccggccuggacugcaucagacccugcuucuggguggagcugaucagaggcagacccaaggagaacaccaucuggaccagcggcagcagcaucagcuucugcggcgugaacagcaacaccguggacuggagcuggcccgacggcgccgagcugcccuucaccaucgacaaguga

SEQ ID NO: 185880 - RNA, 1410 nt, Artificial Sequence
  derived and/or modified CDS sequence (opt4) from neuraminidase__InfluenzaA__AIW60703
augaaccccaaccagaagaucaucaccaucggcagcgugagccugaccaucgccaccaucugcuuccugaugcagaucgugauccuggugaccaccgugacccugcacuucaagcaguacgagugcaacagcccccccaacaaccaggugaugcugugcgagcccaccaucaucgagagaaacaucaccgagaucguguaccugaccaacaccaccaucgagaaggagaucugccccaagcuggccgaguacagaaacuggagcaagccccagugcaagaucaccggcuucgcccccuucagcaaggacaacagcaucagacugagcgccggcggcgacaucugggugaccagagagcccuacgugagcugcgaccccgacaagugcuaccaguucgcccugggccagggcaccacccugaacaacagacacagcaacgacaccgugcacgacagaacccccuacagaacccugcugaugaacgagcugggcgugcccuuccaccugggcaccaagcaggugugcaucgccuggagcagcagcagcugccacgacggcaaggccuggcugcacgugugcgugaccggccacgacgagaacgccaccgccagcuucaucuacgacggcagacugguggacagcaucggcagcuggagcaagaagauccugagaacccaggagagcgagugcgugugcaucaacggcaccugcaccguggugaugaccgacggcagcgccagcggcagagccgacaccaagauccuguucaucgaggagggcaagaucgugcacaucagcccccugagcggcagcgcccagcacguggaggagugcagcugcuacccccaguacagcggcgugagaugcgugugcagagacaacuggaagggcagcaacagacccaucguggacaucaacgugaaggacuacagcaucgugagcagcuacgugugcagcggccuggugggcgacacccccagaaagaacgacagcagcagcagcagccacugccugaaccccaacaacgaggagggcggccacggcgugaagggcugggccuucgacgacggcaacgacguguggaugggcagaaccaucagcgagaagcugagaagcggcuacgagaccuucaaggugaucggcggcuggagcaagcccaacagcaagcugcagaucaacagacaggugaucguggacagaggcaacagaagcggcuacagcggcaucuucagcguggagggcaagaacugcaucaacagaugcuucuacguggagcugaucagaggcagaaagcaggagaccgaggugugguggaccagcaacagcaucgugguguucugcggcaccagcggcaccuacggcaccggcagcuggcccgacggcgccgacaucaaccugaugcccaucuga

SEQ ID NO: 185881 - RNA, 1410 nt, Artificial Sequence
  derived and/or modified CDS sequence (opt4) from neuraminidase__InfluenzaA__AIW60704
augaaccccaaccagaagaucaucaccaucggcagcgugagccugaccaucgccaccaucugcuuccugaugcagaucgugauccuggugaccaccgugacccugcacuucaagcaguacgagugcaacagcccccccaacaaccaggugaugcugugcgagcccaccaucaucgagagaaacaucaccgagaucguguaccugaccaacaccaccaucgagaaggagaucugccccaagcuggccgaguacagaaacuggagcaagccccagugcaagaucaccggcuucgcccccuucagcaaggacaacagcaucagacugagcgccggcggcgacaucugggugaccagagagcccuacgugagcugcgaccccgacaagugcuaccaguucgcccugggccagggcaccacccugaacaacagacacagcaacgacaucgugcacgacagaacccccuacagaacccugcugaugaacgagcugggcgugcccuuccaccugggcaccaagcaggugugcaucgccuggagcagcagcagcugccacgacggcaaggccuggcugcacgugugcgugaccggccacgacgagaacgccaccgccagcuucaucuacgacggcagacugguggacagcaucggcagcuggagcaagaagauccugagaacccaggagagcgagugcgugugcaucaacggcaccugcaccguggugaugaccgacggcagcgccagcggcagagccgacaccaagauccuguucaucgaggagggcaagaucgugcacaucagcccccugagcggcagcgcccagcacguggaggagugcagcugcuacccccaguacagcggcgugagaugcgugugcagagacaacuggaagggcagcaacagacccaucguggacaucaacgugaaggacuacagcaucgugagcagcuacgugugcagcggccuggugggcgacacccccagaaagaacgacagcagcagcagcagccacugccugaaccccaacaacgaggagggcggccacggcgugaagggcugggccuucgacgacggcaacgacguguggaugggcagaaccaucagcgagaagcugagaagcggcuacgagaccuucaaggugaucggcggcuggagcaagcccaacagcaagcugcagaucaacagacaggugaucguggacagaggcaacagaagcggcuacagcggcaucuucagcguggagggcaagaacugcaucaacagaugcuucuacguggagcugaucagaggcagaaagcaggagaccgaggugugguggaccagcaacagcaucgugguguucugcggcaccagcggcaccuacggcaccggcagcuggcccgacggcgccgacaucaaccugaugcccaucuga

SEQ ID NO: 185882 - RNA, 1410 nt, Artificial Sequence
  derived and/or modified CDS sequence (opt4) from neuraminidase__InfluenzaA__AIW60705
augaaccccaaccagaagaucaucaccaucggcagcgugagccugaccaucgccaccaucugcuuccugaugcagaucgccauccuggugaccaccgugacccugcacuucaagcaguacgagugcaacagcccccccaacaaccaggugaugcugugcgagcccaccaucaucgagagaaacaucaccgagaucguguaccugaccaacaccaccaucgagaaggagaucugccccaagcuggccgaguacagaaacuggagcaagccccagugcaagaucaccggcuucgcccccuucagcaaggacaacagcaucagacugagcgccggcggcgacaucugggugaccagagagcccuacgugagcugcgaccccgacaagugcuaccaguucgcccugggccagggcaccacccugaacaacagacacagcaacgacaccgugcacgacagaacccccuacagaacccugcugaugaacgagcugggcgugcccuuccaccugggcaccaagcaggugugcaucgccuggagcagcagcagcugccacgacggcaaggccuggcugcacgugugcgugaccggccacgacgagaacgccaccgccagcuucaucuacgacggcagacugguggacagcaucggcagcuggagcaagaagauccugagaacccaggagagcgagugcgugugcaucaacggcaccugcaccguggugaugaccgacggcagcgccagcggcagagccgacaccaagauccuguucaucgaggagggcaagaucgugcacaucagcccccugagcggcagcgcccagcacguggaggagugcagcugcuaccccagauacagcggcgugagaugcgugugcagagacaacuggaagggcagcaacagacccaucguggacaucaacgugaaggacuacagcaucgugagcagcuacgugugcagcggccuggugggcgacacccccagaaagaacgacagcagcagcagcagccacugccugaaccccaacaacgaggagggcggccacggcgugaagggcugggccuucgacgacggcaacgacguguggaugggcagaaccaucagcgagaaguucagaagcggcuacgagaccuucaaggugaucggcggcuggagcaagcccaacagcaagcugcagaucaacagacaggugaucguggacagaggcaacagaagcggcuacagcggcaucuucagcguggagggcaagagcugcaucaacagaugcuucuacguggagcugaucagaggcagaaagcaggagaccgaggugugguggaccagcaacagcaucgugguguucugcggcaccagcggcaccuacggcaccggcagcuggcccgacggcgccgacaucaaccugaugcccaucuga

SEQ ID NO: 185883 - RNA, 1410 nt, Artificial Sequence; identical to SEQ ID NO: 185882
  derived and/or modified CDS sequence (opt4) from neuraminidase__InfluenzaA__AIW60706

SEQ ID NO: 185884 - RNA, 1410 nt, Artificial Sequence
  derived and/or modified CDS sequence (opt4) from neuraminidase__InfluenzaA__AIW60708
augaaccccaaccagaagaucaucaccaucggcagcgugagccugaccaucgccaccaucugcuuccugaugcagaucgccauccuggugaccaccgugacccugcacuucaagcaguacgagugcaacagcccccccaacaaccaggugaugcugugcgagcccaccaucaucgagagaaacaucaccgagaucguguaccugaccaacaccaccaucgagaaggagaucugccccaagcuggccgaguacagaaacuggagcaagccccagugcaacaucaccggcuucgcccccuucagcaaggacaacagcaucagacugagcgccggcggcgacaucugggugaccagagagcccuacgugagcugcgaccccgacaagugcuaccaguucgcccugggccagggcaccacccugaacaacagacacagcaacgacaccgugcacgacagaacccccuacagaacccugcugaugaacgagcugggcgugcccuuccaccugggcaccaagcaggugugcaucgccuggagcagcagcagcugccacgacggcaaggccuggcugcacgugugcgugaccggccacgacgagaacgccaccgccagcuucaucuacaacggcagacugguggacagcaucggcagcuggagcaagaagauccugagaacccaggagagcgagugcgugugcaucaacggcaccugcaccguggugaugaccgacggcagcgccagcggcaaggccgacaccaagauccuguucaucgaggagggcaagaucgugcacaucagcccccugagcggcagcgcccagcacguggaggagugcagcugcuaccccagauaccccggcgugagaugcgugugcagagacaacuggaagggcagcaacagacccaucguggacaucaacgugaaggacuacagcaucgugagcagcuacgugugcagcggccuggugggcgacacccccagaaagaacgacagcagcagcagcagccacugccugaaccccaacaacgaggagggcggccacggcgugaagggcugggccuucgacgacggcaacgacguguggaugggcagaaccaucagcgagaagcugagaagcggcuacgagaccuucaaggugaucgagggcuggagcaaccccaacagcaagcugcagaucaacagacaggugaucguggacagaggcaacagcagcggcuacagcggcaucuucagcguggagggcaagagcugcaucaacagaugcuucuacguggagcugaucagaggcagaaagcaggagaccgaggugugguggaccagcaacagcaucguggugcugugcggcaccagcggcaccuacggcaccggcagcuggcccgacggcgccgacaucaaccugaugcccaucuga

SEQ ID NO: 185885 - RNA, 1410 nt, Artificial Sequence
  derived and/or modified CDS sequence (opt4) from neuraminidase__InfluenzaA__AIW60710
augaaccccaaccagaagaucaucaccaucggcagcgugagccugaccaucgccaccaucugcuuccugaugcagaucgccauccuggugaccaccgugacccugcacuucaagcaguacgagugcaacagcccccccaacaaccaggugaugcugugcgagcccaccaucaucgagagaaacaucaccgagaucguguaccugaccaacaccaccaucgagaaggagaucugccccaagcuggccgaguacagaaacuggagcaagccccagugcaacaucaccggcuucgcccccuucagcaaggacaacagcaucagacugagcgccggcggcgacaucugggugaccagagagcccuacgugagcugcgaccccgacaagugcuaccaguucgcccugggccagggcaccacccugaacaacggccacagcaacgacaccgugcacgacagaacccccuacagaacccugcugaugaacgagcugggcgugcccuuccaccugggcaccaagcaggugugcaucgccuggagcagcagcagcugccacgacggcaaggccuggcugcacgugugcgugaccggcgacgacgagaacgccaccgccagcuucaucuacaacggcagacugguggacagcaucggcagcuggagcaagaagauccugagaacccaggagagcgagugcgugugcaucaacggcaccugcaccguggugaugaccgacggcagcgccagcggcaaggccgacaccaagauccuguucaucgaggagggcaagaucgugcacaccagcagccugagcggcagcgcccagcacguggaggagugcagcugcuaccccagauaccccggcgugagaugcgugugcagagacaacuggaagggcagcaacagacccaccguggacaucaacgugaaggacuacagcaucgugagcagcuacgugugcagcggccuggugggcgacacccccagaaagaacgacagcagcagcagcagccacugccuggaccccaacaacgaggagggcggccacggcgugaagggcugggccuucgacgacggcaacgacguguggaugggcagaaccaucagcgagaagcugagaagcggcuacgagaccuucaaggugaucgagggcuggagcaagcccaacagcaagcugcagaucaacagacaggugaucguggacagaggcaacagaagcggcuacagcggcaucuucagcguggagagcaagagcugcaucaacagaugcuucuacguggagcugaucagaggcagaaagcaggagaccgaggugcuguggaccagcaacagcaucgugguguucugcggcaccagcggcaccuacggcaccggcagcuggcccgacggcgccgacaucaaccugaugcccaucuga

SEQ ID NO: 185886 - RNA, 1410 nt, Artificial Sequence; identical to SEQ ID NO: 174651
  derived and/or modified CDS sequence (opt4) from neuraminidase__InfluenzaA__AIW60711

SEQ ID NO: 185887 - RNA, 1410 nt, Artificial Sequence; identical to SEQ ID NO: 174651
  derived and/or modified CDS sequence (opt4) from neuraminidase__InfluenzaA__AIW60712

SEQ ID NO: 185888 - RNA, 1410 nt, Artificial Sequence
  derived and/or modified CDS sequence (opt4) from neuraminidase__InfluenzaA__AIW60713
augaaccccaaccagaagaucaucaccaucggcagcgugagccugaccaucagcaccaucugcuucuucaugcagaucgccauccugaucaccaccgugacccugcacuucaagcaguacgaguucagcagcccccccaacaaccaggugaugcugugcgagcccaccaucaucgagagaaacaucaccgagaucguguaccugaccaacaccaccaucgagaaggagaucugccccaagcuggccgaguacagaaacuggagcaagccccagugcgacaucaccggcuucgcccccuucagcaaggacaacagcaucagacugagcgccggcggcgacaucugggugaccagagagcccuacgugagcugcgaccccgacaagugcuaccaguucgcccugggccagggcaccacccugaacaacgugcacagcaacgacaccgugcacgacagaacccccuacagaacccugcugaugaacgagcugggcgugcccuuccaccugggcaccaagcaggugugcaucgccuggagcagcagcagcugccacgacggcaaggccuggcugcacgugugcgugaccggcgacgacaagaacgccaccgccagcuucaucuacaacggcagacugguggacagcaucgugagcuggagcaaggagauccugagaacccaggagagcgagugcgugugcaucaacggcaccugcaccguggugaugaccgacggcagcgccagcggcaaggccgacaccaagauccuguucaucgaggagggcaagaucgugcacaccagcacccugagcggcagcgcccagcacguggaggagugcagcugcuaccccagauaccccggcgugagaugcgugugcagagacaacuggaagggcagcaacagacccaucguggacaucaacaucaaggacuacagcaucgccagcagcuacgugugcagcggccuggugggcgacacccccagaaagaacgacagcagcagcagcagccacugccuggaccccaacaacgaggagggcggccacggcgugaagggcugggccuucgacgacggcaacgacguguggaugggcagaaccaucagcgagaagcugagaagcggcuacgagaccuucaaggugaucgagggcuggagcaaccccaacagcaagcugcagaucaacagacaggugaucguggacagaggcaacagaagcggcuacagcggcaucuucagcguggagggcaagagcugcaucaacagaugcuucuacguggagcugaucagaggcagaaaggaggagaccgaggugcuguggaccagcaacagcaucgugguguucugcggcaccagcggcaccuacggcaccggcagcuggcccgacggcgccgacaucaaccugaugcccaucuga

SEQ ID NO: 185889 - RNA, 1410 nt, Artificial Sequence
  derived and/or modified CDS sequence (opt4) from neuraminidase__InfluenzaA__AIW60714
augaaccccaaccagaagaucaucaccaucggcagcgugagccugaccaucagcaccaucugcuucuucaugcagaucgccauccugaucaccaccgugacccugcacuucaagcaguacgaguucagcagcccccccaacaaccaggugaugcugugcgagcccaccaucaucgagagaaacaucaccgagaucguguaccugaccaacaccaccaucgagaaggagaucugccccaagcuggccgaguacagaaacuggagcaagccccagugcgacaucaccggcuucgcccccuucagcaaggacaacagcaucagacugagcgccggcggcgacaucugggugaccagagagcccuacgugagcugcgaccccgacaagugcuaccaguucgcccugggccagggcaccacccugaacaacgugcacagcaacgacaccgugcacgacagaacccccuacagaacccugcugaugaacgagcugggcgugcccuuccaccugggcaccaagcaggugugcaucgccuggagcagcagcagcugccacgacggcaaggccuggcugcacgugugcgugaccggcgacgacaagaacgccaccgccagcuucaucuacaacggcagacugguggacagcaucgugagcuggagcaaggagauccugagaacccaggagagcgagugcgugugcaucaacggcaccugcaccguggugaugaccgacggcagcgccagcggcaaggccgacaccaagauccuguucaucgaggagggcaagaucgugcacaccagcacccugagcggcagcgcccagcacguggaggagugcagcugcuaccccagauaccccggcgugagaugcgugugcagagacaacuggaagggcagcaacagacccaucguggacaucaacaucaaggacuacagcaucgccagcagcuacgugugcagcggccuggugggcgacacccccagaaagaacgacagcagcagcagcagccacugccuggaccccaacaacgaggagggcggccacggcgugaagggcugggccuucgacgacggcaacgacguguggaugggcagaaccaucagcgagaagcugagaagcggcuacgagaccuucaaggugaucgagggcuggagcaaccccaacagcaagcugcagaucaacagacaggugaucgugggcagaggcaacagaagcggcuacagcggcaucuucagcguggagggcaagagcugcaucaacagaugcuucuacguggagcugaucagaggcagaaaggaggagaccgaggugcuguggaccagcaacagcaucgugguguucugcggcaccagcggcaccuacggcaccggcagcuggcccgacggcgccgacaucaaccugaugcccaucuga

SEQ ID NO: 185890 - RNA, 1410 nt, Artificial Sequence
  derived and/or modified CDS sequence (opt4) from neuraminidase__InfluenzaA__AIW60715
augaaccccaaccagaagaucaucaccaucggcagcgugagccugaccaucagcaccaucugcuucuucaugcagaucgccauccugaucaccaccgugacccugcacuucaagcaguacgaguucaacagcccccccaacaaccaggugaugcugugcgagcccaccaucaucgagagaaacaucaccgagaucguguaccugaccaacaccaccaucgagaaggagaucugccccaagcuggccgaguacagaaacuggagcaagccccagugcgacaucaccggcuucgcccccuucagcaaggacaacagcaucagacugagcgccggcggcgacaucugggugaccagagagcccuacgugagcugcgaccccgacaagugcuaccaguucgcccugggccagggcaccacccugaacaacgugcacagcaacgacaccgugagagacagaacccccuacagaacccugcugaugaacgagcugggcgugcccuuccaccugggcaccaagcaggugugcaucgccuggagcagcagcagcugccacgacggcaaggccuggcugcacgugugcaucaccggcgacgacaagaacgccaccgccagcuucaucuacaacggcagacugguggacagcaucgugagcuggagcaagaagauccugagaacccaggagagcgagugcgugugcaucaacggcaccugcaccguggugaugaccgacggcagcgccagcggcaaggccgacaccaagauccuguucaucgaggagggcaagaucgugcacaccagcacccugagcggcagcgcccagcacguggaggagugcagcugcuaccccagauaccccggcgugagaugcgugugcagagacaacuggaagggcagcaacagacccaucguggacaucaacaucaaggaccacagcaucgugagcagcuacgugugcagcggccuggugggcgacacccccagaaagaacgacagcagcagcagcagccacugccuggaccccaacaacgaggagggcggccacggcgugaagggcugggccuucgacgacggcaacgacguguggaugggcagaaccaucagcgagaagagcagacugggcuacgagaccuucaaggugaucgagggcuggagcaaccccaagagcaagcugcagaucaacagacaggugaucguggacagaggcaacagaagcggcuacagcggcaucuucagcguggagggcaagagcugcaucaacagaugcuucuacguggagcugaucagaggcagaaaggaggagaccgaggugcuguggaccagcaacagcaucgugguguucugcggcaccagcggcaccuacggcaccggcagcuggcccgacggcgccgacaucaaccugaugcccaucuga

SEQ ID NO: 185891 - RNA, 1410 nt, Artificial Sequence; identical to SEQ ID NO: 176571
  derived and/or modified CDS sequence (opt4) from neuraminidase__InfluenzaA__AIW60716

SEQ ID NO: 185892 - RNA, 1410 nt, Artificial Sequence
  derived and/or modified CDS sequence (opt4) from neuraminidase__InfluenzaA__AIY54970
augaaccccaaccagaagaucaucaccaucggcagcgugagccugaccaucagcaccaucugcuucuucaugcagaucgccauccugaucaccaccgugacccugcacuucaagcaguacgaguucaacagcccccccaacaaccaggugaugcugugcgagcccaccaucaucgagagaaacaucaccgagaucguguaccugaccaacaccaccaucgagaaggagaucugccccaagcuggccgaguacagaaacuggagcaagccccagugcaacaucaccggcuucgcccccuucagcaaggacaacagcaucagacugagcgccggcggcgacaucugggugaccagagagcccuacgugagcugcgaccccgacaagugcuaccaguucgcccugggccagggcaccacccugaacaacgugcacagcaacgacaccgugcacgacagaacccccuacagaacccugcugaugaacgagcugggcgugcccuuccaccugggcaccaagcaggugugcaucgccuggagcagcagcagcugccacgacggcaaggccuggcugcacgugugcgugaccggcgacgacgagaacgccaccgccagcuucaucuacaacggcagacugguggacagcaucgugagcuggagcaagaagauccugagaacccaggagagcgagugcgugugcaucaacggcaccugcaccguggugaugaccgacggcagcgccagcggcaaggccgacaccaagauccuguucaucgaggagggcaagaucgugcacaccagcacccugagcggcagcgcccagcacguggaggagugcagcugcuaccccagauaccccggcgugagaugcgugugcagagacaacuggaagggcagcaacagacccaucguggacaucaacaucaaggacuacagcaucgugagcagcuacgugugcagcggccuggugggcgacacccccagaaagaccgacagcagcagcagcagccacugccuggaccccaacaacgaggagggcggccacggcgugaagggcugggccuucgacgacggcaacgaccuguggaugggcagaaccaucagccagaaccugagaagcggcuacgagaccuucaaggugaucgagggcuggagcaaccccaacagcaagcugcagaucaacagacaggugaucguggacagaggcaacagaagcggcuacagcggcaucuucagcguggagggcaagagcugcaucaacagaugcuucuacguggagcugaucagaggcagaaagcaggagaccgaggugcuguggaccagcaacagcaucgugguguucugcggcaccagcggcaccuacggcaccggcagcuggcccgacggcgccgacaucaaccugaugcccaucuga

SEQ ID NO: 185893 - RNA, 1410 nt, Artificial Sequence
  derived and/or modified CDS sequence (opt4) from neuraminidase__InfluenzaA__AIY54974
augaaccccaaccagaagaucaucaccaucggcagcgugagccugaccaucagcaccaucugcuucuucaugcagaucgccauccugaucaccaccgugacccugcacuucaagcaguacgaguucaacagcccccccaacaaccaggugaugcugugcgagcccaccaucaucgagagaaacaucaccgagaucguguaccugaccaacaccaccaucgagaaggagaucugccccaagcuggccgaguacagaaacuggagcaagccccagugcgacaucaccggcuucgcccccuucagcaaggacaacagcaucagacugagcgccggcggcgacaucugggugaccagagagcccuacgugagcugcgaccccgacaagugcuaccaguucgcccugggccagggcaccacccugaacaacgugcacagcaacgacaccgugcacgacagaacccccuacagaacccugcugaugagcgagcugggcgugcccuuccaccugggcaccaagcaggugugcaucgccuggagcagcagcagcugccacgacggcaaggccuggcugcacgugugcgugaccggcgacgacaagaacgccaccgccagcuucaucuacaacggcagacugguggacagcaucgugagcuggagcaagaagauccugagaacccaggagagcgagugcgugugcaucaacggcaccugcaccguggugaugaccgacggcagcgccagcggcaaggccgacaccaagauccuguucaucgaggagggcaagaucgugcacaccagcacccugagcggcagcgcccagcacguggaggagugcagcugcuaccccagauaccccggcgugagaugcgugugcagagacaacuggaagggcagcaacagacccaucguggacaucaacaucaaggacuacagcaucgugagcagcuacgugugcagcggccuggugggcgacacccccagaaagaacgacagcagcagcagcagccacugccuggaccccaacaacgaggagggcggccacggcgugaagggcugggccuucgacgacggcaacgacguguggaugggcagaaccaucagcgagaagcugagaagcggcuacgagaccuucaaggugaucgagggcuggagcaaccccaacagcaagcugcagaucaacagacaggugaagguggacagaggcaacagaagcggcuacagcggcaucuucagcguggagggcaagagcugcaucaacagaugcuucuacguggagcugaucagaggcagaaaggaggagaccaaggugcuguggaccagcaacagcaucgugguguucugcggcaccagcggcaccuacggcaccggcagcuggcccgacggcgccgacaucaaccugaugcccaucuga

SEQ ID NO: 185894 - RNA, 1410 nt, Artificial Sequence
  derived and/or modified CDS sequence (opt4) from neuraminidase__InfluenzaA__AIY54982
augaaccccaaccagaagaucaucaccaucggcagcgugagccugaccaucagcaccaucugcuucuucaugcagaucgccauccugaucaccaccgugacccugcacuucaagcaguacgaguucaacagcccccccaacaaccaggugaugcugugcgagcccaccaucaucgagagaaacaucaccgagaucguguaccugaccaacaccaccaucgagaaggagaucugccccaagcuggccgaguacagaaacuggagcaagccccagugcgacaucaccggcuucgcccccuucagcaaggacaacagcaucagacugagcgccggcggcgacaucugggugaccagagagcccuacgugagcugcgaccccgacaagugcuaccaguucgcccugggccagggcaccacccugaacaacgugcacagcaacgacaccgugcacgacagaacccccuacagaacccugcugaugaacgagcugggcgugcccuuccaccugggcaccaagcaggugugcaucgccuggagcagcagcagcugccacgacggcaaggccuggcugcacgugugcgugaccggcgacgacaagaacgccaccgccagcuucaucuacaacggcagacugguggacagcaucgugagcuggagcaaggagauccugagaacccaggagagcgagugcgugugcaucaacggcaccugcaccguggugaugaccgacggcagcgccagcggcaaggccgacaccaagauccuguucaucgaggagggcaagaucgugcacaccagcacccugagcggcagcgcccagcacguggaggagugcagcugcuaccccagauaccccggcgugagaugcgugugcagagacaacuggaagggcagcaacagacccaucguggacaucaacaucaaggacuacagcaucgugagcagcuacgugugcagcggccuggugggcgacacccccagaaagaacgacagcagcagcagcagccacugccuggaccccaacaacgaggagggcggccacggcgugaagggcugggccuucgacgacggcaacgacguguggaugggcagaaccaucagcgagaaguucagaagcggcuacgagaccuucaaggugaucgagggcuggagcaaccccaacagcaagcugcagaucaacagacaggugaucguggacagaggcaacagaagcggcuacagcggcaucuucagcguggagggcaagagcugcaucaacagaugcuucuacguggagcugaucagaggcagaaaggaggagaccgaggugcuguggaccagcaacagcaucgugguguucugcggcaccagcggcaccuacggcaccggcagcuggcccgacggcgccgacaucaaccugaugcccaucuga

SEQ ID NO: 185895 - RNA, 1410 nt, Artificial Sequence
  derived and/or modified CDS sequence (opt4) from neuraminidase__InfluenzaA__AIY54990
augaaccccaaccagaagaucaucaccaucggcagcgugagccugaccaucagcaccaucugcuucuucaugcagaucgccauccugaucaccaccgugacccugcacuucaagcaguacgaguucagcagcccccccaacaaccaggugaugcugugcgagcccaccaucaucgagagaaacaucaccgagaucguguaccugaccaacaccaccaucgagaaggagaucugccccaagcuggccgaguacagaaacuggagcaagccccagugcggcaucaccggcuucgcccccuucagcaaggacaacagcaucagacugagcgccggcggcgacaucugggugaccagagagcccuacgugagcugcgaccccgacaagugcuaccaguucgcccugggccagggcaccacccugaacaacgugcacagcaacgacaccgugcacgacagaacccccuacagaacccugcugaugaacgagcugggcgugcccuuccaccugggcaccaagcaggugugcaucgccuggagcagcagcagcugccacgacggcaaggccuggcugcacgugugcgugaccggcgacgacaagaacgccaccgccagcuucaucuacaacggcagacugguggacagcaucgugagcuggagcaaggagauccugagaacccaggagagcgagugcgugugcaucaacggcaccugcaccguggugaugaccgacggcagcgccagcggcaaggccgacaccaagauccuguucaucgaggagggcaagaucgugcacaccagcacccugagcggcagcgcccagcacguggaggagugcagcugcuaccccagauaccccggcgugagaugcgugugcagagacaacuggaagggcagcaacagacccaucguggacaucaacaucaaggacuacagcaucgugagcagauacgugugcagcggccuggugggcgacacccccagaaagaacgacagcagcagcagcagccacugccuggaccccaacaacgaggagggcggccacggcgugaagggcugggccuucgacgacggcaacgacguguggaugggcagaaccaucagcgagaagagcagaagcggcuacgagaccuucaaggugaucgagggcuggagcaaccccaacagcaagcugcagaucaacagacaggugaucguggacagaggcaacagaagcggcuacagcggcaucuucagcguggagggcaagagcugcaucaacagaugcuucuacguggagcugaucagaggcagaaaggaggagaccgaggugcuguggaccagcaacagcaucgugguguucugcggcaccagcggcaccuacggcaccggcagcuggcccgacggcgccgacaucaaccugaugcccaucuga

SEQ ID NO: 185896 - RNA, 1401 nt, Artificial Sequence
  derived and/or modified CDS sequence (opt4) from neuraminidase__InfluenzaA__AJD78177
augaaccccaaccagaagaucaucgccaucggcagcgugagccugaucaucgccgugaucugccugcugaugcagaucgccauccugaccaccaccaugacccugcacuucaugcagaacgagugcagcaaccccagcaacaaccaggugaugcccugcgagcccaucaucaucgagagaaacaccgugcaccugaacaacaccaccaucgagagagagaucugccccaaggccgccgaguacaagaacuggagcaagccccagugccagaucaccggcuucgcccccuucagcaaggacaacagcaucagacugagcgccggcggcgacaucugggugaccagagagcccuacgugagcugcagccuggacaagugcuaccaguucgcccugggccagggcaccacccugaagaacaagcacagcaacggcaccacccacgacagaaccccccacagaacccugcugaugaacgagcugggcgugcccuuccaccugggcaccaagcaggugugcaucgccuggagcagcagcagcugcuacgacggcaaggccuggcugcacaucugcgugaccggcgacgacaagaacgccaccgccagcaucaucuacgacggcaugcugguggacagcaucggcagcuggagcaagaacauccugagaacccaggagagcgagugcgugugcaucaacggcaccugcgccguggugaugaccgacggcagcgccagcggcaaggccgacaccagagugcuguucaucagagagggcaagaucaucaacaucagcccccugagcggcagcgcccagcacguggaggagugcagcugcuaccccagauaccccgaggugagaugcgugugcagagacaacuggaagggcagcaacagacccauccuguacaucaacauggccgacuacagcaucgagagcagcuacgugugcagcggccuggugggcgacacccccagaaacgacgacagcagcagcagcagcaacugcagagaccccaacaacgagagaggcgcccccggcgugaagggcugggccuucgacgacggcaacgacguguggaugggcagaaccaucaagaacggcagcagaagcggcuacgagaccuucagaguggugaacggcuggaccauggccaacagcaagagccagaucaacagacaggugaucguggacagcgacgacuggagcggcuacagcggcaucuucagcguggagggcaagaagugcaucaacagaugcuucuacguggagcugaucagaggcagaccccaggagcccagagugugguggaccagcaacagcaucaucguguucugcggcaccagcggcaccuacggcaccggcagcuggcccgacggcgccaacaucaacuucaugcccaucuga

SEQ ID NO: 185897 - RNA, 1401 nt, Artificial Sequence
  derived and/or modified CDS sequence (opt4) from neuraminidase__InfluenzaA__AJD78189
augaaccccaaccagaagaucaucgccaucggcagcgugagccugaucaucgccaucaucugccugcugaugcagaucgccauccugaccaccaccaugacccugcacuucagacagaacgagugcaacaacagcagcaacaaccaggugaugcccugcgagcccaucaucaucgagagaaacaccgugcaccugaacagcaccaccaucgagagagagaucugccccaagguggccgaguacaagaacuggagcaagccccagugccagaucaccggcuucgcccccuucagcaaggacaacagcaucagacugagcgccggcggcgacaucugggugaccagagagcccuacgugagcugcagccuggacaagugcuaccaguucgcccugggccagggcaccacccugaagaacaagcacagcaacggcaccacccacgacagaaccagccacagaacccugcugaugaacgagcugggcgugcccuuccaccugggcaccaagcaggugugcaucgccuggagcagcagcagcugcuacgacggcaaggccuggcugcacaucugcgugaccggcgacgacaagaacgccaccgccagcaucaucuacaacggcaugcugguggacagcaucggcagcuggagcaagaacauccugagaacccaggagagcgagugcgugugcaucaacggcaccugcgccguggugaugaccgacggcagcgccagcggcaaggccgacaccagagugcuguucaucagagagggcaagaucaucaacaucagcccccugagcggcagcgcccagcacguggaggagugcagcugcuaccccagauaccccgaggugagaugcgugugcagagacaacuggaagggcagcaacagacccauccuguacaucaacauggccgacuacagcaucgagagcagcuacgugugcagcggccuggugggcgacacccccagaaacgacgacagcagcagcagcagcaacugcaaggaccccaacagcgagagaggcgcccccggcgugaagggcugggccuucgacgacggcaacgacguguggaugggcagaaccaucaagaacggcagcagaagcggcuacgagaccuucagagugcugaacggcuggaccguggccaacagcaagagccagaucaacagacaggugaucguggacagcgacgacuggagcggcuacagcggcaucuucagcguggagggcaagaagugcaucaacagaugcuucuacguggagcugaucagaggcagaccccaggagcccagagugugguggaccagcaacagcaucaucguguucugcggcaccagcggcaccuacggcaccggcagcuggcccgacggcgccaacaucaacuucaugcccaucuga

SEQ ID NO: 185898 - RNA, 1401 nt, Artificial Sequence
  derived and/or modified CDS sequence (opt4) from neuraminidase__InfluenzaA__AJD78201
augaaccccaaccagaagaucaccgccaucggcagcgugagccugaucaucgccaucaucugccugcugaugcagaucgccauccugaccaccaccaugacccugcacuucagacagaaggagugcagcaaccccagcaacaaccaggugaugcccugcgagcccaucaucaucgagagaaacaccgugcaccugaacagcaccaccaucgagagagagaucugccccaagguggccgaguacaagaacuggagcaagccccagugccugaucaccggcuucgcccccuucagcaaggacaacagcaucagacugagcgccggcggcgacaucugggugaccagagagcccuacgugagcugcagccccgacaagugcuaccaguucgcccugggccagggcaccacccugaagaacaagcacagcaacggcaccacccacgacagaaccccccacagaacccugcugaugaacgagcugggcgugcccuuccaccugggcaccaagcaggugugcaucgccuggagcagcagcagcugcuacgacggcaaggccuggcugcacaucugcgugaccggcgacgacaagaacgccaccgccagcaucaucuacgacggcaugcugguggacagcaucggcagcuggagcaagaacauccugagaacccaggagagcgagugcgugugcaucaacggcaccugcgccguggugaugaccgacggcagcgccagcggcguggccgacaccagagugcuguucaucagagagggcaagaucaucaacaucagaccccugagcggcagcgcccagcacguggaggagugcagcugcuaccccagauaccccgaggugagaugcgugugcagagacaacuggaagggcagcaacagacccaucaucuacaucaacauggccgacuacagcaucgagagcagcuacgugugcagcggccuggugggcgacacccccagaaacgacgacagcagcagcagcagcaacugcagagaccccaacaacgagagaggcgcccccggcgugaagggcugggccuucgacgacggcaacgacguguggaugggcagaaccaucaagaacggcagcagaagcggcuacgagaccuucagagugaucaacggcuggaccauggccaacagcaagagccagaucaacagacaggugaucguggacagcgacgacuggagcggcuacagcggcaucuucagcguggagggcaagaagugcaucaacagaugcuucuacguggagcugaucagaggcagaccccaggagcccagagugugguggaccagcaacagcaucaucguguucugcggcaccagcggcaccuacggcaccggcagcuggcccgacggcgccaacaucaacuucaugcccaucuga

SEQ ID NO: 185899 - RNA, 1401 nt, Artificial Sequence
  derived and/or modified CDS sequence (opt4) from neuraminidase__InfluenzaA__AJD78213
augaaccccaaccagaagaucaccgccaucggcagcgugagccugaucaucgccaucaucugccuguucaugcagaucgccauccugaccaccaccaugacccugcacuucagacagaaggagugcagcaaccccagcaacaaccaggugaugcccugcgagcccaucaucaucgagagaaacaccgugcaccugaacagcaccaccaucgagagagagaucugccccaagguggccgaguacaagaacuggagcaagccccagugccugaucaccggcuucgcccccuucagcaaggacaacagcaucagacugagcgccggcggcgacaucugggugaccagagagcccuacgugagcugcagccccgacaagugcuaccaguucgcccugggccagggcaccacccugaagaacaagcacagcaacggcaccacccacgacagaaccccccacagaacccugcugaugaacgagcugggcgugcccuuccaccugggcaccaagcaggugugcaucgccuggagcagcagcagcugcuacgacggcaaggccuggcugcacaucugcgugaccggcgacgacaagaacgccaccgccagcaucaucuacgacggcaugcugguggacagcaucggcagcuggagcaagaacauccugagaacccaggagagcgagugcgugugcaucaacggcaccugcgccguggugaugaccgacggcagcgccagcggcguggccgacaccagagugcuguucaucagagagggcaagaucaucaacaucagaccccugagcggcagcgcccagcacguggaggagugcagcugcuaccccagauaccccgaggugagaugcgugugcagagacaacuggaagggcagcaacagacccaucaucuacaucaacauggccgacuacagcaucgagagcagcuacgugugcagcggccuggugggcgacacccccagaaacgacgacagcagcagcagcagcaacugcagagaccccaacaacgagagaggcgcccccggcgugaagggcugggccuucgacgacggcaacgacguguggaugggcagaaccaucaagaacggcagcagaagcggcuacgagaccuucagagugaucaacggcuggaccauggccaacagcaagagccagaucaacagacaggugaucguggacagcgacgacuggagcggcuacagcggcaucuucagcguggagggcaagaagugcaucaacagaugcuucuacguggagcugaucagaggcagaccccaggagcccagagugugguggaccagcaacagcaucaucguguucugcggcaccagcggcaccuacggcaccggcagcuggcccgacggcgccaacaucaacuucaugcccaucuga

SEQ ID NO: 185900 - RNA, 1410 nt, Artificial Sequence; identical to SEQ ID NO: 182982
  derived and/or modified CDS sequence (opt4) from neuraminidase__InfluenzaA__AJI80140

SEQ ID NO: 185901 - RNA, 1410 nt, Artificial Sequence; identical to SEQ ID NO: 182982
  derived and/or modified CDS sequence (opt4) from neuraminidase__InfluenzaA__AJI80152

SEQ ID NO: 185902 - RNA, 1410 nt, Artificial Sequence; identical to SEQ ID NO: 185758
  derived and/or modified CDS sequence (opt4) from neuraminidase__InfluenzaA__AJI80164

SEQ ID NO: 185903 - RNA, 1410 nt, Artificial Sequence; identical to SEQ ID NO: 185697
  derived and/or modified CDS sequence (opt4) from neuraminidase__InfluenzaA__AJI80175

SEQ ID NO: 185904 - RNA, 1410 nt, Artificial Sequence; identical to SEQ ID NO: 185697
  derived and/or modified CDS sequence (opt4) from neuraminidase__InfluenzaA__AJI80187

SEQ ID NO: 185905 - RNA, 1410 nt, Artificial Sequence; identical to SEQ ID NO: 185697
  derived and/or modified CDS sequence (opt4) from neuraminidase__InfluenzaA__AJI80199

SEQ ID NO: 185906 - RNA, 1410 nt, Artificial Sequence; identical to SEQ ID NO: 185697
  derived and/or modified CDS sequence (opt4) from neuraminidase__InfluenzaA__AJI80211

SEQ ID NO: 185907 - RNA, 1410 nt, Artificial Sequence; identical to SEQ ID NO: 183931
  derived and/or modified CDS sequence (opt4) from neuraminidase__InfluenzaA__AJI80223

SEQ ID NO: 185908 - RNA, 1410 nt, Artificial Sequence; identical to SEQ ID NO: 185697
  derived and/or modified CDS sequence (opt4) from neuraminidase__InfluenzaA__AJI80235

SEQ ID NO: 185909 - RNA, 1410 nt, Artificial Sequence; identical to SEQ ID NO: 183931
  derived and/or modified CDS sequence (opt4) from neuraminidase__InfluenzaA__AJI80247

SEQ ID NO: 185910 - RNA, 1410 nt, Artificial Sequence; identical to SEQ ID NO: 185716
  derived and/or modified CDS sequence (opt4) from neuraminidase__InfluenzaA__AJI80259

SEQ ID NO: 185911 - RNA, 1410 nt, Artificial Sequence; identical to SEQ ID NO: 182206
  derived and/or modified CDS sequence (opt4) from neuraminidase__InfluenzaA__AJI80271

SEQ ID NO: 185912 - RNA, 1410 nt, Artificial Sequence; identical to SEQ ID NO: 185697
  derived and/or modified CDS sequence (opt4) from neuraminidase__InfluenzaA__AJI80283

SEQ ID NO: 185913 - RNA, 1410 nt, Artificial Sequence
  derived and/or modified CDS sequence (opt4) from neuraminidase__InfluenzaA__AJI80306
augaaccccaaccagaagaucaucaccaucggcagcgugagccugaccaucagcaccaucugcuucuucaugcagaucgccauccugaucaccaccgugacccugcacuucaagcaguacgaguucaacagcccccccaacaaccaggugaugcugugcgagcccaccaucaucgagagaaacaucaccgagaucguguaccugaccaacaccaccaucgagaaggagaucugccccaagcccgccgaguacagaaacuggagcaagccccagugcggcaucaccggcuucgcccccuucagcaaggacaacagcaucagacugagcgccggcggcgacaucugggugaccagagagcccuacgugagcugcgaccccgacaagugcuaccaguucgcccugggccagggcaccacccugaacaacgugcacagcaacaacaccgugcuggacagaacccccuacagaacccugcugaugaacgagcugggcgugcccuuccaccugggcaccaagcaggugugcaucgccuggagcagcagcagcugccacgacggcaaggccuggcugcacgugugcaucaccggcgacgacaagaacgccaccgccagcuucaucuacaacggcagacugguggacagcguggugagcuggagcaaggagauccugagaacccaggagagcgagugcgugugcaucaacggcaccugcaccguggugaugaccgacggcagcgccagcggcaaggccgacaccaagauccuguucaucgaggagggcaagaucgugcacaccagcacccugagcggcagcgcccagcacguggaggagugcagcugcuaccccagauaccccggcgugagaugcgugugcagagacaacuggaagggcagcaacagacccaucguggacaucaacaucaaggaccacagcaucgugagcagcuacgugugcagcggccuggugggcgacacccccagaaagaacgacagcagcagcagcagccacugccuggaccccaacaacgaggagggcggccacggcgugaagggcugggccuucgacgacggcaacgacguguggaugggcagaaccaucaacgagaccagcagacugggcuacgagaccuucaaggugaucgagggcuggagcaaccccaagagcaagcugcagaucaacaagcaggugaucguggacagaggcgacagaagcggcuacagcggcaucuucagcguggagggcaagagcugcaucaacagaugcuucuacguggagcugaucagaggcagaaaggaggagaccgaggugcuguggaccagcaacagcaucgugguguucugcggcaccagcggcaccuacggcaccggcagcuggcccgacggcgccgaccugaaccugaugcccaucuga

SEQ ID NO: 185914 - RNA, 1410 nt, Artificial Sequence
  derived and/or modified CDS sequence (opt4) from neuraminidase__InfluenzaA__AJI80318
augaaccccaaccagaagaucaucaccaucggcagcgugugcaugaccaucggcauggccaaccugauccugcagaucggcaacaucaucagcaucuggaucagccacagcauccagcugggcaaccagagccagaucgaggccugcaaccagaacgugaucaccuacgagaacaacaccugggugaaccagaccuacgugaacaucagcaacaccaacuucgccaccggccagagcguggugagcgugaagcuggccggcaacagcagccugugccccgugagcggcugggccaucuacagcaaggacaacagcgugagaaucggcagcaagggcgacguguucgugaucagagagcccuucaucagcugcagcccccuggagugcagaaccuucuuccugacccagggcgcccugcugaacgacaagcacagcaacggcaccaucaaggacagaagccccuacagaacccugaugagcugccccaucggcgaggugcccagccccuacaacagcagauucgagagcguggccuggagcgccagcgccugccacgacggcaucaacuggcugaccaucggcaucagcggccccgacagcggcgccguggccgugcugaaguacaacggcaucaucaccgacaccaucaagagcuggaagaacaacauccugagaacccaggagagcgagugcgccugcgugaacggcagcugcuucaccaucaugaccgacggccccagcgacggccaggccagcuacaagaucuucagaaucgagaagggcaagaucgugaagagcguggagaugaacgcccccaacuaccacuacgaggagugcagcugcuaccccgacagcagcgagaucaccugcgugugcagagacaacuggcacggcagcaacagacccugggugagcuucaaccagaaccuggaguaccagaucggcuacaucugcagcggcguguucggcgacaaccccagacccaacgacaagaccggcagcugcggccccgugagcagcaacggcgccaacggcgugaagggcuucagcuucaaguacggcaacggcguguggaucggcagaaccaagagcaucagcagcagaaagggcuucgagaugaucugggaccccaacggcuggaccggcaccgacaacaacuucagcaucaagcaggacaucgugggcaucaacgaguggagcggcuacagcggcagcuucgugcagcaccccgagcugaccggccuggacugcaucagacccugcuucuggguggagcugaucagaggcagacccaaggagaacaccaucuggaccagcggcagcagcaucagcuucugcggcgugaacagcgacaccgugggcuggagcuggcccgacggcgccgagcugcccuucaccaucgacaaguga

SEQ ID NO: 185915 - RNA, 1410 nt, Artificial Sequence
  derived and/or modified CDS sequence (opt4) from neuraminidase__InfluenzaA__AJI80329
augaaccccaaccagaagaucaucaccaucggcagcgugugcaugaccaucggcauggccaaccugauccugcagaucggcaacaucaucagcaucuggaucagccacagcauccagcugggcaaccagagccagaucgagaccugcaaccagagcgugaucaccuacgagaacaacaccugggugaaccagaccuacgugaacaucagcaacaccaacuucgccgccggccagagcguggugagcgugaagcuggccggcaacagcagccugugccccgugagcggcugggccaucuacagcaaggacaacagcgugagaaucggcagcaagggcgacguguucgugaucagagagcccuucaucagcugcagcccccuggagugcagaaccuucuuccugacccagggcgcccugcugaacgacaagcacagcaacggcaccaucaaggacagaagccccuacagaacccugaugagcugccccaucggcgaggugcccagccccuacaacagcagauucgagagcguggccuggagcgccagcgccugccacgacggcaucaacuggcugaccaucggcaucagcggccccgacagcggcgccguggccgugcugaaguacaacggcaucaucaccgacaccaucaagagcuggaagaacaacauccugagaacccaggagagcgagugcgccugcgugaacggcagcugcuucaccaucaugaccgacggccccagcgacggccaggccagcuacaagaucuucagaaucgagaagggcaagaucgugaagagcguggagaugaacgcccccaacuaccacuacgaggagugcagcugcuaccccgacagcagcgagaucaccugcgugugcagagacaacuggcacggcagcaacagacccugggugagcuucaaccagaaccuggaguaccagaucggcuacaucugcagcggcguguucggcgacaaccccagacccaacgacaagaccggcagcugcggccccgugagcagcaacggcgccaacggcgugaagggcuucagcuucaaguacggcaacggcguguggaucggcagaaccaagagcaucagcagcagaaagggcuucgagaugaucugggaccccaacggcuggaccggcaccgacaacaacuucagcaucaagcaggacaucgugggcaucaacgaguggagcggcuacagcggcagcuucgugcagcaccccgagcugaccggccuggacugcaucagacccugcuucuggguggagcugaucagaggcagacccaaggagaacaccaucuggaccagcggcagcagcaucagcuucugcggcgugaacagcgacaccgugggcuggagcuggcccgacggcgccgagcugcccuucaccaucgacaaguga

SEQ ID NO: 185916 - RNA, 1410 nt, Artificial Sequence
  derived and/or modified CDS sequence (opt4) from neuraminidase__InfluenzaA__AJI80340
augaaccccaaccagaagaucaucaccaucggcagcgugugcaugaccaucggcauggccaaccugauccugcagaucggcaacaucaucagcaucuggaucagccacagcauccagcugggcaaccagagccagaucgagaccugcaaccagagcgugaucaccuacgagaacaacaccugggugaaccagaccuacgugaacaucagcaacaccaacuucgccgccggccagagcguggugagcgugaagcuggccggcaacagcagccugugccccgugagcggcugggccaucuacagcaaggacaacagcaucagaaucggcagcaagggcgacguguucgugaucagagagcccuucaucagcugcagcccccuggagugcagaaccuucuuccugacccagggcgcccugcugaacgacaagcacagcaacggcaccaucaaggacagaagccccuacagaacccugaugagcugccccaucggcgaggugcccagccccuacaacagcagauucgagagcguggccuggagcgccagcgccugccacgacggcaucaacuggcugaccaucggcaucagcggccccgacagcggcgccguggccgugcugaaguacaacggcaucaucaccgacaccaucaagagcuggaagaacaacauccugagaacccaggagagcgagugcgccugcgugaacggcagcugcuucaccaucaugaccgacggccccagcgacggccaggccagcuacaagaucuucagaaucgagaagggcaagaucgugaagagcguggagaugaacgcccccaacuacuacuacgaggagugcagcugcuaccccgacagcagcgagaucaccugcgugugcagagacaacuggcacggcagcaacagacccugggugagcuucaaccagaaccuggaguaccagaucggcuacaucugcagcggcaucuucggcgacaaccccagacccaacgacaagaccggcagcugcggccccgugagcagcaacggcgccaacggcgugaagggcuucagcuucaaguacggcaacggcguguggaucggcagaaccaagagcaucagcagcagaaagggcuucgagaugaucugggaccccaacggcuggaccggcaccgacaacaacuucagcaucaagcaggacaucgugggcaucaacgaguggagcggcuacagcggcagcuucgugcagcaccccgagcugaccggccuggacugcaucagacccugcuucuggguggagcugaucagaggcagacccaaggagaacaccaucuggaccagcggcagcagcaucagcuucugcggcgugaacagcgacaccgugggcuggagcuggcccgacggcgccgagcugcccuucaccaucgacaaguga

SEQ ID NO: 185917 - RNA, 1410 nt, Artificial Sequence; identical to SEQ ID NO: 182206
  derived and/or modified CDS sequence (opt4) from neuraminidase__InfluenzaA__AJI80351

SEQ ID NO: 185918 - RNA, 1410 nt, Artificial Sequence
  derived and/or modified CDS sequence (opt4) from neuraminidase__InfluenzaA__AJI80363
augaaccccaaccagaagaucaucaccaucggcagcgugagccugaccaucagcaccaucugcuucuucaugcagaucgccauccugaucaccaccgugacccugcacuucaagcaguacgaguucaacagccugcccaacaaccaggugaugcugugcgagcccaccaucaucgagagaaacaucaccgagaucguguaccugaccaacaccaccaucgagaaggagaucugccccaagcccgccgaguacagaaacuggagcaagccccagugcggcaucaccggcuucgcccccuucagcaaggacaacagcaucagacugagcgccggcggcgacaucugggugaccagagagcccuacgugagcugcgaccccgacaagugcuaccaguucgcccugggccagggcaccacccugaacaacgugcacagcaacaacaccgccagagacagaacccccuacagaacccugcugaugaacgagcugggcgugcccuuccaccugggcaccaagcaggugugcaucgccuggagcagcagcagcugccacgacggcaaggccuggcugcacgugugcaucaccggcgacgacaagaacgccaccgccagcuucaucuacaacggcagacugguggacagcguggugagcuggagcaaggagauccugagaacccaggagagcgagugcgugugcaucaacggcaccugcaccguggugaugaccgacggcagcgccagcggcaaggccgacaccaagauccuguucaucgaggagggcaagaucgugcacaccagcacccugagcggcggcgcccagcacguggaggagugcagcugcuaccccagauaccccggcgugagaugcgugugcagagacaacuggaagggcagcaacagacccaucguggacaucaacaucaaggaccacagcaucgugagcagcuacgugugcagcggccuggugggcgacacccccagaaagaacgacagcagcagcagcagccacugccugaaccccaacaacgaggagggcggccacggcgugaagggcugggccuucgacgacggcaacgacguguggaugggcagaaccaucaacgagaccagcagacugggcuacgagaccuucaaggugaucgagggcuggagcaaccccaagagcaagcugcagaucaacagacaggugaucguggacagaggcgacagaagcggcuacagcggcaucuucagcguggagggcaagagcugcaucaacagaugcuucuacguggagcugaucagaggcagaaaggaggagaccgaggugcuguggaccagcaacagcaucgugguguucugcggcaccagcggcaccuacggcaccggcagcuggcccgacggcgccgaccugaaccugaugcccaucuga

SEQ ID NO: 185919 - RNA, 1410 nt, Artificial Sequence
  derived and/or modified CDS sequence (opt4) from neuraminidase__InfluenzaA__AJI80375
augaaccccaaccagaagaucaucaccaucggcagcgugagccugaccaucagcaccaucugccuguucaugcagaucgccauccugaucaccaccgugacccugcacuucaagcagcacgaguucaacagcccccccaacaaccaggugaugcugugcgagcccaccaucaucgagagaaacaucaccgagaucguguaccugaccaacaccaccaucgagaaggagaucugccccaagcccgccgaguacagaaacuggagcaagccccagugcggcaucaccggcuucgcccccuucagcaaggacaacagcaucagacugagcgccggcggcgacaucugggugaccagagagcccuacgugagcugcgaccccgacaagugcuaccaguucgcccugggccagggcaccacccugaacaacgugcacagcaacaacaccgugagagacagaacccccuacagaacccugcugaugaacgagcugggcgugcccuuccaccugggcaccaagcaggugugcaucgccuggagcagcagcagcugccacgacggcaaggccuggcugcacgugugcaucaccggcgacgacaagaacgccaccgccagcuucaucuacaacggcagacugguggacagcguggugagcuggagcaaggagauccugagaacccaggagagcgagugcgugugcaucaacggcaccugcaccguggugaugaccgacggcagcgccagcggcaaggccgacaccaagauccuguucaucgaggagggcaagaucgugcacaccagcacccugagcggcagcgcccagcacguggaggagugcagcugcuaccccagauaccccggcgugagaugcgugugcagagacaacuggaagggcagcaacagacccaucguggacaucaacaucaaggaccacagcaucgugagcagcuacgugugcagcggccuggugggcgacacccccagaaagaacgacagcagcagcagcagccacugccuggaccccaacaacgaggagggcggccacggcgugaagggcugggccuucgacgacggcaacgacguguggaugggcagaaccaucaacgagaccagcagacugggcuacgagaccuucaaggugaucgagggcuggagcaaccccaagagcaagcugcagaucaacagacaggugaucguggacagaggcgacagaagcggcuacagcggcaucuucagcguggagggcaagagcugcaucaacagaugcuucuacguggagcugaucagaggcagaaaggaggagaccgaggugcuguggaccagcaacagcaucgugguguucugcggcaccagcggcaccuacggcaccggcagcuggcccgacggcgccgaccugaaccugaugcccaucuga

SEQ ID NO: 185920 - RNA, 1410 nt, Artificial Sequence; identical to SEQ ID NO: 185736
  derived and/or modified CDS sequence (opt4) from neuraminidase__InfluenzaA__AJI80387

SEQ ID NO: 185921 - RNA, 1410 nt, Artificial Sequence; identical to SEQ ID NO: 185736
  derived and/or modified CDS sequence (opt4) from neuraminidase__InfluenzaA__AJI80398

SEQ ID NO: 185922 - RNA, 1410 nt, Artificial Sequence; identical to SEQ ID NO: 185736
  derived and/or modified CDS sequence (opt4) from neuraminidase__InfluenzaA__AJI80409

SEQ ID NO: 185923 - RNA, 1410 nt, Artificial Sequence; identical to SEQ ID NO: 185736
  derived and/or modified CDS sequence (opt4) from neuraminidase__InfluenzaA__AJI80420

SEQ ID NO: 185924 - RNA, 1410 nt, Artificial Sequence; identical to SEQ ID NO: 185736
  derived and/or modified CDS sequence (opt4) from neuraminidase__InfluenzaA__AJI80431

SEQ ID NO: 185925 - RNA, 1410 nt, Artificial Sequence; identical to SEQ ID NO: 185731
  derived and/or modified CDS sequence (opt4) from neuraminidase__InfluenzaA__AJI80442

SEQ ID NO: 185926 - RNA, 1410 nt, Artificial Sequence; identical to SEQ ID NO: 185736
  derived and/or modified CDS sequence (opt4) from neuraminidase__InfluenzaA__AJI80454

SEQ ID NO: 185927 - RNA, 1410 nt, Artificial Sequence; identical to SEQ ID NO: 185731
  derived and/or modified CDS sequence (opt4) from neuraminidase__InfluenzaA__AJI80465

SEQ ID NO: 185928 - RNA, 1410 nt, Artificial Sequence; identical to SEQ ID NO: 185736
  derived and/or modified CDS sequence (opt4) from neuraminidase__InfluenzaA__AJI80477

SEQ ID NO: 185929 - RNA, 1410 nt, Artificial Sequence; identical to SEQ ID NO: 185736
  derived and/or modified CDS sequence (opt4) from neuraminidase__InfluenzaA__AJI80488

SEQ ID NO: 185930 - RNA, 1410 nt, Artificial Sequence; identical to SEQ ID NO: 185758
  derived and/or modified CDS sequence (opt4) from neuraminidase__InfluenzaA__AJI80499

SEQ ID NO: 185931 - RNA, 1410 nt, Artificial Sequence; identical to SEQ ID NO: 185736
  derived and/or modified CDS sequence (opt4) from neuraminidase__InfluenzaA__AJI80510

SEQ ID NO: 185932 - RNA, 1410 nt, Artificial Sequence; identical to SEQ ID NO: 185758
  derived and/or modified CDS sequence (opt4) from neuraminidase__InfluenzaA__AJI80521

SEQ ID NO: 185933 - RNA, 1410 nt, Artificial Sequence
  derived and/or modified CDS sequence (opt4) from neuraminidase__InfluenzaA__AJJ98767
augaaccccaaccagaagaucaucaccaucggcagcgugagccugaccaucagcaccaucugcuucuucaugcagaucgccauccugaucaccaccgugacccugcacuucaagcaguacgaguucaacagccccagcaacaaccaggugaugcugugcgagcccaccaucaucgagagaaacaucaccgagaucguguaccugaccaacaccaccaucgagaaggagaagugccccaagcccgccgaguacagaaacuggagcaagccccagugcgacaucaccggcuucgcccccuucagcaaggacaacagcaucagacugagcgccggcggcgacaucugggugaccagagagcccuacgugagcugcgaccccgacaagugcuaccaguucgcccugggccagggcaccacccugaacaacgugcacagcaacaacaccgugagagacagaacccccuacagaacccugcugaugaacgagcugggcgugcccuuccaccugggcaccaagcaggugugcaucgccuggagcagcagcagcugccacgacggcaaggccuggcugcacgugugcaucaccggcgacgacaagaacgccaccgccagcuucaucuacaacggcagacugguggacagcguggugagcuggagcaaggagauccugagaacccaggagagcgagugcgugugcaucaacggcaccugcaccguggugaugaccgacggcagcgccagcggcaaggccgacaccaagauccuguucaucgaggagggcaagaucgugcacaccagcacccugagcggcagcgcccagcacguggaggagugcagcugcuaccccagauaccccggcgugagaugcgugugcagagacaacuggaagggcagcaacagacccaucguggacaucaacaucaaggaccacagcaucgugagcagcuacgugugcagcggccuggugggcgacacccccagaaagaacgacagcagcagcagcagccacugccuggaccccaacaacgaggagggcggccacggcgugaagggcugggccuucgacgacggcgacgacguguggaugggcagaaccaucagcgagaagagcagacugggcuacgagaccuucaaggugaucgagggcuggagcaaccccaagagcaagcugcagaucaacagacaggugaucguggacagaggcaacagaagcggcuacagcggcaucuucagcguggagggcaagagcugcaucaacagaugcuucuacguggagcugaucagaggcagaaaggaggagaccgacgugcuguggaccagcaacagcaucgugguguucugcggcaccagcggcaccuacggcaccggcagcuggcccgacggcgccgacaucaaccugaugcccaucuga

SEQ ID NO: 185934 - RNA, 1410 nt, Artificial Sequence
  derived and/or modified CDS sequence (opt4) from neuraminidase__InfluenzaA__AJJ98779
augaaccccaaccagaagaucaucaccaucggcagcgugagccugaccaucagcaccaucugcuucuucaugcagaccgccauccugaucaccaccgugacccugcacuucaagcaguacgaguucaacagcccccccaacaaccaggugaugcugugcgagcccaccaucaucgagagaaacaucaccgagaucguguaccugaccaacaccaccaucgagaaggagaucugccccaagcccgccgaguacagaaacuggagcaagccccagugcgacaucaccggcuucgcccccuucagcaaggacaacagcaucagacugagcgccggcggcgacaucugggugaccagagagcccuacgugagcugcgaccccgacaagugcuaccaguucgcccugggccagggcaccacccugaacaacgugcacagcaacgacaccgugagagacagaacccccuacagaacccugcugaugaacgagcugggcgugcccuuccaccugggcaccaagcaggugugcaucgccuggagcagcagcagcugccacgacggcaaggccuggcugcacgugugcaucaccggcgacgacaagaacgccaccgccagcuucaucuacaacggcagacugguggacagcaucgugagcuggaccaaggagauccugagaacccaggagagcgagugcgugugcaucaacggcaccugcaccguggugaugaccgacggcagcgccagcggcaaggccgacaccaagauccuguucaucgaggagggcaagaucgugcacaccagcacccugagcggcagcgcccagcacguggaggagugcagcugcuaccccagauaccccggcgugagaugcgugugcagagacaacuggaagggcagcaacagacccaucguggacaucaacaucaaggaccacagcaucgugagcagcuacgugugcagcggccuggugggcgacacccccagaaagaacgacagcagcagcagcagccacugccuggaccccaacaacgaggagggcggccacggcgugaagggcugggccuucgacgacggcaacgacguguggaugggcagaaccaucagcgagaagagcagacugggcuacgagaccuucaaggugaucgagggcuggagcaaccccaagagcaagcugcagaucaacagacaggugaucguggacagaggcaacagaagcggcuacagcggcaucuucagcguggagggcaagagcugcaucaacagaugcuucuacguggagcugaucagaggcagaaaggaggagaccgaggugcuguggaccagcaacagcaucgugguguucugcggcaccagcggcaccuacggcaccggcagcuggcccgacggcgccgacaucaaccugaugcccaucuga

SEQ ID NO: 185935 - RNA, 1410 nt, Artificial Sequence; identical to SEQ ID NO: 182206
  derived and/or modified CDS sequence (opt4) from neuraminidase__InfluenzaA__AJJ98791

SEQ ID NO: 185936 - RNA, 1410 nt, Artificial Sequence
  derived and/or modified CDS sequence (opt4) from neuraminidase__InfluenzaA__AJJ98803
augaaccccaaccagaagaucaucaccaucggcagcgugagccugaccaucagcaccaucugcuucuucaugcagaucgccauccugaucaccaccgugacccugcacuucaagcaguacgaguucaacagcccccccaacaaccaggugaugcugugcgagcccaccaucaucgagagaaacaucaccgagaucguguaccugaccaacaccaccaucgagaaggagaucugccccaagcccgccgaguacagaaacuggagcaagccccagugcggcaucaccggcuucgcccccuucagcaaggacaacagcaucagacugagcgccggcggcgacaucugggugaccagagagcccuacgugagcugcgaccccgacaagugcuaccaguucgcccugggccagggcaccacccugaacaacgugcacagcaacaacaaggugagagacagaacccccuacagaacccugcugaugaacgagcugggcgugcccuuccaccugggcaccaagcaggugugcaucgccuggagcagcagcagcugccacgacggcaaggccuggcugcacgugugcaucaccggcgacgacaagaacgccaccgccagcuucaucuacaacggcagacugguggacagcguggugagcuggagcaaggagauccugagaacccaggagagcgagugcgugugcaucaacggcaccugcaccguggugaugaccgacggcagcgccagcggcaaggccgacaccaagauccuguucaucgaggagggcaagaucgugcacaccagcacccugagcggcagcgcccagcacguggaggagugcagcugcuaccccagauaccccggcgugagaugcgugugcagagacaacuggaagggcagcaacagacccaucguggacaucaacaucaaggaccacagcaucgugagcagcuacgugugcagcggccuggugggcgacacccccagaaagaacgacagcagcagcagcagccacugccuggaccccaacaacgaggagggcggccacggcgugaagggcugggccuucgacgacggcaacgacguguggaugggcagaaccaucaacgagaccagcagacugggcuacgagaccuucaaggugaucgagggcuggagcaaccccaagagcaagcugcagaucaacagacaggugaucguggacagaggcgacagaagcggcuacagcggcaucuucagcguggagggcaagagcugcaucaacagaugcuucuacguggagcugaucagaggcagaaaggaggagaccgaggugcuguggaccagcaacagcaucgugguguucugcggcaccagcggcaccuacggcaccggcagcuggcccgacggcgccgaccugaaccugaugcccaucuga

SEQ ID NO: 185937 - RNA, 1410 nt, Artificial Sequence; identical to SEQ ID NO: 182206
  derived and/or modified CDS sequence (opt4) from neuraminidase__InfluenzaA__AJJ98815

SEQ ID NO: 185938 - RNA, 1410 nt, Artificial Sequence
  derived and/or modified CDS sequence (opt4) from neuraminidase__InfluenzaA__AJJ98827
augaaccccaaccagaagaucaucaccaucggcagcgugagccugaccaucagcaccaucugcuucuucaugcagaucgccauccugaucaccaccgugacccugcacuucaagcaguacgaguucaacagcccccccaacaaccaggugaugcugugcgagcccaccaucaucgagagaaacaucaccgagaucguguaccugaccaacaccaccaucgagaaggagaucugccccaagcccgccgaguacagaaacuggagcaagccccagugcggcaucaccggcuucgcccccuucagcaaggacaacagcaucagacugagcgccggcggcgacaucugggugaccagagagcccuacgugagcugcgaccccgacaagugcuaccaguucgcccugggccagggcaccacccugaacaacgugcacagcaacaacaccgugagagacagaacccccuacagaacccugcugaugaacgagcugggcgugcccuuccaccugggcaccaagcaggugugcaucgccuggagcagcagcagcugccacgacggcaaggccuggcugcacgugugcaucaccggcgacgacaagaacgccaccgccagcuucaucuacaacggcagacugguggacagcguggugagcuggagcaaggagauccugagaacccaggagagcgagugcgugugcaucaacggcaccugcaccguggugaugaccgacggcagcgccagcggcaaggccgacaccaagauccuguucaucgaggagggcaagaucgugcacaccagcacccugagcggcagcgcccagcacguggaggagugcagcugcuaccccagauaccccggcgugagaugcgugugcagagacaacuggaagggcagcaacagacccaucguggacaucaacaucaaggaccacaacaucgugagcagcuacgugugcagcggccuggugggcgacacccccagaaagaacgacagcagcagcagcagccacugccuggaccccaacaacgaggagggcggccacggcgugaagggcugggccuucgacgacggcaacgacguguggaugggcagaaccaucaacgagaccagcagacugggcuacgagaccuucaaggugaucgagggcuggagcaaccccaagagcaagcugcagaucaacagacaggugaucguggacagaggcgacagaagcggcuacagcggcaucuucagcguggagggcaagagcugcaucaacagaugcuucuacguggagcugaucagaggcagaaaggaggagaccgaggugcuguggaccagcaacagcaucgugguguucugcggcaccagcggcaccuacggcaccggcagcuggcccgacggcgccgaccugaaccugaugcccaucuga

SEQ ID NO: 185939 - RNA, 1410 nt, Artificial Sequence; identical to SEQ ID NO: 181203
  derived and/or modified CDS sequence (opt4) from neuraminidase__InfluenzaA__AJJ98839

SEQ ID NO: 185940 - RNA, 1410 nt, Artificial Sequence; identical to SEQ ID NO: 179578
  derived and/or modified CDS sequence (opt4) from neuraminidase__InfluenzaA__AJJ98851

SEQ ID NO: 185941 - RNA, 1410 nt, Artificial Sequence
  derived and/or modified CDS sequence (opt4) from neuraminidase__InfluenzaA__AJJ98863
augaaccccaaccagaagaucaucaccaucggcagcgugagccugaccaucagcaccaucugcuucuucaugcagaucgccauccugaucaccaccgugacccugcacuucaagcaguacgaguucaacagcccccccaacaaccaggugaugcugugcgagcccaccaucaucgagagaaacaucaccgagaucguguaccugaccaacaccaccaucgagaaggagaucugccccaagcccgccgaguacagaaacuggagcaagccccagugcgacaucaccggcuucgcccccuucagcaaggacaacagcaucagacugagcgccggcggcgacaucugggugaccagagagcccuacgugagcugcgaccccgacaagugcuaccaguucgcccugggccagggcaccacccugaacaacgugcacagcaacaacaccgugagagagagaacccccuacagaacccugcugaugaacgagcugggcgugcccuuccaccugggcaccaagcaggugugcaucgccuggagcagcagcagcugccacgacggcaaggccuggcugcacgugugcaucaccggcgacgacaagaacgccaccgccagcuucaucuacaacggcagacugguggacagcguggugagcuggagcaaggagauccugagaacccaggagagcgagugcaucugcaucaacggcaccugcaccguggugaugaccgacggcagcgccagcggcaaggccgacaccaagauccuguucaucgaggagggcaagaucgugcacaccagcacccugagcggcagcgcccagcacguggaggagugcagcugcuaccccagauaccccggcgugagaugcgugugcagagacaacuggaagggcagcaacagacccaucguggacaucaacaugaaggaccacagcaucgugagcagcuacgugugcagcggccuggugggcgacacccccagaaagaacgacagcagcagcagcagccacugccuggaccccaacaacgaggagggcggccacggcgugaagggcugggccuucgacgacggcaacgacguguggaugggcagaaccaucagcgagaagagcagacugggcuacgagaccuucaaggugaucgagggcuggagcaaccccaagagcaagcugcagaucaacagacaggugaucguggacagaggcaacagaagcggcuacagcggcaucuucagcguggagggcaagagcugcaucaacagaugcuucuacguggagcugaucagaggcagaaaggaggagaccgaggugcuguggaccagcaacagcaucgugguguucugcggcaccagcggcaccuacggcaccggcagcuggcccgacggcgccgacaucaaccugaugcccaucuga

SEQ ID NO: 185942 - RNA, 1410 nt, Artificial Sequence
  derived and/or modified CDS sequence (opt4) from neuraminidase__InfluenzaA__AJJ98875
augaaccccaaccagaagaucaucaccaucggcagcgugagccugaccaucagcaccaucugcuucuucaugcagaucgccauccugaucaccaccgugacccugcacuucaagcaguacgaguucaacagcccccccaacaaccaggugaugcugugcgagcccaccaucaucgagagaaacaucaccgagaucguguaccugaccaacaccaccaucgagaaggagaucugccccaagcccgccgaguacagaaacuggagcaagccccagugcgacaucaccggcuucgcccccuucagcaaggacaacagcaucagacugagcgccggcggcgacaucugggugaccagagagcccuacgugagcugcgaccccgacaagugcuaccaguucgcccugggccagggcaccacccugaacaacgugcacagcaacgacaccgugagaaacagaacccccuacagaacccugcugaugaacgagcugggcgugcccuuccaccugggcaccaagcaggugugcaucgccuggagcagcagcagcugccacgacggcaaggccuggcugcacgugugcaucaccggcgacgacaagaacgccaccgccagcuucaucuacaacggcagacugguggacagcguggugagcuggagcaaggagauccugagaacccaggagagcgagugcgugugcaucaacggcaccugcaccguggugaugaccgacggcagcgccagcggcaaggccgacaccaagauccuguucaucgaggagggcaagaucgugcacaccagcacccugagcggcagcgcccagcacguggaggagugcagcugcuaccccagauaccccggcgugagaugcgugugcagagacaacuggaagggcagcaacagacccaucguggacaucaacaucaaggaccacagcaucgugagcagcuacgugugcagcggccuggugggcgacacccccagaaagaacgacagcagcagcagcagccacugccuggaccccaacaacgaggagggcggccacggcgugaagggcugggccuucgacgacggcaacgacguguggaugggcagaaccaucagcgagaagagcagacugggcuacgagaccuucaaggugaucgagggcuggagcaaccccaagagcaagcugcagaucaacagacaggugaucguggacagaggcaacagaagcggcuacagcggcaucuucagcguggagggcaagagcugcaucaacagaugcuucuacguggagcugaucagaggcagaaaggaggagaccgaggugcuguggaccagcaacagcaucgugguguucugcggcaccagcggcaccuacggcaccggcagcuggcccgacggcgccgacaucaaccugaugcccaucuga

SEQ ID NO: 185943 - RNA, 1410 nt, Artificial Sequence
  derived and/or modified CDS sequence (opt4) from neuraminidase__InfluenzaA__AJJ98887
augaaccccaaccagaagaucaucaccaucggcagcgugagccugaccaucagcaccaucugcuucuucaugcagaucgccauccugaucaccaccgugacccugcacuucaagcaguacgaguucaacagcccccccaacaaccaggugaugcugugcgagcccaccaucaucgagagaaacaucaccgagaucguguaccugaccaacaccaccaucgagaaggagaucugccccaagcuggccgaguacagaaacuggagcaagccccagugcgacaucaccggcuucgcccccuucagcaaggacaacagcaucagacugagcgccggcggcgacaucugggugaccagagagcccuacgugagcugcgaccccgacaagugcuaccaguucgcccugggccagggcaccacccugaacaacgugcacagcaacaacaccgugagaaacagaacccccuacagaacccugcugaugaacgagcugggcgugcccuuccaccugggcaccaagcaggugugcaucgccuggagcagcagcagcugccacgacggcaaggccuggcugcacgugugcaucaccggcgacgacaagaacgccaccgccagcuucaucuacaacggcagacugguggacagcaucgugagcuggagcaaggagauccugagaacccaggagagcgagugcgugugcaucaacggcaccugcaccguggugaugaccgacggcagcgccagcggcaaggccgacaccaagauccuguucaucgaggagggcaagaucgugcacaccagcacccugagcggcagcgcccagcacguggaggagugcagcugcuaccccagauaccccggcgugagaugcgugugcagagacaacuggaagggcagcaacagacccaucguggacaucaacaucaaggaccacagcaucgugagcagcuacgugugcagcggccuggugggcgacacccccagaaagaacgacagcagcagcagcagccacugccuggaccccaacaacgaggagggcggccacggcgugaagggcugggccuucgacgacggcaacgacguguggaugggcagaaccaucagcgagaagagcagacugggcuacgagaccuucaaggugaucgagggcuggagcaaccccaagagcaagcugcagaucaacagacaggugaucguggacagaggcaacagaagcggcuacagcggcaucuucagcguggagggcaagagcugcaucaacagaugcuucuacguggagcugaucagaggcagaaaggaggagaccgacgugcuguggaccagcaacagcaucgugguguucugcggcaccagcggcaccuacggcaccggcagcuggcccgacggcgccgacaucaaccugaugcccaucuga

SEQ ID NO: 185944 - RNA, 1410 nt, Artificial Sequence
  derived and/or modified CDS sequence (opt4) from neuraminidase__InfluenzaA__AJJ98899
augaaccccaaccagaagaucaucaccaucggcagcgugagccugaccaucagcaccaucugcuucuucaugcagaccgccauccugaucaccaccgugacccugcacuucaagcaguacgaguucaacagcccccccaacaaccaggugaugcugugcgagcccaccaucaucgagagaaacaucaccgagaucguguaccugaccaacaccaccaucgagaaggagaucugccccaagcuggccgaguacagaaacuggagcaagccccagugcgacaucaccggcuucgcccccuucagcaaggacaacagcaucagacugagcgccggcggcgacaucugggugaccagagagcccuacgugagcugcgaccccgacaagugcuaccaguucgcccugggccagggcaccacccugaacaacgugcacagcaacaacaccgugagaaacagaacccccuacagaacccugcugaugaacgagcugggcgugcccuuccaccugggcaccaagcaggugugcaucgccuggagcagcagcagcugccacgacggcaaggccuggcugcacgugugcaucaccggcgacgacaagaacgccaccgccagcuucaucuacaacggcagacugguggacagcaucgugagcuggagcaaggagauccugagaacccaggagagcgagugcgugugcaucaacggcaccugcaccguggugaugaccgacggcagcgccagcggcaaggccgacaccaagauccuguucaucgaggagggcaagaucgugcacaccagcacccugagcggcagcgcccagcacguggaggagugcagcugcuaccccagauaccccggcgugagaugcgugugcagagacaacuggaagggcagcaacagacccaucguggacaucaacaucaaggaccacagcaucgugagcagcuacgugugcagcggccuggugggcgacacccccagaaagaacgacagcagcagcagcagccacugccuggaccccaacaacgaggagggcggccacggcgugaagggcugggccuucgacgacggcaacgacguguggaugggcagaaccaucagcgagaagagcagacugggcuacgagaccuucaaggugaucgagggcuggagcaaccccaagagcaagcugcagaucaacagacaggugaucguggacagaggcaacagaagcggcuacagcggcaucuucagcguggagggcaagagcugcaucaacagaugcuucuacguggagcugaucagaggcagaaaggaggagaccgaggugcuguggaccagcaacagcaucgugguguucugcggcaccagcggcaccuacggcaccggcagcuggcccgacggcgccgacaucaaccugaugcccaucuga

SEQ ID NO: 185945 - RNA, 1410 nt, Artificial Sequence; identical to SEQ ID NO: 182206
  derived and/or modified CDS sequence (opt4) from neuraminidase__InfluenzaA__AJJ98911

SEQ ID NO: 185946 - RNA, 1410 nt, Artificial Sequence; identical to SEQ ID NO: 182982
  derived and/or modified CDS sequence (opt4) from neuraminidase__InfluenzaA__AJJ98923

SEQ ID NO: 185947 - RNA, 1410 nt, Artificial Sequence
  derived and/or modified CDS sequence (opt4) from neuraminidase__InfluenzaA__AJJ98935
augaaccccaaccagaagaucaucaccaucggcagcgugagccugaccaucagcaccaucugcuucuucaugcagaucgccauccugaucaccaccgugacccugcacuucaagagauacgaguucaacagcccccccaacaaccaggugaugcugugcgagcccaccaucaucgagagaaacaucaccgagaucguguaccugaccaacaccaccaucgagaaggagaucugccccaagcccgccgaguacagaaacuggagcaagccccagugcggcaucaccggcuucgcccccuucagcaaggacaacagcaucagacugagcgccggcggcgacaucugggugaccagagagcccuacgugagcugcgaccccgacaagugcuaccaguucgcccugggccagggcaccacccugaacaacgugcacagcaacaacaccgugagagacagaacccccuacagaacccugcugaugaacgagcugggcgugcccuuccaccugggcaccaagcaggugugcaucgccuggagcagcagcagcugccacgacggcaaggccuggcugcacgugugcaucaccggcgacgacaagaacgccaccgccagcuucaucuacaacggcagacugguggacagcguggugagcuggagcaaggagauccugagaacccaggagagcgagugcgugugcaucaacggcaccugcaccguggugaugaccgacggcagcgccagcggcaaggccgacaccaagauccuguucaucgaggagggcaagaucgugcacaccagcacccugagcggcagcgcccagcacguggaggagugcagcugcuaccccagauaccccggcgugagaugcgugugcagagacaacuggaagggcagcaacagacccaucguggacaucaacaucaaggaccacagcaucgugagcagcuacgugugcagcggccuggugggcgacacccccagaaagaacgacagcagcagcagcagccacugccuggaccccaacaacgaggagggcggccacggcgugaagggcugggccuucgacgacggcaacgacguguggaugggcagaaccaucaacgagaccagcagacugggcuacgagaccuucaaggugaucgagggcuggagcaaccccaagagcaagcugcagaucaacagacaggugaucguggacagaggcgacagaagcggcuacagcggcaucuucagcguggagggcaagagcugcaucaacagaugcuucuacguggagcugaucagaggcagaaaggaggagaccgaggugcuguggaccagcaacagcaucgugguguucugcggcaccagcggcaccuacggcaccggcagcuggcccgacggcgccgaccugaaccugaugcccaucuga

SEQ ID NO: 185948 - RNA, 1410 nt, Artificial Sequence
  derived and/or modified CDS sequence (opt4) from neuraminidase__InfluenzaA__AJJ98947
augaaccccaaccagaagaucaucaccaucggcagcgugagccugaccaucagcaccaucugcuucuucaugcagaucgccauccugaucaccaccgugacccugcacuucaagcaguacgaguucaacagcccccccaacaaccaggugacccugugcgagcccaccaucaucgagagaaacaucaccgagaucguguaccugaccaacaccaccaucgagaaggagaucugccccaagcuggccgaguacagaaacuggagcaagccccagugcgacaucaccggcuucgcccccuucagcaaggacaacagcaucagacugagcgccggcggcgacaucugggugaccagagagcccuacgugagcugcgaccccgacaagugcuaccaguucgcccugggccagggcaccacccugaacaacgugcacagcaacaacaccgugagagacagaacccccuacagaacccugcugaugaacgagcugggcgugcccuuccaccugggcaccaagcaggugugcaucgccuggagcagcagcagcugccacgacggcaaggccuggcugcacgugugcaucaccggcaacgacaagaacgccaccgccagcuucaucuacaacggcagacugguggacagcguggugagcuggagcaaggagauccugagaacccaggagagcgagugcgugugcaucaacggcaccugcaccguggugaugaccgacggcagcgccagcggcaaggccgacaccaagauccuguucaucgaggagggcaagaucgugcacaccagcacccugagcggcagcgcccagcacguggaggagugcagcugcuaccccagauaccccggcgugagaugcgugugcagagacaacuggaagggcagcaacagacccaucguggacaucaacaucaaggaccacagcaucgugagcagcuacgugugcagcggccuggugggcgacacccccagaaagaacgacagcagcagcagcagccacugccuggaccccaacaacgaggagggcggccacggcgugaagggcugggccuucgacgacggcaacgacguguggaugggcagaaccaucaacgagaccagcagacugggcuacgagaccuucaaggugaucgagggcuggagcaaccccaagagcaagcugcagaucaacagacaggugaucguggacagaggcaacagaagcggcuacagcggcaucuucagcguggagggcaagagcugcaucaacagaugcuucuacguggagcugaucagaggcagaaaggaggagaccgaggugcuguggaccagcaacagcaucgugguguucugcggcaccagcggcaccuacggcaccggcagcuggcccgacggcgccgaccugaaccugaugcccaucuga

SEQ ID NO: 185949 - RNA, 1410 nt, Artificial Sequence
  derived and/or modified CDS sequence (opt4) from neuraminidase__InfluenzaA__AJJ98971
augaaccccaaccagaagaucaucaccaucggcagcgugagccugaccaucagcaccaucugcuucuucaugcagaucgccauccugaucaccaccgugacccugcacuucaagcaguacgaguucaacagcccccccaacaaccaggugaugcugugcgagcccaccaucaucgagagaaacaucaccgagaucguguaccugaccaacaccaccaucgagaaggagaucugccccaagcuggccgaguacagaaacuggagcaagccccagugcgacaucaccggcuucgcccccuucagcaaggacaacagcaucagacugagcgccggcggcgacaucugggugaccagagagcccuacgugagcugcgaccccgacaagugcuaccaguucgcccugggccagggcaccacccugaacaacgugcacagcaacgacaccgugagaaacagaacccccuacagaacccugcugaugaacgagcugggcgugcccuuccaccugggcaccaagcaggugugcaucgccuggagcagcagcagcugccacgacggcaaggccuggcugcacgugugcaucaccggcgacgacaagaacgccaccgccagcuucaucuacaacggcagacugguggacagcguggugagcuggagcaaggagauccugagaacccaggagagcgagugcgugugcaucaacggcaccugcaccguggugaugaccgacggcagcgccagcggcaaggccgacaccaagauccuguucaucgaggagggcaagaucgugcacaccagcacccugagcggcagcgcccagcacguggaggagugcagcugcuaccccagauaccccggcgugagaugcgugugcagagacaacuggaagggcagcaacagacccaucguggacaucaacaucaaggaccacagcaucgugagcagcuacgugugcagcggccuggugggcgacacccccagaaagaacgacagcagcagcagcagccacugccuggaccccaacaacgaggagggcggccacggcgugaagggcugggccuucgacgacggcaacgacguguggaugggcagaaccaucagcgagaagagcagacugggcuacgagaccuucaaggugaucgagggcuggagcaaccccaagagcaagcugcagaucaacagacaggugaucguggacagaggcaacagaagcggcuacagcggcaucuucagcguggagggcaagagcugcaucaacagaugcuucuacguggagcugaucagaggcagaaaggaggagaccgaggugcuguggaccagcaacagcaucgugguguucugcggcaccagcggcaccuacggcaccggcagcuggcccgacggcgccgacaucaaccugaugcccaucuga

SEQ ID NO: 185950 - RNA, 1410 nt, Artificial Sequence
  derived and/or modified CDS sequence (opt4) from neuraminidase__InfluenzaA__AJJ98995
augaaccccaaccagaagaucaucaccaucggcagcgugagccugaccaucagcaccaucugcuucuucaugcagaucgccauccugaucaccaccgugacccugcacuucaagcaguacgaguucaacagcccccccaacaaccaggugaugcugugcgagcccaccaucaucgagagaaacaugaccgagaucguguaccugaccaacaccaccaucgagaaggagaucugccccaagcccgccgaguacagaaacuggagcaagccccagugcgacaucaccggcuucgcccccuucagcaaggacaacagcaucagacugagcgccggcggcgacaucugggugaccagagagcccuacgugagcugcgaccccgacaagugcuaccaguucgcccugggccagggcaccacccugaacaacgugcacagcaacaacaucgugagagacagaacccccuacagaacccugcugaugaacgagcugggcgugcccuuccaccugggcaccaagcaggugugcaucgccuggagcagcagcagcugccacgacggcaaggccuggcugcacgugugcaucaccggcgacgacaagaacgccaccgccagcuucaucuacaacggcagacugguggacagcguggugagcuggagcaaggagauccugagaacccaggagagcgagugcgugugcaucaacggcaccugcaccguggugaugaccgacggcagcgccagcggcaaggccgacaccaagauccuguucaucgaggagggcaagaucgugcacaccagcacccugagcggcagcgcccagcacguggaggagugcagcugcuaccccagauaccccggcgugagaugcgugugcagagacaacuggaagggcagcaacagacccaucguggacaucaacaucaaggaccacagcaucgugagcagcuacgugugcagcggccuggugggcgacacccccagaaagaacgacagcagcagcagcagccacugccuggaccccaacaacgaggagggcggccacggcgugaagggcugggccuucgacgacggcaacgacguguggaugggcagaaccaucaacgagaccagcagacugggcuacgagaccuucaaggugaucgagggcuggagcaaccccaagagcaagcugcagaucaacagacaggugaucguggacagaagcgacagaagcggcuacagcggcaucuucagcguggagggcaagagcugcaucaacagaugcuucuacguggagcugaucagaggcagaaaggaggagaccgaggugcuguggaccagcaacagcaucgugguguucugcggcaccagcggcaccuacggcaccggcagcuggcccgacggcgccgaccugaaccugaugcccaucuga

SEQ ID NO: 185951 - RNA, 1410 nt, Artificial Sequence; identical to SEQ ID NO: 181203
  derived and/or modified CDS sequence (opt4) from neuraminidase__InfluenzaA__AJJ99007

SEQ ID NO: 185952 - RNA, 1410 nt, Artificial Sequence
  derived and/or modified CDS sequence (opt4) from neuraminidase__InfluenzaA__AJJ99019
augaaccccaaccagaagaucaucaccaucggcagcgugagccugaccaucagcaccaucugcuucuucaugcagaccgccauccugaucaccaccgugacccugcacuucaagcagugcgaguucaacagcccccccaacaaccaggugaugcugugcgagcccaccaucaucgagagaaacaucaccgagaucguguaccugaccaacaccaccaucgagaaggagaucugccccaagcuggccgaguacagaaacuggagcaagccccagugcgacaucaccggcuucgcccccuucagcaaggacaacagcaucagacugagcgccggcggcgacaucugggugaccagagagcccuacgugagcugcgaccccgacaagugcuaccaguucgcccugggccagggcaccacccugaacaacgugcacagcaacaacaccgugagagacagaacccccuacagaacccugcugaugaacgagcugggcgugcccuuccaccugggcaccaagcaggugugcaucgccuggagcagcagcagcugccacgacggcaaggccuggcugcacgugugcaucaccggcgacgacaagaacgccaccgccagcuucaucuacaacggcagacugguggacagcguggugagcuggagcaaggagauccugagaacccaggagagcgagugcgugugcaucaacggcaccugcaccguggugaugaccgacggcagcgccagcggcaaggccgacaccaagauccuguucaucgaggagggcaagaucgugcacaccagcacccugagcggcagcgcccagcacguggaggagugcagcugcuaccccagauaccccggcgugagaugcgugugcagagacaacuggaagggcagcaacagacccaucguggacaucaacaucaaggaccacagcaucgugagcaacuacgugugcagcggccuggugggcgacacccccagaaagaacgacagcagcagcagcagccacugccuggaccccaacaacgaggagggcggccacggcgugaagggcugggccuucgacgacggcaacgacguguggaugggcagaaccaucagcgagaagagcagauucggcuacgagaccuucaaggugaucgagggcuggagcaaccccaagagcaagcugcagaucaacagacaggugaucguggacagaggcaacagaagcggcuacagcggcaucuucagcguggagggcaagagcugcaucaacagaugcuucuacguggagcugaucagaggcagaaaggaggagaccgaggugcuguggaccagcaacagcaucgugguguucugcggcaccagcggcaccuacggcaccggcagcuggcccgacggcgccgacaucaaccugaugcccaucuga

SEQ ID NO: 185953 - RNA, 1410 nt, Artificial Sequence
  derived and/or modified CDS sequence (opt4) from neuraminidase__InfluenzaA__AJJ99031
augaaccccaaccagaagaucaucaccaucggcagcgugagccugaccaucagcaccaucugcuucuucaugcagaucgccauccugaucaccaccgugacccugcacuucaagcaguacgaguucaacagcccccccaacaaccaggugaugcugugcgagcccaccaucaucgagagaaacaucaccgagaucguguaccugaccaacaccaccaucgagaaggagaucugccccaagcuggccgaguacagaaacuggagcaagccccagugcgacaucaccggcuucgcccccuucagcaaggacaacagcaucagacugagcgccggcggcgacaucugggugaccagagagcccuacgugagcugcgaccccgacaagugcuaccaguucgcccugggccagggcaccaccaucaacaacgugcacagcaacgacaccgugagagacagaacccccuacagaacccugcugaugaacgagcugggcgugcccuuccaccugggcaccaagcaggugugcaucgccuggagcagcagcagcugccacgacggcaaggccuggcugcacgugugcaucaccggcgacgacaagaacgccaccgccagcuucaucuacaacggcagacugguggacagcguggugagcuggagcaaggagauccugagaacccaggagagcgagugcgugugcaucaacggcaccugcaccguggugaugaccgacggcagcgccagcggcaaggccgacaccaagauccuguucaucgaggagggcaagaucgugcacaccagcacccugagcggcagcgcccagcacguggaggagugcagcugcuaccccagauaccccggcgugagaugcgugugcagagacaacuggaagggcagcaacagacccaucguggacaucaacaucaaggaccacagcaucgugagcagcuacgugugcagcggccuggugggcgacacccccagaaagaacgacagcagcagcagcagccacugccuggaccccaacaacgaggagggcggccacggcgugaagggcugggccuucgacgacggcaacgacguguggaugggcagaaccaucagcgagaagagcagacugggcuacgagaccuucaaggugaucgagggcuggagcaaccccaagagcaagcugcagaucaacagacaggugaucguggacagaggcaacagaagcggcuacagcggcaucuucagcguggagggcaagagcugcaucaacagaugcuucuacguggagcugaucagaggcagaaaggaggagaccgaggugcuguggaccagcaacagcaucgugguguucugcggcaccagcggcaccuacggcaccggcagcuggcccgacggcgccgacaucaaccugaugcccaucuga

SEQ ID NO: 185954 - RNA, 1410 nt, Artificial Sequence
  derived and/or modified CDS sequence (opt4) from neuraminidase__InfluenzaA__AJJ99043
augaaccccaaccagaagaucaucaccaucggcagcgugagccugaccaucagcaccaucugcuucuucaugcagaucgccauccugaucaccaccgugacccugcacuucaagcaguacgaguucaacagcccccccaacaaccaggugaugcugugcgagcccaccaucaucgagagaaacaucaccgagaucguguaccugaccaacaccaccaucgagaaggagaucugccccaagcuggccgaguacagaaaguggagcaagccccagugcaacaucaccggcuucgcccccuucagcaaggacaacagcaucagacugagcgccggcggcgacaucugggugaccagagagcccuacgugagcugcgaccccgacaagugcuaccaguucgcccugggccagggcaccacccugaacaacgugcacagcaacgacaccgugagagacagaacccccuacagaacccugcugaugaacgagcugggcgugcccuuccaccugggcaccaagcaggugugcaucgccuggagcagcagcagcugccacgacggcaaggccuggcugcacgugugcgugaccggcgacgacaagaacgccaccgccagcuucaucuacaacggcagacugguggacagcaucgugagcuggagcaaggagauccugagaacccaggagagcgagugcgugugcaucaacggcaccugcaccguggugaugaccgacggcagcgccagcggcaaggccgacaccaagauccuguucaucgaggagggcaagaucgugcacaccagcacccugagcggcagcgcccagcacguggaggagugcagcugcuaccccagauaccccggcgugagaugcgugugcagagacaacuggagaggcagcaacagacccaucguggacaucaacaugaaggacuacagcaucgugagcagcuacgugugcagcggccuggugggcgacacccccagaaagaacgacagcagcagcagcggccacugccuggaccccaacaacgaggagggcggccacggcgugaagggcugggccuucgacgacggcaacgacguguggaugggcagaaccaucagcgagaagagcagaagcggcuacgagaccuucaaggugaucgagggcuggagcaaccccaacagcaagcugcagaucaacagacaggugaucguggacagaggcaacagaagcggcuacagcggcaucuucagcguggagggcaagagcugcaucaacagaugcuucuacguggagcugaucagaggcagaaaggaggagaccgaggugcuguggaccagcaacagcaucgugguguucugcggcaccagcggcaccuacggcaccggcagcuggcccgacggcgccgacaucaaccugaugcccaucuga

SEQ ID NO: 185955 - RNA, 1410 nt, Artificial Sequence
  derived and/or modified CDS sequence (opt4) from neuraminidase__InfluenzaA__AJJ99067
augaaccccaaccagaagaucaucaccaucggcagcgugagccugaccaucagcaccaucugcuucuucaugcagaucgccauccugaucaccaccgugacccugcacuucaagcaguacgaguucaacagcccccccaacaaccaggugaugcugugcgagcccaccaucaucgagagaaacaucaccgagaucguguaccugaccaacaccaccaucgagaaggagaucugccccaagcccgccgaguacagaaacuggagcaagccccagugcggcaucaccggcuucgcccccuucagcaaggacaacagcaucagacugagcgccggcggcgacaucugggugaccagagagcccuacgugagcugcgaccccgacaagugcuaccaguucgcccugggccagggcaccacccugaacaacgugcacagcaacaacaccgugagaggcagaacccccuacagaacccugcugaugaacgagcugggcgugcccuuccaccugggcaccaagcaggugugcaucgccuggagcagcagcagcugccacgacggcaaggccuggcugcacgugugcaucaccggcgacgacaagaacgccaccgccagcuucaucuacaacggcagacugguggacagcguggugagcuggagcaaggacauccugagaacccaggagagcgagugcgugugcaucaacggcaccugcaccguggugaugaccgacggcagcgccagcggcaaggccgacaccaagauccuguucaucgaggagggcaagaucgugcacaccagcacccugagcggcagcgcccagcacguggaggagugcagcugcuaccccagauaccccggcgugagaugcgugugcagagacaacuggaagggcagcaacagacccaucguggacaucaacaucaaggaccacagcaucgugagcagcuacgugugcagcggccuggugggcgacacccccagaaagaacgacagcagcagcagcagccacugccuggaccccaacaacgaggagggcggccacggcgugaagggcugggccuucgacgacggcaacgacguguggaugggcagaaccaucaacgagaccagcagacugggcuacgagaccuucaaggugaucgagggcuggagcaaccccaagagcaagcugcagaucaacagacaggugaucguggacagaggcgacagaagcggcuacagcggcaucuucagcguggagggcaagagcugcaucaacagaugcuucuacguggagcugaucagaggcagaaaggaggagaccgaggugcuguggaccagcaacagcaucgugguguucugcggcaccagcggcaccuacggcaccggcagcuggcccgacggcgccgaccugaaccugaugcccaucuga

SEQ ID NO: 185956 - RNA, 1410 nt, Artificial Sequence
  derived and/or modified CDS sequence (opt4) from neuraminidase__InfluenzaA__AJJ99079
augaaccccaaccagaagaucaucaccaucggcagcgugagccugaccaucagcaccaucugcuucuucaugcagaucgccauccugaucaccaccgugacccugcacuucaagcaguacgaguucaacagcccccccaacaaccaggugaugcugugcgagcccaccaucaucgagagaaacaucaccgagaucguguaccugaccaacaccaccaucgagaaggagaucugccccaagcccgccgaguacagaaacuggagcaagccccagugcggcaucaccggcuucgcccccuucagcaaggacaacagcaucagacugagcgccggcggcgacaucugggugaccagagagcccuacgugagcugcgaccccgacaagugcuaccaguucgcccugggccagggcaccacccugaacaacgugcacagcaacaacaccgugagaaacagaacccccuacagaacccugcugaugaacgagcugggcgugcccuuccaccugggcaccaagcaggugugcaucgccuggagcagcagcagcugccacgacggcaaggccuggcugcacgugugcaucaccggcgacgacaagaacgccaccgccagcuucaucuacaacggcagacugguggacagcguggugagcuggagcaaggagauccugagaacccaggagagcgagugcgugugcaucaacggcaccugcaccguggugaugaccgacggcagcgccagcggcaaggccgacaccaagauccuguucaucgaggagggcaagaucgugcacaccagcacccugagcggcagcgcccagcacguggaggagugcagcugcuaccccagauaccccggcgugagaugcgugugcagagacaacuggaagggcagcaacagacccaucguggacaucaacaucaaggaccacagcaucgugagcagcuacgugugcagcggccuggugggcgacacccccagaaagaacgacagcagcagcagcagccacugccuggaccccaacaacgaggagggcggccacggcgugaagggcugggccuucgacgacggcaacgacguguggaugggcagaaccaucaacgagaccagcagacugggcuacgagaccuucaaggugaucgagggcuggagcaaccccaagagcaagcugcagaucaacagacaggugaucguggacagaggcgacagaagcggcuacagcggcaucuucagcguggagggcaagagcugcaucaacagaugcuucuacguggagcugaucagaggcagaaaggaggagaccgaggugcuguggaccagcaacagcaucgugguguucugcggcaccagcggcaccuacggcaccggcagcuggcccgacggcgccgaccugaaccugaugcccaucuga

SEQ ID NO: 185957 - RNA, 1410 nt, Artificial Sequence
  derived and/or modified CDS sequence (opt4) from neuraminidase__InfluenzaA__AJJ99091
augaaccccaaccagaagaucaucaccaucggcagcgugagccugaccaucagcaccaucugcuucuucaugcagaucgccauccugaucaccaccgugacccugcacuucaagcaguacgaguucaacagcccccccaacaaccaggugaugcugugcgagcccaccaucaucgagagaaacaucaccgagaucguguaccugaccaacaccaccaucgagaaggagaucugccccaagcccgccgaguacagaaacuggagcaagccccagugcggcaucaccggcuucgcccccuucagcaaggacaacagcaucagacugagcgccggcggcgacaucugggugaccagagagcccuacgugagcugcgaccccgacaagugcuaccaguucgcccugggccagggcaccacccugaacaacgugcacagcaacaacaccgugagagacagaacccccuacagaacccugcugaugaacgagcugggcgugcccuuccaccugggcaccaagcaggugugcaucgccuggagcagcagcagcugccacgacggcaaggccuggcugcacgugugcaucaccggcgacgacaagaacgccaccgccagcuucaucuacaacggcagacugguggacagcguggugagcuggagcaaggagauccugagaacccaggagagcgagugcgugugcaucaacggcaccugcaccguggugaugaccgacggcagcgccagcggcaaggccgacaccaagauccuguucaucgaggagggcaagaucgugcacaccagcacccugagcggcagcgcccagcacguggaggagugcagcugcuaccccagauaccccggcgugagaugcgugugcagagacaacuggaagggcagcaacagacccaucguggacaucaacaucaaggaccacagcaucgugagcagcuacgugugcagcggccuggugggcgacacccccagaaagaacgacagcagcagcagcagccacugccuggaccccaacaacgaggagggcggccacggcgugaagggcugggccuucgacgacggcaacgaccuguggaugggcagaaccaucaacgagaccagcagacugggcuacgagaccuucaaggugaucgagggcuggagcaaccccaagagcaagcugcagaucaacagacaggugaucguggacagaggcgacagaagcggcuacagcggcaucuucagcguggagggcaagagcugcaucaacagaugcuucuacguggagcugaucagaggcagaaaggaggagaccgaggugcuguggaccagcaacagcaucgugguguucugcggcaccagcggcaccuacggcaccggcagcuggcccgacggcgccgaccugaaccugaugcccaucuga

SEQ ID NO: 185958 - RNA, 1410 nt, Artificial Sequence
  derived and/or modified CDS sequence (opt4) from neuraminidase__InfluenzaA__AJJ99103
augaaccccaaccagaagaucaucaccaucggcagcgugagccugaccaucagcaccaucugcuucuucaugcagaucgccauccugaucaccaccgugacccugcacuucaagcaguacgaguucaacagcccccccaacaaccaggugaugcugugcgagcccaccaucaucgagagaaacaugaccgagaucguguaccugaccaacaccaccaucgagaaggagaucugccccaagcccgccgaguacagaaacuggagcaagccccagugcgacaucaccggcuucgcccccuucagcaaggacaacagcaucagacugagcgccggcggcgacaucugggugaccagagagcccuacgugagcugcgaccccgacaagugcuaccaguucgcccugggccagggcaccacccugaacaacgugcacagcaacaacaccgugagaaacagaacccccuacagaacccugcugaugaacgagcugggcgugcccuuccaccugggcaccaagcaggugugcaucgccuggagcagcagcagcugccacgacggcaaggccuggcugcacgugugcaucaccggcgacgacaagaacgccaccgccagcuucaucuacaacggcagacugguggacagcguggugagcuggagcaaggagauccugagaacccaggagagcgagugcgugugcaucaacggcaccugcaccguggugaugaccgacggcagcgccagcggcaaggccgacaccaagauccuguucaucgaggagggcaagaucgugcacaccagcacccugagcggcagcgcccagcacguggaggagugcagcugcuaccccagauaccccggcgugagaugcgugugcagagacaacuggaagggcagcaacagacccaucguggacaucaacaucaaggaccacagcaucgugagcagcuacgugugcagcggccuggugggcgacacccccagaaagaacgacagcagcagcagcagccacugccuggaccccaacaacgaggagggcggccacggcgugaagggcugggccuucgacgacggcaacgacguguggaugggcagaaccaucaacgagaccagcagacugggcuacgagaccuucaaggugaucgagggcuggagcaaccccaagagcaagcugcagaucaacagacaggugaucguggacagaagcgacagaagcggcuacagcggcaucuucagcguggagggcaagagcugcaucaacagaugcuucuacguggagcugaucagaggcagaaaggaggagaccgaggugcuguggaccagcaacagcaucgugguguucugcggcaccagcggcaccuacggcaccggcagcuggcccgacggcgccgaccugaaccugaugcccaucuga

SEQ ID NO: 185959 - RNA, 1410 nt, Artificial Sequence; identical to SEQ ID NO: 185425
  derived and/or modified CDS sequence (opt4) from neuraminidase__InfluenzaA__AJJ99115

SEQ ID NO: 185960 - RNA, 1410 nt, Artificial Sequence; identical to SEQ ID NO: 184345
  derived and/or modified CDS sequence (opt4) from neuraminidase__InfluenzaA__AJJ99127

SEQ ID NO: 185961 - RNA, 1410 nt, Artificial Sequence; identical to SEQ ID NO: 185633
  derived and/or modified CDS sequence (opt4) from neuraminidase__InfluenzaA__AJJ99139

SEQ ID NO: 185962 - RNA, 1410 nt, Artificial Sequence
  derived and/or modified CDS sequence (opt4) from neuraminidase__InfluenzaA__AJJ99151
augaaccccaaccagaagaucaucaccaucggcagcgugagccugaccaucagcaccaucugcuucuucaugcagaucgccauccugaucaccaccgugacccugcacuucaagcaguacgaguucaacagcccccccaacaaccaggugaugcugugcgagcccaccaucaucgagagaaacaucaccgagaucguguaccugaccaacaccaccaucgagaaggagaucugccccaagcccgccgaguacagaaacuggagcaagccccagugcgacaucaccggcuucgcccccuucagcaaggacaacagcaucagacugagcgccggcggcgacaucugggugaccagagagcccuacgugagcugcgaccccgacaagugcuaccaguucgcccugggccagggcaccacccugaacaacgugcacagcaacaacaccgugagagacagaacccccuacagaacccugcugaugaacgagcugggcgugcccuuccaccugggcaccaagcaggugugcaucgccuggagcagcagcagcugccacgacggcaaggccuggcugcacgugugcaucaccggcgacgacaagaacgccaccgccagcuucaucuacaacggcagacugguggacagcguggugagcuggagcaaggagauccugagaacccaggagagcgagugcgugugcaucaacggcaccugcaccguggugaugaccgacggcagcgccagcggcaaggccgacaccaagauccuguucaucgaggagggcaagaucgugcacaccagcacccugagcggcagcgcccagcacguggaggagugcagcugcuaccccagauaccccggcgugagaugcgugugcagagacaacuggaagggcagcaacagacccaucguggacaucaacaucaaggaccacagcaucgugagcagcuacgugugcagcggccuggugggcgacacccccagaaagaacgacagcagcagcagcagccacugccuggaccccaacaacgaggagggcggccacggcgugaagggcugggccuucgacgacggcaacgacguguggaugggcagaaccaucagcgagaagagcagacugggcuacgagaccuucaaggugaucgagggcuggagcaaccccaagagcaagcugcagaucaacagacaggugaucguggacagaggcaacagaagcggcuacagcggcaucuucagcguggagggcaagagcugcaucaacagaugcuucuacguggagcugaucagaggcagaaaggaggagaccgaggugcuguggaccagcaacagcaucgugguguucugcggcaccagcggcaccuacggcaccggcagcuggcccgacggcgccgacaucaaccugaugcccaucuga

SEQ ID NO: 185963 - RNA, 1410 nt, Artificial Sequence; identical to SEQ ID NO: 176659
  derived and/or modified CDS sequence (opt4) from neuraminidase__InfluenzaA__AJJ99163

SEQ ID NO: 185964 - RNA, 1410 nt, Artificial Sequence
  derived and/or modified CDS sequence (opt4) from neuraminidase__InfluenzaA__AJJ99175
augaaccccaaccagaagaucaucaccaucggcagcgugagccugaccaucagcaccaucugccuguucaugcagaucgccauccugaucaccaccgugacccugcacuucaagcaguacgaguucaacagcccccccaacaaccaggugaugcugugcgagcccaccaucaucgagagaaacaucaccgagaucguguaccugaccaacaccaccaucgagaaggagaucugccccaagcuggccgaguacagaaacuggagcaagccccagugcgacaucaccggcuucgcccccuucagcaaggacaacagcaucagacugagcgccggcggcgacaucugggugaccagagagcccuacgugagcugcgaccccgacaagugcuaccaguucgcccugggccagggcaccacccugaacaacgugcacagcaacaacaccgugagagacagaacccccuacagaacccugcugaugaacgagcugggcgugcccuuccaccugggcaccaagcaggugugcaucgccuggagcagcagcagcugccacgacggcaaggccuggcugcacgugugcaucaccggcgacgacaagaacgccaccgccagcuucaucuacaacggcagacugguggacagcguggugagcuggagcaaggagauccugagaacccaggagagcgagugcgugugcaucaacggcaccugcaccguggugaugaccgacggcagcgccagcggcaaggccgacaccaagauccuguucaucgaggagggcaagaucgugcacaccagcacccugagcggcagcgcccagcacguggaggagugcagcugcuaccccagauaccccggcgugagaugcgugugcagagacaacuggaagggcagcaacagacccaucguggacaucaacaucaaggaccacagcaucgugagcagcuacgugugcagcggccuggugggcgacacccccagaaagaacgacagcagcagcagcagccacugccuggaccccaacaacgaggagggcggccacggcgugaagggcugggccuucgacgacggcaacgacguguggaugggcagaaccaucagcgagaagagcagacugggcuacgagaccuucaaggugaucgagggcuggagcaaccccaagagcaagcugcagaucaacagacaggugaucguggacagaggcaacagaagcggcuacagcggcaucuucagcguggagggcaagagcugcaucaacagaugcuucuacguggagcugaucagaggcagaaaggaggagaccgaggugcuguggaccagcaacagcaucgugguguucugcggcaccagcggcaccuacggcaccggcagcuggcccgacggcaccgacaucaaccugaugcccaucuga

SEQ ID NO: 185965 - RNA, 1410 nt, Artificial Sequence
  derived and/or modified CDS sequence (opt4) from neuraminidase__InfluenzaA__AJJ99199
augaaccccaaccagaagaucaucaccaucggcagcgugagccugaccaucagcaccaucugcuucuucaugcagaucgccauccugaucaccaccgugacccugcacuucaagcaguacgaguucaacagcccccccaacaaccaggugaugcugugcgagcccaccaucaucgagagaaacaucaccgagaucguguaccugaccaacaccaccaucgagaaggagaucugccccaagcuggccgaguacagaaacuggagcaagccccagugcgacaucaccggcuucgcccccuucagcaaggacaacagcaucagacugagcgccggcggcgacaucugggugaccagagagcccuacgugagcugcgaccccgacaagugcuaccaguucgcccugggccagggcaccacccugaacaacgugcacagcaacgacaccgugagaaacagaacccccuacagaacccugcugaugaacgagcugggcgugcccuuccaccugggcaccaagcaggugugcaucgccuggagcagcagcagcugccacgacggcaaggccuggcugcacgugugcaucaccggcgacgacaagaacgccaccgccagcuucaucuacaacggcagacugguggacagcaucgugagcuggagcaaggagauccugagaacccaggagagcgagugcgugugcaucaacggcaccugcaccguggugaugaccgacggcagcgccagcggcaaggccgacaccaagauccuguucaucgaggagggcaagaucgugcacaccagcacccugagcggcagcgcccagcacguggaggagugcagcugcuaccccagauaccccggcgugagaugcgugugcagagacaacuggaagggcagcaacagacccaucguggacaucaacaucaaggaccacagcaucgugagcagcuacgugugcagcggccuggugggcgacacccccagaaagaacgacagcagcagcagcagccacugccuggaccccaacaacgaggagggcggccacggcgugaagggcugggccuucgacgacggcaacgacguguggaugggcagaaccaucagcgagaagagcagacugggcuacgagaccuucaaggugaucgagggcuggagcaaccccaagagcaagcugcagaucaacagacaggugaucguggacagaggcaacagaagcggcuacagcggcaucuucagcguggagggcaagagcugcaucaacagaugcuucuacguggagcugaucagaggcagaaaggaggagaccgaggugcuguggaccagcaacagcaucgugguguucugcggcaccagcggcaccuacggcaccggcagcuggcccgacggcgccgacaucaaccugaugcccaucuga

SEQ ID NO: 185966 - RNA, 1410 nt, Artificial Sequence; identical to SEQ ID NO: 176803
  derived and/or modified CDS sequence (opt4) from neuraminidase__InfluenzaA__AJJ99211

SEQ ID NO: 185967 - RNA, 1410 nt, Artificial Sequence
  derived and/or modified CDS sequence (opt4) from neuraminidase__InfluenzaA__AJJ99223
augaaccccaaccagaagaucaucaccaucggcagcgugagccugaccaucagcaccaucugcuucuucaugcagaucgccauccugaucaccaccgugacccugcacuucaagcaguacgaguucaacagcccccccaacaaccaggugaugcugugcgagcccaccaucaucgagagaaacaucaccgagaucguguaccugaccaacaccaccaucgagaaggagaucugccccaagcuggccgaguacagaaacuggagcaagccccagugcgacaucaccggcuucgcccccuucagcaaggacaacagcaucagacugagcgccggcggcgacaucugggugaccagagagcccuacgugagcugcgaccccgacaagugcuaccaguucgcccugggccagggcaccacccugaacaacgugcacagcaacgacaccgugagaaacagaacccccuacagaacccugcugaugaacgagcugggcgugcccuuccaccugggcaccaagcaggugugcaucgccuggagcagcagcagcugccacgacggcaaggccuggcugcacgugugcaucaccggcgacgacaagaacgccaccgccagcuucaucuacaacggcagacugguggacagcaucgugagcuggagcaaggagauccugagaacccaggagagcgagugcgugugcaucaacggcaccugcaccguggugaugaccgacggcagcgccagcggcgaggccgacaccaagauccuguucaucgaggagggcaagaucgugcacaccagcacccugagcggcagcgcccagcacguggaggagugcagcugcuaccccagauaccccggcgugagaugcgugugcagagacaacuggaagggcagcaacagacccaucguggacaucaacaucaaggaccacagcaucgugagcagcuacgugugcagcggccuggugggcgacacccccagaaagaacgacagcagcagcagcagccacugccuggaccccaacaacgaggagggcggccacggcgugaagggcugggccuucgacgacggcaacgacgugugggugggcagaaccaucagcgagaagagcagacugggcuacgagaccuucaaggugaucgagggcuggagcaaccccaagagcaagcugcagaucaacagacaggugaucguggacagaggcaacagaagcggcuacagcggcaucuucagcguggagggcaagagcugcaucaacagaugcuucuacguggagcugaucagaggcagaaaggaggagaccgaggugcuguggaccagcaacagcaucgugguguucugcggcaccagcggcaccuacggcaccggcagcuggcccgacggcgccgacaucaaccugaugcccaucuga

SEQ ID NO: 185968 - RNA, 1410 nt, Artificial Sequence
  derived and/or modified CDS sequence (opt4) from neuraminidase__InfluenzaA__AJJ99235
augaaccccaaccagaagaucaucaccaucggcagcgugagccugaccaucagcaccaucugcuucuucaugcagaucgccauccugaucaccaccgugacccugcacuucaagcaguacgaguucaacagcccccccaacaaccaggugaugcugugcgagcccaccaucaucgagagaaacaucaccgagaucguguaccugaccaacaccaccaucgagaaggagaucugccccaagcccgccgaguacagaaacuggagcaagccccagugcgacaucaccggcuucgcccccuucagcaaggacaacagcaucagacugagcgccggcggcgacaucugggugaccagagagcccuacgugagcugcgaccccgacaagugcuaccaguucgcccugggccagggcaccacccugaacaacgugcacagcaacgacaccgugagagacagaacccccuacagaacccugcugaugaacgagcugggcgugcccuuccaccugggcaccaagcaggugugcaucgccuggagcagcagcagcugccacgacggcaaggccuggcugcacgugugcaucaccggcgacgacaagaacgccaccgccagcuucaucuacaacggcagacugguggacagcaucgugagcuggagcaaggagauccugagaacccaggagagcgagugcgugugcaucaacggcaccugcaccguggugaugaccgacggcagcgccagcggcgaggccgacaccaagauccuguucaucgaggagggcaagaucgugcacaccagcacccugagcggcagcgcccagcacguggaggagugcagcugcuaccccagauaccccggcgugagaugcgugugcagagacaacuggaagggcagcaacagacccaucguggacaucaacaucaaggaccacagcaucgugagcagcuacgugugcagcggccuggugggcgacacccccagaaagaacgacagcagcagcagcagccacugccuggaccccaacaacgaggagggcggccacggcgugaagggcugggccuucgacgacggcaacgacguguggaugggcagaaccaucagcgagaagagcagacugggcuacgagaccuucaaggugaucgagggcuggagcaaccccaagagcaagcugcagaucaacagacaggugaucguggacagaggcaacagaagcggcuacagcggcaucuucagcguggagggcaagagcugcaucaacagaugcuucuacguggagcugaucagaggcagaaaggaggagaccgaggugcuguggaccagcaacagcaucgugguguucugcggcaccagcggcaccuacggcaccggcagcuggcccgacggcgccgacaucaaccugaugcccaucuga

SEQ ID NO: 185969 - RNA, 1410 nt, Artificial Sequence
  derived and/or modified CDS sequence (opt4) from neuraminidase__InfluenzaA__AJJ99246
augaaccccaaccagaagaucaucaccaucggcagcgugugcaugaccaucggcauggccaaccugauccugcagaucggcaacaucaucagcaucuggaucagccacagcauccagcugggcaaccagagccagaucgagaccugcaaccagaacgugaucaccuacgagaacaacaccugggugaaccagaccuacgugaacaucagcaacaccaacuucgccgccggccagagcguggugagcgugaagcuggccggcaacagcagccugugccccgugagcggcugggccaucuacagcaaggacaacagcgugagaaucggcagcaagggcgacguguucgugaucagagagcccuucaucagcugcagcccccuggagugcagaaccuucuuccugacccagggcgcccugcugaacgacaagcacagcaacggcaccaucaaggacagaagccccuacagaacccugaugagcugccccaucggcgaggugcccagccccuacaacagcagauucgagagcguggccuggagcgccagcgccugccacgacggcaucaacuggcugaccaucggcaucagcggccccgacagcggcgccguggccgugcugaaguacaacggcaucaucaccgacaccaucaagagcuggagaaacaacauccugagaacccaggagagcgagugcgccugccugaacggcagcugcuucaccaucaugaccgacggccccagcgacggccaggccagcuacaagaucuucagaaucgagaagggcaagaucgugaagagcguggagaugaacgcccccaacuaccacuacgaggagugcagcugcuaccccgacagcagcgagaucaccugcgugugcagagacaacuggcacggcagcaacagacccugggugagcuucaaccagaaccuggaguaccagaucggcuacaucugcagcggcaucuucggcgacaaccccagacccaacgacaagaccggcagcugcggccccgugagcagcagcggcgccaacggcgugaagggcuucagcuucaaguacggcaacggcguguggaucggcagaaccaagagcaucagcagcagaaagggcuucgagaugaucugggaccccaacggcuggaccggcaccgacaacaacuucagcaucaagcaggacaucgugggcaucaacgaguggagcggcuacagcggcagcuucgugcagcaccccgagcugaccggccuggacugcaucagacccugcuucuggguggagcugaucagaggcagacccaaggagaacaccaucuggaccagcggcagcagcaucagcuucugcggcgugaacagcgacaccgugggcuggagcuggcccgacggcgccgagcugcccuucaccaucgacaaguga

SEQ ID NO: 185970 - RNA, 1410 nt, Artificial Sequence
  derived and/or modified CDS sequence (opt4) from neuraminidase__InfluenzaA__AJJ99257
augaaccccaaccagaagaucaucaccaucggcagcgugugcaugaccaucggcauggccaaccugauccugcagaucggcaacaucaucagcaucuggaucagccacagcauccagcugggcaaccagaaccagaucgagaccugcaaccagagcgugaucaccuacgagaacaacaccugggugaaccagaccuacgugaacaucagcaacaccaacuucgccgccggccagagcguggugagcgugaagcuggccggcaacagcagccugugccccgugagcggcugggccaucuacagcaaggacaacagcaucagaaucggcagcaagggcgacguguucgugaucagagagcccuucaucagcugcagcccccuggagugcagaaccuucuuccugacccagggcgcccugcugaacgacaagcacagcaacggcaccaucaaggacagaagccccuacagaacccugaugagcugccccaucggcgaggugcccagccccuacaacagcagauucgagagcguggccuggagcgccagcgccugccacgacggcaucaacuggcugaccaucggcaucagcggccccgacaacggcgccguggccgugcugaaguacaacggcaucaucaccgacaccaucaagagcuggagaaacaacauccugagaacccaggagagcgagugcgccugcgugaacggcagcugcuucaccaucaugaccgacggccccagcgacggccaggccagcuacaagaucuucagaaucgagaagggcaagaucgugaagagcguggagaugaacgcccccaacuaccacuacgaggagugcagcugcuaccccgacagcagcgagaucaccugcgugugcagagacaacuggcacggcagcaacagacccugggugagcuucaaccagaaccuggaguaccagaucggcuacaucugcagcggcaucuucggcgacaaccccagacccaacgacaagaccggcagcugcggccccgugcccagcaacggcgccaacggcgugaagggcuucagcuucaaguacggcaacggcguguggaucggcagaaccaagagcaucagcagcagaaagggcuucgagaugaucugggaccccaacggcuggaccggcaccgacaacagcuucagcaucaagcaggacaucgugggcaccaacgaguggagcggcuacagcggcagcuucgugcagcaccccgagcugaccggccuggacugcaucagacccugcuucuggguggagcugaucagaggcagacccaaggagaacaccaucuggaccagcggcagcagcaucagcuucugcggcgugaacagcggcaccgugggcuggagcuggcccgacggcgccgagcugcccuucaccaucgacaaguga

SEQ ID NO: 185971 - RNA, 1413 nt, Artificial Sequence; identical to SEQ ID NO: 176692
  derived and/or modified CDS sequence (opt4) from neuraminidase__InfluenzaA__AJJ99269

SEQ ID NO: 185972 - RNA, 1410 nt, Artificial Sequence; identical to SEQ ID NO: 181018
  derived and/or modified CDS sequence (opt4) from neuraminidase__InfluenzaA__AJJ99280

SEQ ID NO: 185973 - RNA, 1410 nt, Artificial Sequence; identical to SEQ ID NO: 180769
  derived and/or modified CDS sequence (opt4) from neuraminidase__InfluenzaA__AJJ99291

SEQ ID NO: 185974 - RNA, 1413 nt, Artificial Sequence
  derived and/or modified CDS sequence (opt4) from neuraminidase__InfluenzaA__AJJ99303
augaaccccaaccagaagaucaucaccaucggcagcaucagcaucgccaucggcaucaucagccugaugcugcagaucggcaacaucaucagcaucugggccagccacagcauccagaccggcagccagaacaacaccggcaucugcaaccagagaaucaucaccuacgagaacagcaccugggugaaccacaccuacgugaacaucaacaacaccaacgugguggccggcgaggacaagaccagcgugacccuggccggcaacagcagccugugcagcaucagcggcugggccaucuacaccaaggacaacagcaucagaaucggcagcaagggcgacguguucgugaucagagagcccuucaucagcugcagccaccuggagugcagaaccuucuuccugacccagggcgcccugcugaacgacaagcacagcaacggcaccgugaaggacagaagccccuacagagcccugaugagcugcccccugggcgaggcccccagccccuacaacagcaaguucgagagcguggccuggagcgccagcgccugccacgacggcaugggcuggcugaccaucggcaucagcggccccgacaacggcgccguggccgugcugaaguacaacggcaucaucaccggcaccaucaagagcuggaagaagcagauccugagaacccaggagagcgagugcgugugcaugaacggcagcugcuucaccaucaugaccgacggccccagcaacaaggccgccagcuacaagaucuucaagaucgagaagggcaaggugaccaagagcauggagcugaacgcccccaacuuccacuacgaggagugcagcugcuaccccgacaccggcaucgugaugugcgugugcagagacaacuggcacggcagcaacagacccugggugagcuucaaccagaaccuggacuaccagaucggcuacaucugcagcggcguguucggcgacaaccccagacccgaggacggcgagggcagcugcaaccccgugaccguggacggcgccaacggcgugaagggcuucagcuacaaguacgacaacggcguguggaucggcagaaccaagagcaacagacugagaaagggcuucgagaugaucugggaccccaacggcuggaccaacaccgacagcgacuucagcgugaagcaggacgugguggccaucaccgacuggagcggcuacagcggcagcuucgugcagcaccccgagcugaccggccuggacugcaucagacccugcuucuggguggagcuggugagaggccugcccagagagaacaccaccaucuggaccagcggcagcagcaucagcuucugcggcgugaacagcgacaccgccaacuggagcuggcccgacggcgccgagcugcccuucaccaucgacaaguga

SEQ ID NO: 185975 - RNA, 1410 nt, Artificial Sequence
  derived and/or modified CDS sequence (opt4) from neuraminidase__InfluenzaA__AJJ99314
augaaccccaaccagaagaucaucaccaucggcagcgccugcaugaccaucggcauggccaaccugauccugcagaucggcaacaucaucagcaucuggaucagccacagcauccagcugggcaaccagaaccagaucgagaccugcaaccagagcgugaucaccuacgagaacaacaccugggugaaccagaccuacgugaacaucagcaacaccaacuucgccgccggccagagcguggugagcgugaagcuggccggcaacagcagccugugccccgugagcggcugggccaucuacagcaaggacaacagcaucagaaucggcagcaagggcgacguguucgugaucagagagcccuucaucagcugcagcccccuggagugcagaaccuucuuccugacccagggcgcccugcugaacgacaagcacagcaacggcaccaucaaggacagaagccccuacagaacccugaugagcugccccaucggcgaggugcccagccccuacaacagcagauucgagagcguggccuggagcgccagcgccugccacgacggcaucaacuggcugaccaucggcaucagcggccccgacaacggcgccguggccgugcugaaguacaacggcaucaucaccgacaccaucaagagcuggagaaacaacauccugagaacccaggagagcgagugcgccugcgugaacggcagcugcuucaccgugaugaccgacggccccagcgacggccaggccagcuacaagaucuucagaaucgagaagggcaagaucgugaagagcguggagaugaacgcccccaacuaccacuacgaggagugcagcugcuaccccgacagcagcgagaucaccugcgugugcagagacaacuggcacggcagcaacagacccugggugagcuucaaccagaaccuggaguaccagaucggcuacaucugcagcggcaucuucggcgacaaccccagacccaacgacaagaccggcagcugcggccccgugagcagcaacggcgccaacggcgugaagggcuucagcuucaaguacggcaacggcguguggaucggcagaaccaagagcaucagcagcagaaacggcuucgagaugaucugggaccccaacggcuggaccggcaccgacaacaacuucagcaucaagcaggacaucgugggcaucaacgaguggagcggcuacagcggcagcuucgugcagcaccccgagcugaccggccuggacugcaucagacccugcuucuggguggagcugaucagaggcagacccaaggagaacaccaucuggaccagcggcagcagcaucagcuucugcggcgugaacagcgacaccgugggcuggagcuggcccgacggcgccgagcugcccuucaccaucgacaaguga

SEQ ID NO: 185976 - RNA, 1413 nt, Artificial Sequence
  derived and/or modified CDS sequence (opt4) from neuraminidase__InfluenzaA__AJJ99326
augaaccccaaccagaagaucaucaccaucggcagcaucagcaucgccaucggcaucaucagccugaugcugcagaucggcaacaucaucagcaucugggccagccacagcauccagaccggcagccagaacaacaccggcaucugcaaccagagaaucaucaccuacgagaacagcaccugggugaaccacaccuacgugaacaucaacaacaccaacgugguggccggcgaggacaagaccagcgugacccuggccggcaacagcagccugugcagcaucagcggcugggccaucuacaccaaggacaacagcaucagaaucggcagcaagggcgacguguucgugaucagagagcccuucaucagcugcagccaccuggagugcagaaccuucuuccugacccagggcgcccugcugaacgacaagcacagcaacggcaccgugaaggacagaagccccuacagagcccugaugagcugcccccugggcgaggcccccagccccuacaacagcaaguucgagagcguggccuggagcgccagcgccugccacgacggccugggcuggcugaccaucggcaucagcggccccgacaacggcgccguggccgugcugaaguacaacggcaucaucaccggcaccaucaagagcuggaagaagcagauccugagaacccaggagagcgagugcgugugcaugaacggcagcugcuucaccaucaugaccgacggccccagcaacaaggccgccagcuacaagaucuucaagaucgagaagggcaaggugaccaagagcaucgagcugaacgcccccaacuucuacuacgaggagugcagcugcuaccccgacaccggcaucgugaugugcgugugcagagacaacuggcacggcagcaacagacccugggugagcuucaaccagaaccuggacuaccagaucggcuacaucugcagcggcguguucggcgacaaccccagacccgaggacggcgagggcagcugcaaccccgugaccguggacggcgccaacggcgugaagggcuucagcuacaaguacggcaacggcguguggaucggcagaaccaagagcaacagacugagaaagggcuucgagaugaucugggaccccaacggcuggaccaacaccgacagcgacuucagcgugaagcaggacgugguggccaucaccgacuggagcggcuacagcggcagcuucgugcagcaccccgagcugaccggccuggacugcaucagacccugcuucuggguggagcuggugagaggccugcccagagagaacaccaccaucuggaccagcggcagcagcaucagcuucugcggcgugaacagcgacaccgccaacuggagcuggcccgacggcgccgagcugcccuucaccaucgacaaguga

SEQ ID NO: 185977 - RNA, 1410 nt, Artificial Sequence; identical to SEQ ID NO: 178442
  derived and/or modified CDS sequence (opt4) from neuraminidase__InfluenzaA__AJJ99337

SEQ ID NO: 185978 - RNA, 1410 nt, Artificial Sequence; identical to SEQ ID NO: 177905
  derived and/or modified CDS sequence (opt4) from neuraminidase__InfluenzaA__AJJ99348

SEQ ID NO: 185979 - RNA, 1410 nt, Artificial Sequence; identical to SEQ ID NO: 176798
  derived and/or modified CDS sequence (opt4) from neuraminidase__InfluenzaA__AJJ99359

SEQ ID NO: 185980 - RNA, 1410 nt, Artificial Sequence
  derived and/or modified CDS sequence (opt4) from neuraminidase__InfluenzaA__AJJ99370
augaaccccaaccagaagaucaucaccaucggcagcgugugcaugaucaucggcauggccaaccugauccugcagaucggcaacaucaucagcaucuggaucagccacagcauccagcugggcaaccagagccagaucgagaccugcaaccagagcgugaucaccuacgagaacaacaccugggugaaccagaccuacgugaacaucagcaacaccaacuucgccgccggccagagcguggugagcgugaagcuggccggcaacagcagccugugccccgugagcggcugggccaucuacagcaaggacaacagcaucagaaucggcagcaagggcgacguguucgugaucagagagcccuucaucagcugcagcccccuggagugcagaaccuucuuccugacccagggcgcccugcugaacgacaagcacagcaacggcaccaucaaggacagaagcccccacagaacccugaugagcugccccaucggcgaggugcccagccccuacaacagcagauucgagagcguggccuggagcgccagcgccugccacgacggcaucaacuggcugaccaucggcaucagcggccccgacaacggcgccguggccgugcugaaguacaacggcaucaucaccgacaccaucaagagcuggagaaacaacauccugagaacccaggagagcgagugcgccugcgugaacggcagcugcuucaccaucaugaccgacggccccagcgacagacaggccagcuacaagaucuucagaaucgagaagggcaagaucgugaagagcguggagaugaacgcccccaacuaccacuacgaggagugcagcugcuaccccgacagcagcgagaucaccugcgugugcagagacaacuggcacggcagcaacagacccugggugagcuucaaccagaaccuggaguaccagaucggcuacaucugcagcggcaucuucggcgacaaccccagacccaacgacaagaccggcagcugcggccccgugagcagcaacggcgccaacggcgugaagggcuucagcuucaaguacggcaacggcguguggaucggcagaaccaagagcaucagcagcagaaagggcuucgagaugaucugggaccccaacggcuggaccggcaccgacaacaacuucagcaucaagcaggacaucgugggcaucaacgaguggagcggcuacagcggcagcuucgugcagcaccccgagcugaccggccuggacugcaucagacccugcuucuggguggagcugaucagaggcagacccaaggagaacaccaucuggaccagcggcagcagcaucagcuucugcggcgugaacagcgacaccgugggcuggagcuggcccgacggcgccgagcugcccuucaccaucgacaaguga

SEQ ID NO: 185981 - RNA, 1410 nt, Artificial Sequence; identical to SEQ ID NO: 180317
  derived and/or modified CDS sequence (opt4) from neuraminidase__InfluenzaA__AJJ99381

SEQ ID NO: 185982 - RNA, 1410 nt, Artificial Sequence
  derived and/or modified CDS sequence (opt4) from neuraminidase__InfluenzaA__AJJ99392
augaaccccaaccagaagaucaucaccaucggcagcgugugcaugaccaucggcauggccaaccugauccugcagaucggcaacaucaucagcaucuggaucagccacagcauccagcugggcaaccagaaccagaucgagaccugcaaccagagcgugaucaccuacgagaacaacaccugggugaaccagaccuacgugaacaucagcaacaccaacuucgccgccggccagagcguggugagcgugaagcuggccggcaacagcagccugugccccgugagcggcugggccaucuacagcaaggacaacagcaucagaaucggcagcaagggcgacguguucgugaucagagagcccuucaucagcugcagcccccuggagugcagaaccuucuuccugacccagggcgcccugcugaacgacaagcacagcaacggcaccaucaaggacagaagccccuacagaacccugaugagcugccccaucggcgaggugcccagccccuacaacagcagauucgagagcguggccuggagcgccagcgccugccacgacggcaucaacuggcugaccaucggcaucagcggccccgacaacggcgccguggccgugcugaaguacaacggcaucaucaccgacaccaucaagagcuggagaaacaacauccugagaacccaggagagcgagugcgccugcgugaacggcagcugcuucaccgugaugaccgacggccccagcgacggccaggccagcuacaagaucuucagaaucgagaagggcaagaucgugaagagcguggagaugaacgcccccaacuaccacuacgaggagugcagcugcuaccccgacagcagcgagaucaccugcgugugcagagacaacuggcacggcagcaacagacccugggugagcuucaaccagaaccuggaguaccagaucggcuacaucugcagcggcaucuucggcgacaaccccagacccaacgacaagaccggcagcugcggccccgugagccccaacggcgccaacggcgugaagggcuucagcuucaaguacggcaacggcguguggaucggcagaaccaagagcaucagcagcagaaacggcuucgagaugaucugggaccccaacggcuggaccggcaccgacaacaacuucagcaucaagcaggacaucgugggcaucaacgaguggagcggcuacagcggcagcuucgugcagcaccccgagcugaccggccuggacugcaucagacccugcuucuggguggagcugaucagaggcagacccaaggagaacaccaucuggaccagcggcagcagcaucagcuucugcggcgugaacagcgacaccgugggcuggagcuggcccgacggcgccaagcugcccuucaccaucgacaaguga

SEQ ID NO: 185983 - RNA, 1410 nt, Artificial Sequence; identical to SEQ ID NO: 176798
  derived and/or modified CDS sequence (opt4) from neuraminidase__InfluenzaA__AJJ99403

SEQ ID NO: 185984 - RNA, 1413 nt, Artificial Sequence; identical to SEQ ID NO: 177521
  derived and/or modified CDS sequence (opt4) from neuraminidase__InfluenzaA__AJJ99415

SEQ ID NO: 185985 - RNA, 1413 nt, Artificial Sequence
  derived and/or modified CDS sequence (opt4) from neuraminidase__InfluenzaA__AJJ99427
augaaccccaaccagaagaucaucaccaucggcagcaucagcaucgccaucggcaucaucagccugaugcugcagaucggcaacaucaucagcaucugggccagccacagcauccagaccggcagccagaacaacaccggcaucugcaaccagagaaucaucaccuacgagaacagcaccugggugaaccacaccuacgugaacaucaacaacaccaacgugguggccggcgaggacaagaccagcgugacccuggccggcaacagcagccugugcagcaucagcggcugggccguguacaccaaggacaacagcaucagaaucggcagcaagggcgacguguucgugaucagagagcccuucaucagcugcagccaccuggagugcagaaccuucuuccugacccagggcgcccugcugaacgacaagcacagcaacggcaccgugaaggacagaagccccuacagagcccugaugagcugcccccugggcgaggcccccagccccuacaacagcaaguucgagagcguggccuggagcgccagcgccugccacgacggcaugggcuggcugaccaucggcaucagcggccccgacaacggcgccguggccgugcugaaguacaacggcaucaucaccggcaccaucaagagcuggaagaagcagauccugagaacccaggagagcgagugcgugugcaugaacggcagcugcuucaccaucaugaccgacggccccagcgacaaggccgccagcuacaagaucuucaagaucgagaagggcaaggugaccaagagcaucgagcugaacgcccccaacuucuacuacgaggagugcagcugcuaccccgacaccggcaucgugaugugcgugugcagagacaacuggcacggcagcaacagacccugggugagcuucaaccagaaccuggacuaccagaucggcuacaucugcagcggcguguucggcgacaaccccagacccgaggacggcgagggcagcugcaaccccgugaccguggacggcgccaacggcgugaagggcuucagcuacaaguacggcaacggcguguggaucggcagaaccaagagcaacagacugagaaagggcuucgagaugaucugggaccccaacggcuggaucaacaccgacagcgacuucagcgugaagcaggacgugguggccaucaccgacuggagcggcuacagcggcagcuucgugcagcaccccgagcugaccggccuggacugcaucagacccugcuucuggguggagcuggugagaggccugcccagagagaacaccaccaucuggaccagcggcagcagcaucagcuucugcggcgugaacagcgacaccgccaacuggagcuggcccgacggcgccgagcugcccuucaccaucgacaaguga

SEQ ID NO: 185986 - RNA, 1413 nt, Artificial Sequence
  derived and/or modified CDS sequence (opt4) from neuraminidase__InfluenzaA__AJJ99439
augaaccccaaccagaagaucaucaccaucggcagcaucagcaucgccaucggcaucaucagccugaugcugcagaucggcaacaucaucagcaucugggccagccacagcauccagaccggcagccagaacaacaccggcaucugcaaccagagaaucaucaccuacgagaacagcaccugggugaaccacaccuacgugaacaucaacaacaccaacgugguggccggcgaggacaagaccagcgugacccuggccggcaacagcagccugugcagcaccagcggcugggccaucuacaccaaggacaacagcaucagaaucggcagcaagggcgacguguucgugaucagagagcccuucaucagcugcagccaccuggagugcagaaccuucuuccugacccagggcgcccugcugaacgacaagcacagcaacggcaccgugaaggacagaagccccuacagagcccugaugagcugcccccugggcgaggcccccagccccuacaacagcaaguucgagagcguggccuggagcgccagcgccugccacgacggcaugggcuggcugaccaucggcaucagcggccccgacaacggcgccguggccgugcugaaguacaacggcaucaucaccggcaccaucaagagcuggaagaagcagauccugagaacccaggagagcgagugcgugugcaugaacggcagcugcuucaccaucaugaccgacggccccagcaacaaggccgccagcuacaagaucuucaagaucgagaagggcaaggugaccaagagcaucgagcugaacgcccccaacuucuacuacgaggagugcagcugcuaccccgacaccggcaucgugaugugcgugugcagagacaacuggcacggcagcaacagacccugggugagcuucaaccagaaccuggacuaccagaucggcuacaucugcagcggcguguucggcgacaaccccagacccgaggacggcgagggcagcugcaaccccgugaccguggacggcgccaacggcgugaagggcuucagcuacaaguacggcaacggcguguggaucggcagaaccaagagcaacagacugagaaagggcuucgagaugaucugggaccccaacggcuggaccaacaccgacagcgacuucagcgugaagcaggacgugguggccaucaccgacuggagcggcuacagcggcagcuucgugcagcaccccgagcugaccggccuggacugcaucagacccugcuucuggguggagcuggugagaggccugcccagagagaacaccaccaucuggaccagcggcagcagcaucagcuucugcggcgugaacagcgacaccgccaacuggagcuggcccgacggcgccgagcugcccuucaccaucgacaaguga

SEQ ID NO: 185987 - RNA, 1413 nt, Artificial Sequence
  derived and/or modified CDS sequence (opt4) from neuraminidase__InfluenzaA__AJJ99451
augaaccccaaccagaagaucaucaccaucggcagcaucagcaucgccaucggcaucaucagccugaugcugcagaucggcaacaucaucagcaucugggccagccacagcauccagaccggcagccagaacaacaccggcaucugcaaccagagaaucaucaccuacgagaacagcaccugggugaaccacaccuacgugaacaucaacaacaccaacgugguggccggcgaggacaagaccagcgugacccuggccggcaacagcagccugugcagcaucagcggcugggccaucuacaccaaggacaacagcaucagaaucggcagcaagggcgacguguucgugaucagagagcccuucaucagcugcagccaccuggagugcagaaccuucuuccugacccagggcgcccugcugaacgacaagcacagcaacagaaccgugaaggacagaagccccuacagagcccugaugagcugcccccugggcgaggcccccagccccuacaacagcaaguucgagagcguggccuggagcgccagcgccugccacgacggcaugggcuggcugaccaucggcaucagcggccccgacaacggcgccguggccgugcugaaguacaacggcaucaucaccggcaccaucaagagcuggaagaagcagauccugagaacccaggagagcgagugcgugugcaugaacggcagcugcuucaccaucaugaccgacggccccagcaacaaggccgccagcuacaagaucuucaagaucgagaagggcaaggugaccaagagcaucgagcugaacgcccccaacuuccacuacgaggagugcagcugcuaccccgacaccggcaucgugaugugcgugugcagagacaacuggcacggcagcaacagacccugggugagcuucaaccagaaccuggacuaccagaucggcuacaucugcagcggcguguucggcgacaaccccagacccgaggacggcgagggcagcugcaaccccgugaccguggacggcgccaacggcgugaagggcuucagcuacaaguacgacaacggcguguggaucggcagaaccaagagcaacagacugagaaagggcuucgagaugaucugggaccccaacggcuggaccaacaccgacagcgacuucagcgugaagcaggacgugguggccaucaccgacuggagcggcuacagcggcagcuucgugcagcaccccgagcugaccggccuggacugcaucagacccugcuucuggguggagcuggugagaggccugcccagagagaacaccaccaucuggaccagcggcagcagcaucagcuucugcggcgugaacagcgacaccgccaacuggagcuggcccgacggcgccgagcugcccuucaccaucgacaaguga

SEQ ID NO: 185988 - RNA, 1413 nt, Artificial Sequence; identical to SEQ ID NO: 176692
  derived and/or modified CDS sequence (opt4) from neuraminidase__InfluenzaA__AJJ99463

SEQ ID NO: 185989 - RNA, 1410 nt, Artificial Sequence
  derived and/or modified CDS sequence (opt4) from neuraminidase__InfluenzaA__AJJ99474
augaaccccaaccagaagaucaucaccaucggcagcgugugcaugaccaucggcaucgccaaccugauccugcagaucggcaacaucaucagcaucuggaucagccacagcauccagcugggcaaccagaaccagaucgagaccugcaaccagagcgugaucaucuacgagaacaacaccugggugaaccagaccuacgugaacaucagcaacaccaacuucgccgccggccagagcguggugagcgugaagcuggccggcaacagcagccugugccccgugagcggcugggccaucuacagcaaggacaacagcaucagaaucggcagcaagggcgacguguucgugaucagagagcccuucaucagcugcagcccccuggagugcagaaccuucuuccugacccagggcgcccugcugaacgacaagcacagcaacggcaccaucaaggacagaagccccuacagaacccugaugagcugccccaucggcgaggugcccagccccuacaacagcagauucgagagcguggccuggagcgccagcgccugccacgacggcaucaacuggcugaccaucggcaucagcggccccgacaacggcgccguggccgugcugaaguacaacggcaucaucaccgacaccaucaagagcuggagaaacaacauccugagaacccaggagagcgagugcgccugcgugaacggcagcugcuucaccaucaugaccgacggccccagcgacggccaggccagcuacaagaucuucagaaucgagaagggcaagaucaucaagagcguggagaugaacgcccccaacuaccacuacgaggagugcagcugcuaccccgacagcagcgagaucaccugcgugugcagagacaacuggcacggcagcaacagacccugggugagcuucaaccagaaccuggaguaccagaucggcuacaucugcagcggcaucuucggcgacaaccccagacccaacgacaagaccggcagcugcggccccgugagcagcaacggcgccaacggcgugaagggcuucagcuucaaguacggcaacggcguguggaucggcagaaccaagagcaucagcagcagaaagggcuucgagaugaucugggaccccaacggcuggaccggcaccgacaacagcuucagcaucaagcaggacaucgugggcaucaacgaguggagcggcuacagcggcagcuucgugcagcaccccgagcugaccggccuggacugcaucagacccugcuucuggguggagcugaucagaggcagacccaaggagaacaccaucuggaccagcggcagcagcaucagcuucugcggcgugaacagcggcaccgugggcuggagcuggcccgacggcgccgagcugcccuucaccaucgacaaguga

SEQ ID NO: 185990 - RNA, 1410 nt, Artificial Sequence; identical to SEQ ID NO: 180769
  derived and/or modified CDS sequence (opt4) from neuraminidase__InfluenzaA__AJJ99496

SEQ ID NO: 185991 - RNA, 1410 nt, Artificial Sequence
  derived and/or modified CDS sequence (opt4) from neuraminidase__InfluenzaA__AJJ99507
augaaccccaaccagaagaucaucaccaucggcagcgugugcaugaccaucggcauggccaaccugauccugcagaucggcaacaucaucagcaucuggaucagccacagcauccagcugggcaaccagaaccagaucgagaccugcaaccagagcgugaucaccuacgagaacaacaccugggugaaccagaccuacgugaacaucagcaacaccaacuucgccgccggccagagcguggugagcgugaagcuggccggcaacagcagccugugccccgugagcggcugggccaucuacagcaaggacaacagcaucagaaucggcagcaagggcgacguguucgugaucagagagcccuucaucagcugcagcccccuggagugcagaaccuucuuccugacccagggcgcccugcugaacgacaagcacagcaacggcaccaucaaggacagaagccccuacagaacccugaugagcugccccaucggcgaggugcccagccccuacaacagcagauucgagagcguggccuggagcgccagcgccugccacgacggcaucaacuggcugaccaucggcaucagcggccccgacaacggcgccguggccgugcugaaguacaacggcaucaucaccgacaccaucaagagcuggagaaacaacauccugagaacccaggagagcgagugcgccugcgugaacggcagcugcuucaccgugaugaccgacggccccagcgacggccaggccagcuacaagaucuucagaaucgagaagggcaagaucgugaagagcguggagaugaacgcccccaacuaccacuacgaggagugcagcugcuaccccgacagcagcgagaucaccugcgugugcagagacaacuggcacggcgccaacagacccugggugagcuucaaccagaaccuggaguaccagaucggcuacaucugcagcggcaucuucggcgacaaccccagacccaacgacaagaccggcagcugcggccccgugagcagcaacggcgccaacggcgugaagggcuucagcuucaaguacgacaacggcguguggaucggcagaaccaagagcaucagcagcagaaacggcuucgagaugaucugggaccccaacggcuggaccggcaccgacaacgacuucagcaucaagcaggacaucgugggcaucaacgaguggagcggcuacagcggcagcuucgugcagcaccccgagcugaccggccuggacugcaucagacccugcuucuggguggagcugaucagaggcagacccaaggagaacaccaucuggaccagcggcagcagcaucagcuucugcggcgugaacagcgacaccgugggcuggagcuggcccgacggcgccgagcugcccuucaccaucgacaaguga

SEQ ID NO: 185992 - RNA, 1410 nt, Artificial Sequence; identical to SEQ ID NO: 176798
  derived and/or modified CDS sequence (opt4) from neuraminidase__InfluenzaA__AJJ99518

SEQ ID NO: 185993 - RNA, 1410 nt, Artificial Sequence
  derived and/or modified CDS sequence (opt4) from neuraminidase__InfluenzaA__AJJ99529
augaaccccaaccagaagaucaucaccaucggcagcgugugcaugaccaucggcauggccaaccugauccugcaggugggcaacaucaucagcaucuggaucagccacagcauccagcugggcaaccagaaccagaucgagaccugcaaccagagcgugaucaccuacgagaacaacaccugggugaaccagaccuacgugaacaucagcaacaccaacuucgccgccggccagagcguggugagcgugaagcuggccggcaacagcagccugugccccgugagcggcugggccaucuacagcaaggacaacagcaucagaaucggcagcaagggcgacguguucgugaucagagagcccuucaucagcugcagcccccuggagugcagaaccuucuuccugacccagggcgcccugcugaacgacaagcacagcaacggcaccaucaaggacagaagccccuacagaacccugaugagcugccccaucggcgaggugcccagccccuacaacagcagauucgagagcguggccuggagcgccagcgccugccacgacggcuucaacuggcugaccaucggcaucagcggccccgacaacggcgccguggccgugcugaaguacaacggcaucaucaccgacaccaucaagagcuggagaaacaacauccugagaacccaggagagcgagugcgccugcgugaacggcagcugcuucaccaucaugaccgacggccccagcgacggccaggccagcuacaagaucuucagaaucgagaagggcaagaucaucaagagcguggagaugaacgcccccaacuaccacuacgaggagugcagcugcuaccccgacagcagcgagaucaccugcgugugcagagacaacuggcacggcagcaacagacccugggugagcuucaaccagaaccuggaguaccagaucggcuacaucugcagcggcaucuucggcgacaaccccagacccaacgacaagaccggcagcugcggccccgugagcagcaacggcgccaacggcgugaagggcuucagcuucaaguacggcaacggcguguggaucggcagaaccaagagcaucagcagcagaaagggcuucgagaugaucugggaccccaacggcuggaccggcaccgacaacagcuucagcaucaagcaggacaucgugggcaucaacgaguggagcggcuacagcggcagcuucgugcagcaccccgagcugaccggccuggacugcaucagacccugcuucuggguggagcugaucagaggcagacccaaggagaacaccaucuggaccagcggcagcagcaucagcuucugcggcgugaacagcggcaccgugggcuggagcuggcccgacggcgccgagcugcccuucaccaucgacaaguga

SEQ ID NO: 185994 - RNA, 1410 nt, Artificial Sequence
  derived and/or modified CDS sequence (opt4) from neuraminidase__InfluenzaA__AJJ99540
augaaccccaaccagaagaucaucaccaucggcagcgugugcaugaccaucggcauggccaaccugauccugcagaucggcaacaucaucagcaucuggaucagccacagcauccagcugggcaaccagaaccagaucgagaccugcaaccagagcgugaucaccuacgagaacaacaccugggugaaccagaccuacgugaacaucagcaacaccaacuucgccgccggccagagcguggugagcgugaagcuggccggcaacagcagccugugccccgugagcggcugggccaucuacagcaaggacaacagcaucagaaucggcagcaagggcgacguguucgugaucagagagcccuucaucagcugcagcccccuggagugcagaaccuucuuccugacccagggcgcccugcugaacgacaagcacagcaacggcaccaucaaggacagaagccccuacagaacccugaugagcugccccaucggcgaggugcccagccccuacaacagcagauucgagagcguggccuggagcgccagcgccugccacgacggcaucaacuggcugaccaucggcaucagcggccccgacaacggcgccguggccgugcugaaguacaacggcaucaucaccgacaccaucaagagcuggagaaacaacauccugagaacccaggagagcgagugcgccugcgugaacggcagcugcuucaccaucaugaccgacggccccagcgacggccaggccagcuacaagaucuucagaaucgagaagggcaagaucgugaagagcguggagaugaacgcccccaacuaccacuacgaggagugcagcugcuaccccgacagcagcaagaucaccugcgugugcagagacaacuggcacggcagcaacagacccugggugagcuucaaccagaaccuggaguaccagaucggcuacaucugcagcggcaucuucggcgacaaccccagacccaacgacaagaccggcagcugcggccccgugagcagcaacggcgccaacggcgugaagggcuucagcuucaaguacggcaacggcaucuggaucggcagaaccaagagcaucagcagcagaaagggcuucgagaugaucugggaccccaacggcuggaccggcaccgacaacaacuucagcaucaagcaggacaucgugggcaucaacgaguggagcggcuacagcggcagcuucgugcagcaccccgagcugaccggccuggacugcaucagacccugcuucuggguggagcugaucagaggcagacccaaggagaacaccaucuggaccagcggcagcagcaucagcuucugcggcgugaacagcgacaccgugggcuggagcuggcccgacggcgccgagcugcccuucaccaucgacaaguga

SEQ ID NO: 185995 - RNA, 1410 nt, Artificial Sequence
  derived and/or modified CDS sequence (opt4) from neuraminidase__InfluenzaA__AJJ99551
augaaccccaaccagaagaucaucaccaucggcagcgugugcaugaccaucggcauggccaaccugauccugcagaucggcaacaucaucagcaucuggaucagccacagcauccagcugggcaaccagagccagaccgagaccugcaaccagagcgugaucaccuacgagaacaacaccugggugaaccagaccuacgugaacaucagcaacaccaaccccgccgccggccagagcguggugagcgugaagcuggccggcaacagcagccugugccccgugagcggcugggccaucuacagcaaggacaacagcaucagaaucggcagcaagggcgacguguucgugaucagagagcccuucaucagcugcagcagccuggagugcagaaccuucuuccugacccagggcgcccugcugaacgacaagcacagcaacggcaccaucaaggacagaagccccuacagaacccugaugagcugccccaucggcgaggugcccagccccuacaacagcagauucgagagcguggccuggagcgccagcgccugccacgacggcaucaacuggcugaccaucggcaucagcggccccgacaacggcgccguggccgugcugaaguacaacggcaucaucaccgacaccaucaagagcuggagaaacaacauccugagaacccaggagagcgagugcgccugcgugaacggcagcugcuucaccaucaugaccgacggccccagcgacggccaggccagcuacaagaucuucagaaucgagaagggcaagaucgugaagagcguggagaugaacgcccccaacuaccacuacgaggagugcagcugcuaccccgacagcagcgagaucaccugcgugugcagagacaacuggcacggcagcaacagacccugggugagcuucaaccagaaccuggaguaccagaucggcuacaucugcagcggcaucuucggcgacaaccccagacccaacgacaagaccggcagcugcggccccgugagcagcaacggcgccaacggcgugaagggcuucagcuucaaguacggcaacggcguguggaucggcagaaccaagagcaucagcagcagaaagggcuucgagaugaucugggaccccaacggcuggaccggcaccgacaacaacuucagcaucaagcaggacaucgugggcaucaacgaguggagcggcuacagcggcagcuucgugcagcaccccgagcugaccggccuggacugcaucagacccugcuucuggguggagcugaucagaggcagacccaaggagaacaccaucuggaccagcggcagcagcaucagcuucugcggcgugaacagcgacaccgugggcuggagcuggcccgacggcgccgagcugcccuucaccaucgacaaguga

SEQ ID NO: 185996 - RNA, 1410 nt, Artificial Sequence; identical to SEQ ID NO: 180785
  derived and/or modified CDS sequence (opt4) from neuraminidase__InfluenzaA__AJJ99562

SEQ ID NO: 185997 - RNA, 1410 nt, Artificial Sequence
  derived and/or modified CDS sequence (opt4) from neuraminidase__InfluenzaA__AJJ99573
augaaccccaaccagaagaucaucaccaucggcagcgugugcaugaccaucggcauggccaaccugauccugcagaucggcaacaucaucagcaucuggaucagccacagcauccagcugggcaaccagagccagaucgagaccugcaaccagagcgugaucaccuacgagaacaacaccugggugaaccagaccuacgugaacaucagcaacaccaacuucgccgccggccagagcguggugagcgugaagcuggccggcaacagcagccugugccccgugagcggcugggccaucuacagcaaggacaacagcaucagaaucggcagcaagggcgacguguucgugaucagagagcccuucaucagcugcagcccccuggagugcagaaccuucuuccugacccagggcgcccugcugaacgacaagcacagcaacggcaccaucaaggacagaagccccuacagaacccugaugagcugccccaucggcgaggugcccagccccuacaacagcagauucgagagcguggccuggagcgccagcgccugccacgacggcaucaacuggcugaccaucggcaucagcggccccgacaacggcgccguggccgugcugaaguacaacggcaucaucaccgacaccaucaagagcuggagaaacaacauccugagaacccaggagagcgagugcgccugcgugaacggcagcugcuucaccaucaugaccgacggccccagcgacggccaggccagcuacaagaucuucagaaucgagaagggcaagaucgugaagagcguggagaugaacgcccccaacuaccacuacgaggagugcagcugcuaccccgacagcagcgagaucaccugcgugugcagagacaacuggcacggcagcaacagacccugggugagcuucaaccagaaccuggaguaccagaucggcuacaucugcagcggcaucuucggcgacaaccccagacccaacgacaagaccggcagcugcggccccgugagcagcaacggcgccaacggcgugaagggcuucagcuucaaguacggcaacggcguguggaucggcagaaccaagagcaucagcagcagaaagggcuucgagaugaucugggaccccaacggcuggaccggcaccgacaacaacuucagcaucaagcaggacguggugggcaucaacgaguggagcggcuacagcggcagcuucgugcagcaccccgagcugaccggccuggacugcaucagacccugcuucuggguggagcugaucagaggcagacccaaggagaacaccaucuggaccagcggcagcagcaucagcuucugcggcgugaacagcgacaccgugggcuggagcuggcccgacggcgccgagcugcccuucaccaucgacaaguga

SEQ ID NO: 185998 - RNA, 1410 nt, Artificial Sequence; identical to SEQ ID NO: 185975
  derived and/or modified CDS sequence (opt4) from neuraminidase__InfluenzaA__AJJ99584

SEQ ID NO: 185999 - RNA, 1410 nt, Artificial Sequence
  derived and/or modified CDS sequence (opt4) from neuraminidase__InfluenzaA__AJJ99595
augaaccccaaccagaagaucaucaccaucggcagcgugugcaugaccaucggcauggccaaccugaucuuccagaucggcaacaucaucagcaucuggaucagccacagcauccagcugggcaaccagaaccagaucgagaccugcaaccagagcgugaucaccuacgagaacaacaccugggugaaccagaccuacgugaacaucagcaacaccaacuucgccgccggccagagcguggugagcgugaagcuggccggcaacagcagccugugccccgugagcggcugggccaucuacagcaaggacaacagcaucagaaucggcagcaagggcgacguguucgugaucagagagcccuucaucagcugcagcccccuggagugcagaaccuucuuccugacccagggcgcccugcugaacgacaagcacagcaacggcaccaucaaggacagaagccccuacagaacccugaugagcugccccaucggcgaggugcccagccccuacaacagcagauucgagagcguggccuggagcgccagcgccugccacgacggcaucaacuggcugaccaucggcaucagcggccccgacaacggcgccguggccgugcugaaguacaacggcaucaucaccgacaccaucaagagcuggagaaacaacauccugagaacccaggagagcgagugcgccugcgugaacggcagcugcuucaccgugaugaccgacggccccagcgacggccaggccagcuacaagaucuucagaaucgagaagggcaagaucgugaagagcguggagaugaacgcccccaacuaccacuacgaggagugcagcugcuaccccgacagcagcgagaucaccugcgugugcagagacaacuggcacggcagcaacagacccugggugagcuucaaccagaaccuggaguaccagaucggcuacaucugcagcggcaucuucggcgacaaccccagacccaacgacaagaccggcagcugcggccccgugagcagcaacggcgccaacggcgugaagggcuucagcuucaaguacggcaacggcguguggaucggcagaaccaagagcaucagcagcagaaacggcuucgagaugaucugggaccccaacggcuggaccggcaccgacaacaacuucagcaucaagcaggacaucgugggcaucaacgaguggagcggcuacagcggcagcuucgugcagcaccccgagcugaccggccuggacugcaucagacccugcuucuggguggagcugaucagaggcagacccaaggagaacaccaucuggaccagcggcagcagcaucagcuucugcggcgugaacagcgacaccgugggcuggagcuggcccgacggcgccgagcugcccuucaccaucgacaaguga

SEQ ID NO: 186000 - RNA, 1410 nt, Artificial Sequence
  derived and/or modified CDS sequence (opt4) from neuraminidase__InfluenzaA__AJJ99606
augaaccccaaccagaagaucaucaccaucggcagcgugugcaugaccaucggcauggccaaccugauccugcagaucggcaacaucaucagcaucuggaucagccacagcauccagcugggcaaccagaaccagaucgagaccugcaaccagagcgugaucaccuacgagaacaacaccugggugaaccagaccuacgugaacaucagcaacaccaacuucgccgccggccagagcguggugagcgugaagcuggccggcaacagcagccugugccccgugagcggcugggccaucuacagcaaggacaacagcaucagaaucggcagcaagggcgacguguucgugaucagagagcccuucaucagcugcagcccccuggagugcagaaccuucuuccugacccagggcgcccugcugaacgacaagcacagcaacggcaccaucaaggacagaagccccuacagaacccugaugagcugccccaucggcgaggugcccagccccuacaacagcagauucgagagcguggccuggagcgccagcgccugccacgacggcaucaacuggcugaccaucggcaucagcggccccgacaacggcgccguggccgugcugaaguacaacggcgugaucaccgacaccaucaagagcuggagaaacaacauccugagaacccaggagagcgagugcgccugcgugaacggcagcugcuucaccgugaugaccgacggccccagcgacggccaggccagcuacaagaucuucagaaucgagaagggcaagaucgugaagagcguggagaugaacgcccccaacuaccacuacgaggagugcagcugcuaccccgacagcagcgagaucaccugcgugugcagagacaacuggcacggcagcaacagacccugggugagcuucaaccagaaccuggaguaccagaucggcuacaucugcagcggcaucuucggcgacaaccccagacccaacgacaagaccggcagcugcggccccgugagcagcaacggcgccaacggcgugaagggcuucagcuucaaguacggcaacggcguguggaucggcagaaccaagagcaucagcagcagaaacggcuucgagaugaucugggaccccaacggcuggaccggcaccgacaacaacuucagcaucaagcaggacaucgugggcaucaacgaguggagcggcuacagcggcagcuucgugcagcaccccgagcugaccggccuggacugcaucagacccugcuucuggguggagcugaucagaggcagacccaaggagaacaccaucuggaccagcggcagcagcaucagcuucugcggcgugaacagcgacaccgugggcuggagcuggcccgacggcgccgagcugcccuucaccaucgacaaguga

SEQ ID NO: 186001 - RNA, 1413 nt, Artificial Sequence; identical to SEQ ID NO: 177521
  derived and/or modified CDS sequence (opt4) from neuraminidase__InfluenzaA__AJJ99618

SEQ ID NO: 186002 - RNA, 1413 nt, Artificial Sequence
  derived and/or modified CDS sequence (opt4) from neuraminidase__InfluenzaA__AJJ99630
augaaccccaaccagaagaucaucaccaucggcagcaucagcaucgccaucggcaucaucagccugaugcugcagaucggcaacaucaucagcaucugggccagccacagcauccagaccggcagccagaacaacaccggcaucugcaaccagagaaucaucaccuacgagaacagcaccugggugaaccacaccuacgugaacaucaacaacaccaacgugguggccggcgaggacaagaccagcgugacccuggccggcaacagcagccugugcagcaucagcggcugggccaucuacaccaaggacaacagcaucagaaucggcagcaagggcgacguguucgugaucagagagcccuucaucagcugcagccaccuggagugcagaaccuucuuccugacccagggcgcccugcugaacgacaagcacagcaacggcaccgugaaggacagaagccccuacagagcccugaugagcugcccccugggcgaggcccccagccccuacaacagcaaguucgagagcguggccuggagcgccagcgccugccacgacggcaugggcuggcugaccaucggcaucagcggccccgacaacggcgccguggccgugcugaaguacaacggcaucaucaccggcaccaucaagagcuggaagaagcagauccugagaacccaggagagcgagugcgugugcaugaacggcagcugcuucaccaucaugaccgacggccccagcaacaaggccgccagcuacaagaucuucaagaucgagaagggcaaggugaccaagagcaucgagcugaacgcccccaacuucuacuacgaggagugcagcugcuaccccgacaccggcaucgugaugugcgugugcagagacaacuggcacggcagcaacagacccugggugagcuucaaccagaaccuggacuaccagaucggcuacaucugcagcggcguguucggcgacaaccccagacccgaggacggcgagggcagcugcaaccccgugaccguggacggcgccaacggcgugaagggcuucagcuacaaguacggcaacggcguguggaucggcagaaccaagagcaacagacugagaaagggcuucgagaugaucugggaccccaacggcuggaccaacaccgacagcgacuucagcaugaagcagaacgugguggccaucaccgacuggagcggcuacagcggcagcuucgugcagcaccccgagcugaccggccuggacugcaucagacccugcuucuggguggagcuggugagaggccugcccagagagaacaccaccaucuggaccagcggcagcagcaucagcuucugcggcgugaacagcgacaccgccaacuggagcuggcccgacggcgccgagcugcccuucaccaucgacaaguga

SEQ ID NO: 186003 - RNA, 1413 nt, Artificial Sequence; identical to SEQ ID NO: 177521
  derived and/or modified CDS sequence (opt4) from neuraminidase__InfluenzaA__AJJ99642

SEQ ID NO: 186004 - RNA, 1413 nt, Artificial Sequence; identical to SEQ ID NO: 177521
  derived and/or modified CDS sequence (opt4) from neuraminidase__InfluenzaA__AJJ99654

SEQ ID NO: 186005 - RNA, 1413 nt, Artificial Sequence
  derived and/or modified CDS sequence (opt4) from neuraminidase__InfluenzaA__AJJ99666
augaaccccaaccagaagaucaucaccaucggcagcaucagcaucgccaucggcaucaucagccugaugcugcagaucggcaacaucaucagcaucugggccagccacagcauccagaccggcagccagaacaacaccggcaucugcaaccagagaaucaucaccuacgagaacagcaccugggugaaccacaccuacgugaacaucaacaacaacaacgugguggccggcgaggacaagaccagcgugacccuggccggcaacagcagccugugcagcaucagcggcugggccaucuacaccaaggacaacagcaucagaaucggcagcaagggcgacguguucgugaucagagagcccuucaucagcugcagccaccuggagugcagaaccuucuuccugacccagggcgcccugcugaacgacaagcacagcaacggcaccgugaaggacagaagccccuacagagcccugaugagcugcccccugggcgaggcccccagccccuacaacagcaaguucgagagcguggccuggagcgccagcgccugccacgacggcaugggcuggcugaccaucggcaucagcggccccgacaacggcgccguggccgugcugaaguacaacggcaucaucaccggcaccaucaagagcuggaagaagcagauccugagaacccaggagagcgagugcgugugcaugaacggcagcugcuucaccaucaugaccgacggccccagcaacaaggccgccagcuacaagaucuucaagaucgagaagggcaaggugaccaagagcaucgagcugaacgcccccaacuuccacuacgaggagugcagcugcuaccccgacaccggcaucgugaugugcgugugcagagacaacuggcacggcagcaacagacccugggugagcuucaaccagaaccuggacuaccagaucggcuacaucugcagcggcguguucggcgacaaccccagacccgaggacggcgagggcagcugcaaccccgugaccguggacggcgccaacggcgugaagggcuucagcuacaaguacgacaacggcguguggaucggcagaaccaagagcaacagacugagaaagggcuucgagaugaucugggaccccaacggcuggaccaacaccgacagcgacuucagcgugaagcaggacgugguggccaucaccgacuggagcggcuacagcggcagcuucgugcagcaccccgagcugaccggccuggacugcaucagacccugcuucuggguggagcuggugagaggccugcccagagagaacaccaccaucuggaccagcggcagcagcaucagcuucugcggcgugaacagcgacaccgccaacuggagcuggcccgacggcgccgagcugcccuucaccaucgacaaguga

SEQ ID NO: 186006 - RNA, 1410 nt, Artificial Sequence
  derived and/or modified CDS sequence (opt4) from neuraminidase__InfluenzaA__AJJ99677
augaaccccaaccagaagaucaucaccaucggcagcgugugcaugaccaucggcauggccaaccugauccugcagaucggcaacaucaucagcaucuggaucagccacagcauccagcugggcaaccagaaccagaucgagaccugcaaccagagcgugaucaccuacgagaacaacaccugggugaaccagaccuacgugaacaucagcaacaccaacuucgccgccggccagagcguggugagcgugaagcuggccggcaacagcagccugugccccgugagcggcugggccaucuacagcaaggacaacagcaucagaaucggcagcaagggcgacguguucgugaucagagagcccuucaucagcugcagcccccuggagugcagaaccuucuuccugacccagggcgcccugcugaacgacaagcacagcaacggcaccaucaaggacagaagccccuacagaacccugaugagcugccccaucggcgaggugcccagccccuacaacagcagauucgagagcguggccuggagcgccagcgccugccacgacggcaucaacuggcugaccaucggcaucagcggccccgacaacggcgccguggccgugcugaaguacaacggcaucaucaccgacaccaucaagagcuggagaaacaacauccugagaacccaggagagcgagugcgccugcgugaacggcagcugcuucaccaucaugaccgacggccccagcgacggccaggccagcuacaagaucuucagaaucgagaagggcaagaucaucaagagcguggagaugaacgcccccaacuaccacuacgaggagugcagcugcuaccccgacagcagcgagaucaccugcgugugcagagacaacuggcacggcagcaacagacccugggugagcuucaaccagaaccuggaguaccagaucggcuacaucugcagcggcaucuucggcgacaaccccagacccaacgacaagaccggcagcugcggccccgugagcagcaacggcgccaacggcgugaagggcuucagcuucaaguacggcaacggcguguggaucggcagaaccaagagcaucagcagcagaaagggcuucgagaugaucugggaccccaacggcuggaccggcaccgacaacagcuucagcaucaagcaggacaucgugggcaugaacgaguggagcggcuacagcggcagcuucgugcagcaccccgagcugaccggccuggacugcaucagacccugcuucuggguggagcugaucagaggcagacccaaggagaacaccaucuggaccagcggcagcagcaucagcuucugcggcgugaacagcggcaccgugggcuggagcuggcccgacggcgccgagcugcccuucaccaucgacaaguga

SEQ ID NO: 186007 - RNA, 1410 nt, Artificial Sequence
  derived and/or modified CDS sequence (opt4) from neuraminidase__InfluenzaA__AJJ99688
augaaccccaaccagaagaucaucaccaucggcagcgugugcaugaccaucggcauggccaaccugauccugcagaucggcaacaucaucagcaucuggaucagccacagcauccagcugggcaaccagaaccagaucgagaccugcaaccagagcgugaucaccuacgagaacaacaccugggugaaccagaccuacgugaacaucagcaacaccaacuucgccgccggccagagcguggugagcgugaagcuggccggcaacagcagccugugccccgugagcggcugggccaucuacagcaaggacaacagcaucagaaucggcagcaagggcgacguguucgugaucagagagcccuucaucagcugcagcccccuggagugcagaaccuucuuccugacccagggcgcccugcugaacgacaagcacagcaacggcaccaucaaggacagaagccccuacagaacccugaugagcugccccaucggcgaggugcccagccccuacaacagcagauucgagagcguggccuggagcgccagcgccugccacgacggcaucaacuggcugaccaucggcaucagcggccccgacaacggcgccguggccgugcugaaguacaacggcaucaucaccgacaccaucaagagcuggagaaacaacauccugagaacccaggagagcgagugcgccugcgugaacggcagcugcuucaccaucaugaccgacggccccagcgacggccaggccagcuacaagaucuucagaaucgagaagggcaagaucaucaagagcguggagaugaacgcccccaacuaccacuacgaggagugcagcugcuaccccgacagcagcgagaucaccugcgugugcagagacaacuggcacggcagcaacagacccugggugagcuucaaccagaaccuggaguaccagaucggcuacaucugcagcggcaucuucggcgacaaccccagacccaacgacaagaccggcagcugcggccccgugagcagcaacggcgccaacggcgugaagggcuucagcuucaaguacggcaacggcguguggaucggcagaaccaagagcaucagcagcagaaagggcuucgagaugaucugggaccccaacggcuggaccggcaccgacaacagcuucagcaucaagcaggacaucgugggcaucaacgaguggagcggcuacagcggcagcuucgugcagcaccccgagcugaccggccuggacugcaucagacccugcuucuggguggagcugaucagaggcagacccaaggagaacaccaucuggaccagcggcagcagcaucagcuucugcggcgugaacagcggcaccgugggcuggagcuggcccgacggcgccgagcugcccuucaccaucgacaaguga

SEQ ID NO: 186008 - RNA, 1410 nt, Artificial Sequence
  derived and/or modified CDS sequence (opt4) from neuraminidase__InfluenzaA__AJJ99710
augaaccccaaccagaagaucaucaccaucggcagcgugugcaugaccaucggcauggccaaccugauccugcagaucggcaacaucaucagcaucuggaucagccacagcauccagcugggcaaccagagccagaucgagaccugcaaccagagcgugaucaccuacgagaacaacaccugggugaaccagaccuacgugaacaucagcaacaccaacuucgccgccggccagagcguggugagcgugaagcuggccggcaacagcagccugugccccgugagcggcugggccaucuacagcaaggacaacagcaucagaaucggcagcaagggcgacguguucgugaucagagagcccuucaucagcugcagcccccuggagugcagaaccuucuuccugacccagggcgcccugcugaacgacaagcacagcaacggcaccaucaaggacagaagccccuacagaacccugaugagcugccccaucggcgaggugcccagccccuacaacagcagauucgagagcguggccuggagcgccagcgccugccacgacggcaucaacuggcugaccaucggcaucagcggccccgacaacggcgccguggccgugcugaaguacaacggcaucaucaccgacaccaucaagagcuggagaaacaacauccugagaacccaggagagcgagugcgccugcgugaacggcagcugcuucaccaucaugaccgacggccccagcgacggccaggccagcuacaagaucuucagaaucgagaagggcaagaucgugaagagcguggagaugaacgcccccaacuaccacuacgaggagugcagcugcuaccccgacagcagcaagaucaccugcgugugcagagacaacuggcacggcagcaacagacccugggugagcuucaaccagaaccuggaguaccagaucggcuacaucugcagcggcaucuucggcgacaaccccagacccaacgacaagaccggcagcugcggccccgugagcagcaacggcgccaacggcgugaagggcuucagcuucaaguacggcaacggcguguggaucggcagaaccaagagcaucagcagcagaaagggcuucgagaugaucugggaccccaacggcuggaccggcaccgacaacaacuucagcaucaagcaggacaucgugggcaucaacgaguggagcggcuacagcggcagcuucgugcagcaccccgagcugaccggccuggacugcaucagacccugcuucuggguggagcugaucagaggcagacccaaggagaacaccaucuggaccagcggcagcagcaucagcuucugcggcgugaacagcgacaccgugggcuggagcuggcccgacggcgccgagcugcccuucaccaucgacaaguga

SEQ ID NO: 186009 - RNA, 1410 nt, Artificial Sequence; identical to SEQ ID NO: 180317
  derived and/or modified CDS sequence (opt4) from neuraminidase__InfluenzaA__AJJ99721

SEQ ID NO: 186010 - RNA, 1410 nt, Artificial Sequence; identical to SEQ ID NO: 180317
  derived and/or modified CDS sequence (opt4) from neuraminidase__InfluenzaA__AJJ99732

SEQ ID NO: 186011 - RNA, 1410 nt, Artificial Sequence; identical to SEQ ID NO: 181017
  derived and/or modified CDS sequence (opt4) from neuraminidase__InfluenzaA__AJJ99743

SEQ ID NO: 186012 - RNA, 1410 nt, Artificial Sequence; identical to SEQ ID NO: 178351
  derived and/or modified CDS sequence (opt4) from neuraminidase__InfluenzaA__AJJ99754

SEQ ID NO: 186013 - RNA, 1410 nt, Artificial Sequence
  derived and/or modified CDS sequence (opt4) from neuraminidase__InfluenzaA__AJJ99765
augaaccccaaccagaagaucaucaccaucggcagcgugugcaugaccaucggcauggccaaccugauccugcagaucggcaacaucaucagcaucuggaucagccacagcauccagcugggcaaccagaaccagaucgagaccugcaaccagagcgugaucaccuacgagaacaacaccugggugaaccagaccuacgugaacaucagcaacaccaacuucgccaccggccagagcguggugagcgugaagcuggccggcaacagcagccugugccccgugagcggcugggccaucuacagcaaggacaacagcaucagaaucggcagcaagggcgacguguucgugaucagagagcccuucaucagcugcagcccccuggagugcagaaccuucuuccugacccagggcgcccugcugaacgacaagcacagcaacggcaccaucaaggacagaagccccuacagaacccugaugagcugccccaucggcgaggugcccagccccuacaacagcagauucgagagcguggccuggagcgccagcgccugccacgacggcaucaacuggcugaccaucggcaucagcggccccgacaacggcgccguggccgugcugaaguacaacggcaucaucaccgacaccaucaagagcuggagaaacaacauccugagaacccaggagagcgagugcgccugcgugaacggcagcugcuucaccgugaugaccgacggccccagcgacggccaggccagcuacaagaucuucagaaucgagaagggcaagaucgugaagagcguggagaugaacgcccccaacuaccacuacgaggagugcagcugcuaccccgacagcagcgagaucaccugcgugugcagagacaacuggcacggcagcaacagacccugggugagcuucaaccagaaccuggaguaccagaucggcuacaucugcagcggcaucuucggcgacaaccccagacccaacgacaagaccggcagcugcggccccgugagcagcaacggcgccaacggcgugaagggcuucagcuucaaguacggcaacggcguguggaucggcagaaccaagagcaucagcagcagaaacggcuucgagaugaucugggaccccaacggcuggaccggcaccgacaacaacuucagcaucaagcaggacaucgugggcaucaacgaguggagcggcuacagcggcagcuucgugcagcaccccgagcugaccggccuggacugcaucagacccugcuucuggguggagcugaucagaggcagacccaaggagaacaccaucuggaccagcggcagcagcaucagcuucugcggcgugaacagcgacaccgugggcuggagcuggcccgacggcgccgagcugcccuucaccaucgacaaguga

SEQ ID NO: 186014 - RNA, 1413 nt, Artificial Sequence
  derived and/or modified CDS sequence (opt4) from neuraminidase__InfluenzaA__AJJ99777
augaaccccaaccagaagaucaucaccaucggcagcaucagcaucgccaucggcaucaucagccugauccugcagaucggcaacaucaucagcaucugggccagccacagcauccagaccggcagccagaacaacaccggcaucugcaaccagagaaucaucaccuacgagaacagcaccugggugaaccacaccuacgugaacaucaacaacaccaacgugguggccggcgaggacaagaccagcgugacccuggccggcaacagcagccugugcagcaucagcggcugggccaucuacaccaaggacaacagcaucagaaucggcagcaagggcgacguguucgugaucagagagcccuucaucagcugcagccaccuggagugcagaaccuucuuccugacccagggcgcccugcugaacgacaagcacagcaacggcaccgugaaggacagaagccccuacagagcccugaugagcugcccccugggcgaggcccccagccccuacaacagcaaguucgagagcguggccuggagcgccagcgccugccacgacggcaugggcuggcugaccaucggcaucagcggccccgacaacggcgccguggccgugcugaaguacaacggcaucaucaccggcaccaucaagagcuggaagaagcagauccugagaacccaggagagcgagugcgugugcaugaacggcagcugcuucaccaucaugaccgacggccccagcaacaaggccgccagcuacaagaucuucaagaucgagaagggcaaggugaccaagagcaucgagcugaacgcccccaacuucuacuacgaggagugcagcugcuaccccgacaccggcaucgugaugugcgugugcagagacaacuggcacggcagcaacagacccugggugagcuucaaccagaaccuggacuaccagaucggcuacaucugcagcggcguguucggcgacaaccccagacccgaggacggcgagggcagcugcaaccccgugaccguggacggcgccaacggcgugaagggcuucagcuacaaguacggcaacggcguguggaucggcagaaccaagagcaacagacugagaaagggcuucgagaugaucugggaccccaacggcuggaccaacaccgacagcgacuucagcgugaagcaggacgugguggccaucaccgacuggagcggcuacagcggcagcuucgugcagcaccccgagcugaccggccuggacugcaucagacccugcuucuggguggagcuggugagaggccugcccagagagaacaccgccguguggaccagcggcagcagcaucagcuucugcggcgugaacagcgacaccgccaacuggagcuggcccgacggcgccgagcugcccuucaccaucgacaaguga

SEQ ID NO: 186015 - RNA, 1410 nt, Artificial Sequence; identical to SEQ ID NO: 176798
  derived and/or modified CDS sequence (opt4) from neuraminidase__InfluenzaA__AJJ99788

SEQ ID NO: 186016 - RNA, 1413 nt, Artificial Sequence
  derived and/or modified CDS sequence (opt4) from neuraminidase__InfluenzaA__AJJ99800
augaaccccaaccagaagaucaucaccaucggcagcaucagcaucgccaucggcaucaucagccugaugcugcagaucggcaacaucaucagcaucugggccagccacagcauccagaccggcagccagaacaacaccggcaucugcaaccagagaaucaucaccuacgagaacagcaccugggugaaccacaccuacgugaacaucaacaacaccaacgugguggccggcgaggacaagaccagcgugacccuggccggcaacagcagccugugcagcaucagcggcugggccaucuacaccaaggacaacagcaucagaaucggcagcaagggcgacguguucgugaucagagagcccuucaucagcugcagccaccuggagugcagaaccuucuuccugacccagggcgcccugcugaacgacaagcacagcaacggcaccgugaaggacagaagccccuacagagcccugaugagcugcccccugggcgaggcccccagccccuacaacagcaaguucgagagcguggccuggagcgccagcgccugccacgacggcaugggcuggcugaccaucggcaucagcggccccgacaacggcgccguggccgugcugaaguacaacggcaucaucaccggcaccaucaagagcuggaagaagcagauccugagaacccaggagagcgagugcgugugcaugaacggcagcugcuucaccaucaugaccgacggccccagcaacaaggccgccagcuacaagaucuucaagaucgagaagggcaaggugaccaagagcaucgagcugaacgcccccaacuucuacuacgaggagugcagcugcuaccccgacaccggcaucgugaugugcgugugcagagacaacuggcacggcagcaacagacccugggugagcuucaaccagaaccuggacuaccagaucggcuacaucugcagcggcguguucggcgacaaccccagacccgaggacggcgagggcagcugcaaccccgugaccguggacggcgccaacggcgugaagggcuucagcuacaaguacggcaacggcguguggaucggcagaaccaagagcaacagacugagaaagggcuucgagaugaucugggaccccaacggcuggaccaacaccgacagcgacuucagcgugaagcaggacgugguggccaucaccgacuggagcggcuacagcggcagcuucgugcagcaccccgagcugaccggccuggacugcaucagacccugcuucuggguggagcuggugagaggccugcccagagagaacaccaccaucuggaccagcggcagcagcaucagcuucugcggcgugaacagcgacaccgccaacuggagcuggcccgacggcgccgagcugcccuucaucaucgacaaguga

SEQ ID NO: 186017 - RNA, 1413 nt, Artificial Sequence; identical to SEQ ID NO: 177521
  derived and/or modified CDS sequence (opt4) from neuraminidase__InfluenzaA__AJJ99812

SEQ ID NO: 186018 - RNA, 1413 nt, Artificial Sequence
  derived and/or modified CDS sequence (opt4) from neuraminidase__InfluenzaA__AJJ99824
augaaccccaaccagaagaucaucaccaucggcagcaucagcaucgccaucggcaccaucagccugaugcugcagaucggcaacaucaucagcaucugggccagccacagcauccagaccggcagccagaacaacaccggcaucugcaaccagagaaucaucaccuacgagaacagcaccugggugaaccacaccuacgugaacaucaacaacaccaacgugguggccggcgaggacaagaccagcgugacccuggccggcaacagcagccugugcagcaucagcggcugggccaucuacaccaaggacaacagcaucagaaucggcagcaagggcgacguguucgugaucagagagcccuucaucagcugcagccaccuggagugcagaaccuucuuccugacccagggcgcccugcugaacgacaagcacagcaacggcaccgugaaggacagaagccccuacagagcccugaugagcugcccccugggcgaggcccccagccccuacaacagcaaguucgagagcguggccuggagcgccagcgccugccacgacggcaugggcuggcugaccaucggcaucagcggccccgacaacggcgccguggccgugcugaaguacaacggcaucaucaccggcaccaucaagagcuggaagaagcagauccugagaacccaggagagcgagugcgugugcaugaacggcagcugcuucaccaucaugaccgacggccccagcaacaaggccgccagcuacaagaucuucaagaucgagaagggcaaggugaccaagagcaucgagcugaacgcccccaacuuccacuacgaggagugcagcugcuaccccgacaccggcaucgugaugugcgugugcagagacaacuggcacggcagcaacagacccugggugagcuucaaccagaaccuggacuaccagaucggcuacaucugcagcggcguguucggcgacaaccccagacccgaggacggcgagggcagcugcaaccccgugaccguggacggcgccaacggcgugaagggcuucagcuacaaguacgacaacggcguguggaucggcagaaccaagagcaacagacugagaaagggcuucgagaugaucugggaccccaacggcuggaccaacaccgacagcgacuucagcgugaagcaggacgugguggccaucaccgacuggagcggcuacagcggcagcuucgugcagcaccccgagcugaccggccuggacugcaucagacccugcuucuggguggagcuggugagaggccugcccagagagaacaccaccaucuggaccagcggcagcagcaucagcuucugcggcgugaacagcgacaccgccaacuggagcuggcccgacggcgccgagcugcccuucaccaucgacaaguga

SEQ ID NO: 186019 - RNA, 1410 nt, Artificial Sequence; identical to SEQ ID NO: 186007
  derived and/or modified CDS sequence (opt4) from neuraminidase__InfluenzaA__AJJ99835

SEQ ID NO: 186020 - RNA, 1410 nt, Artificial Sequence; identical to SEQ ID NO: 180317
  derived and/or modified CDS sequence (opt4) from neuraminidase__InfluenzaA__AJJ99846

SEQ ID NO: 186021 - RNA, 1410 nt, Artificial Sequence; identical to SEQ ID NO: 180317
  derived and/or modified CDS sequence (opt4) from neuraminidase__InfluenzaA__AJJ99857

SEQ ID NO: 186022 - RNA, 1410 nt, Artificial Sequence
  derived and/or modified CDS sequence (opt4) from neuraminidase__InfluenzaA__AJJ99868
augaaccccaaccagaagaucaucaccaucggcagcgugugcaugaccaucggcauggccaaccugauccugcagaucggcaacaucaucagcaucuggaucagccacagcauccagcugggcaaccagaaccagaucgagaccugcaaccagagcgugaucaccuacgagaacaacaccugggugaaccagaccuacgugaacaucagcaacaccaacuucgccgccggccagagcguggugagcgugaagcuggccggcaacagcagccugugccccgugagcggcugggccaucuacagcaaggacaacagcaucagaaucggcagcaagggcgacguguucgugaucagagagcccuucaucagcugcagcccccuggagugcagaaccuucuuccugacccagggcgcccugcugaacgacaagcacagcaacggcaccaucaaggacagaagccccuacagaacccugaugagcugccccaucggcgaggugcccagccccuacaacagcagauucgagagcguggccuggagcgccagcgccugccacgacggcaucaacuggcugaccaucggcaucagcggccccgacaacggcgccguggccgugcugaaguacaacggcaucaucaccgacaccaucaagagcuggagaaacaacauccugagaacccaggagagcgagugcgccugcgugaacggcagcugcuucaccgugaugaccgacggccccagcgacggccaggccagcuacaagaucuucagaaucgagaagggcaagaucgugaagagcguggagaugaacgcccccaacuaccacuacgaggagugcagcugcuaccccgacagcagcgugaucaccugcgugugcagagacaacuggcacggcagcaacagacccugggugagcuucaaccagaaccuggaguaccagaucggcuacaucugcagcggcaucuucggcgacaaccccagacccaacgacaagaccggcagcugcggccccgugagcagcaacggcgccaacggcgugaagggcuucagcuucaaguacggcaacggcguguggaucggcagaaccaagagcaucagcagcagaaacggcuucgagaugaucugggaccccaacggcuggaccggcaccgacaacaacuucagcaucaagcagaacaucgugggcaucaacgaguggagcggcuacagcggcagcuucgugcagcaccccgagcugaccggccuggacugcaucagacccugcuucuggguggagcugaucagaggcagacccaaggagaacaccaucuggaccagcggcagcagcaucagcuucugcggcgugaacagcgacaccgugggcuggagcuggcccgacggcgccgagcugcccuucaccaucgacaaguga

SEQ ID NO: 186023 - RNA, 1410 nt, Artificial Sequence; identical to SEQ ID NO: 179217
  derived and/or modified CDS sequence (opt4) from neuraminidase__InfluenzaA__AJJ99879

SEQ ID NO: 186024 - RNA, 1410 nt, Artificial Sequence; identical to SEQ ID NO: 176798
  derived and/or modified CDS sequence (opt4) from neuraminidase__InfluenzaA__AJJ99890

SEQ ID NO: 186025 - RNA, 1410 nt, Artificial Sequence
  derived and/or modified CDS sequence (opt4) from neuraminidase__InfluenzaA__AJJ99901
augaaccccaaccagaagaucaucaccaucggcagcgugugcaugaccaucggcauggccaaccugauccugcagaucggcaacaucaucagcaucuggaucagccacagcauccagcugggcaaccagaaccagaucgagaccugcaaccagagcgugaucaccuacgagaacaacaccugggugaaccagaccuacgugaacaucagcaacaccaacuucgccgccggccagagcguggugagcgugaagcuggccggcaacagcagccugugccccgugagcggcugggccaucuacagcaaggacaacagcaucagaaucggcagcaagggcgacguguucgugaucagagagcccuucaucagcugcagcccccuggagugcagaaccuucuuccugacccagggcgcccugcugaacgacaagcacagcaacggcaccaucaaggacagaagccccuacagaacccugaugagcugccccaucggcgaggugcccagccccuacaacagcagauucgagagcguggccuggagcgccagcgccugccacgacggcaucaacuggcugaccaucggcaucagcggccccgacaacggcgccguggccgugcugaaguacaacggcaucaucaccgacaccaucaagagcuggagaaacaacauccugagaacccaggagagcgagugcgccugcgugaacggcagcugcuucaccaucaugaccgacggccccagcgacggccaggccagcuacaagaucuucagaaucgagaagggcaagaucgugaagagcguggagaugaacgcccccaacuaccacuacgaggagugcagcugcuaccccgacagcagcgagaucaccugcgugugcagagacaacuggcacggcagcaacagacccugggugagcuucaaccagaaccuggaguaccagaucggcuacaucugcagcggcaucuucggcgacaaccccagacccaacgacaagaccggcagcugcggccccgugagcagcaacggcgccaacggcgugaagggcuucagcuucaaguacggcaacggcguguggaucggcagaaccaagagcaucagcagcagaaagggcuucgagaugaucugggaccccaacggcuggaccggcaccgacaacagcuucagcaucaagcaggacaucgugggcaucaacgaguggagcggcuacagcggcagcuucgugcagcaccccgagcugaccggccuggacugcaucagacccugcuucuggguggagcugaucagaggcagacccaaggagaacaccaucuggaccagcggcagcagcaucagcuucugcggcguggacagcggcaccgugggcuggagcuggcccgacggcgccgagcugcccuucaccaucgacaaguga

SEQ ID NO: 186026 - RNA, 1410 nt, Artificial Sequence
  derived and/or modified CDS sequence (opt4) from neuraminidase__InfluenzaA__AJJ99912
augaaccccaaccagaagaucaucaccaucggcagcgugugcaugaccaucggcauggccaaccugauccugcagaucggcaacaucaucagcaucuggaucagccacagcauccagcugggcaaccagagccagaucgagaccugcaaccagagcgugaucaccuacgagaacaacaccugggugaaccagaccuacgugaacaucagcaacaccaacuucgccgccggccagagcguggugagcgugaagcuggccggcaacagcagccugugccccgugagcggcugggccaucuacagcaaggacaacagcaucagaaucggcagcaagggcgacguguucgugaucagagagcccuucaucagcugcagcccccuggagugcagaaccuucuuccugacccagggcgcccugcugaacgacaagcacagcaacggcaccaucaaggacagaagccccuacagaacccugaugagcugccccaucggcgaggugcccagccccuacaacagcagauucgagagcguggccuggagcgccagcgccugccacgacggcaucaacuggcugaccaucggcaucagcggccccgacaacggcgccguggccgugcugaaguacaacggcaucaucaccgacaccaucaagagcuggagaaacaacauccugagaacccaggagagcgagugcgccugcgugaacggcagcugcuucaccaucaugaccgacggccccagcgacggccaggccagcuacaagaucuucagaaucgagaagggcaagaucgugaagagcguggagaugaacgcccccaacuaccacuacgaggagugcagcugcuaccccgacagcagcaagaucaccugcgugugcagagacaacuggcacggcagcaacagacccugggugagcuucaaccagaaccuggaguaccagaucggcuacaucugcagcggcaucuucggcgacaaccccagacccaaggacaagaccggcagcugcggccccgugagcagcaacggcgccaacggcgugaagggcuucagcuucaaguacggcaacggcguguggaucggcagaaccaagagcaucagcagcagaaagggcuucgagaugaucugggaccccaacggcuggaccggcaccgacaacaacuucagcaucaagcaggacaucgugggcaucaacgaguggagcggcuacagcggcagcuucgugcagcaccccgagcugaccggccuggacugcaucagacccugcuucuggguggagcugaucagaggcagacccaaggagaacaccaucuggaccagcggcagcagcaucagcuucugcggcgugaacagcgacaccgugggcuggagcuggcccgacggcgccgagcugcccuucaccaucgacaaguga

SEQ ID NO: 186027 - RNA, 1410 nt, Artificial Sequence; identical to SEQ ID NO: 180317
  derived and/or modified CDS sequence (opt4) from neuraminidase__InfluenzaA__AJJ99923

SEQ ID NO: 186028 - RNA, 1410 nt, Artificial Sequence; identical to SEQ ID NO: 180769
  derived and/or modified CDS sequence (opt4) from neuraminidase__InfluenzaA__AJJ99934

SEQ ID NO: 186029 - RNA, 1410 nt, Artificial Sequence; identical to SEQ ID NO: 180317
  derived and/or modified CDS sequence (opt4) from neuraminidase__InfluenzaA__AJJ99945

SEQ ID NO: 186030 - RNA, 1410 nt, Artificial Sequence
  derived and/or modified CDS sequence (opt4) from neuraminidase__InfluenzaA__AJJ99956
augaaccccaaccagaagaucaucaccaucggcagcgugugcaugaccaucggcauggccaaccugauccugcagaucggcaacaucaucagcaucuggaucagccacagcauccagcugggcaaccagaaccagaucgagaccugcaaccagagcgugaucaccuacgagaacaacaccugggugaaccagaccuacgugaacaucagcaacaccaacuucgccgccggccagagcguggugagcgugaagcuggccggcaacagcagccugugccccgugagcggcugggccaucuacagcaaggacaacagcaucagaaucggcagcaagggcgacguguucgugaucagagagcccuucaucagcugcagcccccuggagugcagaaccuucuuccugacccagggcgcccugcugaacgacaagcacagcaacggcaccaucaaggacagaagccccuacagaacccugaugagcugccccaucggcgaggugcccagccccuacaacagcagauucgagagcguggccuggagcgccagcgccugccacgacggcaucaacuggcugaccaucggcaucagcggccccgacaacggcgccguggccgugcugaaguacaacggcaucaucaccgacaccaucaagagcuggagaaacaacauccugagaacccaggagagcgagugcgccugcgugaacggcagcugcuucaccgugaugaccgacggccccagcgacggccaggccagcuacaagaucuucagaaucgagaagggcaagaucgugaagagcguggagaugaacgcccccaacuaccacuacgaggagugcagcugcuaccccgacagcagcgagaucaccugcgugugcagagacaacuggcacggcagcaacagacccugggugagcuucaaccagaaccuggaguaccagaucggcuacaucugcagcggcaucuucggcgacaaccccagacccaacgacaagaccggcagcugcggccccgugcugagcaacggcgccaacggcgugaagggcuucagcuucaaguacggcaacggcguguggaucggcagaaccaagagcaucagcagcagaaacggcuucgagaugaucugggaccccaacggcuggaccggcaccgacaacaacuucagcaucaagcaggacaucgugggcaucaacgaguggagcggcuacagcggcagcuucgugcagcaccccgagcugaccggccuggacugcaucagacccugcuucuggguggagcugaucagaggcagacccaaggagaacaccaucuggaccagcggcagcagcaucagcuucugcggcgugaacagcgacaccgugggcuggagcuggcccgacggcgccgagcugcccuucaccaucgacaaguga

SEQ ID NO: 186031 - RNA, 1410 nt, Artificial Sequence; identical to SEQ ID NO: 176798
  derived and/or modified CDS sequence (opt4) from neuraminidase__InfluenzaA__AJJ99967

SEQ ID NO: 186032 - RNA, 1413 nt, Artificial Sequence
  derived and/or modified CDS sequence (opt4) from neuraminidase__InfluenzaA__AJJ99991
augaaccccaaccagaagaucaucaccaucggcagcaucagcaucgccaucggcaucaucagccugaugcugcagaucggcaacaucaucagcaucugggccagccacagcauccagaccggcagccagaacaacaccggcaucugcaaccagagaaucaucaccuacgagaacugcaccugggugaaccacaccuacgugaacaucaacaacaccaacgugguggccggcgaggacaagaccagcgugacccuggccggcaacagcagccugugcagcaucagcggcugggccaucuacaccaaggacaacagcaucagaaucggcagcaagggcgacguguucgugaucagagagcccuucaucagcugcagccaccuggagugcagaaccuucuuccugacccagggcgcccugcugaacgacaagcacagcaacggcaccgugaaggacagaagccccuacagagcccugaugagcugcccccugggcgaggcccccagccccuacaacagcaaguucgagagcguggccuggagcgccagcgccugccacgacggcaugggcuggcugaccaucggcaucagcggccccgacaacggcgccguggccgugcugaaguacaacggcaucaucaccggcaccaucaagagcuggaagaagcagauccugagaacccaggagagcgagugcgugugcaugaacggcagcugcuucaccaucaugaccgacggccccagcaacaaggccgccagcuacaagaucuucaagaucgagaagggcaaggugaccaagagcaucgagcugaacgcccccaacuuccacuacgaggagugcagcugcuaccccgacaccggcaucgugaugugcgugugcagagacaacuggcacggcagcaacagacccugggugagcuucaaccagaaccuggacuaccagaucggcuacaucugcagcggcguguucggcgacaaccccagacccgaggacggcgagggcagcugcaaccccgugaccguggacggcgccaacggcgugaagggcuucagcuacaaguacgacaacggcguguggaucggcagaaccaagagcaacagacugagaaagggcuucgagaugaucugggaccccaacggcuggaccaacaccgacagcgacuucagcgugaagcaggacgugguggccaucaccgacuggagcggcuacagcggcagcuucgugcagcaccccgagcugaccggccuggacugcaucagacccugcuucuggguggagcuggugagaggccugcccagagagaacaccaccaucuggaccagcggcagcagcaucagcuucugcggcgugaacagcgacaccgccaacuggagcuggcccgacggcgccgagcugcccuucaccaucgacaaguga

SEQ ID NO: 186033 - RNA, 1410 nt, Artificial Sequence; identical to SEQ ID NO: 186007
  derived and/or modified CDS sequence (opt4) from neuraminidase__InfluenzaA__AJK00003

SEQ ID NO: 186034 - RNA, 1410 nt, Artificial Sequence
  derived and/or modified CDS sequence (opt4) from neuraminidase__InfluenzaA__AJK00014
augaaccccaaccagaagaucaucaccaucggcagcgugugcaugaccaucggcauggccaaccugauccugcagaucggcaacaucaucagcaucuggaucagccacagcauccagcugggcaaccagagccagaucgagaccugcaaccagagcgugaucaccuacgagaacaacaccugggugaaccagaccuacgugaacaucagcaacaccaacuucgccgccggccagagcguggugagcgugaagcuggccggcaacagcagccugugccccgugagcggcugggccaucuacagcaaggacaacagcaucagaaucggcagcaagggcgacguguucgugaucagagagcccuucaucagcugcagcccccuggagugcagaaccuucuuccugacccagggcgcccugcugaacgacaagcacagcaacggcaccaucaaggacagaagccccuacagaacccugaugagcugccccaucggcgaggugcccagccccuacaacagcagauucgagagcguggccuggagcgccagcgccugccacgacggcaucaacuggcugaccaucggcaucagcggccccgacaacggcgccguggccgugcugaaguacaacggcgugaucaccgacaccaucaagagcuggagaaacaacauccugagaacccaggagagcgagugcgccugcgugaacggcagcugcuucaccaucaugaccgacggccccagcgacggccaggccagcuacaagaucuucagaaucgagaagggcaagaucgugaagagcguggagaugaacgcccccaacuaccacuacgaggagugcagcugcuaccccgacagcagcgagaucaccugcgugugcagagacaacuggcacggcagcaacagacccugggugagcuucaaccagaaccuggaguaccagaucggcuacaucugcagcggcaucuucggcgacaaccccagacccaacgacaagaccggcagcugcggccccgugagcagcaacggcgccaacggcgugaagggcuucagcuucaaguacggcaacggcguguggaucggcagaaccaagagcaucagcagcagaaagggcuucgagaugaucugggaccccaacggcuggaccggcaccgacaacaacuucagcaccaagcaggacaucgugggcaucaacgaguggagcggcuacagcggcagcuucgugcagcaccccgagcugaccggccuggacugcaucagacccugcuucuggguggagcugaucagaggcagacccaaggagaacaccaucuggaccagcggcagcaucaucagcuucugcggcgugaacagcgacaccgugggcuggagcuggcccgacggcgccgagcugcccuucaccaucgacaacuga

SEQ ID NO: 186035 - RNA, 1410 nt, Artificial Sequence
  derived and/or modified CDS sequence (opt4) from neuraminidase__InfluenzaA__AJK00025
augaaccccaaccagaagaucaucaccaucggcagcgugugcaugaccaucggcauggccaaccugauccugcagaucggcaacaucaucagcaucuggaucagccacagcauccagcugggcaaccagaaccagaucgagaccugcaaccagagcgugaucaccuacgagaacaacaccugggugaaccagaccuacgugaacaucagcaacaccaacuucgccgccggccagagcguggugagcgugaagcuggccggcaacagcagccugugccccgugagcggcugggccaucuacagcaaggacaacagcaucagaaucggcagcaagggcgacguguucgugaucagagagcccuucaucagcugcagcccccuggagugcagaaccuucuuccugacccagggcgcccugcugaacgacaagcacagcaacggcaccaucaaggacagaagccccuacagaacccugaugagcugccccaucggcgaggugcccagccccuacaacagcagauucgagagcguggccuggagcgccagcgccugccacgacggcaucaacuggcugaccaucggcaucagcggccccgacaacggcgccguggccgugcugaaguacaacggcaucaucaccgacaccaucaagagcuggagaaacaacauccugagaacccaggagagcgagugcgccugcgugaacggcagcugcuucaccaucaugaccgacggccccagcgacggccaggccagcuacaagaucuucagaaucgagaagggcaagaucgugaagagcguggagaugaacgcccccaacuaccacuacgaggagugcagcugcuaccccgacagcagcgagaucaccugcgugugcagagacaacuggcacggcagcaacagacccugggugagcuucaaccagaaccuggaguaccagaucggcuacaucugcagcggcaucuucggcgacaaccccagacccaacgacaagaccggcagcugcggccccgugagcagcaacggcgccaacggcgugaagggcuucagcuucaaguacggcaacggcguguggaucggcagaaccaagagcaucagcagcagaaagggcuucgagaugaucugggaccccaacggcuggaccggcaccgacaacagcuucagcaucaagcaggacaucgugggcaucaacgaguggagcggcuacagcggcagcuucgugcagcaccccgagcugaccggccuggacugcaucagacccugcuucuggguggagcugaucagaggcagacccaaggagaacaccaucuggaccagcggcagcagcaucagcuucugcggcgugaacagcggcaccgugggcuggagcuggcccgacggcgccgagcugcccuucaccaucgacaaguga

SEQ ID NO: 186036 - RNA, 1410 nt, Artificial Sequence
  derived and/or modified CDS sequence (opt4) from neuraminidase__InfluenzaA__AJK00036
augaaccccaaccagaagaucaucaccaucggcagcgugugcaugaccaucggcauggccaaccugauccugcagaucggcaacaucaucagcaucuggaucagccacagcauccagcugggcaaccagagccagaucgagaccugcaaccagagcgugaucaccuacgagaacaacaccugggugaaccagaccuacgugaacaucagcaacaucaacuucgccgccggccagagcguggugagcgugaagcuggccggcaacagcagccugugccccgugagcggcugggccaucuacagcaaggacaacagcaucagaaucggcagcaagggcgacguguucgugaucagagagcccuucaucagcugcagcccccuggagugcagaaccuucuuccugacccagggcgcccugcugaacgacaagcacagcaacggcaccaucaaggacagaagccccuacagaacccugaugagcugccccaucggcgaggugcccagccccuacaacagcagauucgagagcguggccuggagcgccagcgccugccacgacggcaucaacuggcugaccaucggcaucagcggccccgacaacggcgccguggccgugcugaaguacaacggcaucaucaccgacaccaucaagagcuggagaaacaacauccugagaacccaggagagcgagugcgccugcgugaacggcagcugcuucaccaucaugaccgacggccccagcgacggccaggccagcuacaagaucuucagaaucgagaagggcaagaucgugaagagcguggagaugaacgcccccaacuaccacuacgaggagugcagcugcuaccccgacagcagcgagaucaccugcgugugcagagacaacuggcacggcagcaacagacccugggugagcuucaaccagaaccuggaguaccagaucggcuacaucugcagcggcaucuucggcgacaaccccagacccaacgacaagaccggcagcugcggccccgugagcagcaacggcgccaacggcgugaagggcuucagcuucaaguacggcaacggcguguggaucggcagaaccaagagcaucagcagcagaaagggcuucgagaugaucugggaccccaacggcuggaccggcaccgacaacaacuucagcaucaagcaggacaucgugggcaucaacgaguggagcggcuacagcggcagcuucgugcagcaccccgagcugaccggccuggacugcaucagacccugcuucuggguggagcugaucagaggcagacccaaggagaacaccaucuggaccagcggcagcagcaucagcuucugcggcgugaacagcgacaccgugggcuggagcuggcccgacggcgccgagcugcccuucaccaucgacaaguga

SEQ ID NO: 186037 - RNA, 1410 nt, Artificial Sequence; identical to SEQ ID NO: 181017
  derived and/or modified CDS sequence (opt4) from neuraminidase__InfluenzaA__AJK00047

SEQ ID NO: 186038 - RNA, 1410 nt, Artificial Sequence; identical to SEQ ID NO: 181017
  derived and/or modified CDS sequence (opt4) from neuraminidase__InfluenzaA__AJK00058

SEQ ID NO: 186039 - RNA, 1410 nt, Artificial Sequence
  derived and/or modified CDS sequence (opt4) from neuraminidase__InfluenzaA__AJK00069
augaaccccaaccagaagaucaucaccaucggcagcgugugcaugaccaucggcauggccaaccugauccugcagaucggcaacaucaucagcaucuggaucagccacagcauccagcugggcaaccagaaccagaucgagaccugcaaccagagcgugaucaccuacgagaacaacaccugggugaaccagaccuacuucaacaucagcaacaccaacuucgccgccggccagagcguggugagcgugaagcuggccggcaacagcagccugugccccgugagcggcugggccaucuacagcaaggacaacagcaucagaaucggcagcaagggcgacguguucgugaucagagagcccuucaucagcugcagcccccuggagugcagaaccuucuuccugacccagggcgcccugcugaacgacaagcacagcaacggcaccaucaaggacagaagccccuacagaacccugaugagcugccccaucggcgaggugcccagccccuacaacagcagauucgagagcguggccuggagcgccagcgccugccacgacggcaucaacuggcugaccaucggcaucagcggccccgacaacggcgccguggccgugcugaaguacaacggcaucaucaccgacaccaucaagagcuggagaaacaacauccugagaacccaggagagcgagugcgccugcgugaacggcagcugcuucaccgugaugaccgacggccccagcgacggccaggccagcuacaagaucuucagaaucgagaagggcaagaucgugaagagcguggagaugaacgcccccaacuaccacuacgaggagugcagcugcuaccccgacagcagcgagaucaccugcgugugcagagacaacuggcacggcagcaacagacccugggugagcuucaaccagaaccuggaguaccagaucggcuacaucugcagcggcaucuucggcgacaaccccagacccaacgacaagaccggcagcugcggccccgugagcagcaacggcgccaacggcgugaagggcuucagcuucaaguacggcaacggcguguggaucggcagaaccaagagcaucagcagcagaaacggcuucgagaugaucugggaccccaacggcuggaccggcaccgacaacaacuucagcaucaagcaggacaucgugggcaucaacgaguggagcggcuacagcggcagcuucgugcagcaccccgagcugaccggccuggacugcaucagacccugcuucuggguggagcugaucagaggcagacccaaggagaacaccaucuggaccagcggcagcagcaucagcuucugcggcgugaacagcgacaccgugggcuggagcuggcccgacggcgccgagcugcccuucaccaucgacaaguga

SEQ ID NO: 186040 - RNA, 1413 nt, Artificial Sequence; identical to SEQ ID NO: 177521
  derived and/or modified CDS sequence (opt4) from neuraminidase__InfluenzaA__AJK00081

SEQ ID NO: 186041 - RNA, 1413 nt, Artificial Sequence; identical to SEQ ID NO: 176692
  derived and/or modified CDS sequence (opt4) from neuraminidase__InfluenzaA__AJK00093

SEQ ID NO: 186042 - RNA, 1413 nt, Artificial Sequence
  derived and/or modified CDS sequence (opt4) from neuraminidase__InfluenzaA__AJK00105
augagccccaaccagaagaucaucaccaucggcagcaucagcaucgccaucggcaucaucagccugaugcugcagaucggcaacaccaucagcaucugggccagccacagcauccagaccggcagccagaacaacaccggcaucugcaaccagagaaucaucaccuacgagaacagcaccugggugaaccacaccuacgugaacaucaacaacaccaacgugguggccggcgaggacaagaccagcgugacccuggccggcaacagcagccugugcagcaucagcggcugggccaucuacaccaaggacaacagcaucagaaucggcagcaagggcgacguguucgugaucagagagcccuucaucagcugcagccaccuggagugcagaaccuucuuccugacccagggcgcccugcugaacgacaagcacagcaacggcaccgugaaggacagaagccccuacagagcccugaugagcugcccccugggcgaggcccccagccccuacaacagcaaguucgagagcguggccuggagcgccagcgccugccacgacggcaugggcuggcugaccaucggcaucagcggccccgacaacggcgccguggccgugcugaaguacaacggcaucaucaccggcaccaucaagagcuggaagaagcagauccugagaacccaggagagcgagugcgugugcaugaacggcagcugcuucaccaucaugaccgacggccccagcaacaaggccgccagcuacaagaucuucaagaucgagaagggcaaggugaccaagagcaucgagcugaacgcccccaacuuccacuacgaggagugcagcugcuaccccgacaccggcaucgugaugugcgugugcagagacaacuggcacggcagcaacagacccugggugagcuucaaccagaaccuggacuaccagaucggcuacaucugcagcggcguguucggcgacaaccccagacccgaggacggcgagggcagcugcaaccccgugaccguggacggcgccaacggcgugaagggcuucagcuacaaguacgacaacggcguguggaucggcagaaccaagagcaacagacugagaaagggcuucgagaugaucugggaccccaacggcuggaccaacaccgacagcgacuucagcgugaagcaggacgugguggccaucaccgacuggagcggcuacagcggcagcuucgugcagcaccccgagcugaccggccuggacugcaucagacccugcuucuggguggagcuggugagaggccugcccagagagaacaccaccaucuggaccagcggcagcagcaucagcuucugcggcgugaacagcgacaccgccaacuggagcuggcccgacggcgccgagcugcccuucaccaucgacaaguga

SEQ ID NO: 186043 - RNA, 1410 nt, Artificial Sequence; identical to SEQ ID NO: 179073
  derived and/or modified CDS sequence (opt4) from neuraminidase__InfluenzaA__AJK00116

SEQ ID NO: 186044 - RNA, 1410 nt, Artificial Sequence; identical to SEQ ID NO: 177905
  derived and/or modified CDS sequence (opt4) from neuraminidase__InfluenzaA__AJK00127

SEQ ID NO: 186045 - RNA, 1410 nt, Artificial Sequence; identical to SEQ ID NO: 176798
  derived and/or modified CDS sequence (opt4) from neuraminidase__InfluenzaA__AJK00138

SEQ ID NO: 186046 - RNA, 1350 nt, Artificial Sequence
  derived and/or modified CDS sequence (opt4) from neuraminidase__InfluenzaA__AJK00152
augaaccccaaccagaagaucaucaccaucggcagcaucugcauggugaccggcaucgugagccugaugcugcagaucggcaacaucaucagcaugugggugagccacagcauccagaccagaaaccagcaccagaccgagcccaucagaaacaccaacuuccugaccgagaacgccguggccagcgugacccuggccggcaacagcagccugugccccaucagaggcugggccgugcacagcaaggacaacagcaucagaaucggcagcaagggcgacguguucgugaucagagagcccuucaucagcugcagccaccuggagugcagaaccuucuuccugacccagggcgcccugaucaacgacaagcacagcaacggcaccgugaaggacagaagcccccacagaacccugaugagcugccccgugggcgaggcccccagccccuacaacagcagauucgagagcguggccuggagcgccagcgccugccacgacggcaccagcuggcugaccaucggcaucagcggccccgacaacggcgccguggccgugcugaaguacaacggcaucaucaccgacaccaucaagagcuggagaaacaacauccugagaacccaggagagcgagugcgccugcgugaacggcagcugcuucaccgugaugaccgacggccccagcaacggccaggccagcuacaagaucuucaagauggagaagggcaagguggugaagagcguggagcugaacgcccccaacuaccacuacgaggagugcagcugcuaccccgacgccggcgagaucaccugcgugugcagagacaacuggcacggcagcaacagacccugggugagcuucaaccagaaccuggaguaccagaucggcuacaucugcagcggcguguucggcgacaaccccagacccaacgacggcaccggcagcugcggccccgugagccccaacggcgccuacggcaucaagggcuucagcuucaaguacggcaacggcguguggaucggcagaaccaagagcaccaacagcagaagcggcuucgagaugaucugggaccccaacggcuggaccggcaccgacagcgacuucagcgugaagcaggacaucguggagaucaccgacuggagcggcuacagcggcagcuucgugcagcaccccgagcugaccggccuggacugcaucagacccugcuucuggguggagcugaucagaggcagacccaaggagagcaccaucuggaccagcggcagcagcaucagcuucugcggcgugaacagcgacaccgugagcuggagcuggcccgacggcgccgagcugcccuucaccaucgacaaguga

SEQ ID NO: 186047 - RNA, 1350 nt, Artificial Sequence
  derived and/or modified CDS sequence (opt4) from neuraminidase__InfluenzaA__AJK00167
augaaccccaaccagaagaucaucaccaucggcagcaucugcauggugaucggcaucgugagccugaugcugcagaucggcaacaugaucagcaucugggugagccacagcauccagaccggcaaccagcaccaggccgagcccaucagaaacgccaacuuccugaccgagaacgccguggccagcgugacccuggccggcaacagcagccugugccccgugagaggcugggccgugcacagcaaggacaacagcaucagaaucggcagcaagggcgacguguucgugaucagagagcccuucaucagcugcagccaccuggagugcagaaccuucuuccugacccagggcgcccugcugaacgacaagcacagcaacggcaccgugaaggacagaagcccccacagaacccugaugagcugccccgugggcgaggcccccagccccuacaacagcagauucgagagcguggccuggagcgccagcgccugccacgacggcaccagcuggcugaccaucggcaucagcggccccgacaacggcgccguggccgugcugaaguacaacggcaucaucaccgacaccaucaagagcuggagaaacaacauccugagaacccaggagagcgagugcgccugcgugaacggcagcugcuucaccgugaugaccgacggccccagcaacggccaggccagcuacaagaucuucaagauggagaagggcaagguggugaagagcguggagcugaacgcccccaacuaccacuacgaggagugcagcugcuaccccgacgccggcgagaucaccugcgugugcagagacaacuggcacggcagcaacagacccugggugagcuucaaccagaaccuggaguaccagaucggcuacaucugcagcggcguguucggcgacaaccccagacccaacgacggcaccggcagcugcggccccgugagccccaacggcgccuacggcaucaagggcuucagcuucaaguacggcaacggcguguggaucggcagaaccaagagcaccaacagcagaagcggcuucgagaugaucugggaccccaacggcuggaccgagaccgacagcaacuucagcgugaagcaggacaucguggccaucaccgacuggagcggcuacagcggcagcuucgugcagcaccccgagcugaccggccuggacugcaucagacccugcuucuggguggagcugaucagaggcagacccaaggagagcaccaucuggaccagcggcagcagcaucagcuucugcggcgugaacagcgacaccgugagcuggagcuggcccgacggcgccgagcugcccuucaccaucgacaaguga

SEQ ID NO: 186048 - RNA, 1350 nt, Artificial Sequence
  derived and/or modified CDS sequence (opt4) from neuraminidase__InfluenzaA__AJK00178
augaaccccaaccagaagaucaucaccaucggcagcaucugcauggugaucggcaucgugagccugaugcugcagaucggcaacaugaucagcaucugggccagccacagcaucagaaccggcaaccagaaccagguggagcccaucaucaacaccaacuuccccaccgagaaggccgccgccagcaucacccuggccggcaacagcagccugugccccaucagaggcugggccauccacagcaaggacaacagcaucagaaucggcagcaagggcgacguguucgugaucagagagcccuucaucagcugcagccaccuggagugcagaaccuucuuccugacccagggcgcccugcugaacgacaagcacagcaacggcaccgugaaggacagaagcccccacagaacccugaugagcugccccgugggcgaggcccccagccccuacaacagcagauucgagagcguggccuggagcgccagcgccugccacgacggcaccagcuggcugaccaucggcaucagcggccccgacaacggcgccguggccgugcugaaguacaacggcaucaucaccgacaccaucaagaccuggagaaacaacauccugagaacccaggagagcgagugcgccugcgugaacggcagcugcuucaccgugaugaccgacggccccagcgacggccaggccagcuacaagaucuucaagauggagaagggcaaggugaucaagagcguggagcuggacgcccccaacuaccacuacgaggagugcagcugcuaccccgacgccggcgagaucaccugcgugugcagagacaacuggcacggcagcaacagacccugggugagcuucaaccagaaccuggaguaccagaucggcuacaucugcagcggcguguucggcgacaaccccagacccaccgacggcaccggcagcugcggccccgugagccacaacggcgccuacggcgugaagggcuucagcuucaaguacggcaacggcguguggaucggcagaaccaagagccccaacagcagaagcggcuucgagaugaucugggaccccaacggcuggagcgagaccgacagcagcuucagcgugaagcaggacaucguggccaucaccgacuggagcggcuacagcggcagcuucgugcagcaccccgagcugaccggccuggacugcaucagacccugcuucuggguggagcugaucagaggcagacccaaggagagcaccguguggaccagcggcagcagcaucagcuucugcggcgugaacagcgacaccgugagcuggagcuggcccgacggcgccgagcugcccuucaccaucgacaaguga

SEQ ID NO: 186049 - RNA, 1350 nt, Artificial Sequence
  derived and/or modified CDS sequence (opt4) from neuraminidase__InfluenzaA__AJK00199
augaaccccaaccagaagaucaucaccaucggcagcaucugcauggugaucggcaucgugagccugaugcugcagaucggcaacaugaucagcaucugggugagccacagcauccagaccggcaaccagaaccagguggagcccaucaucaacaccaacuuccugaccgagaaggccguggugagcaucacccuggccggcaacagcagccugugccccaucagaggcugggccauccacagcaaggacaacagcaucagaaucggcagcaagggcgacguguucgugaucagagagcccuucaucagcugcagccaccuggagugcagaaccuucuuccugacccagggcgcccugcugaacgacaagcacagcaacggcaccgugaaggacagaagcccccacagaacccugaugagcugccccgugggcgaggcccccagccccuacaacagcagauucgagagcguggccuggagcgccagcgccugccacgacggcaccagcuggcugaccaucggcaucagcggccccgacaacggcgccgccgccgugcugaaguacaacggcaucaucaccgacaccaucaagagcuggagaaacaacauccugagaacccaggagagcgagugcgccugcgugaacggcagcugcuucaccgugaugaccgacggccccagcgacggccaggccagcuacaagaucuucaagauggagaagggcaaggugaucaagagcguggagcuggacgcccccaacuaccacuacgaggagugcagcugcuaccccgacgccggcgagaucaccugcgugugcagagacaacuggcacggcagcaacagacccugggugagcuucaaccagaaccuggaguaccagaucggcuacaucugcagcggcguguucggcgacaaccccagacccaacgacggcaccggcagcugcagccccgugagccacaacggcgccuacggcgugaagggcuucagcuucaaguacggcaacggcguguggaucggcagaaccaagagccccaacagcagaagcggcuucgagaugaucugggaccccaacggcuggagcgagaccgacagcagcuucagcgugaagcaggacaucguggccaucaccgacuggagcggcuacagcggcagcuucgugcagcaccccgagcugaccggccuggacugcaucagacccugcuucuggguggagcugaucagaggcagacccaaggagagcaccguguggaccagcggcagcagcaucagcuucugcggcgugaacagcgacaccgugagcuggagcuggcccgacggcgccgagcugcccuucaccaucgacaaguga

SEQ ID NO: 186050 - RNA, 1350 nt, Artificial Sequence
  derived and/or modified CDS sequence (opt4) from neuraminidase__InfluenzaA__AJK00208
augaaccccaaccagaagaucaucaccaucggcagcaucugcauggugaccggcaucgugagccugaugcugcagaucggcaacaucaucagcaugugggugagccacagcauccagaccagaaaccagcaccagaccgagcccaucagaaacaccaacuuccugaccgagaacgccguggccagcgugacccuggccggcaacagcagccugugccccaucagaggcugggccgugcacagcaaggacaacagcaucagaaucggcagcaagggcgacguguucgugaucagagagcccuucaucagcugcagccaccuggagugcagaaccuucuuccugacccagggcgcccugcugaacgacaagcacagcaacggcaccgugaaggacagaagcccccacagaacccugaugagcugccccgugggcgaggcccccagccccuacaacagcagauucgagagcguggccuggagcgccagcgccugccacgacggcaccagcuggcugaccaucggcaucagcggccccgacaacggcgccguggccgugcugaaguacaacggcaucaucaccgacaccaucaagagcuggagaaacaacauccugagaacccaggagagcgagugcgccugcgugaacggcagcugcuucaccgugaugaccgacggccccagcaacggccaggccagcuacaagaucuucaagauggagaagggcaagguggugaagagcguggagcugaacgcccccaacuaccacuacgaggagugcagcugcuaccccgacgccggcgagaucaucugcgugugcagagacaacuggcacggcagcaacagacccugggugagcuucaaccagaaccuggaguaccagaucggcuacaucugcagcggcguguucggcgacaaccccagacccaacgacggcaccggcagcugcggccccgugagccccaacggcgccuacggcaucaagggcuucagcuucaaguacggcaacggcguguggaucggcagaaccaagagcaccaacagcagaagcggcuucgagaugaucugggaccccaacggcuggaccggcaccgacagcgacuucagcgugaagcaggacaucguggagaucaccgacuggagcggcuacagcggcagcuucgugcagcaccccgagcugaccggccuggacugcaucagacccugcuucuggguggagcugaucagaggcagacccaaggagagcaccaucuggaccagcggcagcagcaucagcuucugcggcgugaacagcgacaccgugagcuggagcuggcccgacggcgccgagcugcccuucaccaucgacaaguga

SEQ ID NO: 186051 - RNA, 1350 nt, Artificial Sequence
  derived and/or modified CDS sequence (opt4) from neuraminidase__InfluenzaA__AJK00219
augaaccccaaccagaagaucaucaccaucggcagcaucugcauggugaccggcaucgugagccugaugcugcagaucggcaacaucaucagcaugugggugagccacagcauccagaccagaaaccagcaccaggccgagcccaucagaaacaccaacuuccugaccgagaacgccguggccagcgugacccuggccggcaaccugagccugugccccaucagaggcugggccgugcacagcaaggacaacaacaucagaaucggcagcaagggcgacguguucgugaucagagagcccuucaucagcugcagccaccuggagugcagaaccuucuuccugacccagggcgcccugcugaacgacaagcacagcaacggcaccgugaaggacagaagcccccacagaacccugaugagcugccccgugggcgaggcccccagccccuacaacagcagauucgagagcguggccuggagcgccagcgccugccacgacggcaccagcuggcugaccaucggcaucagcggccccgacaacggcgccguggccgugcugaaguacaacggcaucaucaccgacaccaucaagagcuggagaaacaacauccugagaacccaggagagcgagugcgccugcgugaacggcagcugcuucaccgugaugaccgacggccccagcaacggccaggccagcuacaagaucuucaagauggagaagggcaagguggugaagagcguggagcugaacgcccccaacuaccacuacgaggagugcagcugcuaccccgacgccggcgagaucaucugcgugugcagagacaacuggcacggcagcaacagacccugggugagcuucaaccagaaccuggaguaccagaucggcuacaucugcagcggcguguucggcgacaaccccagacccaacgacggcaccggcagcugcggccccgugagccccaacggcgccuacggcaucaagggcuucagcuucaaguacggcaacggcguguggaucggcagaaccaagagcaccaacagcagaagcggcuucgagaugaucugggaccccaacggcuggaccggcaccgacagcgacuucagcgugaagcaggacaucguggagaucaccgacuggagcggcuacagcggcagcuucgugcagcaccccgagcugaccggccuggacugcaucagacccugcuucuggguggagcugaucagaggcagacccaaggagagcaccaucuggaccagcggcagcagcaucagcuucugcggcgugaacagcgacaccgugagcuggagcuggcccgacggcgccgagcugcccuucaccaucgacaaguga

SEQ ID NO: 186052 - RNA, 1350 nt, Artificial Sequence
  derived and/or modified CDS sequence (opt4) from neuraminidase__InfluenzaA__AJK00230
augaaccccaaccagaagaucaucaccaucggcagcaucugcauggugaccggcaucgugagccugaugcugcagaucggcaacaucaucagcaugugggugagccacagcauccagaccagaaaccagcaccagaccgagcccaucagaaacaccaacuuccugaccgagaacgccguggccagcgugacccuggccggcaacagcagccugugccccaucagaggcugggccgugcacagcaaggacaacagcaucagaaucggcagcaagggcgacguguucgugaucagagagcccuucaucagcugcagccaccuggagugcagaaccuucuuccugacccagggcgcccugaucaacgacaagcacagcaacggcaccgugaaggacagaagcccccacagaacccugaugagcugccccgugggcgaggcccccagccccuacaacagcagauucgagagcguggccuggagcgccagcgccugccacgacggcaccagcuggcugaccaucggcaucagcggccccgacaacggcgccguggccgugcugaaguacaacggcaucaucaccgacaccaucaagagcuggagaaacaacauccugagaacccaggagagcgagugcgccugcgugaacggcagcugcuucaccgugaugaccgacggccccagcaacggccaggccagcuacaagaucuucaagauggagaagggcaagguggugaagagcguggagcugaacgcccccaacuaccacuacgaggagugcagcugcuaccccgacgccggcgagaucaucugcgugugcagagacaacuggcacggcagcaacagacccugggugagcuucaaccagaaccuggaguaccagaucggcuacaucugcagcggcguguucggcgacaaccccagacccaacgacggcaccggcagcugcggccccgugagccccaacggcgccuacggcaucaagggcuucagcuucaaguacggcaacggcguguggaucggcagaaccaagagcaccaacagcagaagcggcuucgagaugaucugggaccccaacggcuggaccggcaccgacagcgacuucagcgugaagcaggacaucguggagaucaccgacuggagcggcuacagcggcagcuucgugcagcaccccgagcugaccggccuggacugcaucagacccugcuucuggguggagcugaucagaggcagacccaaggagagcaccaucuggaccagcggcagcagcaucagcuucugcggcgugaacagcgacaccgugagcuggagcuggcccgacggcgccgagcugcccuucaccaucgacaaguga

SEQ ID NO: 186053 - RNA, 1380 nt, Artificial Sequence
  derived and/or modified CDS sequence (opt4) from neuraminidase__InfluenzaA__AJS18470
augaaccccaaccagaagaucaccugcaucagcgccaccggcgugacccugagcguggugagccugcugaucggcaucgccaaccugggccugaacaucggccugcacuacaagguggacgacagcaccaccaucaacauccccaacaugaacgagaccaaccccaccaucaccaacaucaccaacaucaucgugaacaagaacgaggagagaaccuuccugaaccugaccaagccccugugcgaggugaacagcuggcacauccugagcaaggacaacgccaucagaaucggcgaggacgcccacauccuggugaccagagagcccuaccugagcugcgacccccagggcugcagaauguucgcccugagccagggcaccacccugagaggcagacacgccaacggcaccauccacgacagaagccccuucagagcccugaucagcugggagaugggccaggcccccagccccuacaacaccagaguggagugcaucggcuggagcagcaccagcugccacgacggcaucagcagaaugagcaucugcaucagcggccccaacaacaacgccagcgccguggugugguacagaggcagacccgugaccgagauccccagcugggugggcaacauccugagaacccaggagagcgagugcgugugccacaagggcaucugccccguggugaugaccgacggccccgccaacaacaaggccgccaccaagaucaucuacuucaaggagggcaagauccagaagaucgaggagcugcagggcaacgcccagcacguggaggagugcagcugcuacggcgccgccggcaugaucaagugcgugugcagagacaacuggaagggcgccaacagacccaucaucaccaucgaccccgagaugaugacccacaccagcaaguaccugugcagcaagauccugaccgacaccagcagacccaacgaccccaccaacggcaacugcgacgcccccaucaucggcggcagccccgaccccggcgugaagggcuucgccuaccuggacggcgagaacagcuggcugggcagaaccaucagcaaggacagcagaagcggcuacgagaugcugaaggugcccaacgccgagaccgacacccagagcggccccaccagcuaccagcugaucgugaacaaccagaacuggagcggcuacagcggcgccuucaucgacuacugggccaacaagggcugcuucaaccccugcuucuacguggagcugaucagaggcagacccaaggagaucgacgugcuguggaccagcaacagcaugguggcccugugcggcagcagagagagacugggcagcuggagcuggcacgacggcgccgagaucaucuacuucaaguga

SEQ ID NO: 186054 - RNA, 1380 nt, Artificial Sequence
  derived and/or modified CDS sequence (opt4) from neuraminidase__InfluenzaA__AJS18481
augaaccccaaccagaagaucaccugcaucagcgccaccggcgugacccugagcguggugagccugcugaucggcaucgccaaccugggccugaacaucggccugcacuacaaggugagcgacagcaccaccaucaacagccccaacaugaacgagaccaaccccaccaccaccaacaucaccaacaucaucgugaacaagaacgaggagagaaccuuccugaaccugaccaagccccugugcgaggugaacagcuggcacauccugagcaaggacaacgccaucagaaucggcgaggaggcccacauccuggugaccagagagcccuaccugagcugcgacccccagggcugcagaauguucgcccugagccagggcaccacccugagaggcagacacgccaacggcaccauccacgacagaagccccuucagagcccugaucagcugggagaugggccaggcccccagccccuacaacaccagaguggagugcaucggcuggagcagcaccagcugccacgacggcaucagcagaaugagcaucugcaucagcggccccaacaacaacgccagcgccguggugugguacagaggcagacccgugaccgagauccccagcugggccggcaacauccugagaacccaggagagcgagugcgugugccacaagggcaucugccccguggugaugaccgacggccccgccaacaacaaggccgccaccaagaucaucuacuucagagagggcaagauccagaagaucgaggagcugcagggcaacgcccagcacaucgaggagugcagcugcuacggcgccgccggcaugaucaagugcgccugcagagacaacuggaagggcgccaacagacccaucaucaccaucgaccccgagaugaugacccacaccagcaaguaccugugcagcaagauccugaccgacaccagcagacccaacgaccccaccaacggcaacugcgacgcccccgugaccggcggcagccccgaccccggcaucaagggcuucgccuuccuggacggcgagaacagcuggcugggcagaaccaucagcaagaacagcagaagcggcuacgagaugcugaaggugcccaacgccgagaccgacacccagagcggccccaccagcuaccagcugaucgugaacaaccagaacuggagcggcuacagcggcgccuucaucgacuacugggccaacaaggagugcuucaaccccugcuucuacguggagcugaucagaggcagacccaaggagagcgacgugcuguggaccagcaacagcaugguggcccugugcggcagcagagagagacugggcagcuggagcuggcacgacggcgccgagaucaucuacuucaaguga

SEQ ID NO: 186055 - RNA, 1410 nt, Artificial Sequence
  derived and/or modified CDS sequence (opt4) from neuraminidase__InfluenzaA__AKA59350
augaaccccaaccagaagaucaucaccaucggcagcgugugcaugaccaucggcguggccaaccugauccugcagaucggcaacaucaucagcaucuggaucagccacagcauccagcugggcaaccagaaccagaucgagaccugcaaccagagcgugaucaccuacgagaacaacaccugggugaaccagaccgacgugaacaucagcaacaccaacuucgccgccggccagagcguggugagcgugaagcuggccggcaacagcagccugugccccgugagcggcugggccaucuacagcaaggacaacagcaucagaaucggcagcaagggcgacguguucgugaucagagagcccuucaucagcugcagcccccuggagugcagaaccuucuuccugacccagggcgcccugcugaacgacaagcacagcaacggcaccaucaaggacagaagccccuacagaacccugaugagcugccccaucggcgaggugcccagccccuacaacagcagauucgagagcguggccuggagcgccagcgccugccacgacggcaucaacuggcugaccaucggcaucagcggccccgacaacggcgccguggccgugcugaaguacaacggcaucaucaccgacaccaucaagagcuggagaaacaacauccugagaacccaggagagcgagugcgugugcgugaacggcagcugcuucaccgugaugaccgacggccccagcaacggccaggccagcuacaagaucuucagaaucgagaagggcaagaucgugaagagcguggagaugaacgcccccaacuaccacuacgaggagugcagcugcuaccccgacagcagcgagaucaccugcgugugcagagacaacuggcacggcagcaacagacccugggugagcuucaaccagaaccuggaguaccagaucggcuacaucugcagcggcaucuucggcgacaaccccagacccaacgacaagaccggcagcugcggccccgugagcagcaacggcgccaacggcgugaagggcuucagcuucaaguacggcaacggcguguggaucggcagaaccaagagcaucagcagcagaaacggcuucgagaugaucugggaccccaacggcuggaccggcaccgacaacaacuucagcaucaagcaggacaucgugggcaucaacgaguggagcggcuacagcggcagcuucgugcagcaccccgagcugaccggccuggacugcaucagacccugcuucuggguggagcugaucagaggcagacccaaggagaacaccguguggaccagcggcagcagcaucagcuucugcggcgugaacagcgacaccgugggcuggagcuggcccgacggcgccgagcugcccuucaccaucgacaaguga

SEQ ID NO: 186056 - RNA, 1410 nt, Artificial Sequence
  derived and/or modified CDS sequence (opt4) from neuraminidase__InfluenzaA__AKA59352
augaaccccaaccagaagaucaucaccaucggcagcgugugcaugaccaucggcauggccaaccugaugcugcagaucggcaacaucaucagcaucuggaucagccacagcauccagcugggcaaccagaaccagaucgagaccugcaaccagagcgugaucaccuacgagaacaacaccugggugaaccagaccuacgugaacaucagcaacaccaaccuggccgugggccagagcguggugagcaccaagcuggccggcaacagcagccugugccccgugagcggcugggccaucuacagcaaggacaacagcaucagaaucggcagcaagggcgacguguucgugaucagagagcccuucaucagcugcagcccccuggagugcagaaccuucuuccugacccagggcgcccugcugaacgacaagcacagcaacggcaccaucaaggacagaagccccuacagaacccugaugagcugccccaucggcgaggugcccagccccuacaacagcagauucgagagcguggccuggagcgccagcgccugccacgacggcaucaacuggcugaccaucggcaucagcggccccgacaacggcgccguggccgugcugaaguacaacggcaucaucaccgacaccaucaagagcuggagaaacaacauccugagaacccaggagagcgagugcgccugcgugaacggcagcugcuucaccgugaugaccgacggccccagcgacggccaggccagcuacaagaucuucagaaucgagaagggcaagaucgugaagagcguggagaugaacgcccccaacuaccacuacgaggagugcagcugcuaccccgacagcagcgagaucaccugcgugugcagagacaacuggcacggcagcaacagacccugggugagcuucaaccagaaccuggaguaccagaucggcuacaucugcagcggcaucuucggcgacaaccccagacccaacgacaagaccggcagcugcggccccgugagcagcaacggcgccaacggcgugaagggcuucagcuucaaguacggcaacggcguguggaucggcagaaccaagagcaucagcagcagaaacggcuucgagaugaucugggaccccaacggcuggaccggcaccgacaacaacuucagcaucaagcaggacaucgugggcaucaacgaguggagcggcuacagcggcagcuucgugcagcaccccgagcugaccggccuggacugcaucagacccugcuucuggguggagcugaucagaggcagacccaaggagaacaccaucuggaccagcggcagcagcaucagcuucugcggcgugaacagcgacaccgugggcuggagcuggcccgacggcgccgagcugcccuucaccaucgacaaguga

SEQ ID NO: 186057 - RNA, 1410 nt, Artificial Sequence
  derived and/or modified CDS sequence (opt4) from neuraminidase__InfluenzaA__AKA59354
augaaccccaaccagaagaucaucaccaucggcagcgugugcaugaccaucggcguggccaaccugauccugcagaucggcaacaucaucagcaucuggaucagccacagcauccagcugggcaaccagaaccagaucgagaccugcaaccagagcgugaucaccuacgagaacaacaccugggccaaccagaccuacgugaacaucagcaacaccaacuucgccgccggccagagcguggugagcgugaagcuggccggcaacagcagccugugccccgugagcggcugggccaucuacagcaaggacaacagcaucagaaucggcagcaagggcgacguguucgugaucagagagcccuucaucagcugcagcccccuggagugcagaaccuucuuccugacccagggcgcccugcugaacgacaagcacagcaacggcaccaucaaggacagaagccccuacagaacccugaugagcugccccaucggcgaggugcccagccccuacaacagcagauucgagagcguggccuggagcgccagcgccugccacgacggcaucaacuggcugaccaucggcaucagcggccccgacaacggcgccguggccgugcugaaguacaacggcaucaucaccgacaccaucaagagcuggagaaacaacauccugagaacccaggagagcgagugcgugugcgugaacggcagcugcuucaccgugaugaccgacggccccagcaacggccaggccagcuacaagaucuucagaaucgagaagggcaagaucgugaagagcguggagaugaacgcccccaacuaccacuacgaggagugcagcugcuaccccgacagcagcgagaucaccugcgugugcagagacaacuggcacggcagcaacagacccugggugagcuucaaccagaaccuggaguaccagaucggcuacaucugcagcggcaucuucggcgacaaccccagacccaacgacaagaccggcagcugcggccccgugagcagcaacggcgccaacggcgugaagggcuucagcuucaaguacggcaacggcguguggaucggcagaaccaagagcaucagcagcagaaacggcuucgagaugaucugggaccccaacggcuggaccgagaccgacaacaacuucagcaucaagcaggacaucgugggcaucaacgaguggagcggcuacagcggcagcuucgugcagcaccccgagcugaccggccuggacugcaucagacccugcuucuggguggagcugaucagaggcagacccaaggagaacaccguguggaccagcggcagcagcaucagcuucugcggcgugaacagcgacaccgugggcuggagcuggcccgacggcgccgagcugcccuucaccaucgacaaguga

SEQ ID NO: 186058 - RNA, 1380 nt, Artificial Sequence
  derived and/or modified CDS sequence (opt4) from neuraminidase__InfluenzaA__AKS48026
augaaccccaaccagaagaucaccugcaucagcgccaccggcgugacccugagcguggugagccugcugaucggcaucgccaaccugggccugaacaucggccugcacuacaaggugagcgacagcaccaccaucaacauccccaacaugaacgagaccaaccccaccaccaccaacaucaccaacaucaucgugaacaagaacgaggagagaaccuuccugaaccugaccaagccccugugcgaggugaacagcuggcacauccugagcaaggacaacgccaucagaaucggcgaggacgcccacauccuggugaccagagagcccuaccugagcugcgacccccagggcugcagaauguucgcccugagccagggcaccacccugagaggcagacacgccaacggcaccauccacgacaagagccccuucagagcccugaucagcugggagaugggccaggcccccagccccuacaacaccagaguggagugcaucggcuggagcagcaccagcugccacgacggcaucagcagaaugagcaucugcaucagcggccccaacaacaacgccagcgccguggugugguacagaggcagacccgugaccgagauccccagcugggugggcaacauccugagaacccaggagagcgagugcgugugccacaagggcaucugccccguggugaugaccgacggccccgccaacaacaaggccgccaccaagaucaucuacuucaaggagggcaagauccagaagaucgaggagcugcagggcaacgcccagcacaucgaggagugcagcugcuacggcgccgccggcaugaucaagugcgugugcagagacaacuggaagggcgccaacagacccaucaucaccaucgaccccgagaugaugacccacaccagcaaguaccugugcagcaagauccugaccgacaccagcagacccaacgaccccaccaacggcaacugcgacgagcccaucaccggcggcagccccgaccccggcgugaagggcuucgccuuccuggacggcgagaacagcuggcugggcagaaccaucagcaaggacagcagaagcggcuacgagaugcugaaggugcccaacgccgagaccgacacccagagcggccccaccagcuaccagcugaucgugaacaaccagaacuggagcggcuacagcggcgccuucaucgacuacugggccaacaaggagugcuucaaccccugcuucuacguggagcugaucagaggcagacccaaggagaucgacgugcugugggccagcaacagcaugguggcccugugcggcagcagagagagacugggcagcuggagcuggcacgacggcgccgagaucaucuacuucaaguga

SEQ ID NO: 186059 - RNA, 1380 nt, Artificial Sequence
  derived and/or modified CDS sequence (opt4) from neuraminidase__InfluenzaA__AKS48040
augaaccccaaccagaagaucaccugcaucagcgccaccggcaugacccugagcguggugagccugcugaucggcaucgccaaccugggccugaacaucggccugcacuacaaggugagcgacagcaccaccaucaacauccccaacaugaacgagaccaaccccaccaccaccaacaucaccaacaucaucgugaacaagaacgaggagagaaccuuccugaaccugaccaagccccugugcgaggugaacagcuggcacauccugagcaaggacaacgccaucagaaucggcgaggacgcccacauccuggugaccagagagcccuaccugagcugcgacccccagggcugcagaauguucgcccugagccagggcaccacccugagaggcagacacgccaacggcaccauccacgacagaagccccuucagagcccugaucagcugggagaugggccaggcccccagccccuacaacaccagaguggagugcaucggcuggagcagcaccagcugccacgacggcaucagcagaaugagcaucugcaucagcggccccaacaacaacgccagcgccguggugugguacagaggcagacccgugaccgagauccccagcugggugggcaacauccugagaacccaggagagcgagugcgugugccacaagggcaucugccccguggugaugaccgacggccccgccaacaacaaggccgccaccaagaucaucuacuucaaggagggcaagauccagaagaucgaggagcugcagggcaacgcccagcacaucgaggagugcagcugcuacggcgccgccggcaugaucaagugcgugugcagagacaacuggaagggcgccaacagacccaucaucaccaucgaccccgagaugaugacccacaccagcaaguaccugugcagcaagauccugaccgacaccagcagacccaacgaccccaccaacggcaacugcgacgcccccaucaccggcggcagccccgaccccggcgugaagggcuucgccuuccuggacggcgagaacagcuggcugggcagaaccaucagcaaggacagcagaagcggcuacgagaugcugaaggugcccaacgccgagaccgacacccagagcggccccaccagcuaccagcugaucgugaacaaccagaacuggagcggcuacagcggcgccuucaucgacuacugggccaacaaggagugcuucaaccccugcuucuacguggagcugaucagaggcagacccaaggagaucgacgugcugugggccagcaacagcaugguggcccugugcggcagcagagagagacugggcagcuggagcuggcacgacggcgccgagaucaucuacuucaaguga

SEQ ID NO: 186060 - RNA, 1380 nt, Artificial Sequence
  derived and/or modified CDS sequence (opt4) from neuraminidase__InfluenzaA__ALO75898
augaaccccaaccagaagaucaccugcaucagcgccaccggcgugacccugagcguggugagccugcugaucggcaucgccaaccugggccugaacaucggccugcacuacaaggugagcgacagcaccaccaucaacauccccaacaugaacgagaccaaccccaccaccaccaacaucaccaacaucaucgugaacaagaacgaggagagaaccuuccugaaccugaccaagccccugugcgaggugaacagcuggcacauccugagcaaggacaacgccaucagaaucggcgaggacgcccacauccuggugaccagagagcccuaccugagcugcgacccccagggcugcagaauguucgcccugagccagggcaccacccugagaggcagacacgccaacggcaccauccacgacagaagccccuucagagcccugaucagcugggagaugggccaggcccccagccccuacaacaccagaguggagugcaucggcuggagcagcaccagcugccacgacggcaucagcagaaugagcaucugcaucagcggccccaacaacaacgccagcgccguggugugguacagaggcagacccgugaccgagauccccagcugggugggcaacauccugagaacccaggagagcgagugcgugugccacaagggcaucugccccguggugaugaccgacggccccgccaacaacaaggccgccaccaagaucaucuacuucaaggagggcaagauccagaagaucgaggagcugcagggcaacgcccagcacaucgaggagugcagcugcuacggcgccgccggcaugaucaagugcgugugcagagacaacuggaagggcgccaacagacccaucaucaccaucgaccccgagaugaugacccacaccagcaaguaccugugcagcaagauccugaccgacaccagcagacccaacgaccccaccaacggcaacugcgacgcccccaucaccggcggcagccccgaccccggcgugaagggcuucgccuuccuggacggcgagaacagcuggcugggcagaaccaucagcaaggacagcagaagcggcuacgagaugcugaaggugcccaacgccgagaccgacacccagagcggccccaccagcuaccagcugaucgugaacaaccagaacuggagcggcuacagcggcgccuucaucgacuacugggccaacaaggagugcuucaaccccugcuucuacguggagcugaucagaggcagacccaaggagaucgacgugcugugggccagcaacagcaugguggcccugugcggcagcagagagagacugggcagcuggagcuggcacgacggcgccgagaucaucuacuucaaguga

SEQ ID NO: 186061 - RNA, 1380 nt, Artificial Sequence; identical to SEQ ID NO: 186060
  derived and/or modified CDS sequence (opt4) from neuraminidase__InfluenzaA__ALO75910

SEQ ID NO: 186062 - RNA, 1380 nt, Artificial Sequence
  derived and/or modified CDS sequence (opt4) from neuraminidase__InfluenzaA__ALO75922
augaaccccaaccagaagaucaccugcaucagcgccaccggcgugacccugagcguggugagccugcugaucggcaucgccaaccugggccugaacaucggccugcacuacaaggugagcgacagcaccaccaucaacauccccaacaugaacgagaccaaccccaccaccaccaacaucaccaacaucaucgugaacaagaacgaggagagaaccuuccugaaccugaccaagccccugugcgaggugaacagcuggcacauccugagcaaggacaacgccaucagaaucggcgaggacgcccacauccuggugaccagagagcccuaccugagcugcgacccccagggcugcagaauguucgcccugagccagggcaccacccugagaggcagacacgccaacggcaccauccacgacagaagccccuucagagcccugaucagcugggagaugggccaggcccccagccccuacaacaccagaguggagugcaucggcuggagcagcaccagcugccacgacggcaucagcagaaugagcaucugcaucagcggccccaacaacaacgccagcgccguggugugguacagaggcagacccgugaccgagauccccagcugggugggcaacauccugagaacccaggagagcgagugcgugugccacaagggcaucugccccguggugaugaccgacggccccgccaacaacaaggccgccaccaagaucaucuacuucaaggagggcaagauccagaagaucgaggagcugcagggcaacgcccagcacaucgaggagugcagcugcuacggcgccgccggcaugaucaagugcgugugcagagacaacuggaagggcgccaacagacccaucaucaccaucgaccccgagaugaugacccacaccagcaaguaccugugcagcaagauccugaccgacaccagcagacccaacgaccccaccaacggcaacugcgacgagcccaucaccggcggcagccccgaccccggcgugaagggcuucgccuuccuggacggcgagaacagcuggcugggcagaaccaucagcaaggacagcagaagcggcuacgagaugcugaaggugcccaacgccgagaccgacacccagagcggccccaccagcuaccagcugaucgugaacaaccagaacuggagcggcuacagcggcgccuucaucgacuacugggccaacaaggagugcuucaaccccugcuucuacguggagcugaucagaggcagacccaaggagaucgacgugcugugggccagcaacagcaugguggcccugugcggcagcagagagagacugggcagcuggagcuggcacgacggcgccgagaucaucuacuucaaguga

SEQ ID NO: 186063 - RNA, 1401 nt, Artificial Sequence
  derived and/or modified CDS sequence (opt4) from neuraminidase__InfluenzaA__ALT20083
augaaccccaaccagagaaucaccgccaucggcagcgugagccugaucaucgccaucaucugccugcugaugcagaucgccauccugaccaccaccaugacccugcacuucagacagaacgagugcagcaaccccagcaacaaccaggugaugcccugcgagcccaucaucaucgagagaaacaccgugcaccugaacagcaccaccaucgagagagagaucugccccaagguggccgaguacaagaacuggagcaagccccagugccagaucaccggcuucgcccccuucagcaaggacaacagcaucagacugagcgccagcggcgacaucugggugaccagagagcccuacgugagcugcagccugaacaagugcuaccaguucgcccugggccagggcaccacccugaagaacaagcacagcaacggcaccacccacgacagaaccccccacagaacccugcugaugaacgagcugggcgugcccuuccaccugggcaccaagcaggugugcaucgccuggagcagcagcagcugcuacgacggcaaggccuggcugcacgugugcgugaccggcgacgacaagaacgccaccgccagcaucaucuacgacggcaugcugguggacagcaucggcagcuggagcaagaacauccugagaacccaggagagcgagugcgugugcaucaacggcaccugcgccguggugaugaccgacggcagcgccagcggcaaggccgacaccagagugcuguucaucagagagggcaagaucaucaacaucagcccccugagcggcagcgcccagcacguggaggagugcagcugcuaccccagauaccccgaggugagaugcgugugcagagacaacuggaagggcagcaacagacccauccuguacaucaacauggccgacuacagcaucgagagcagcuacgugugcagcggccuggugggcgacacccccagaaacgacgacagcagcagcagcagcaacugcagagaccccaacaacgagagaggcgcccccggcgugaagggcugggccuucgacgacggcaacgacguguggaugggcagaaccaucaagaacggcagcagaagcggcuacgagaccuucagaguggugaacggcuggaccauggccaacagcaagagccagaucaacagacaggugaucguggacagcaacgacuggagcggcuacagcggcaucuucagcguggagggcaagaagugcaucaacagaugcuucuacguggagcugaucagaggcagaccccaggagcccagagugugguggaccagcaacagcaucaucguguucugcggcaccagcggcaccuacggcaccggcagcuggcccgacggcgccaacaucaacuucaugcccaucuga

SEQ ID NO: 186064 - RNA, 1410 nt, Artificial Sequence
  derived and/or modified CDS sequence (opt4) from neuraminidase__InfluenzaA__AMA65392
augaaccccaaccagaagaucaucaccaucggcagcgugugcaugaccaucggcauggccaaccugauccugcagaucggcaacaucaucagcaucugggugagccacagcauccagaucggcaaccagagccagaucgagaccugcaaccagagcgugaucaccuacgagaacaacaccugggugaaccagaccuacgugaacaucagcaacaccaacuucgccgccggccagagcguggugagcgugaagcuggccggcaacagcagccugugccccgugagcggcugggccaucuacagcaaggacaacagcgugagaaucggcagcagaggcgacguguucgugaucagagagcccuucaucagcugcagcccccuggagugcagaaccuucuuccugacccagggcgcccugcugaacgacaagcacagcaacggcaccaucaaggacagaagccccuacagaacccugaugagcugccccaucggcgaggugcccagccccuacaacagcagauucgagagcguggccuggagcgccagcgccugccacgacggcaucaacuggcugaccaucggcaucagcggccccgacagcggcgccguggccgugcugaaguacaacggcaucaucaccgacaccaucaagagcuggagaaacaacauccugagaacccaggagagcgagugcgccugcgugaacggcagcugcuucaccaucaugaccgacggccccagcgacggccaggccagcuacaagaucuucagaaucgagaagggcaagaucaucaagagcguggagaugaaggcccccaacuaccacuacgaggagugcagcugcuaccccgacagcagcgagaucaccugcgugugcagagacaacuggcacggcagcaacagacccugggugagcuucaaccagaaccuggaguaccagaugggcuacaucugcagcggcguguucggcgacaaccccagacccaacgacaagaccggcagcugcggccccgugagcagcaacggcgccaacggcgugaagggcuucagcuucaaguacggcaacggcguguggaucggcagaaccaagagcaucagcagcagaaagggcuucgagaugaucugggaccccaacggcuggaccggcaccgacaacaaguucagcaucaagcaggacaucgugggcaucaacgaguggagcggcuacagcggcagcuucgugcagcaccccgagcugaccggccuggacugcaucagacccugcuucuggguggagcugaucagaggcagacccgaggagaacaccaucuggaccagcggcagcagcaucagcuucugcggcgugaacagcgacaccgugggcuggagcuggcccgacggcgccgagcugcccuucaccaucgacaaguga

SEQ ID NO: 186065 - RNA, 1410 nt, Artificial Sequence
  derived and/or modified CDS sequence (opt4) from neuraminidase__InfluenzaA__AMA65394
augaaccccaaccagaagaucaucaccaucggcagcgugugcaugaccaucggcauggccaaccugauccugcagaucggcaacaucaucagcaucugggugagccacagcauccagaucggcaaccagagccagaucgagaccugcaaccagagcgugaucaccuacgagaacaacaccugggugaaccagaccuacgugaacaucagcaacaccaacuucgccgccggccagagcguggugagcgugaagcuggccggcaacagcagccugugccccgugagcggcugggccaucuacagcaaggacaacagcgugagaaucggcagcaagggcgacguguucgugaucagagagcccuucaucagcugcagcccccuggagugcagaaccuucuuccugacccagggcgcccugcugaacgacaagcacagcaacggcaccaucaaggacagaagccccuacagaacccugaugagcugccccaucggcgaggugcccagccccuacaacagcagauucgagagcguggccuggagcgccagcgccugccacgacggcaucaacuggcugaccaucggcaucagcggccccgacagcggcgccguggccgugcugaaguacaacggcaucaucaccgacaccaucaagagcuggagaaacaacauccugagaacccaggagagcgagugcgccugcgugaacggcagcugcuucaccaucaugaccgacggccccagcgacggccaggccagcuacaagaucuucagaaucgagaagggcaagaucaucaagagcguggagaugaaggcccccaacuaccacuacgaggagugcagcugcuaccccgacagcagcgagaucaccugcgugugcagagacaacuggcacggcagcaacagacccugggugagcuucaaccagaaccuggaguaccagaugggcuacaucugcagcggcguguucggcgacaaccccagacccaacgacaagaccggcagcugcggccccgugagcagcaacggcgccaacggcgugaagggcuucagcuucaaguacggcaacggcguguggaucggcagaaccaagagcaucagcagcagaaagggcuucgagaugaucugggaccccaacggcuggaccggcaccgacaacaaguucagcaucaagcaggacaucgugggcaucaacgaguggagcggcuacagcggcagcuucgugcagcaccccgagcugaccggccuggacugcaucagacccugcuucuggguggagcugaucagaggcagacccgaggagaacaccaucuggaccagcggcagcagcaucagcuucugcggcgugaacagcgacaccgugggcuggagcuggcccgacggcgccgagcugcccuucaccaucgacaaguga

SEQ ID NO: 186066 - RNA, 1410 nt, Artificial Sequence
  derived and/or modified CDS sequence (opt4) from neuraminidase__InfluenzaA__BAA00618
augaaccccaaccagaagaucaucaccaugggcagcgugagcaucaucaucgccaucgugugccugcugaugcagaucgccauccuggugaccaccgugacccugcacuucagacagcacgagagcgacagcccccccagcaaccaggugauccccugcgagcccaucaucaucgagagaaacaucaccgagaucguguaccugaacaacaccaccaucgagaaggagaccugccccaagagcguggaguacagaaacuggagcaagccccagugcaagaucaccggcuucgcccccuucagcaaggacaacagcaucagacugagcgccggcggcgacaucugggugaccagagagcccuacgugagcugcgaccccggcaagugcuaccaguucgcccugggccagggcaccacccuggacaacaagcacagcaacgacaccauccacgacagaaucccccacagaacccugcugaugaacgagcugggcgugcccuuccaccugggcaccagacaggugugcaucgccuggagcagcagcagcugccacgacggcaaggccuggcugcacgugugcgugaccggcgacgacaagaacgccaccgccagcuucaucuacaacggcagacugguggacagcaucggcagcuggagccagaacauccugagaacccaggagagcgagugcgugugcaucaacggcaccugcaccguggugaugaccgacggcagcgccagcggcagagccgacaccagaauccuguucaucgaggagggcaagaucgugcacaucagcccccugagcggcagcgcccagcacguggaggagugcagcugcuaccccagauaccccgacgugagaugcaucugcagagacaacuggaagggcagcaacagccccgugguggacaucaacaugaaggacuacagcaucgacagcagcuacgugugcagcggccuggugggcgacacccccagaaacgacgacagaagcagcaagagcaacugcagaaaccccaacaacgagagaggcaaccacggcgugaagggcugggccuucgacaacggcgacgacguguggaugggcagaaccaucagcaaggaccugagaagcggcuacgagaccuucaaggugaucggcggcuggagcacccccaacagcaagagccagaccaacagacaggugaucguggacagcaacaacuggagcggcuacagcggcaucuucagcguggagggcaagagcugcaucaacagaugcuucuacguggagcugaucagaggcagaaagcaggagaccagagugugguggaccagcaacagcaucgugguguucugcggcaccagcggcaccuacggcaccggcagcuggcccgacggcgccaacaucgacuucaugcccaucuga

SEQ ID NO: 186067 - RNA, 1410 nt, Artificial Sequence
  derived and/or modified CDS sequence (opt4) from neuraminidase__InfluenzaA__BAA00619
augaaccccaaccagaagaucaucaccaucggcagcgugagccugaccuucgccgccaucugcuuccugaugcagaucgccauccuggugaccaccgugacccugaacuucaagcaguacgagugcgacccccccgccaccaaccaggugaugcccugcgagcccaucaucaucgagagaaacaucaccgagaucguguaccugaccaacaccaccaucgagagagagaucugccccaagcugguggaguacagaaacuggagcaagccccagugcaagaucaccggcuucgcccccuucagcaaggacaacagcaucagacugagcgccggcggcgacaucugggugaccagagagcccuacgugagcugcgaccccggcagaugcuaccaguucgcccugggccagggcaccacccuggacaacaagcacagcaacgacaccauccacgacagaaccccccacagaacccugcugaugaacgagcugggcgugcccuuccaccugggcaccagacaggugugcaucgccuggagcagcagcagcugccacgacggcaaggccuggcugcacgugugcaucaccggcuacgacaagaacgccaccgccagcuucaucuacgacggcagacugguggacagcaucggcagcuggagcaagaacauccugagaacccaggagagcgagugcgugugcaucaacggcaccugcaccguggugaugaccgacggcagcgccagcggcagagccgacaccagaauccuguucaucgaggagggcagaaucgugcacaucagcccccugagcggcagcgcccagcacguggaggagugcagcugcuaccccagauaccccggcgugagaugcaucugcagagacaacuggaagggcagcaacagacccgugguggacaucaacgugaaggacuacagcaucaacagcagcuacgugugcagcggccuggugggcgacacccccagaaacaacgacagaagcagcaacagcuacugccagaaccccaacaacgagaagggcaaccacggcgugaagggcugggccuucgacgacggcaacgacguguggaugggcagaaccaucagcgaggacagcagaagcggcuaccagaccuucaaggugaucggcggcuggagcacccccaacagcaagcugcagaucaacagacaggugaucguggacagcgacaacagaagcggcuacagcggcaucuucagcguggagggcaagagcugcaucaacagaugcuucuacguggagcugaucagaggcagaagacaggagaccagagugugguggaccagcaacagcaucgugguguucugcggcaccagcggcaccuacggcaccggcagcuggcccgacggcgccgacaucaaccugaugcccaucuga

SEQ ID NO: 186068 - RNA, 1410 nt, Artificial Sequence
  derived and/or modified CDS sequence (opt4) from neuraminidase__InfluenzaA__BAA00620
augaaccccaaccagaagaucaugaccaucggcagcgugagccugaucaucgccgccgugugcuuccugaugcagaucgccauccuggugaccaccgugacccugcacuucaagcagugcgagugcgacagccccagcaacaaccaggugaagcccugcgagcccaucaucaucgagagaaacaucaccgagaucguguaccugaacaacaccaccaucgagaaggagaccugccccaagcugguggaguacagaaacuggagcaagccccagugcaagaucaccggcuucgcccccuucagcaaggacaacagcaucagacugagcgccggcggcgacaucugggugaccagagagcccuacgugagcugcgaccccggcaagugcuaccaguucgcccugggccagggcaccacccuggacaacaagcacagcaacgacaccauccacgacagaaucccccacagaacccugcugaugaacgagcugggcgugcccuuccaccugggcaccagacaggugugcaucgccuggagcagcagcagcugccacgacggcaaggccuggcugcacgugugcgugaccggcgacgacaagaacgccaccgccagcuucaucuacgacggcagacugguggacagcaucggcagcuggagccagaacauccugagaacccaggagagcgagugcgugugcaucaacggcaccugcaccguggugaugaccgacggcagcgccagcggcagagccgacaccagaauccuguucaucgaggagggcaagaucgugcacaucagcccccugagcggcagcgcccagcacguggaggagugcagcugcuaccccagauaccccaacgugagaugcaucugcagagacaacuggaagggcagcaacagacccaucguggacaucaacaugaaggacuacagcaucgacagcagcuacgugugcagcggccuggugggcgacacccccagaaacgacgacagaagcagcaagagcaacugcagaaaccccaacaacgagaagggcaaccacggcgugaagggcugggccuucgacaacggcgacgacguguggaugggcagaaccaucagcaaggaccugagaagcggcuacgagaccuucaaggugaucggcggcugguucacccccaacagcaagagccaggugaacagacaggugaucguggacagcgacaacagaagcggcuacagcggcaucuucagcguggagggcaagagcugcaucaacagaugcuucuacguggagcugaucagaggcagaggccaggagaccagagugugguggaccagcaacagcaucgugguguucugcggcaccagcggcaccuacggcaagggcagcuggcccgacggcgccaacaucaacuucaugcccaucuga

SEQ ID NO: 186069 - RNA, 1410 nt, Artificial Sequence
  derived and/or modified CDS sequence (opt4) from neuraminidase__InfluenzaA__BAA00621
augaaccccaaccagaagaucaucaccaucggcagcgugagccugaccaucgccaccaucugcuuccugaugcagaucgccauccuggugaccaccgugacccugcacuucaagcaguacgagugcgacagccccgccaacaaccaggugaugcccugcgagcccaucaucaucgagagaaacaucaccgagaucguguaccugaccaacaccaccaucgagaaggagaucugccccaagcugguggaguacagaaacuggagcaagccccagugcaagaucaccggcuucgcccccuucagcaaggacaacagcaucagacugagcgccggcggcgacaucugggugaccagagagcccuacgugagcugcgaccccggcaagugcuaccaguucgcccugggccagggcaccacccuggacaacaagcacagcaacgacaccauccacgacagaaccccccacagaacccugcugaugaacgagcugggcgugcccuuccaccugggcaccagacaggugugcaucgccuggagcagcagcagcugccacgacggcaaggccuggcugcacgugugcgugaccggcuacgacaagaacgccaccgccagcuucaucuacgacggcagacugguggacagcaucggcagcuggagccagaacauccugagaacccaggagagcgagugcgugugcaucaacggcaccugcaccguggugaugaccgacggcagcgccagcggcagagccgacaccaagauccuguucaucgaggagggcaagaucgugcacaccagcccccugagcggcagcgcccagcacguggaggagugcagcugcuaccccagauaccccggcgugagaugcaucugcagagacaacuggaagggcagcaacagacccgugguggacaucaacgugaaggacuacagcaucgacagcagcuacgugugcagcggccuggugggcgacacccccagaaagaacgacagaagcagcagcagcuacugcagaaaccccaacaacgagaagggcacccacggcgugaagggcugggccuucgacgacggcaacgacguguggaugggcagaaccaucagcgaggacagcagaagcggcuacgagaccuucaaggugaucggcggcuggagcacccccaacagcaagcugcagaucaacagacaggugaucguggacagcaacgacagaagcggcuacagcggcaucuucagcguggagggcaagagcugcaucaacagaugcuucuacguggagcugaucagaggcagagagcaggagaccagagugugguggaccagcaacagcaucgugguguucugcggcaccagcggcaccuacggcaccggcagcuggcccgacggcgccgacaucaaccugaugcccaucuga

SEQ ID NO: 186070 - RNA, 1413 nt, Artificial Sequence
  derived and/or modified CDS sequence (opt4) from neuraminidase__InfluenzaA__BAA06714
augaaccccaaccagaagaucaucaccaucggcagcaucagcauggccaucggcaucaucagccugauccugcagaucggcaacaucaucagcaucugggugagccacagcauccagaccggcagccagaaccacaccggcaucugcaaccagagaaucaucaccuacgagaacagcaccugggugaaccagaccuacgugaacaucaacaacaccaacgugguggccggcaaggacaagaccagcgugacccuggccggcaacagcagccugugccccaucagaggcugggccaucuacaccaaggacaacagcaucagaaucggcagcaagggcgacguguucgugaucagagagcccuucaucagcugcagccaccuggagugcagaaccuucuuccugacccagggcgcccugcugaacgacaagcacagcaacggcaccgugaaggacagaagccccuacagaagacugaugagcugcccccugggcgaggcccccagccccuacaacagcagauucgagagcaucgccuggagcgccagcgccugccacgacggcaugggcuggcugaccaucggcaucagcggccccgacgacggcgccguggccgugcugaaguacaacggcaucaucaccgagaccaucaagagcuggaagaagagaauccugagaacccaggagagcgagugcgugugcgugaacggcagcugcuucaccaucaugaccgacggccccagcaacggccaggccagcuacagaaucuucaagaucgagaagggcaaggugaccaagagcaucgagcuggacgcccccaacagccacuacgaggagugcagcugcuaccccgacaccggcaccgugaugugcgugugcagagacaacuggcacggcagcaacagacccugggugagcuucaaccagaaccuggacuaccagaucggcuacaucugcagcggcguguucggcgacaaccccccccccaaggacggcaagggcagcugcgaccccgugaccguggacggcgccgacggcgugaagggcuucagcuacagauacggcaacggcguguggaucggcagaaccaagagcaacagauucagaaagggcuucgagaugaucugggaccccaacggcuggaccgacaccgacagcgacuuccuggugaagcaggacgugguggccaugaccgacuggagcggcuacagcggcagcuucgugcagcaccccgagcugaccggccuggacugcaugagacccugcuucuggguggagcuggugagaggcagacccagagagaacaccaccaucuggaccagcggcagcagcaucagcuucugcggcgugaacagcgacaccgccaacuggagcuggcccgacggcgccgagcugcccuucaccaucgacaaguga

SEQ ID NO: 186071 - RNA, 1413 nt, Artificial Sequence
  derived and/or modified CDS sequence (opt4) from neuraminidase__InfluenzaA__BAA06715
augaaccccaaccagaagaucaucaccaucggcagcaucagcauggccaucggcaucaucagccugauccugcagaucggcaacaucaucagcaucugggccagccacagcauccagaccggcagccagaaccacaccggcaucugcaaccagagaaucaucaccuacgagaacagcaccugggugaaccagaccuacgugaacaucaacaacaccaacgugguggccggcaaggacaagaccagcgugacccuggccggcaacagcagccugugccccaucagaggcugggccaucuacaccaaggacaacagcaucagaaucggcagcaagggcgacguguucgugaucagagagcccuucaucagcugcagccaccuggagugcagaaccuucuuccugacccagggcgcccugcugaacgacaagcacagcaacggcaccgugaaggacagaagccccuacagagcccugaugagcugcccccugggcgaggcccccagccccuacaacagcagauucgagagcguggccuggagcgccagcgccugccacgacggcaugggcuggcugaccaucggcaucagcggccccgacaacggcgccguggccgugcugaaguacaacggcaucaucaccgagaccaucaagagcuggaagaagagaauccugagaacccaggagagcgagugcgugugcgugaacggcagcugcuucaccaucaugaccgacggccccagcaacggcgccgccagcuacagaaucuucaagaucgagaagggcaaggugaccaagagcaucgagcuggacgcccccaacuaccacuacgaggagugcagcugcuaccccgacaccggcaccgugaugugcgugugcagagacaacuggcacggcagcaacagacccagcgugagcuucaaccagaaccuggacuaccagaucggcuacaucugcagcggcguguucggcgacaaccccagacccaaggacggcgagggcagcugcaaccccgugaccguggacggcgccgacggcgugaagggcuucagcuacagauacggcaacggcguguggaucggcagaaccaagagcaacagacugagaaagggcuucgagaugaucugggaccccaacggcuggaccgacaccgacagcgacuucagcgugaagcaggacgugguggccaugaccgacuggagcggcuacagcggcagcuucgugcagcaccccgagcugaccggccuggacugcaugagacccugcuucuggguggagcugaucagaggcagacccagagagaagaccaccaucuggaccagcggcagcagcaucagcuucugcggcgugaacagcgacaccgccaacuggagcuggcccgacggcgccgagcugcccuucaccaucgacaaguga

SEQ ID NO: 186072 - RNA, 1410 nt, Artificial Sequence
  derived and/or modified CDS sequence (opt4) from neuraminidase__InfluenzaA__BAA06716
augaacaccaaccagagaaucaucaccaucggcaccaucugccugaucgugggcaucaucagccugcugcugcagaucggcaacaucauccugcuguggaugagccacagcauccagaccggcgagaagagccaccccaaggugugcaaccagagcgugaucaccuacgagaacaacaccugggugaaccagaccuacgugaacaucagcaacaccaacaucgccgccggccagggcgugacccccaucauccuggccggcaacagcagccugugccccaucagcggcugggccaucuacagcaaggacaacagcaucagaaucggcagcaagggcgacaucuucgugaugagagagcccuucaucagcugcagccaccuggagugcagaaccuucuuccugacccagggcgcccugcugaacgacagacacagcaacggcaccgugaaggacagaagccccuacagaacccugaugagcugccccaucggcgaggcccccagccccuacaacagcagauucgagagcguggccuggagcgccagcgccugccacgacggcaugggcuggcugaccaucggcaucagcggccccgacaacggcgccguggccgugcugaaguacaacggcaucaucaccgacaccaucaagagcuggagaaacaagauccugagaacccaggagagcgagugcgugugcaucaacggcagcugcuucaccaucaugaccgacggccccagcaacggccaggccagcuacaagcuguucaagauggagaagggcaagaucaucaagagcaucgagcuggacgcccccaacuaccacuacgaggagugcagcugcuaccccgacaccggcaagguggugugcgugugcagagacaacuggcacgccagcaacagacccugggugagcuucgaccagaaccuggacuaccagaucggcuacaucugcagcggcguguucggcgacaaccccagaagcaacgacggcaagggcaacugcggccccgugcugagcaacggcgccaacggcgugaagggcuucagcuucagauacggcaacggcguguggaucggcagaaccaagagcaucagcagcagaagaggcuucgagaugaucugggaccccaacggcuggaccgagaccgacagcagcuucagcaugaagcaggacaucaucgcccugaccgacuggagcggcuacagcggcagcuucgugcagcaccccgagcugaccggcaugaacugcaucagacccugcuucuggguggagcugaucagaggccagcccaaggagagcaccaucuggaccagcggcagcagcaucagcuucugcggcgugaacagcggcaccgccagcuggagcuggcccgacggcgccgaccugcccuucaccaucgacaaguga

SEQ ID NO: 186073 - RNA, 1413 nt, Artificial Sequence
  derived and/or modified CDS sequence (opt4) from neuraminidase__InfluenzaA__BAA06717
augaaccccaaccagaagaucaucaccaucggcagcaucagcauggccaucggcaucaucagccugauccugcagaucggcaacaucaucagcaucugggccagccacagcauccagaccggcagccagaaccacaccggcaucugcaaccagagaaugaucaccuacgagaacagcaccugggugaaccagaccuacgugaacaucagcaacaccaacgugguggccggcaaggacaagaccagcgugacccuggccggcaacagcagccugugccccaucagaggcugggccaucuacaccaaggacaacagcaucagaaucggcagcaagggcgacguguucgugaucagagagcccuucaucagcugcagccaccuggagugcagaaccuucuuccugacccagggcgcccugcugaacgacaagcacagcaacggcaccgugaaggacagaagccccuacagagcccugaugagcugcccccugggcgaggcccccagccccuacaacagcagauucgagagcguggccuggagcgccagcgccugccacgacggcaugggcuggcugaccaucggcaucagcggccccgacgacggcgccguggccgugcugaaguacaacggcaucaucaccgagaccaucaagagcuggagaaagcagauccugagaacccaggagagcgagugcgugugcgugaacggcagcugcuucaccaucaugaccgacggccccagcgacggccccgccagcuacagaaucuucaagaucgagaagggcaaggugaccaagagcaucgagcuggacgcccccaacuaccacuacgaggagugcagcugcuaccccgacaccggcaccgugaugugcgugugcagagacaacuggcacggcagcaacagacccugggugagcuucaaccagaaccuggacuaccagaucggcuacaucugcagcggcguguucggcgacaaccccagacccaaggacggcgagggcagcugcaaccccgugaccguggacggcgccgacggcgugaagggcuucagcuacagauacggcaacggcguguggaucggcagaaccaagagcaacagacugagaaagggcuucgagaugaucugggaccccaacggcuggaccgacaccgacagcgacuucagcgugaagcaggacgugguggccaugaccgacuggagcggcuacagcggcagcuucgugcagcaccccgagcugaccggccuggacugcaugagacccugcuucuggguggagcugaucagaggcagacccagagagaagaccaccaucuggaccagcggcagcagcaucagcuucugcggcgugaacagcgacaccgccaacuggagcuggcccgacggcgccgagcugcccuucaccaucgacaaguga

SEQ ID NO: 186074 - RNA, 1413 nt, Artificial Sequence
  derived and/or modified CDS sequence (opt4) from neuraminidase__InfluenzaA__BAA06718
augaaccccaaccagaagaucaucaccaucggcagcaucugcauggccaucggcaucaucagccugauccugcagaucggcaacaucgugagcaucuggaucagccacagcauccagaccggcagccagaacuacaccggcaucugcaaccagagaaucaucaccuacgagaacagcaccugggugaaccagaccuacgugaacaucaacaacaccaacgugguggccggccaggacaccaccagcguggcccuggccggcaacagcagccugugccccaucagcggcugggccaucuacagcaaggacaacagcaucagaaucggcagcaagggcgacguguucgugaucagagagcccuucaucagcugcagccaccuggagugcagaaccuucuuccugacccagggcgcccugcugaacgacaagcacagcaacggcaccgugaaggacagaagccccuacagaagacugaugagcugccccaucggcgaggcccccagccccuacaacagcagauucgagagcguggccuggagcgccagcgccugccacgacggcaugggcuggcugaccaucggcaucagcggccccgacgacggcgccguggccgugcugaaguacaacggcaucaucaccgagaccaucaagagcuggagaaagagaauccugagaacccaggagagcgagugcgugugcgugaacggcagcugcuucaccaucaugaccgacggccccaacaacggccccgccagcuacagaaucuucaagaucgagaagggcaagaucaccaagagcaucgagcuggacgcccccaacagccacuacgaggagugcagcugcuaccccgacgccggcaccgugaugugcgugugcagagacaacuggcacggcagcaacagacccugggugagcuucaaccagaaccuggacuaccagaucggcuacaucugcagcggcguguucggcgacaaccccagacccaaggacggcaagggcagcugcgaccccgugaccguggacggcgccgacggcgugaagggcuucagcuacagauacggcaacggcguguggaucggcagaaccaagagcaacagcagcagaagaggcuucgagaugaucugggaccccaacggcuggaccgacaccgacagcaaguuccuggugaagcaggacgugguggccaugaccgacuggagcggcuacagcggcagcuucgugcagcaccccgagcugaccggccuggacugcaugagacccugcuucuggguggagcuggugagaggcagacccagagagaacaccaccaucuggaccagcggcagcagcaucagcuucugcggcgugaacggcgacaccgccaacuggagcuggcccgacggcgccgagcugcccuucaccaucgacaaguga

SEQ ID NO: 186075 - RNA, 1413 nt, Artificial Sequence
  derived and/or modified CDS sequence (opt4) from neuraminidase__InfluenzaA__BAA06720
augaaccccaaccagaagaucaucaccaucggcagcaucagcauggccaucggcaucaucagccugauccugcagaucggcaacaucaucagcaucugggugagccacagcauccagaccggcagccagaaccacaccggcaucugcaaccagagaaucaucaccuacgagaacagcaccugggugaaccagaccuacgugaacaucaacaacaccaacgugguggccggcaaggacaagaccagcgugacccuggccggcaacagcagccugugccccauccugggcugggccaucuacaccaaggacaacagcaucagaaucggcagcaagggcgacguguucgugaucagagagcccuucaucagcugcagccaccuggagugcagaaccuucuuccugacccagggcgcccugcugaacgacaagcacagcaacggcaccgugaaggacagaagccccuacagaagacugaugagcugcccccugggcgaggcccccagccccuacaacagcagauucgagagcguggccuggagcgccagcgccugccacgacggcaugggcuggcugaccaucggcaucagcggccccgacgacggcgccguggccgugcugaaguacaacggcaucaucaccgagaccaucaagagcuggaagaagagaauccugagaacccaggagagcgagugcgugugcgugaacggcagcugcuucaccaucaugaccgacggccccagcaacggcgccgccagcuacagaaucuucaagaucgagaagggcaaggugaccaagagcaucgagcuggacgcccccaacagccacuacgaggagugcagcugcuaccccgacaccggcaccgugaugugcgugugcagagacaacuggcacggcagcaacagacccugggugagcuucaaccagaaccuggacuaccagaucggcuacaucugcagcggcguguucggcgacaaccccccccccaaggacggcaagggcagcugcaaccccgugaccguggacggcgccgacggcgugaagggcuucagcuacagauacggcaacggcguguggaucggcagaaccaagagcaacagauucagaaagggcuucgagaugaucugggaccccaacggcuggaccgacaccgacagcgacuucagcgugaagcaggacgugguggccaugaccgacuggagcggcuacagcggcagcuucgugcagcaccccgagcugaccggccuggacugcaugagacccugcuucuggguggagcuggugagaggcagacccagagagaacaccaccaucuggaccagcggcagcagcaucagcuucugcggcgugaacagcgacaccgccaacuggagcuggcccgacggcgccgagcugcccuucaccaucgacaaguga

SEQ ID NO: 186076 - RNA, 1410 nt, Artificial Sequence
  derived and/or modified CDS sequence (opt4) from neuraminidase__InfluenzaA__BAD16637
augaaccccaaccagaagaucaucaccaucggcagcgugagccugaccaucgccaccgugugcuuccugaugcagaucgccauccuggccaccaccgugacccugcacuucaagcagcacgagugcgacagccccgccagcaaccaggugaugcccugcgagcccaucaucaucgagagaaacaucaccgagaucguguaccugaacaacaccaccaucgagaaggagaucugccccgaggugguggaguacagaaacuggagcaagccccagugccagaucaccggcuucgcccccuucagcaaggacaacagcaucagacugagcgccggcggcgacaucugggugaccagagagcccuacgugagcugcgaccccggcaagugcuaccaguucgcccugggccagggcaccacccuggacaacaagcacagcaacggcaccauccacgacagaaucccccacagaacccugcugaugaacgagcugggcgugcccuuccaccugggcaccaagcaggugugcguggccuggagcagcagcagcugccacgacggcaaggccuggcugcacgugugcgugaccggcgacgacagaaacgccaccgccagcuucaucuacgacggcagacugguggacagcaucggcagcuggagccagaacauccugagaacccaggagagcgagugcgugugcaucaacggcaccugcaccguggugaugaccgacggcagcgccagcggcagagccgacaccagaauccuguucaucaaggagggcaagaucgugcacaucagcccccugagcggcagcgcccagcacaucgaggagugcagcugcuaccccagauaccccgacgugagaugcaucugcagagacaacuggaagggcagcaacagacccgugaucgacaucaacauggaggacuacagcaucgacagcagcuacgugugcagcggccuggugggcgacacccccagaaacgacgacagcagcagcaacagcaacugcagagaccccaacaacgagagaggcaaccccggcgugaagggcugggccuucgacaacggcgacgacguguggaugggcagaaccaucagcaaggacagcagaagcggcuacgagaccuucaaggugaucggcggcuggagcacccccaacagcaagagccaggugaacagacaggugaucgugggcaacaacaacuggagcggcuacagcggcaucuucagcguggagggcaagagcugcaucaacagaugcuucuacguggagcugaucagaggcaugccccaggagaccagagugugguggaccagcaacagcaucgugguguucugcggcaccagcggcaccuacggcaccggcagcuggcccgacggcgccaacaucaacuucaugcccaucuga

SEQ ID NO: 186077 - RNA, 1410 nt, Artificial Sequence
  derived and/or modified CDS sequence (opt4) from neuraminidase__InfluenzaA__BAD16638
augaaccccaaccagaagaucaucaccaucggcagcgugagccugaccaucgccaccgugugcuuccugaugcagaucgccauccuggccaccaccgugacccugcacuucaagcagcacgagugcgacagccccgccagcaaccaggugaugcccugcgagcccaucaucaucgagagaaacaucaccgagaucguguaccugaacaacaccaccaucgagaaggagaucugccccgaggugguggaguacagaaacuggagcaagccccagugccagaucaccggcuucgcccccuucagcaaggacaacagcaucagacugagcgccggcggcgacaucugggugaccagagagcccuacgugagcugcgaccccggcaagugcuaccaguucgcccugggccagggcaccacccuggacaacaagcacagcaacggcaccauccacgacagaaucccccacagaacccugcugaugaacgagcugggcgugcccuuccaccugggcaccaagcaggugugcguggccuggagcagcagcagcugccacgacggcaaggccuggcugcacgugugcgugaccggcgacgacagaaacgccaccgccagcuucaucuacgacggcagacugguggacagcaucggcagcuggagccagaacauccugagaacccacgagagcgagugcgugugcaucaacggcaccugcaccguggugaugaccgacggcagcgccagcggcagagccgacaccagaauccuguucaucaaggagggcaagaucgugcacaucagcccccugagcggcagcgcccagcacaucgaggagugcagcugcuaccccagauaccccgacgugagaugcaucugcagagacaacuggaagggcagcaacagacccgugaucgacaucaacauggaggacuacagcaucgacagcagcuacgugugcagcggccuggugggcgacacccccagaaacgacgacagcagcagcaacagcaacugcagagaccccaacaacgagagaggcaaccccggcgugaagggcugggccuucgacaacggcgacgacguguggaugggcagaaccaucaacaaggacagcagaagcggcuacgagaccuucaaggugaucggcggcuggagcacccccaacagcaagagccaggugaacagacaggugaucguggacaacaacaacuggagcggcuacagcggcaucuucagcguggagggcaagagcugcaucaacagaugcuucuacguggagcugaucagaggcagaccccaggagaccagagugugguggaccagcaacagcaucgugguguucugcggcaccagcggcaccuacggcaccggcagcuggcccgacggcgccaacaucaacuucaugcccaucuga

SEQ ID NO: 186078 - RNA, 1410 nt, Artificial Sequence; identical to SEQ ID NO: 183257
  derived and/or modified CDS sequence (opt4) from neuraminidase__InfluenzaA__BAD16639

SEQ ID NO: 186079 - RNA, 1410 nt, Artificial Sequence
  derived and/or modified CDS sequence (opt4) from neuraminidase__InfluenzaA__BAD16640
augaaccccaaccagaagaucaucaccaucggcagcgugagccugaccaucgccaccgugugcuuccugaugcagaucgccauccuggugaccaccgugacccugcacuucaagcagcacgagugcgacagccccgccagcaaccaggugaugcccugcgagcccaucaucaucgagagaaacaucaccgagaucguguaccugaacaacaccaccaucgagaaggagaucugccccgaggugguggaguacagaaacuggagcaagccccagugccagaucaccggcuucgcccccuucagcaaggacaacagcaucagacugagcgccggcggcgacaucugggugaccagagagcccuacgugagcugcgaccccggcaagugcuaccaguucgcccugggccagggcaccacccuggacaacaagcacagcaacgacaccauccacgacagaaucccccacagaacccugcugaugaacgagcugggcgugcccuuccaccugggcaccagacaggugugcguggccuggagcagcagcagcugccacgacggcaaggccuggcugcacgugugcgugaccggcgacgacaagaacgccaccgccagcuucaucuacgacggcagacugauggacagcaucggcagcuggagccagaacauccugagaacccaggagagcgagugcgugugcaucaacggcaccugcaccguggugaugaccgacggcagcgccagcggcagagccgacaccagaauccuguucaucgaggagggcaagaucgugcacaucagcccccugagcggcagcgcccagcacguggaggagugcagcugcuaccccagauaccccgacgugagaugcaucugcagagacaacuggaagggcagcaacagacccgugaucgacaucaacauggaggacuacagcaucgacagcagcuacgugugcagcggccuggugggcgacacccccagaaacgacgacagaagcagcaacagcaacugcagaaaccccaacaacgagagaggcaaccccggcgugaagggcugggccuucgacaacggcgacgacguguggaugggcagaaccaucagcaaggaccugagaagcggcuacgagaccuucaaggugaucggcggcuggagcacccccaacagcaagagccagaucaacagacaggugaucguggacagcaacaacuggagcggcuacagcggcaucuucagcguggagggcaagagcugcaucaacagaugcuucuacguggagcugaucagaggcagacagcaggagaccagagugugguggaccagcaacagcaucgugguguucugcggcaccagcggcaccuacggcaccggcagcuggcccgacggcgccaacaucaacuucaugcccaucuga

SEQ ID NO: 186080 - RNA, 1410 nt, Artificial Sequence
  derived and/or modified CDS sequence (opt4) from neuraminidase__InfluenzaA__BAD16641
augaaccccaaccagaagaucaucaccaucggcagcgccagccugaccaucgccaccgugugcuuccugaugcagaucgccauccuggugaccaccgugacccugcacuucaagcagcacgagugcgacagccccgccagcaaccaggugaugcccugcgagcccaucaucaucgagagaaacaccaccgagaucguguaccugaacaacaccaccaucgagaaggagaucugccccaaggugguggaguacagaaacuggagcaagccccagugcaagaucaccggcuucgcccccuucagcaaggacaacagcaucagacugagcgccggcggcgacaucugggugaccagagagcccuacgugagcugcgaccccggcaagugcuaccaguucgcccugggccagggcaccacccuggacaacaagcacagcaacgacaccauccacgacagaaucccccacagaacccugcugaugaacgagcugggcgugcccuuccaccugggcaccagacaggugugcaucgccuggagcagcagcagcugccacgacggcaaggccuggcugcacgugugcgugaccggcgacgacaagaacgccaccgccagcuucaucuacgacggcagacugguggacagcaucggcagcuggagccagaacauccugagaacccaggagagcgagugcgugugcaucaacggcaccugcaccguggugaugaccgacggcagcgccagcggcagagccgacaccagaauccuguucaucgaggagggcaagaucgugcacaucagcccccugagcggcagcgcccagcacguggaggagugcagcugcuaccccagauaccccgacgugagaugcaucugcagagacaacuggaagggcagcaacagacccgugguggacaucaacauggaggacuacagcaucgacagcagcuacgugugcagcggccuggugggcgacacccccagaaacgacgacagaagcagcaacagcaacugcagaaaccccaacaacgagaagggcaaccagggcgugaagggcugggccuucgacaacggcgacgacguguggaugggcagaaccaucagcaaggaccugagaagcggcuacgagaccuucaaggugaucggcggcuggagcacccccaacagcaagagccagaucaacagacaggugaucguggacagcgacaacagaagcggcuacagcggcaucuucagcguggagggcaagagcugcaucaacagaugcuucuacguggagcugaucagaggcagaaagcaggagaccagagugugguggaccagcaacagcaucgugguguucugcggcaccagcggcaccuacggcaccggcagcuggcccgacggcgccaacaucaaccugaugcccaucuga

SEQ ID NO: 186081 - RNA, 1410 nt, Artificial Sequence
  derived and/or modified CDS sequence (opt4) from neuraminidase__InfluenzaA__BAD16642
augaaccccaaccagaagaucaucaccaucggcagcgugagccugaccaucgccaccgugugcuuccugaugcagaucgccauccuggugaccaccgugacccugcacuucaagcaguacgagugcgacagccccgccagcaaccaggugaugcccugcgagcccaucaucaucgagagaaacaucaccgagaucguguaccugaacaacaccaccaucgacaaggagaagugccccaaggugguggaguacagaaacuggagcaagccccagugccagaucaccggcuucgcccccuucagcaaggacaacagcaucagacugagcgccggcggcgacaucugggugaccagagagcccuacgugagcugcgaccacggcaagugcuaccaguucgcccugggccagggcaccacccuggacaacaagcacagcaacgacaccauccacgacagaaucccccacagaacccugcugaugaacgagcugggcgugcccuuccaccugggcaccagacaggugugcaucgccuggagcagcagcagcugccacgacggcaaggccuggcugcacgugugcaucaccggcgacgacaagaacgccaccgccagcuucaucuacgacggcagacugguggacagcaucggcagcuggagccagaacauccugagaacccaggagagcgagugcgugugcaucaacggcaccugcaccguggugaugaccgacggcagcgccagcggcagagccgacaccagaauccuguucaucgaggagggcaagaucgugcacaucagcccccugagcggcagcgcccagcacguggaggagugcagcugcuaccccagauaccccggcgugagaugcaucugcagagacaacuggaagggcagcaacagacccgugguggacaucaacauggaggacuacagcaucgacagcagcuacgugugcagcggccuggugggcgacacccccagaaacgacgacagaagcagcaacagcaacugcagaaaccccaacaacgagagaggcaaccagggcgugaagggcugggccuucgacaacggcgacgacguguggaugggcagaaccaucagcaaggaccugagaagcggcuacgagaccuucaaggugaucggcggcuggagcacccccaacagcaagagccagaucaacagacaggugaucguggacagcgacaacagaagcggcuacagcggcaucuucagcguggagggcaagagcugcaucaacagaugcuucuacguggagcugaucagaggcagaaagcaggagaccagagugugguggaccagcaacagcaucgugguguucugcggcaccagcggcaccuacggcaccggcagcuggcccgacggcgccaacaucaacuucaugcccaucuga

SEQ ID NO: 186082 - RNA, 1410 nt, Artificial Sequence
  derived and/or modified CDS sequence (opt4) from neuraminidase__InfluenzaA__BAD16643
augaaccccaaccagaagaucaucaccaucggcagcgugagccugaccaucgccaccaucugcuuccugaugcagaucgccauccuggugaccaccgugacccugcacuucaagcaguacgagugcgacagccccgccaacaaccaggugaugcccugcgagcccaucaucaucgagagaaacaucaccgagaucguguaccugaccaacaccaccaucgagaaggagaucugccccaagcugguggaguacagaaacuggagcaagccccagugcaagaucaccggcuucgcccccuucagcaaggacaacagcaucagacugagcgccggcggcgacaucugggugaccagagagcccuacgugagcugcgaccccggcaagugcuaccaguucgcccugggccagggcaccacccuggacaacaagcacagcaacgacaccauccacgacagaaccccccacagaacccugcugaugaacgagcugggcgugcccuuccaccugggcaccagacaggugugcaucgccuggagcagcagcagcugccacgacggcaaggccuggcugcacgugugcgugaccggcuacgacaagaacgccaccgccagcuucaucuacgacggcagacugguggacagcaucggcagcuggagccagaacauccugagaacccaggagagcgagugcgugugcaucaacggcaccugcaccguggugaugaccgacggcagcgccagcggcagagccgacaccaagauccuguucaucgaggagggcaagaucgugcacaucagcccccugagcggcagcgcccagcacguggaggagugcagcugcuaccccagauaccccggcgugagaugcaucugcagagacaacuggaagggcagcaacagacccgugguggacaucaacgugaaggacuacagcaucgacagcagcuacgugugcagcggccuggugggcgacacccccagaaacaacgacagaagcagcaacagcuacugcagaaaccccaacaacgagaagggcaaccacggcgugaagggcugggccuucgacgacggcaacgacguguggaugggcagaaccaucagcgaggacagcagaagcggcuacgagaccuucaaggugaucggcggccuguucacccccaacagcaagcugcagaucaacagacaggugaucguggacagcgacaacagaagcggcuacagcggcaucuucagcguggagggcaagagcugcaucaacagaugcuucuacguggagcugaucagaggcagagagcaggagaccagagugugguggaccagcaacagcaucgugguguucugcggcaccagcggcaccuacggcaccggcagcuggcccgacggcgccgacaucaaccugaugcccaucuga

SEQ ID NO: 186083 - RNA, 1410 nt, Artificial Sequence
  derived and/or modified CDS sequence (opt4) from neuraminidase__InfluenzaA__BAD16644
augaaccccaaccagaagaucaucaccaucggcagcgugagccugaccaucgccaccaucugcuuccugaugcagaucgccauccuggugaccaccgugacccugcacuucaagcaguacgagugcgacagcccccccaacaaccaggugaugcccugcgagcccaucaucaucgagagaaacaucaccgagaucguguaccugaccaacaccaccaucgagaaggagaucugccccaagcugguggaguacagaaacuggagcaagccccagugcaagaucaccggcuucgcccccuucagcaaggacaacagcaucagacugagcgccggcggcgacaucugggugaccagagagcccuacgugagcugcgaccccggcaagugcuaccaguucgcccugggccagggcaccacccuggacaacaagcacagcaacgacaccauccacgacagaaccccccacagaacccugcugaugaacgagcugggcgugcccuuccaccugggcaccagacaggugugcaucgccuggagcagaagcagcugccacgacggcaaggccuggcugcacgugugcgugaccggcuacgacaagaacgccaccgccagcuucaucuacgacggcagacugguggacagcaucggcagcuggagcaagaacauccugagaacccaggagagcgagugcgugugcaucaacggcaccugcaccguggugaugaccgacggcagcgccagcggcagagccgacaccaagauccuguucaucgaggagggcaagaucgugcacaucagcccccugagcggcagcgcccagcacguggaggagugcagcugcuaccccagauaccccggcgugagaugcaucugcagagacaacuggaagggcagcaacagacccgugguggacaucaacgugaaggacuacagcaucgacagcagcuacgugugcagcggccuggugggcgacacccccagaaacaacgacagaagcagcaacagcuacugcagaaaccccaacaacgagaagggcaaccacggcgugaagggcugggccuucgacgacggcaacgacguguggaugggcagaaccaucagcgaggacagcagaagcggcugcgagaccuucaaggugaucggcggcuggagcacccccaacagcaagcugcagaucaacagacaggugaucguggacagcgacaacagaagcggcuacagcggcaucuucagcguggagggcaagagcugcaucaacagaugcuucuacguggagcugaucagaggcagagagcaggagaccagagugugguggaccagcaacagcaucgugguguucugcggcaccagcggcaccuacggcaccggcagcuggcccgacggcgccgacaucaaccugaugcccaucuga

SEQ ID NO: 186084 - RNA, 1410 nt, Artificial Sequence; identical to SEQ ID NO: 174636
  derived and/or modified CDS sequence (opt4) from neuraminidase__InfluenzaA__BAD16645

SEQ ID NO: 186085 - RNA, 1410 nt, Artificial Sequence; identical to SEQ ID NO: 182604
  derived and/or modified CDS sequence (opt4) from neuraminidase__InfluenzaA__BAD16646

SEQ ID NO: 186086 - RNA, 1410 nt, Artificial Sequence; identical to SEQ ID NO: 174636
  derived and/or modified CDS sequence (opt4) from neuraminidase__InfluenzaA__BAD16647

SEQ ID NO: 186087 - RNA, 1410 nt, Artificial Sequence
  derived and/or modified CDS sequence (opt4) from neuraminidase__InfluenzaA__BAD16648
augaaccccaaccagaagaucaucaccaucggcagcgugagccugaccaucgccaccaucugcuuccugaugcagaucgccauccuggugaccaccgugacccugcacuucaagcaguacgagugcagcagcccccccaacaaccaggugaugcccugcgagcccaucaucaucgagagaaacaucaccgagaucguguaccugaccaacaccaccaucgagaaggagaucugccccaagcugguggaguacagaaacuggagcaagccccagugcaagaucaccggcuucgcccccuucagcaaggacaacagcaucagacugagcgccggcggcgacaucugggugaccagagagcccuacgugagcugcgaccccggcaagugcuaccaguucgcccugggccagggcaccacccuggacaacaagcacagcaacgacaccauccacgacagaacccccuacagaacccugcugaugaacgagcugggcgugcccuuccaccugggcaccagacaggugugcaucgccuggagcagcagcagcugccacgacggcaaggccuggcugcacgugugcgugaccggcuacgacaagaacgccaccgccagcuucaucuacgacggcagacugguggacagcaucggcagcuggagcaagaacauccugagaacccaggagagcgagugcgugugcaucuacggcaccugcaccguggugaugaccgacggcagcgccagcgagagagccgagaccaagauccuguucaucgaggagggcaagaucgugcacaucagcccccugagcggcagcgcccagcacguggaggagugcagcugcuaccccagauaccccggcgugagaugcgugugcagagacaacuggaagggcagcaacagacccgugguggacaucaacgugaaggacuacagcaucgugagcagcuacgugugcagcggccuggugggcgacacccccagaaagaacgacagaagcagcagcagcuacugcagaaaccccaacaacgagaagggcaaccacggcgugaagggcugggccuucgacgacggcaacgacguguggaugggcagaaccaucagcgaggagagcagaagcggcuacgagaccuucaaggugaucggcggcuggagcacccccaacagcaagcugcagaucaacagacaggugaucguggacagcgacaacagaagcggcuacagcggcaucuucagcguggagggcaagagcugcaucaacagaugcuucuacguggagcugaucagaggcagagagcaggagaccagagugugguggaccagcaacagcaucgugguguucugcggcaccagcggcaccuacggcaccggcagcuggcccgacggcgccgacaucaaccugaugcccaucuga

SEQ ID NO: 186088 - RNA, 1410 nt, Artificial Sequence
  derived and/or modified CDS sequence (opt4) from neuraminidase__InfluenzaA__BAE07203
augaaccccaaccagaagaucaccaccaucggcagcaucugcauggugaucggcaucgugagccugaugcugcagaucggcaacaucaucagcaucugggugagccacagcauccagaccggcaaccagcaccaggccgagcccugcaaccagagcaucaucaccuacgagaacaacaccugggugaaccagaccuacgugaacaucagcaacaccaacuuccugaccgagaaggccguggccagcgugacccuggccggcaacagcagccugugccccaucagcggcugggccguguacagcaaggacaacggcaucagaaucggcagcaagggcgacguguucgugaucagagagcccuucaucagcugcagccaccuggagugcagaaccuucuuccugacccagggcgcccugcugaacgacaagcacagcaacggcaccgugaaggacagaagcccccacagaacccugaugagcugccccgugggcgaggcccccagccccuacaacagcagauucgagagcguggccuggagcgccagcgccugccacgacggcaccagcuggcugaccaucggcaucagcggccccgacaacggcgccguggccgugcugaaguacaacggcaucaucaccgacaccaucaagagcuggagaaacaacaucaugagaacccaggagagcgagugcgccugcgugaacggcagcugcuucaccgugaugaccgacggccccagcaacggccaggccagcuacaagaucuucagaaucgagaagggcaagguggugaagagcgccgagcugaacgcccccaacuaccacuacgaggagugcagcugcuaccccgacgccggcgagaucaccugcgugugcagagacaacuggcacggcagcaacagacccugggugagcuucaaccagaaccuggaguacagaaucggcuacaucugcagcggcguguucggcgacaaccccagacccaacgacggcaccggcagcugcggccccgugagccccaagggcgccuacggcaucaagggcuucagcuucaaguacggcaacggcguguggaucggcagaaccaagagcaccaacagcagaagcggcuucgagaugaucugggaccccaacggcuggaccggcaccgacagcaacuucagcgugaagcaggacaucguggccaucaccgacuggagcggcuacagcggcagcuucgugcagcaccccgagcugaccggccuggacugcaucagacccugcuucuggguggagcugaucagaggcagacccaaggagagcaccaucuggaccagcggcagcagcaucagcuucugcggcgugaacagcgacaccgugggcuggagcuggcccgacggcgccgagcugcccuucaccaucgacaaguga

SEQ ID NO: 186089 - RNA, 1410 nt, Artificial Sequence
  derived and/or modified CDS sequence (opt4) from neuraminidase__InfluenzaA__BAF46322
augaaccccaaccccaagaucaucaccaucggcagcgugagccugaccaucagcaccaucugcuucuucaugcagaucgccauccugaucaccaccgugacccugcacuucaagcaguacgaguucaacagcccccccaacaaccaggugaugcugugcgagcccaccaucaucgagagaaacaucaccgagaucguguaccugaccaacaccaccaucgagaaggagaucugccccaagcuggccgaguacagaaacuggagcaagccccagugcgacaucaccggcuucgcccccuucagcaaggacaacagcaucagacugagcgccggcggcgacaucugggugaccagagagcccuacgugagcugcgaccccgacaagugcuaccaguucgcccugggccagggcaccacccugaacaacgugcacagcaacgacaccgugcacgacagaacccccuacagaacccugcugaugaacgagcugggcgugcccuuccaccugggcaccaagcaggugugcaucgccuggagcagcagcagcugccacgacggcaaggccuggcugcacgugugcgugaccggcgacgacaagaacgccaccgccagcuucaucuacaacggcagacugguggacagcaucgugagcuggagcaagaagauccugagaacccaggagagcgagugcgugugcaucaacggcaccugcaccguggugaugaccgacggcagcgccagcggcaaggccgacaccaagauccuguucaucgaggagggcaagaucgugcacaccagcacccugagcggcagcgcccagcacguggaggagugcagcugcuaccccagauaccccggcgugagaugcgugugcagagacaacuggaagggcagcaacagacccaucguggacaucaacaucaaggacuacagcaucgugagcagcuacgugugcagcggccuggugggcgacacccccagaaagaacgacagcagcagcagcagccacugccuggaccccaacaacgaggagggcggccacggcgugaagggcugggccuucgacgacggcaacgacguguggaugggcagaaccaucagcgagaagcugagaagcggcuacgagaccuucaaggugaucgagggcuggagcaaccccaacagcaagcugcagaucaacagacaggugaucguggacagaggcaacagaagcggcuacagcggcaucuucagcguggagggcaagagcugcaucaacagaugcuucuacguggagcugaucagaggcagaaaggaggagaccgaggugcuguggaccagcaacagcaucgugguguucugcggcaccagcggcaccuacggcaccggcagcuggcccgacggcgccgacaucaaccugaugcccaucuga

SEQ ID NO: 186090 - RNA, 1410 nt, Artificial Sequence; identical to SEQ ID NO: 174774
  derived and/or modified CDS sequence (opt4) from neuraminidase__InfluenzaA__BAF46323

SEQ ID NO: 186091 - RNA, 1410 nt, Artificial Sequence
  derived and/or modified CDS sequence (opt4) from neuraminidase__InfluenzaA__BAF46324
augaaccccaaccagaagaucaucaccaucggcagcgugagccugaccaucagcaccaucugcuucuucaugcagaucgccauccugaucaccaccgugacccugcacuucaagcaguacgaguucaacagcccccccaacaaccaggugaugcugugcgagcccaccaucaucgagagaaacaucaccgagaucguguaccugaccaacaccaccaucgagaaggagaucugccccaagcuggccgaguacagaaacuggagcaagccccagugcgacaucaccggcuucgcccccuucagcaaggacaacagcaucagacugagcgccggcggcgacaucugggugaccagagagcccuacgugagcugcgaccccgacaagugcuaccaguucgcccugggccagggcaccacccugaacaacgugcacagcaacgacaucgugcacgacagaacccccuacagaacccugcugaugaacgagcugggcgugcccuuccaccugggcaccaagcaggugugcaucgccuggagcagcagcagcugccacgacggcaaggccuggcugcacgugugggugaccggcgacgacaagaacgccaccgccagcuucaucuacaacggcagacugguggacagcaucgugagcuggagcaagaagauccugagaacccaggagagcgagugcgugugcaucaacggcaccugcaccguggugaugaccgacggcagcgccagcggcaaggccgacaccaagauccuguucaucgaggagggcaagaucgugcacaccagcacccugagcggcagcgcccagcacguggaggagugcagcugcuaccccagauaccccggcgugagaugcgugugcagagacaacuggaagggcagcaacagacccaucguggacaucaacaucaaggacuacagcaucgugagcagcuacgugugcagcggccuggugggcgacacccccagaaagaacgacagcagcagcagcagccacugccuggaccccaacaacgaggagggcggccacggcgugaagggcugggccuucgacgacggcaacgacguguggaugggcagaaccaucagcgagaagcugagaagcggcuacgagaccuucaaggugaucgagggcuggagcaaccccaacagcaagcugcagaucaacagacaggugaucguggacagaggcaacagaagcggcuacagcggcaucuucagcguggagggcaagagcugcaucaacagaugcuucuacguggagcugaucagaggcagaaaggaggagaccgaggugcuguggaccagcaacagcaucgugguguucugcggcaccagcggcaccuacggcaccggcagcuggcccgacggcgccgacaucaaccugaugcccaucuga

SEQ ID NO: 186092 - RNA, 1410 nt, Artificial Sequence
  derived and/or modified CDS sequence (opt4) from neuraminidase__InfluenzaA__BAF46332
augaaccccaaccagaagaucaucaccaucggcagcgugagccugaccaucagcaccaucugcuucuucaugcagaucgccauccugaucaccaccgugacccugcacuucaagcaguacgaguucaacagcccccccaacaaccaggugaugcugugcgagcccaccaucaucgagagaaacaucaccgagaucguguaccugaccaacaccaccaucgagaaggagaucugccccaagcuggccgaguacagaaaguggagcaagccccagugcaacaucaccggcuucgcccccuucagcaaggacaacagcaucagacugagcgccggcggcgacaucugggugaccagagagcccuacgugagcugcgaccccgacaagugcuaccaguucgcccugggccagggcaccacccugaacaacgugcacagcaacgacaccgugagagacagaacccccuacagaacccugcugaugaacgagcugggcgugcccuuccaccugggcaccaagcaggugugcaucgccuggagcagcagcagcugccacgacggcaaggccuggcugcacgugugcgugaccggcgacgacaagaacgccaccgccagcuucaucuacaacggcagacugguggacagcaucgugagcuggagcaaggagauccugagaacccaggagagcgagugcgugugcaucaacggcaccugcaccguggugaugaccgacggcagcgccagcggcaaggccgacaccaagauccuguucaucgaggagggcaagaucgugcacaccagcacccugagcggcagcgcccaccacguggaggagugcagcugcuaccccagauaccccggcgugagaugcgugugcagagacaacuggaagggcagcaacagacccaucguggacaucaacaucaaggacuacagcaucgugagcagcuacgugugcagcggccuggugggcgacacccccagaaagaacgacagcagcagcagcagccacugccuggaccccaacaacgaggagggcggccacggcgugaagggcugggccuucgacgacggcaacgacguguggaugggcagaaccaucagcgagaagcugagaagcggcuacgagaccuucaaggugaucgagggcuggagcaaccccaacagcaagcugcagaucaacagacaggugaucguggacagaggcaacagaagcggcuacagcggcaucuucagcguggagggcaagagcugcaucaacagaugcuucuacguggagcugaucagaggcagaaaggaggagaccgaggugcuguggaccagcaacagcaucgugguguucugcggcaccagcggcaccuacggcaccggcagcuggcccgacggcgccgacaucaaccugaugcccaucuga

SEQ ID NO: 186093 - RNA, 1410 nt, Artificial Sequence
  derived and/or modified CDS sequence (opt4) from neuraminidase__InfluenzaA__BAF46334
augaaccccaaccagaagaucaucaccaucggcagcgugagccugaccaucagcaccaucugcuucuucaugcagaucgccauccugaucaccaccgugacccugcacuucaagcaguacgaguucaacagcccccccaacaaccaggugaugcugugcgagcccaccaucaucgagagaaacaucaccgagaucguguaccugaccaacaccaccaucgagaaggagaucugccccaagcuggccgaguacagaaaguggagcaagccccagugcaacaucaccggcuucgcccccuucagcaaggacaacagcaucagacugagcgccggcggcgacaucugggugaccagagagcccuacgugagcugcgaccccgacaagugcuaccaguucgcccugggccagggcaccacccugaacaacgugcacagcaacgacaccgugagagacagaacccccuacagaacccugcugaugaacgagcugggcgugcccuuccaccugggcaccaagcaggugugcaucgccuggagcagcagcagcugccacgacggcaaggccuggcugcacgugugcgugaccggcgacgacaagaacgccaccgccagcuucaucuacaacggcagacugguggacagcaucgugagcuggagcaaggagauccugagaacccaggagagcgagugcgugugcaucaacggcaccugcaccguggugaugaccgacggcagcgccagcggcaaggccgacaccaagauccuguucaucgaggagggcaagaucgugcacaccagcacccugagcggcagcgcccagcacguggaggagugcagcugcuaccccagauaccccggcgugagaugcgugugcagagacaacuggaagggcagcaacagacccaucguggacaucaacaucaaggacuacagcaucgugagcagcuacgugugcagcggccuggugggcgacacccccagaaagaacgacagcagcagcagcagccacugccuggaccccaacaacgaggagggcggccacggcgugaagggcugggccuucgacgacggcaacgacguguggaugggcagaaccaucagcgagaagcugagaagcggcuacgagaccuucaaggugaucgagggcuggagcaaccccaacagcaagcugcagaucaacagacaggugaucguggacagaggcaacagaagcggcuacagcggcaucuucagcguggagggcaagagcugcaucaacagaugcuucuacguggagcugaucagaggcagaaaggaggagaccgaggugcuguggaccagcaacagcaucgugguguucugcggcaccagcggcaccuacggcaccggcagcuggcccgacggcgccgacaucaaccugaugcccaucuga

SEQ ID NO: 186094 - RNA, 1410 nt, Artificial Sequence; identical to SEQ ID NO: 186093
  derived and/or modified CDS sequence (opt4) from neuraminidase__InfluenzaA__BAF46335

SEQ ID NO: 186095 - RNA, 1410 nt, Artificial Sequence
  derived and/or modified CDS sequence (opt4) from neuraminidase__InfluenzaA__BAF46337
augaaccccaaccagaagaucaucaccaucggcagcgugagccugaccaucagcaccaucugcuucuucaugcagaucgccauccugaucaccaccgugacccugcacuucaagcaguacgaguucaacagcccccccaacaaccaggugaugcugugcgagcccaccaucaucgagagaaacaucaccgagaucguguaccugaccaacaccaccaucgagaaggagaucugccccaagcuggccgaguacagaaaguggagcaagccccagugcaacaucaccggcuucgcccccuucagcaaggacaacagcaucagacugagcgccggcggcgacaucugggugaccagagagcccuacgugagcugcgaccccgacaagugcuaccaguucgcccugggccagggcaccacccugaacaacgugcacagcaacgacaccgugagagugagaacccccuacagaacccugcugaugaacgagcugggcgugcccuuccaccugggcaccaagcaggugugcaucgccuggagcagcagcagcugccacgacggcaaggccuggcugcacgugugcgugaccggcgacgacaagaacgccaccgccagcuucaucuacaacggcagacugguggacagcaucgugagcuggagcaaggagauccugagaacccaggagagcgagugcgugugcaucaacggcaccugcaccguggugaugaccgacggcagcgccagcggcaaggccgacaccaagauccuguucaucgaggagggcaagaucgugcacaccagcacccugagcggcagcgcccagcacguggaggagugcagcugcuaccccagauaccccggcgugagaugcgugugcagagacaacuggaagggcagcaacagacccaucguggacaucaacaucaaggacuacagcaucgugagcagcuacgugugcagcggccuggugggcgacacccccagaaagaacgacagcagcagcagcagccacugccuggaccccaacaacgaggagggcggccacggcgugaagggcugggccuucgacgacggcaacgacguguggauggccagaaccaucagcgagaagcugagaagcggcuacgagaccuucaaggugaucgagggcuggagcaaccccaacagcaagcugcagaucaacagacaggugaucguggacagaggcaacagaagcggcuacagcggcaucuucagcguggagggcaagagcugcaucaacagaugcuucuacguggagcugaucagaggcagaaaggaggagaccgaggugcuguggaccagcaacagcaucgugguguucugcggcaccagcggcaccuacggcaccggcagcuggcccgacggcgccgacaucaaccugaugcccaucuga

SEQ ID NO: 186096 - RNA, 1410 nt, Artificial Sequence; identical to SEQ ID NO: 186093
  derived and/or modified CDS sequence (opt4) from neuraminidase__InfluenzaA__BAF46345

SEQ ID NO: 186097 - RNA, 1410 nt, Artificial Sequence
  derived and/or modified CDS sequence (opt4) from neuraminidase__InfluenzaA__BAF46346
augaaccccaaccagaagaucaucaccaucggcagcgugagccugaccaucagcaccaucugcuucuucaugcagaucgccauccugaucaccaccgugacccugcacuucaagcaguacgaguucaacagcccccccaacaaccaggugaugcugugcgagcccaccaucaucgagagaaacaucaccgagaucguguaccugaccaacaccaccaucgagaaggagaucugccccaagcuggccgaguacagaaaguggagcaagccccagugcaacaucgccggcuucgcccccuucagcaaggacaacagcaucagacugagcgccggcggcgacaucugggugaccagagagcccuacgugagcugcgaccccgacaagugcuaccaguucgcccugggccagggcaccacccugaacaacgugcacagcaacgacaccgugagagacagaacccccuacagaacccugcugaugaacgagcugggcgugcccuuccaccugggcaccaagcaggugugcaucgccuggagcagcagcagcugccacgacggcaaggccuggcugcacgugugcgugaccggcgacgacaagaacgccaccgccagcuucaucuacaacggcagacugguggacagcaucgugagcuggagcaaggagauccugagaacccaggagagcgagugcgugugcaucaacggcaccugcaccguggugaugaccgacggcagcgccagcggcaaggccgacaccaagauccuguucaucgaggagggcaagaucgugcacaccagcacccugagcggcagcgcccagcacguggaggagugcagcugcuaccccagauaccccggcgugaucugcgugugcagagacaacuggaagggcagcaacagacccaucguggacaucaacaucaaggacuacagcaucgugagcagcuacgugugcagcggccuggugggcgacacccccagaaagaacgacagcagcagcagcagccacugccuggaccccaacaacgaggagggcggccacggcgugaagggcugggccuucgacgacggcaacgacguguggaugggcagaaccaucagcgagaagcugagaagcggcuacgagaccuucaaggugaucgagggcuggagcaaccccaacagcaagcugcagaucaacagacaggugaucguggacagaggcaacagaagcggcuacagcggcaucuucagcguggagggcaagagcugcaucaacagaugcuucuacguggagcugaucagaggcagaaaggaggagaccgaggugcuguggaccagcaacagcaucgugguguucugcggcaccagcggcaccuacggcaccggcagcuggcccgacggcgccgacaucaaccugaugcccaucuga

SEQ ID NO: 186098 - RNA, 1410 nt, Artificial Sequence
  derived and/or modified CDS sequence (opt4) from neuraminidase__InfluenzaA__BAF46347
augaaccccaaccagaagaucaucaccaucggcagcgugagccugaccaucagcaccaucugcuucuucaugcagaucgccauccugaucaccaccgugacccugcacuucaagcaguacgaguucaacagcccccccaacaaccaggugaugcugugcgagcccaccaucaucgagagaaacaucaccgagaucguguaccugaccaacaccaccaucgagaaggagaucugccccaagcuggccgaguacagaaaguggagcaagccccagugcaacaucaccggcuucgcccccuucagcaaggacaacagcaucagacugagcgccggcggcgacaucugggugaccagagagcccuacgugagcugcgaccccgacaagugcuaccaguucgcccugggccagggcaccacccugaacaacgugcacagcaacgacaccgugagagacagaacccccuacagaacccugcugaugaacgagcugggcgugcccuuccaccugggcaccaagcaggugugcaucgccuggagcagcagcagcugccacgacggcaaggccuggcugcacgugugcgugaccggcgacgacaagaacgccaccgccaccuucaucuacaacggcagacugguggacagcaucgugagcuggagcaaggagauccugagaacccaggagagcgagugcgugugcaucaacggcaccugcaccguggugaugaccgacggcagcgccagcggcaaggccgacaccaagauccuguucaucgaggagggcaagaucgugcacaccagcacccugagcggcagcgcccagcacguggaggagugcagcugcuaccccagauaccccggcgugagaugcgugugcagagacaacuggaagggcagcaacagacccaucguggacaucaacaucaaggacuacagcaucgugagcagcuacgugugcagcggccuggugggcgacacccccagaaagaacgacagcagcagcagcagccacugccuggaccccaacaacgaggagggcggccacggcgugaagggcugggccuucgacgacggcaacgacguguggaugggcagaaccaucagcgagaagcugagaagcggcuacgagaccuucaaggugaucgagggcuggagcaaccccaacagcaagcugcagaucaacagacaggugaucguggacagaggcaacagaagcggcuacagcggcaucuucagcguggagggcaagagcugcaucaacagaugcuucuacguggagcugaucagaggcagaaaggaggagaccgaggugcuguggaccagcaacagcaucgugguguucugcggcaccagcggcaccuacggcaccggcagcuggcccgacggcgccgacaucaaccugaugcccaucuga

SEQ ID NO: 186099 - RNA, 1410 nt, Artificial Sequence
  derived and/or modified CDS sequence (opt4) from neuraminidase__InfluenzaA__BAF46349
augaaccccaaccagaagaucaucaccaucggcagcgugagccugaccaucagcaccaucugcuucuucaugcagaucgccauccugaucaccaccgugacccugcacuucaagcaguacgaguucaacagcccccccaacaaccaggugaugcugugcgagcccaccaucaucgagagaaacaucaccgagaucguguaccugaccaacaccaccaucgagaaggagaucugccccaagcuggccgaguacagaaaguggagcaagccccagugcaacaucaccggcuucgcccccuucagcaaggacaacagcaucagacugagcgccggcggcgacaucugggugaccagagagcccuacgugagcugcgaccccgacaagugcuaccaguucgcccugggccagggcaccacccugaacaacgugcacagcaacgacaccgugagagccagaacccccuacagaacccugcugaugaacgagcugggcgugcccuuccaccugggcaccaagcaggugugcaucgccuggagcagcagcagcugccacgacggcaaggccuggcugcacgugugcgugaccggcgacgacaagaacgccaccgccagcuucaucuacaacggcagacugguggacagcaucgugagcuggagcaaggagauccugagaacccaggagagcgagugcgugugcaucaacggcaccugcaccguggugaugaccgacggcagcgccagcggcaaggccgacaccaagauccuguucaucgaggagggcaagaucgugcacaccagcacccugagcggcagcgcccagcacguggaggagugcagcugcuaccccagauaccccggcgugagaugcgugugcagagacaacuggaagggcagcaacagacccaucguggacaucaacaucaaggacuacagcaucgugagcagcuacgugugcagcggccuggugggcgacacccccagaaagaacgacagcagcagcagcagccacugccuggaccccaacaacgaggagggcggccacggcgugaagggcugggccuucgacgacggcaacgacguguggaugggcagaaccaucagcgagaagcugagaagcggcuacgagaccuucaagguguucgagggcuggagcaaccccaacagcaagcugcagaucaacagacaggugaucguggacagaggcaacagaagcggcuacagcggcaucuucagcguggagggcaagagcugcaucaacagaugcuucuacguggagcugaucagaggcagaaaggaggagaccgaggugcuguggaccagcaacagcaucgugguguucugcggcaccagcggcaccuacggcaccggcagcuggcccgacggcgccgacaucaaccugaugcccaucuga

SEQ ID NO: 186100 - RNA, 1410 nt, Artificial Sequence; identical to SEQ ID NO: 186093
  derived and/or modified CDS sequence (opt4) from neuraminidase__InfluenzaA__BAF46350

SEQ ID NO: 186101 - RNA, 1410 nt, Artificial Sequence
  derived and/or modified CDS sequence (opt4) from neuraminidase__InfluenzaA__BAF46351
augaaccccauccagaagaucaucaccaucggcagcgugagccugaccaucagcaccaucugcuucuucaugcagaucgccauccugaucaccaccgugacccugcacuucaagcaguacgaguucaacagcccccccaacaaccaggugaugcugugcgagcccaccaucaucgagagaaacaucaccgagaucguguaccugaccaacaccaccaucgagaaggagaucugccccaagcuggccgaguacagaaaguggagcaagccccagugcaacaucaccggcuucgcccccuucagcaaggacaacagcaucagacugagcgccggcggcgacaucugggugaccagagagcccuacgugagcugcgaccccgacaagugcuaccaguucgcccugggccagggcaccacccugaacaacgugcacagcaacgacaccgugagagacagaacccccuacagaacccugcugaugaacgagcugggcgugcccuuccaccugggcaccaagcaggugugcaucgccuggagcagcagcagcugccacgacggcaaggccuggcugcacgugugcgugaccggcgacgacaagaacgccaccgccagcuucaucuacaacggcagacugguggacagcaucgugagcuggagcaaggagauccugagaacccaggagagcgagugcgugugcaucaacggcaccugcaccguggugaugaccgacggcagcgccagcggcaaggccgacaccaagauccuguucaucgaggagggcaagaucgugcacaccagcacccugagcggcagcgcccagcacguggaggagugcagcugcuaccccagauaccccggcgugagaugcgugugcagagacaacuggaagggcagcaacagacccaugguggacaucaacaucaaggacuacagcaucgugagcagcuacgugugcagcggccuggugggcgacacccccagaaagaacgacagcagcagcagcagccacugccuggaccccaacaacgaggagggcggccacggcgugaagggcugggccuucgacgacggcaacgacguguggaugggcagaaccaucagcgagaagcugagaagcggcuacgagaccuucaaggugaucgagggcuggagcaaccccaacagcaagcugcagaucaacagacaggugaucguggacagaggcaacagaagcggcuacagcggcaucuucagcguggagggcaagagcugcaucaacagaugcuucuacguggagcugaucagaggcagaaaggaggagaccgaggugcuguggaccagcaacagcaucgugguguucugcggcaccagcggcaccuacggcaccggcagcuggcccgacggcgccgacaucaaccugaugcccaucuga

SEQ ID NO: 186102 - RNA, 1410 nt, Artificial Sequence
  derived and/or modified CDS sequence (opt4) from neuraminidase__InfluenzaA__BAF46368
augaaccccaaccagaagaucaucaccaucggcagcgugagccugaccaucagcaccaucugcuucuucaugcagaucgccauccugaucaccaccgugacccugcacuucaagcaguacgaguucaacagcccccccaacaaccaggugaugcugugcgagcccaccaucaucgagagaaacaucaccgagaucguguaccugaccaacaccaccaucgagaaggagaucugccccaagcuggccgaguacagaaacuggagcaagccccagugcaacaucaccggcuucgcccccuucagcaaggacaacagcaucagacugagcgccggcggcgacaucugggugaccagagagcccuacgugagcugcgaccccgacaagugcuaccaguucgcccugggccagggcaccacccugaacaacgugcacagcaacgacaccgugagagagagaacccccuacagaacccugcugaugaacgagcugggcgugcccuuccaccugggcaccaagcaggugugcaucgccuggagcagcagcagcugccacgacggcaaggccuggcugcacgugugcgugaccggcgacgacaagaacgccaccgccagcuucaucuacaacggcagacugguggacagcaucgugagcuggagcaaggagauccugagaacccaggagagcgagugcgugugcaucaacggcaccugcaccguggugaugaccgacggcagcgccagcggcaaggccgacaccaagauccuguucaucgaggagggcaagaucgugcacaccagcacccugagcggcagcgcccagcacguggaggagugcagcugcuaccccagauaccccggcgugagaugcgugugcagagacaacuggaagggcagcaacagacccaucguggacaucaacaucaaggacuacagcaucgugagcagcuacgugugcagcggccuggugggcgacacccccagaaagaacgacagcagcagcagcagccacugccuggaccccaacaacgaggagggcggccacggcgugaagggcugggccuucgacgacggcaacgacguguggaugggcagaaccaucagcgagaagcugagaagcggcuacgagaccuucaaggugaucgagggcuggagcaaccccaacagcaagcugcagaucaacagacaggugaucguggacagaggcaacagaagcggcuacagcggcaucuucagcguggagggcaagagcugcaucaacagaugcuucuacguggagcugaucagaggcagaaaggaggagaccgaggugcuguggaccagcaacagcaucgugguguucugcggcaccagcggcaccuacggcaccggcagcuggcccgacggcgccgacaucaaccugaugcccaucuga

SEQ ID NO: 186103 - RNA, 1410 nt, Artificial Sequence
  derived and/or modified CDS sequence (opt4) from neuraminidase__InfluenzaA__BAF46369
augaaccccaaccagaagaucaucaccaucggcagcgugagccugaccaucagcaccaucugcuucuucaugcagaucgccauccugaucaccaccgugacccugcacuucaagcaguacgaguucaacagcccccccaacaaccaggugaugcugugcgagcccaccaucaucgagagaaacaucaccgagaucguguaccugaccaacaccaccaucgagaaggagaucugccccaagcuggccgaguacagaaacuggagcaagccccagugcaacaucaccggcuucgcccccuucagcaaggacaacagcaucagacugagcgccggcggcgacaucugggugaccagagagcccuacgugagcugcgaccccgacaagugcuaccaguucgcccugggccagggcaccacccugaacaacgugcacagcaacgacaccgugcacgacagaacccccuacagaacccugcugaugaacgagcugggcgugcccuuccaccugggcaccaagcaggugugcaucgccuggagcagcagcagcugccacgacggcaaggccuggcugcacgugugcgugaccggcgacgacaagaacgccaccgccagcuucaucuacaacggcaagcugguggacagcaucgugagcuggagcaaggagauccugagaacccaggagagcgagugcgugugcaucaacggcaccugcaccguggugaugaccgacggcagcgccagcggcaaggccgacaccaagauccuguucaucgaggagggcaagaucgugcacaccagcacccugagcggcagcgcccagcacguggaggagugcagcugcuaccccagauaccccggcgugagaugcgugugcagagacaacuggaagggcagcaacagacccaucguggacaucaacaucaaggacuacagcaucgugagcagcuacgugugcagcggccuggugggcgacacccccagaaagaacgacagcagcagcagcagccacugccuggaccccaacaacgaggagggcggccacggcgugaagggcugggccuucgacgacggcaacgacguguggaugggcagaaccaucagcgagaagagcagaagcggcuacgagaccuuccaggugaucgagggcuggagcaacagcaacagcaagcugcagaucaacagacaggugaucguggacagaggcaacagaagcggcuacagcggcaucuucagcguggagggcaagagcugcaucaacagaugcuucuacguggagcugaucagaggcagaaaggaggagaccgaggugcuguggaccagcaacagcaucgugguguucugcggcaccagcggcaccuacggcaccggcagcuggcccgacggcgccgacaucaaccugaugcccaucuga

SEQ ID NO: 186104 - RNA, 1410 nt, Artificial Sequence
  derived and/or modified CDS sequence (opt4) from neuraminidase__InfluenzaA__BAF46370
augaaccccaaccagaagaucaucaccaucggcagcgugagccugaccaucagcaccaucugcuucuucaugcagaucgccauccugaucaccaccgugacccugcacuucaagcaguacgaguucaacagccugcccaacaaccaggugaugcugugcgagcccaccaucaucgagagaaacaucaccgagaucguguaccugaccaacaccaccaucgagaaggagaucugccccaagcuggccgaguacagaaacuggagcaagccccagugcaacaucaccggcuucgcccccuucagcaaggacaacagcaucagacugagcgccggcggcgacaucugggugaccagagagcccuacgugagcugcgaccccgacaagugcuaccaguucgcccugggccagggcaccacccugaacaacgugcacagcaacgacaccgugcacgacagaacccccuacagaacccugcugaugaacgagcugggcgugcccuuccaccugggcaccaagcaggugugcaucgccuggagcagcagcagcugccacgacggcaaggccuggcugcacgugugcgugaccggcgacgacaagaacgccaccgccagcuucaucuacaacggcagacugguggacagcaucgugagcuggagcaaggagauccugagaacccaggagagcgagugcgugugcaucaacggcaccugcaccguggugaugaccgacggcagcgccagcggcaaggccgacaccaagauccuguucaucgaggagggcaagaucgugcacaccagcacccugagcggcagcgcccagcacguggaggagugcagcugcuaccccagauaccccggcgugagaugcgugugcagagacaacuggaagggcagcaacagacccaucguggacaucaacaucaaggacuacagcaucgugagcagcuacgugugcagcggccuggugggcgacacccccagaaagaacgacagcagcagcagcagccacugccuggaccccaacaacgaggagggcggccacggcgugaagggcugggccuucgacgacggcaacgacguguggaugggcagaaccaucagcgagaagcugagaagcggcuacgagaccuucaaggugaucgagggcuggagcaaccccaacagcaagcugcagaucaacagacaggugaucguggacagaggcaacagaagcggcuacagcggcaucuucagcguggagggcaagagcugcaucaacagaugcuucuacguggagcugaucagaggcagaaaggaggagaccgaggugcuguggaccagcaccagcaucgugguguucugcggcagcagcggcaccuacggcaccggcagcuggcccgacggcgccgacaucaaccugaugcccaucuga

SEQ ID NO: 186105 - RNA, 1410 nt, Artificial Sequence
  derived and/or modified CDS sequence (opt4) from neuraminidase__InfluenzaA__BAF46371
augaaccccaaccagaagaucaucaccaucggcagcgugagccugaccaucagcaccaucugcuucuucaugcagaucgccauccugaucaccaccgugacccugcacuucaagcaguacgaguucaacagcccccccaacaaccaggugaugcugugcgagcccaccaucaucgagagaaacaucaccgagaucgugcaccugaccaacaccaccaucgagaaggagaucugccccaagcuggccgaguacagaaacuggagcaagccccagugcaacaucaccggcuucgcccccuucagcaaggacaacagcaucagacugagcgccggcggcgacaucugggugaccagagagcccuacgugagcugcgaccccgacaagugcuaccaguucgcccugggccagggcaccacccugaacaacgugcacagcaacgacaccgugcacgacagaacccccuacagaacccugcugaugaacgagcugggcgugcccuuccaccugggcaccaagcaggugugcaucgccuggagcagcagcagcugccacgacggcaaggccuggcugcacgugugcgugaccggcgacgacaagaacgccaccgccagcuucaucuacaacggcagacugguggacagcaucgugagcuggagcaaggagauccugagaacccaggagagcgagugcgugugcaucaacggcaccugcaccguggugaugaccgacggcagcgccagcggcaaggccgacaccaagauccuguucaucgaggagggcaagaucgugcacaccagcacccugagcggcagcgcccagcacguggaggagugcagcugcuaccccagauaccccggcgugagaugcgugugcagagacaacuggaagggcagcaacagacccaucguggacaucaacaucaaggacuacagcaucgugagcagcuacgugugcagcggccuggugggcgacacccccagaaagaacgacagcagcagcagcagccacugccuggaccccaacaacgaggagggcggccacggcgugaagggcugggccuucgacgacggcaacgacguguggaugggcagaaccaucagcgagaagcugagaagcggcuacgagaccuucaaggugaucgagggcuggagcaaccccaacagcaagcugcagaccaacagacaggugaucguggacagaagcaacagaagcggcuacagcggcaucuucagcguggagggcaagagcugcaucaacagaugcuucuacguggagcugaucagaggcagaaaggaggagaccgaggugcuguggaccagcaacagcaucgugguguucugcggcaccagcggcaccuacggcaccggcagcuggcccgacggcgccgacaucaaccugaugcccaucuga

SEQ ID NO: 186106 - RNA, 1410 nt, Artificial Sequence
  derived and/or modified CDS sequence (opt4) from neuraminidase__InfluenzaA__BAF46372
augaaccccaaccagaagaucaucaccaucggcagcgugagccugaccaucagcaccaucugcuucuucaugcagaucgccauccugaucaccaccgugacccugcacuucaagcaguacgaguucaacagcccccccaacaaccaggugaugcugugcgagcccaccaucaucgagagaaacaucaccgagaucguguaccugaccaacaccaccaucgagaaggagaucugccccaagcuggccgaguacagaaacuggagcaagccccagugcgacaucgccggcuucgcccccuucagcaaggacaacagcaucagacugagcgccggcggcgacaucugggugaccagagagcccuacgugagcugcgaccccgacaagugcuaccaguucgcccugggccagggcaccacccugaacaacgugcacagcaacgacaccgugcacgacagaacccccuacagaacccugcugaugaacgagcugggcgugcccuuccaccugggcaccaagcaggugugcaucgccuggagcagcagcagcugccacgacggcaaggccuggcugcacgugugcgugaccggcgacgacaagaacgccaccgccagcuucaucuacaacggcagacugguggacagcaucgugagcuggagcaagaagauccugagaacccaggagagcgagugcgugugcaucaacggcaccugcaccguggugaugaccgacggcagcgccagcggcaaggccgacaccaagauccuguucaucgaggagggcaagaucgugcacaccagcacccugagcggcagcgcccagcacguggaggagugcagcugcuaccccagauaccccggcgugagaugcgugugcagagacaacuggaagggcagcaacagacccaucguggacaucaacaucaaggacuacagcaucgugagcagcuacgugugcagcggccuggugggcgacacccccagaaagaacgacagcagcagcagcagccacugccuggaccccaacaacgaggagggcggccacggcgugaagggcugggccuucgacgacggcaacgacguguggaugggcagaaccaucagcgagaagcugagaagcggcuacgagaccuucaaggugaucgagggcuggagcaaccccaacagcaagcugcagaucaacagacaggugaucguggacagaggcaacagaagcggcuacagcggcaucuucagcguggagggcaagagcugcaucaacagaugcuucuacguggagcugaucagaggcagaaaggaggagaccgaggugcuguggaccagcaacagcaucgugguguucugcggcaccagcggcaccuacggcaccggcagcuggcccgacggcgccgacaucaaccugaugcccaucuga

SEQ ID NO: 186107 - RNA, 1410 nt, Artificial Sequence
  derived and/or modified CDS sequence (opt4) from neuraminidase__InfluenzaA__BAF46385
augaaccccaaccagaagaucaucaccaucggcagcgugagccugaccaucagcaccaucugcuucuucaugcagaucgccauccugaucaccaccgugacccugcacuucaagcaguacgaguucaacagcccccccaacaaccaggugaugcugugcgagcccaccaucaucgagagaaacaucaccgagaucguguaccugaccaacaccaccaucgagaaggagaucugccccaagcuggccgaguacagaaacuggagcaagccccagugcaacaucaccggcuucgcccccuucagcaaggacaacagcaucagacugagcgccggcggcgacaucugggugaccagagagcccuacgugagcugcgaccccgacaagugcuaccaguucgcccugggccagggcaccacccugaacaacgugcacagcaacgacaccgugcacgacagaacccccuacagaacccugcugaugaacgagcugggcgugcccuuccaccugggcaccaagcaggugugcaucgccuggagcagcagcagcugccccgacggcaaggccuggcugcacgugugcgugaccggcgacgacaagaacgccaccgccagcuucaucuacaacggcagacugguggacagcaucgugagcuggagcaaggagauccugagaacccaggagagcgagugcgugugcaucaacggcaccugcaccguggugaugaccgacggcagcgccagcggcaaggccgacaccaagauccuguucaucgaggagggcaagaucgugcacaccagcacccugagcggcagcgcccagcacguggaggagugcagcugcuaccccagauaccccggcgccagaugcgugugcagagacaacuggaagggcagcaacagacccaucguggacaucaacaucaaggacuacagcaucgugagcagcuacgugugcagcggccuggugggcgacacccccagaaagaacgacagcagcagcagcagccacugccuggaccccaacaacgaggagggcggccacggcgugaagggcugggccuucgacgacggcaacgacguguggaugggcagaaccaucagcgagaagcugagaagcggcuacgagaccuucaaggugaucgagggcuggagcaaccccaacagcaagcugcagaccaacagacaggugaucguggacagaggcaacagaagcggcuacagcggcaucuucagcguggagggcaagagcugcaucaacagaugcuucuacguggagcugaucagaggcagaaaggaggagaccgaggugcuguggaccagcaacagcaucgugguguucugcggcaccagcagcaccuacggcaccggcagcuggcccgacggcgccgacaucaaccugaugcccaucuga

SEQ ID NO: 186108 - RNA, 1410 nt, Artificial Sequence
  derived and/or modified CDS sequence (opt4) from neuraminidase__InfluenzaA__BAF46386
augaaccccaaccagaagaucaucaccaucggcagcgugagccugaccaucagcaccaucugcuucuucaugcagaucgccauccugaucaccaccgugacccugcacuucaagcaguacgaguucaacagcccccccaacaaccaggugaugcugugcgagcccaccaucaucgagagaaacaucaccgagaucguguaccugaccaacaccaccaucgagaaggagaucugccccaagcuggccgaguacagaaacuggagcaagccccagugcaacaucaccggcuucgcccccuucagcaaggacaacagcaucagacugagcgccggcggcgacaucugggugaccagagagcccuacgugagcugcgaccccgacaagugcuaccaguucgcccugggccagggcaccacccugaacaacgugcacagcaacgacaccgugcacgacagaacccccuacagaacccugcugaugaacgagcugggcgugcccuuccaccugggcaccaagcaggugugcaucgccuggagcagcagcagcugccacgacggcaaggccuggcugcacgugugcgugaccggcgacgacaagaacgccaccgccagcuucaucuacaacggcagacugguggacagcaucgugagcuggagcaaggagauccugagaacccaggagagcgagugcgugugcaucaacggcaccugcaccguggugaugaccgacggcagcgccagcggcaaggccgacaccaagauccuguucaucgaggagggcaagaucgugcacaccagcacccugagcggcagcgcccagcacguggaggagugcagcugcuaccccagauaccccggcgugagaugcgugugcagagacaacuggaagggcagcaacagacccaucguggacaucaacaucaaggacuacagcaucgugagcagcuacgugugcagcggccuggugggcgacacccccagaaagaacgacagcagcagcagcagccacugccuggaccccaacaacgaggagggcggccacggcgugaagggcugggccuucgacgacggcaacgacguguggaugggcagaaccaucagcgagaagcugagaagcggcuacgagaccuucaaggugaucgagggcuggagcaaccccaacagcaagcugcagaccaacagacaggugaucguggacagaggcaacagaagcggcuacagcggcaucuucagcguggagggcaagagcugcaucaacagaugcuucuacguggagcugaucagaggcagaaaggaggagaccgaggugcuguggaccagcaacagcaucgugguguucugcggcaccagcagcaccuacggcaccggcagcuggcccgacggcgccgacaucaaccugaugcccaucuga

SEQ ID NO: 186109 - RNA, 1410 nt, Artificial Sequence; identical to SEQ ID NO: 176624
  derived and/or modified CDS sequence (opt4) from neuraminidase__InfluenzaA__BAF46387

SEQ ID NO: 186110 - RNA, 1410 nt, Artificial Sequence
  derived and/or modified CDS sequence (opt4) from neuraminidase__InfluenzaA__BAF46388
augaaccccaaccagaagaucaucaccaucggcagcgugagccugaccaucagcaccaucugcuucuucaugcagaucgccauccugaucaccaccgugacccugcacuucaagcaguacgaguucaacagcccccccaacaaccaggugaugcugugcgagcccaccaucaucgagagaaacaucaccgagaucguguaccugaccaacaccaccaucgagaaggagaucugccccaagcuggccgaguacagaaacuggagcaagccccagugcaacaucaccggcuucgcccccuucagcaaggacaacagcaucagacugagcgccggcggcgacaucugggugaccagagagcccuacgugagcugcgaccccgacaagugcuaccaguucgcccugggccagggcaccacccugaacaacgugcacagcaacgacaccgugcacgacagaacccccuacagaacccugcugaugaacgagcugggcgugcccuuccaccugggcaccaagcaggugugcaucgccuggagcagcagcagcugccacgacggcaaggccuggcugcacgugugcgugaccggcgacgacaagaacgccaccgccagcuucaucuacaacggcagacugguggacagcaucgugagcuggagcaaggagauccugagaacccaggagagcgagugcgugugcaucaacggcaccugcaccguggugaugaccgacggcagcgccagcggcaaggccgacaccaagauccuguucaucgaggagggcaagaucgugcacaccagcacccugagcggcagcgcccagcacguggaggagugcagcugcuaccccagauaccccggcgugagaugcgugugcagagacaacuggaagggcagcaacagacccaucguggacaucaacaucaaggacuacagcaucgugagcagcuacgugugcagcggccuggugggcgacacccccagaaagaacgacagcagcagcagcagccacugccuggaccccaacaacgaggagggcggccacggcgugaagggcugggccuucgacgacggcaacgacguguggaugggcagaaccaucagcgagaagcugagaagcggcuacgagaccuucaaggugaucgagggcuggagcaaccccaacagcaagcugcagaucaacagacaggacaucguggacagaggcaacagaagcggcuacagcggcaucuucagcguggagggcaagagcugcaucaacagaugcuucuacguggagcugaucagaggcagaaaggaggagaacgaggugcuguggaccagcaacagcaucgugguguucugcggcaccagcggcaccuacggcaccggcagcuggcccgacggcgccgacaucaaccugaugcccaucuga

SEQ ID NO: 186111 - RNA, 1410 nt, Artificial Sequence
  derived and/or modified CDS sequence (opt4) from neuraminidase__InfluenzaA__BAF47922
augaaccccaaccagaagaucaucaccaucggcagcgugagccugaccaucagcaccaucugcuucuucaugcagaucgccauccugaucaccaccgugacccugcacuucaagcaguacgaguucaacagcccccccaacauccaggugaugcugugcgagcccaccaucaucgagagaaacaucaccgagaucguguaccugaccaacaccaccaucgagaaggagaucugccccaagcuggccgaguacagaaacuggagcaagccccagugcgacaucaccggcuucgcccccuucagcaaggacaacagcaucagacugagcgccggcggcgacaucugggugaccagagagcccuacgugagcugcgaccccgacaagugcuaccaguucgcccugggccagggcaccacccugaacaacgugcacagcaacgacaccgugcacgacagaacccccuacagaacccugcugaugaacgagcugggcgugcccuuccaccugggcaccaagcaggugugcaucgccuggagcagcagcagcugccacgacggcaaggccuggcugcacgugugcgugaccggcgacgacaagaacgccaccgccagcuucaucuacaacggcagacugguggacagcaucgugagcuggagcaaggagauccugagaacccaggagagcgagugcgugugcaucaacggcaccugcaccguggugaugaccgacggcagcgccagcggcaaggccgacaccaagauccuguucaucgaggagggcaagaucgugcacaccagcacccugagcggcagcgcccagcacguggaggagugcagcugcuaccccagauaccccggcgugagaugcgugugcagagacaacuggaagggcagcaacagacccaucguggacaucaacaucaaggacuacagcaucgccagcagcuacgugugcagcggccuggugggcgacacccccagaaagaacgacagcagcagcagcagccacugccuggaccccaacaacgaggagggcggccacggcgugaagggcugggccuucgacgacggcaacgacguguggaugggcagaaccaucagcgagaagcugagaagcggcuacgagaccuucaaggugaucgagggcuggagcaaccccaacagcaagcugcagaucaacagacaggugaucguggacagaggcaacagaagcggcuacagcggcaucuucagcguggagggcaagagcugcaucaacagaugcuucuacguggagcugaucagaggcagaaaggaggagaccgaggugcuguggaccagcaacagcaucgugguguucugcggcaccagcggcaccuacggcaccggcagcuggcccgacggcgccgacaucaaccugaugcccaucuga

SEQ ID NO: 186112 - RNA, 1410 nt, Artificial Sequence; identical to SEQ ID NO: 174754
  derived and/or modified CDS sequence (opt4) from neuraminidase__InfluenzaA__BAF47923

SEQ ID NO: 186113 - RNA, 1410 nt, Artificial Sequence
  derived and/or modified CDS sequence (opt4) from neuraminidase__InfluenzaA__BAF47924
augaaccccaaccagaagaucaucaccaucggcagcgugagccugaccaucagcaccaucugcuucuucaugcagaucgccauccugaucaccaccgugacccugcacuucaagcaguacgaguucaacagcccccccaacaaccaggugaugcugugcgagcccaccaucaucgagagaaacaucaccgagaucguguaccugaccaacaccaccaucgagaaggagaucugccccaagcuggccgaguacagaaacuggagcaagccccagugcaacaucaccggcuucgcccccuucagcaaggacaacagcaucagacugagcgccggcggcgacaucugggugaccagagagcccuacgugagcugcgaccccgacaagugcuaccaguucgcccugggccagggcaccacccugaacaacgugcacagcaacgacaccgugcacgacagaacccccuacagaacccugcugaugaacgagcugggcgugcccuuccaccugggcaccaagcaggugugcaucgccuggagcagcagcagcugccacgacggcaaggccuggcugcacgugugcgugaccggcgacgacaagaacgccaccgccagcuucaucuacaacggcagacugguggacagcaucgugagcuggagcaaggagauccugagaacccaggagagcgagugcgugugcaucaacggcaccugcaccguggugaugaccgacggcagcgccagcggcaaggccgacaccaagauccuguucaucgaggagggcaagaucgugcacaccagcacccugagcggcagcgcccagcacguggaggagugcagcugcuaccccagauaccccggcgugagaugcgugugcagagacaacuggaagggcagcaacagacccaucguggacaucaacaucaaggacuacagcaucgugagcagcuacgugugcagcggccuggugggcgacacccccagaaagaacgacagcagcagcagcagccacugccuggaccccaacagcgaggagggcggccacggcgugaagggcugggccuucgacgacggcaacgacguguggaugggcagaaccaucagcgagaagcugagaagcggcuacgagaccuucaaggugaucgagggcuggagcaaccccaacagcaagcugcagaccaacagacaggugaucguggacagaggcaacagaagcggcuacagcggcaucuucagcguggagggcaagagcugcaucaacagaugcuucuacguggagcugaucagaggcagaaaggaggagaccgaggugcuguggaccagcaacagcaucgugguguucugcggcaccagcggcaccuacggcaccggcagcuggcccgacggcgccgacaucaaccugaugcccaucuga

SEQ ID NO: 186114 - RNA, 1410 nt, Artificial Sequence; identical to SEQ ID NO: 174772
  derived and/or modified CDS sequence (opt4) from neuraminidase__InfluenzaA__BAF47925

SEQ ID NO: 186115 - RNA, 1410 nt, Artificial Sequence; identical to SEQ ID NO: 174772
  derived and/or modified CDS sequence (opt4) from neuraminidase__InfluenzaA__BAF47926

SEQ ID NO: 186116 - RNA, 1410 nt, Artificial Sequence; identical to SEQ ID NO: 180759
  derived and/or modified CDS sequence (opt4) from neuraminidase__InfluenzaA__BAF47927

SEQ ID NO: 186117 - RNA, 1410 nt, Artificial Sequence; identical to SEQ ID NO: 176624
  derived and/or modified CDS sequence (opt4) from neuraminidase__InfluenzaA__BAF47928

SEQ ID NO: 186118 - RNA, 1410 nt, Artificial Sequence
  derived and/or modified CDS sequence (opt4) from neuraminidase__InfluenzaA__BAF47929
augaaccccaaccagaagaucaucaccaucggcagcgugagccugaccaucagcaccaucugcuucuucaugcagaucgccauccugaucaccaccgugacccugcacuucaagcaguacgaguucaacagcccccccaacaaccaggugaugcugugcgagcccaccaucaucgagagaaacaucaccgagaucguguaccugaccaacaccaccaccgagaaggagaucugccccaagcuggccgaguacagaaacuggagcaagccccagugcaacaucaccggcuucgcccccuucagcaaggacaacagcaucagacugagcgccggcggcgacaucugggugaccagagagcccuacgugagcugcgaccccgacaagugcuaccaguucgcccugggccagggcaccacccugaacaacgugcacagcgacgacaccgugcacgacagaacccccuacagaacccugcugaugaacgagcugggcgugcccuuccaccugggcaccaagcaggugugcaucgccuggagcagcagcagcugccacgacggcaaggccuggcugcacgugugcgugaccggcgacgacaagaacgccaccgccagcuucaucuacaacggcagacugguggacagcaucgugagcuggagcaaggagauccugagaacccaggagagcgagugcgugugcaucaacggcaccugcaccguggugaugaccgacggcagcgccagcggcaaggccgacaccaagauccuguucaucgaggagggcaagaucgugcacaccagcacccugagcggcagcgcccagcacguggaggagugcagcugcuaccccagauaccccggcgugagaugcgugugcagagacaacuggaagggcagcaacagacccaucguggacaucaacaucaaggacuacagcaucgugagcagcuacgugugcagcggccuggugggcgacacccccagaaagaacgacagcagcagcagcagccacugccuggaccccaacaacgaggagggcggccacggcgugaagggcugggccuucgacgacggcaacgacguguggaugggcagaaccaucagcgagaagcugagaagcggcuacgagaccuucaaggugaucgagggcuggagcaaccccaacagcaagcugcagaucaacagacaggugaucguggacagaggcaacagaagcggcuacagcggcaucuucagcguggagggcaagagcugcaucaacagaugcuucuacguggagcugaucagaggcagaaaggaggagaacgaggugcuguggaccagcaacagcaucgugguguucugcggcaccagcggcaccuacggcaccggcagcuggcccgacggcgccgacaucaaccugaugcccaucuga

SEQ ID NO: 186119 - RNA, 1410 nt, Artificial Sequence
  derived and/or modified CDS sequence (opt4) from neuraminidase__InfluenzaA__BAF47930
augaaccccaaccagaagaucaucaccaucggcagcgugagccugaccaucagcaccaucugcuucuucaugcagaucgccauccugaucaccaccgugacccugcacuucaagcaguacgaguucaacagcccccccaacaaccaggugaugcugugcgagcccaccaucaucgagagaaacaucaccgagaucguguaccugaccaacaccaccaucgagaaggagaucugccccaagcuggccgaguacagaaacuggagcaagccccagugcaacaucaccggcuucgcccccuucagcaaggacaacagcaucagacugagcgccggcggcgacaucugggugaccagagagcccuacgugagcugcgaccccgacaagugcuaccaguucgcccugggccagggcaccacccugaacaacgugcacagcaacgacaccgugcacggcagaacccccuacagaacccugcugaugaacgagcugggcgugcccuuccaccugggcaccaagcaggugugcaucgccuggagcagcagcagcugccacgacggcaaggccuggcugcacgugugcgugaccggcgacgacaagaacgccaccgccagcuucaucuacaacggcagacugguggacagcaucgugagcuggagcaaggagauccugagaacccaggagagcgagugcgugugcaucaacggcaccugcaccguggugaugaccgacggcagcgccagcggcaaggccgacaccaagauccuguucaucgaggagggcaagaucgugcacaccagcacccugagcggcagcgcccagcacguggaggagugcagcugcuaccccagauaccccggcgugagaugcgugugcagagacaacuggaagggcagcaacagacccaucguggacaucaacaucaaggacuacagcaccgugagcagcuacgugugcagcggccuggugggcgacacccccagaaagaacgacagcagcagcagcggccacugccuggaccccaacaacgaggagggcggccacggcgugaagggcugggccuucgacgacggcaacgacguguggaugggcagaaccaucagcgagaagcugagaagcggcuacgagaccuucaaggugaucgagggcuggagcaaccccaacagcaagcugcagaucaacagacaggugaucguggacagaggcaacagaagcggcuacagcggcaucuucagcguggagggcaagagcugcaucaacagaugcuucuacguggagcugaucagaggcagaaaggaggagaccgaggugcuguggaccagcaacagcaucgugguguucugcggcaccagcggcaccuacggcaccggcagcuggcccgacggcgccgacaucaaccugaugcccaucuga

SEQ ID NO: 186120 - RNA, 1410 nt, Artificial Sequence; identical to SEQ ID NO: 180759
  derived and/or modified CDS sequence (opt4) from neuraminidase__InfluenzaA__BAF47931

SEQ ID NO: 186121 - RNA, 1410 nt, Artificial Sequence
  derived and/or modified CDS sequence (opt4) from neuraminidase__InfluenzaA__BAF47932
augaaccccaaccagaagaucaucaccaucggcagcgugagccugaccaucagcaccaucugcuucuucaugcagaucgccauccugaucaccaccgugacccugcacuucaagcaguacgaguucaacagcccccccaacaaccaggugaugcugugcgagcccaccaucaucgagagaaacaucaccgagaucguguaccugaccaacaccaccaucgagaaggagaucugccccaagcuggccgaguacagaaacuggagcaagccccagugcaacaucaccggcuucgcccccuucagcaaggacaacagcaucagacugagcgccggcggcgacaucugggugaccagagagcccuacgugagcugcgaccccgacaagugcuaccaguucgcccugggccagggcaccacccugaacaacgugcacagcaacgacaccgugcacgacagaacccccuacagaacccugcugaugaacgagcugggcgugcccuuccaccugggcaccaagcaggugugcaucgccuggagcagcagcagcugccacgacggcaaggccuggcugcacgugugcgugaccggcgacgacaagaacgccaccgccagcuucaucuacaacggcagacugguggacagcaucgugagcuggagcaaggagauccugagaacccaggagagcgagugcgugugcaucaacggcaccugcaccguggugaugaccgacggcagcgccagcggcaaggccgacaccaagauccuguucaucgaggagggcaagaucgugcacaccagcacccugagcggcagcgcccagcacguggaggagugcagcugcuaccccagauaccccggcgugagaugcgugugcagagacaacuggaagggcagcaacagacccaucguggacaucaacaucaaggacuacagcaucgugagcagcuacgugugcagcggccuggugggcgacacccccagaaagaacgacagcagcagcagcggccacugccuggaccccaacaacgaggagggcggccacggcgugaagggcugggccuucgacgacggcaacgacguguggaugggcagaaccaucagcgagaagcugagaagcggcuacgagaccuucaaggugaucgagggcuggagcaaccccaacagcaagcugcagaucaacagacaggugaucguggacagaggcaacagaagcggcuacagcggcaucuucagcguggagggcaagagcugcaucaacagaugcuucuacguggagcugaucagaggcagaaaggaggagaccgaggugcuguggaccagcaacagcaucgugguguucugcggcaccagcggcaccuacggcaccggcagcuggcccgacggcgccgacaucaaccugaugcccaucuga

SEQ ID NO: 186122 - RNA, 1410 nt, Artificial Sequence; identical to SEQ ID NO: 174772
  derived and/or modified CDS sequence (opt4) from neuraminidase__InfluenzaA__BAF47933

SEQ ID NO: 186123 - RNA, 1410 nt, Artificial Sequence; identical to SEQ ID NO: 174774
  derived and/or modified CDS sequence (opt4) from neuraminidase__InfluenzaA__BAF47934

SEQ ID NO: 186124 - RNA, 1410 nt, Artificial Sequence; identical to SEQ ID NO: 174774
  derived and/or modified CDS sequence (opt4) from neuraminidase__InfluenzaA__BAF47935

SEQ ID NO: 186125 - RNA, 1410 nt, Artificial Sequence
  derived and/or modified CDS sequence (opt4) from neuraminidase__InfluenzaA__BAF47936
augaaccccaaccagaagaucaucaccaucggcagcgugagccugaccaucagcaccaucugcuucuucaugcagaucgccauccugaucaccaccgugacccugcacuucaagcaguacgaguucaacagcccccccaacaaccaggugaugcugugcgagcccaccaucaucgagagaaacaucaccgagaucguguaccugaccaacaccaccaucgagaaggagaucugccccaagcuggccgaguacagaaacuggagcaagccccagugcaacaucaccggcuucgcccccuucagcaaggacaacagcaucagacugagcgccggcggcgacaucugggugaccagagagcccuacgugagcugcgaccccgacaagugcuaccaguucgcccugggccagggcaccacccugaacaacgugcacagcaacgacaccgugcacgacagaacccccuacagaacccugcugaugaacgagcugggcgugcccuuccaccugggcaccaagcaggugugcaucgccuggagcagcagcagcugccacgacggcaaggccuggcugcacgugugcaucaccggcgacgacaagaacgccaccgccagcuucaucuacaacggcagacugguggacagcaucgugagcuggagcaaggagauccugagaacccaggagagcgagugcgugugcaucaacggcaccugcaccguggugaugaccgacggcagcgccagcggcaaggccgacaccaagauccuguucaucgaggagggcaagaucgugcacaccagcacccugagcggcagcgcccagcacguggaggagugcagcugcuaccccagauaccccggcgugagaugcgugugcagagacaacuggaagggcagcaacagacccaucguggacaucaacaucaaggacuacagcaucgugagcagcuacgugugcagcggccuggugggcgacacccccagaaagaacgacagcagcagcagcggccacugccuggaccccaacaacgaggagggcggccacggcgugaagggcugggccuucgacgacggcaacgacguguggaugggcagaaccaucagcgagaagcugagaagcggcuacgagaccuucaaggugaucgagggcuggagcaaccccaacagcaagcugcagaucaacagacaggugaucguggacagaggcaacagaagcggcuacagcggcaucuucagcguggagggcaagagcugcaucaacagaugcuucuacguggagcugaucagaggcagaaaggaggagaccgaggugcuguggaccagcaacagcaucgugguguucugcggcaccagcggcaccuacggcaccggcagcuggcccgacggcgccgacaucaaccugaugcccaucuga

SEQ ID NO: 186126 - RNA, 1410 nt, Artificial Sequence
  derived and/or modified CDS sequence (opt4) from neuraminidase__InfluenzaA__BAF47937
augaaccccaaccagaagaucaucaccaucggcagcgugagccugaccaucagcaccaucugcuucuucaugcagaucgccauccugaucaccaccgugacccugcacuucaagcaguacgaguucaacagcccccccaacaaccaggugaugcugugcgagcccaccaucaucgagagaaacaucaccgagaucguguaccugaccaacaccaccaucgagaaggagaucugccccaagcuggccgaguacagaaacuggagcaagccccagugcaacaucaccggcuucgcccccuucagcaaggacaacagcaucagacugagcgccggcggcgacaucugggugaccagagagcccuacgugagcugcggccccgacaagugcuaccaguucgcccugggccagggcaccacccugaacaacgugcacagcaacgacaccgugcacgacagaacccccuacagaacccugcugaugaacgagcugggcgugcccuuccaccugggcaccaagcaggugugcaucgccuggagcagcagcagcugccacgacggcaaggccuggcugcacgugugcgugaccggcgacgacaagaacgccaccgccagcuucaucuacaacggcagacugguggacagcaucgugagcuggagcaaggagauccugagaacccaggagagcgagugcgugugcaucaacggcaccugcaccguggugaugaccgacggcagcgccagcggcaaggccgacaccaagauccuguucaucgaggagggcaagaucgugcacaccagcacccugagcggcagcgcccagcacguggaggagugcagcugcuaccccagauaccccggcgugagaugcgugugcagagacaacuggaagggcagcaacagacccaucguggacaucaacaucaaggacuacagcaucgugagcagcuacgugugcagcggccuggugggcgacacccccagaaagaacgacagcagcagcagcagccacugccuggaccccaacaacgaggagggcggccacggcgugaagggcugggccuucgacgacggcaacgacguguggaugggcagaaccaucagcgagaagcugagaagcggcuacgagaccuucaaggugaucgagggcuggagcaaccccaacagcaagcugcagaucaacagacaggugaucguggacagaggcaacagaagcggcuacagcggcaucuucagcguggagggcaagagcugcaucaacagaugcuucuacguggagcugaucagaggcagaaaggaggagaccgaggugcuguggaccagcaacagcaucgugguguucugcggcaccagcggcaccuacggcaccggcagcuggcccgacggcgccgacaucaaccugaugcccaucuga

SEQ ID NO: 186127 - RNA, 1410 nt, Artificial Sequence
  derived and/or modified CDS sequence (opt4) from neuraminidase__InfluenzaA__BAF47938
augaaccccaaccagaagaucaucaccaucggcagcgugagccugaccaucagcaccaucugcuucuucaugcagaucgccauccugaucaccaccgugacccugcacuucaagcaguacgaguucaacagccugcccaacaaccaggugaugcugugcgagcccaccaucaucgagagaaacaucaccgagaucguguaccugaccaacaccaccaucgagaaggagaucugccccaagcuggccgaguacagaaacuggagcaagccccagugcaacaucaccggcuucgcccccuucagcaaggacaacagcaucagacugagcgccggcggcgacaucugggugaccagagagcccuacgugagcugcgaccccgacaagugcuaccaguucgcccugggccagggcaccacccugaacaacgugcacagcaacgacaccgugcacggcagaacccccuacagaacccugcugaugaacgagcugggcgugcccuuccaccugggcaccaagcaggugugcaucgccuggagcagcagcagcugccacgacggcaaggccuggcugcacgugugcgugaccggcgacgacaagaacgccaccgccagcuucaucuacaacggcagacugguggacagcaucgugagcuggagcaaggagauccugagaacccaggagagcgagugcgugugcaucaacggcaccugcaccguggugaugaccgacggcagcgccagcggcaaggccgacaccaagauccuguucaucgaggagggcaagaucgugcacaccagcacccugagcggcagcgcccagcacguggaggagugcagcugcuaccccagauaccccggcgugagaugcgugugcagagacaacuggaagggcagcaacagacccaucguggacaucaacaucaaggacuacagcaucgugagcagcuacgugugcagcggccuggugggcgacacccccagaaagaccgacagcagcagcagcagccacugccuggaccccaacaacgaggagggcggccacggcgugaagggcugggccuucgacgacggcaacgacguguggaugggcagaaccaucagcgagaagcugagaagcggcuacgagaccuucaaggugaucgagggcuggagcaaccccaacagcaagcugcagaucaacagacaggugaucguggacagaggcaacagaagcggcuacagcggcaucuucagcguggagggcaagagcugcaucaacagaugcuucuacguggagcugaucagaggcagaaaggaggagaccgaggugcuguggaccagcaacagcaucgugguguucugcggcaccagcggcaccuacggcaccggcagcuggcccgacggcgccgacaucaaccugaugcccaucuga

SEQ ID NO: 186128 - RNA, 1410 nt, Artificial Sequence; identical to SEQ ID NO: 174774
  derived and/or modified CDS sequence (opt4) from neuraminidase__InfluenzaA__BAF47939

SEQ ID NO: 186129 - RNA, 1410 nt, Artificial Sequence
  derived and/or modified CDS sequence (opt4) from neuraminidase__InfluenzaA__BAF47940
augaaccccaaccagaagaucaucaccaucggcagcgugagccugaccaucagcaccaucugcuucuucaugcagaucgccauccugaucaccaccgugacccugcacuucaagcaguacgaguucaacagcccccccaacaaccaggugaugcugugcgagcccaccaucaucgagagaaacaucaccgagaucguguaccugaccaacaccaccaucgagaaggagaucugccccaagcuggccgaguacagaaacuggagcaagccccagugcgacaucaccggcuucgcccccuucagcaaggacaacagcaucagacugagcgccggcggcgacaucugggugaccagagagcccuacgugagcugcgaccccgacaagugcuaccaguucgcccugggccagggcaccacccugaacaacgugcacagcaacgacaccgugcacgacagaacccccuacagaacccugcugaugaacgagcugggcgugcccuuccaccugggcaccaagcaggugugcaucgccuggagcagcagcagcugccacgacggcaaggccuggcugcacgugugcgugaccggcgacgacaagaacgccaccgccagcuucaucuacaacggcagacugguggacagcaucgugagcuggagcaagaagauccugagaacccaggagagcgagugcgugugcaucaacggcaccugcaccguggugaugaccgacggcagcgccagcggcaaggccgacaccaagauccuguucaucgaggagggcaagaucgugcacaccagcacccugagcggcagcgcccagcacguggaggagugcagcugcuaccccagauaccccggcgugagaugcgugugcagagacaacuggaagggcagcaacagacccaucguggacaucaacaucaaggacuacagcaucgugagcagcuacgugugcagcggccuggugggcgacacccccagaaagaacgacagcagcagcagcagccacugccuggaccccaacaacgaggagggcggccacggcgugaagggcugggccuucgacgacggcaacgacguguggaugggcagaaccaucagcgagaagcugagaagcggcuacgagaccuucaaggugaucgagggcuggagcaaccccaacagcaagcugcagaucaacagacaggugaucguggacagaggcaacagaagcggcuacagcggcaucuucagcguggagggcaagagcugcaucaacagaugcuucuacguggagcugaucagaggcagaaaggagaagaccgaggugcuguggaccagcaacagcaucgugguguucugcggcaccagcggcaccuacggcaccggcagcuggcccgacggcgccgacaucaaccugaugcccaucuga

SEQ ID NO: 186130 - RNA, 1410 nt, Artificial Sequence; identical to SEQ ID NO: 174772
  derived and/or modified CDS sequence (opt4) from neuraminidase__InfluenzaA__BAF47941

SEQ ID NO: 186131 - RNA, 1410 nt, Artificial Sequence
  derived and/or modified CDS sequence (opt4) from neuraminidase__InfluenzaA__BAF47943
augaaccccaaccagaagaucaucaccaucggcagcgugagccugaccaucagcaccaucugcuucuucaugcagaucgccauccugaucaccaccgugacccugcacuucaagcaguacgaguucaacagcccccccaacaaccaggugaugcugugcgagcccaccaucaucgagagaaacaucaccgagaucguguaccugaccaacaccaccaucgagaaggagaucugccccaagcuggccgaguacagaaacuggagcaagccccagugcaacaucaccggcuucgcccccuucagcaaggacaacagcaucagacugagcgccggcggcgacaucugggugaccagagagcccuacgugagcugcgaccccgacaagugcuaccaguucgcccugggccagggcaccacccugaacaacgugcacagcaacgacaccgugcacgacagaacccccuacagaacccugcugaugaucgagcugggcgugcccuuccaccugggcaccaagcaggugugcaucgccuggagcagcagcagcugccacgacggcaaggccuggcugcacgugugcgugaccggcgacgacaagaacgccaccgccagcuucaucuacaacggcagacugguggacagcaucgugagcuggagcaaggagauccugagaacccaggagagcgagugcgugugcaucaacggcaccugcaccguggugaugaccgacggcagcgccagcggcaaggccgacaccaagauccuguucaucgaggagggcaagaucgugcacaccagcacccugagcggcagcgcccagcacguggaggagugcagcugcuaccccagauaccccggcgugagaugcgugugcagagacaacuggaagggcagcaacagacccaucguggacaucaacaucaaggacuacagcaucgugagcagcuacgugugcagcggccuggugggcgacacccccagaaagaacgacagcagcagcagcagccacugccuggaccccaacaacgaggagggcggccacggcgugaagggcugggccuucgacgacggcaacgacguguggaugggcagaaccaucagcgagaagcugagaagcggcuacgagaccuucaaggugaucgagggcuggagcaaccccaacagcaagcugcagaccaacagacaggugaucguggacagaggcaacagaagcggcuacagcggcaucuucagcguggagggcaagagcugcaucaacagaugcuucuacguggagcugaucagaggcagaaaggaggagaccgaggugcuguggaccagcaacagcaucgugguguucugcggcaccagcggcaccuacggcaccggcagcuggcccgacggcgccgacaucaaccugaugcccaucuga

SEQ ID NO: 186132 - RNA, 1410 nt, Artificial Sequence
  derived and/or modified CDS sequence (opt4) from neuraminidase__InfluenzaA__BAF47944
augaaccccaaccagaagaucaucaccaucggcagcgugagccugaccaucagcaccaucugcuucuucaugcagaucgccauccugaucaccaccgugacccugcacuucaagcaguacgaguucaacagcccccccaacaaccaggugaugcugugcgagcccaccaucaucgagagaaacaucaccgagaucguguaccugaccaacaccaccaucgagaaggagaucugccccaagcugaccgaguacagaaacuggagcaagccccagugcaacaucaccggcuucgcccccuucagcaaggacaacagcaucagacugagcgccggcggcgacaucugggugaccagagagcccuacgugagcugcgaccccgacaagugcuaccaguucgcccugggccagggcaccacccugaacaacgugcacagcaacgaccccgugcacgacagaacccccuacagaacccugcugaugaacgagcugggcgugcccuuccaccugggcaccaagcaggugugcaucgccuggagcagcagcagcugccacgacggcaaggccuggcugcacgugugcgugaccggcgacgacaagaacgccaccgccagcuucaucuacaacggcagacugguggacagcaucgugagcuggagcaaggagauccugagaacccaggagagcgagugcgugugcaucaacggcaccugcaccguggugaugaccgacggcagcgccagcggcaaggccgacaccaagauccuguucaucgaggagggcaagaucgugcacaccagcacccugagcggcagcgcccagcacguggaggagugcagcugcuaccccagauaccccggcgugagaugcgugugcagagacaacuggaagggcagcaacagacccaucguggacaucaacaucaaggacuacagcaucgugagcagcuacgugugcagcggccuggugggcgacacccccagaaagaacgacagcagcagcagcagccacugccuggaccccaacaacgaggagggcggccacggcgugaagggcugggccuucgacgacggcaacgacguguggaugggcagaaccaucagcgagaagcugagaagcggcuacgagaccuucaaggugaucgagggcuggagcaaccccaacagcaagcugcagaccaacagacaggugaucguggacagaggcaacagaagcggcuacagcggcaucuucagcguggagggcaagagcugcaucaacagaugcuucuacguggagcugaucagaggcagaaaggaggagaccgaggugcuguggaccagcaacagcaucgugguguucugcggcaccagcggcaccuacggcaccggcagcuggcccgacggcgccgacaucaaccugaugcccaucuga

SEQ ID NO: 186133 - RNA, 1410 nt, Artificial Sequence
  derived and/or modified CDS sequence (opt4) from neuraminidase__InfluenzaA__BAF47945
augaaccccaaccagaagaucaucaccaucggcagcgugagccugaccaucagcaccaucugcuucuucaugcagaucgccauccugaucaccaccgugacccugcacuucaagcaguacgaguucaacagcccccccaacaaccaggugaagcugugcgagcccaccaucaucgagagaaacaucaccgagaucguguaccugaccaacaccaccaucgagaaggagaucugccccaagcuggccgaguacagaaacuggagcaagccccagugcaacaucaccggcuucgcccccuucagcaaggacaacagcaucagacugagcgccggcggcgacaucugggugaccagagagcccuacgugagcugcgaccccgacaagugcuaccaguucgcccugggccagggcaccacccugaacaacgugcacagcaacgacaccgugcacgacagaacccccuacagaacccugcugaugaacgagcugggcgugcccuuccaccugggcaccaagcaggugugcaucgccuggagcagcagcagcugccacgacggcaaggccuggcugcacgugugcgugaccggcgacgacaagaacgccaccgccagcuucaucuacaacggcagacugguggacagcaucgugagcuggagcaaggagauccugagaacccaggagagcgagugcgugugcaucaacggcaccugcaccguggugaugaccgacggcagcgccagcggcaaggccgacaccaagauccuguucaucgaggagggcaagaucgugcacaccagcacccugagcggcagcgcccagcacguggaggagugcagcugcuaccccagauaccccggcgugagaugcgugugcagagacaacuggaagggcagcaacagacccaucguggacaucaacaucaaggacuacagcaucgugagcagcuacgugugcagcggccuggugggcgacacccccagaaagaacgacagcagcagcagcagccacugccuggaccccaacaacgaggagggcggccacggcgugaagggcugggccuucgacgacggcaacgacguguggaugggcagaaccaucagcgagaagcugagaagcggcuacgagaccuucaaggugaucgagggcuggagcaaccccaacagcaagcugcagaccaacagacaggugaucguggacagaggcaacagaagcggcuacagcggcaucuucagcguggagggcaagagcugcaucaacagaugcuucuacguggagcugaucagaggcagaaaggaggagaccgaggugcuguggaccagcaacagcaucgugguguucugcggcaccagcggcaccuacggcaccggcagcuggcccgacggcgccgacaucaaccugaugcccaucuga

SEQ ID NO: 186134 - RNA, 1410 nt, Artificial Sequence
  derived and/or modified CDS sequence (opt4) from neuraminidase__InfluenzaA__BAF47946
augaaccccaaccagaagaucaucaccaucggcagcgugagccugaccaucagcaccaucugcuucuucaugcagaucgccauccugaucaccaccgugacccugcacuucaagcaguacgaguucaacagcccccccaacaaccaggugaugcugugcgagcccaccaucaucgagagaaacaucaccgagaucguguaccugaccaacaccaccaucgagaaggagaucugccccaagcuggccgaguacagaaacuggagcaagccccagugcaacaucaccggcuucgcccccuucagcaaggacaacagcaucagacugagcgccggcggcgacaucugggugaccagagagcccuacgugagcugcgaccccgacaagugcuaccaguucgcccugggccagggcaccacccugaacaacgugcacagcaacgacaccgugcacgacagaacccccuacagaacccugcugaugaacgagcugggcgugcccuuccaccugggcaccaagcaggugugcaucgccuggagcagcagcagcugccacgacggcaaggccuggcugcacgugugcgugaccggcgacgacaagaacgccaccgccagcuucaucuacaacggcagacugguggacagcaucgugagcuggagcaaggagauccugagaacccaggagagcgagugcgugugcaucaacggcaccugcaccguggugaugaccgacggcagcgccagcggcaaggccgacaccaagauccuguucaucgaggagggcaagaucgugcacaccagcacccugagcggcagcgcccagcacguggaggagugcagcugcuaccccagauaccccggcgugagaugcgugugcagagacaacuggaagggcagcaacagacccaucguggacaucaacaucaaggacuacagcaucgugagcagcuacgugugcagcggccuggugggcgacacccccagaaagaacgacagcagcagcagcagccacugccuggaccccaacaacgaggagggcggccacggcgugaagggcugggccuucgacgacggcaacgacguguggaugggcagaaccaucagcgagaagcugagaagcggcuacgagaccuucaaggugcuggagggcuggagcaaccccaacagcaagcugcagaccaacagacaggugaucguggacagaggcaacagaagcggcuacagcggcaucuucagcguggagggcaagagcugcaucaacagaugcuucuacguggagcugaucagaggcagaaaggaggagaccgaggugcuguggaccagcaacagcaucgugguguucugcggcaccagcggcaccuacggcaccggcagcuggcccgacggcgccgacaucaaccugaugcccaucuga

SEQ ID NO: 186135 - RNA, 1410 nt, Artificial Sequence
  derived and/or modified CDS sequence (opt4) from neuraminidase__InfluenzaA__BAF47948
augaaccccaaccagaagaucaucaccaucggcagcgugagccugaccaucagcaccaucugcuucuucaugcagaucgccauccugaucaccaccgugacccugcacuucaagcaguacgaguucaacagcccccccaacaaccaggugaugcugugcgagcccaccaucaucgagagaaacaucaccgagaucguguaccugaccaacaccaccaucgagaaggagaucugccccaagcuggccgaguacagaaacuggagcaagccccagugcgacaucaccggcuucgcccccuucagcaaggacaacagcaucagacugagcgccggcggcgacaucugggugaccagagagcccuacgugagcugcgaccccgacaagugcuaccaguucgcccugggccagggcaccacccugaacaacgugcacagcaacgacaaggugcacgacagaacccccuacagaacccugcugaugaacgagcugggcgugcccuuccaccugggcaccaagcaggugugcaucgccuggagcagcagcagcugccacgacggcaaggccuggcugcacgugugcgugaccggcgacgacaagaacgccaccgccagcuucaucuacaacggcagacugguggacagcaucgugagcuggagcaagaagauccugagaacccaggagagcgagugcgugugcaucaacggcaccugcaccguggugaugaccgacggcagcgccagcggcaaggccgacaccaagauccuguucaucgaggagggcaagaucgugcacaccagcacccugagcggcagcgcccagcacguggaggagugcagcugcuaccccagauaccccggcgugagaugcgugugcagagacaacuggaagggcagcaacagacccaucguggacaucaacaucaaggacuacagcaucgugagcagcuacgugugcagcggccuggugggcgacacccccagaaagaacgacagcagcagcagcagccacugccuggaccccaacaacgaggagggcggccacggcgugaagggcugggccuucgacgacggcaacgacguguggaugggcagaaccaucagcgagaagcugagaagcggcuacgagaccuucaaggugaucgagggcuggagcaacagcaacagcaagcugcagaucaacagacaggugaucguggacagaggcaacagaagcggcuacagcggcaucuucagcguggagggcaagagcugcaucaacagaugcuucuacguggagcugaucagaggcagaaaggaggagaccgaggugcuguggaccagcaacagcaucgugguguucugcggcaccagcggcaccuacggcaccggcagcuggcccgacggcgccgacaucaaccugaugcccaucuga

SEQ ID NO: 186136 - RNA, 1410 nt, Artificial Sequence
  derived and/or modified CDS sequence (opt4) from neuraminidase__InfluenzaA__BAF47949
augaaccccaaccagaagaucaucaccaucggcagcgugagccugaccaucagcaccaucugcuucuucaugcagaucgccauccugaucaccaccgugacccugcacuucaagcaguacgaguucaacagcccccccaacaaccaggugaugcugugcgagcccaccaucaucgagagaaacaucaccgagaucguguaccugaccaacaccaccaucgagaaggagaucugccccaagcuggccgaguacagaaacuggagcaagccccagugcgacaucaccggcuucgcccccuucagcaaggacaacagcaucagacugagcgccggcggcgacaucugggugaccagagagcccuacgugagcugcgaccccgacaagugcuaccaguucgcccugggccagggcaccacccugaacaacgugcacagcaacgacaaggugcacgacagaacccccuacagaacccugcugaugaacgagcugggcgugcccuuccaccugggcaccaagcaggugugcaucgccuggagcagcagcagcugccacgacggcaaggccuggcugcacgugugcgugaccggcgacgacaagaacgccaccgccagcuucaucuacaacggcagacugguggacagcaucgugagcuggagcaagaagauccugagaacccaggagagcgagugcgugugcaucaacggcaccugcaccguggugaugaccgacggcagcgccagcggcaaggccgacaccaagauccuguucaucgaggagggcaagaucgugcacaccagcacccugagcggcagcgcccagcacguggaggagugcagcugcuaccccagauaccccggcgugagaugcgugugcagagacaacuggaagggcagcaacagacccaucguggacaucaacaucaaggacuacagcaucgugagcagcuacgugugcagcggccuggugggcgacacccccagaaagaacgacagcagcagcagcagccacugccuggaccccaacaacgaggagggcggccacggcgugaagggcugggccuucgacgacggcaacgacguguggaugggcagaaccaucagcgagaagcugagaagcggcuacgagaccuucaaggugaucgagggcuggagcaaccccaacagcaagcugcagaucaacagacaggugaucguggacagaggcaacagaagcggcuacagcggcaucuucagcguggagggcaagagcugcaucaacagaugcuucuacguggagcugaucagaggcagaaaggaggagaccgaggugcuguggaccagcaacagcaucgugguguucugcggcaccagcggcaccuacggcaccggcagcuggcccgacggcgccgacaucaaccugaugcccaucuga

SEQ ID NO: 186137 - RNA, 1410 nt, Artificial Sequence; identical to SEQ ID NO: 174774
  derived and/or modified CDS sequence (opt4) from neuraminidase__InfluenzaA__BAF47950

SEQ ID NO: 186138 - RNA, 1410 nt, Artificial Sequence
  derived and/or modified CDS sequence (opt4) from neuraminidase__InfluenzaA__BAF47951
augaaccccaaccagaagaucaucaccaucggcagcgugagccugaccaucagcaccaucugcuucuucaugcagaucgccauccugaucaccaccgugacccugcacuucaagcaguacgaguucaacagcccccccaacaaccaggugaugcugugcgagcccaccaucaucgagagaaacaucaccgagaucguguaccugaccaacaccaccaucgagaaggagaucugccccaagcuggccgaguacagaaacuggagcaagccccagugcgacaucaccggcuucgcccccuucagcaaggacaacagcaucagacugagcgccggcggcgacaucugggugaccagagagcccuacgugagcugcgaccccgacaagugcuaccaguucgcccugggccagggcaccacccugaacaacgugcacagcaacgacaccgugcacgacagaacccccuacagaacccugcugaugaacgagcugggcgugcccuuccaccugggcaccaagcaggugugcaucgccuggagcagcagcagcugccacgacggcaaggccuggcugcacgugugcgugaccggcgacgacaagaacgccaccgccagcuucaucuacaacggcagacugguggacagcaucgugagcuggagcaagaagauccugagaacccaggagagcgagugcgugugcaucaacggcaccugcaccguggugaugaccgacggcagcgccagcggcaaggccgacaccaagauccuguucaucgaggagggcaagaucgugcacaccagcacccugagcggcagcgcccagcacguggaggagugcagcugcuaccccagauaccccggcgugagaugcgugugcagagacaacuggaagggcagcaacagacccaucguggacaucaacaucaaggacuacagcaucgugagcagcuacgugugcagcggccuggugggcgacacccccagaaagaacgacagcagcagcagcagccacugccuggaccccaacaacgaggagggcggccacggcgugaagggcugggccuucgacgacggcaacgacguguggaugggcagaaccaucagcgagaagcugagaagcggcuacgagaccuucaaggugaucgagggcuggagcaacagcaacagcaagcugcagaucaacagacaggugaucguggacagaggcaacagaagcggcuacagcggcaucuucagcguggagggcaagagcugcaucaacagaugcuucuacguggagcugaucagaggcagaaaggaggagaccgaggugcuguggaccagcaacagcaucgugguguucugcggcaccagcggcaccuacggcaccggcagcuggcccgacggcgccgacaucaaccugaugcccaucuga

SEQ ID NO: 186139 - RNA, 1410 nt, Artificial Sequence
  derived and/or modified CDS sequence (opt4) from neuraminidase__InfluenzaA__BAF47952
augaaccccaaccagaagaucaucaccaucggcagcgugagccugaccaucagcaccaucugcuucuucaugcagaucgccauccugaucaccaccgugacccugcacuucaagcaguacgaguucaacagcccccccaacaaccaggugaugcugugcgagcccaccaucaucgagagaaacaucaccgagaucguguaccugaccaacaccaccaucgagaaggagaucugccccaagcuggccgaguacagaaacuggagcaagccccagugcaacaucaccggcuucgcccccuucagcaaggacaacagcaucagacugagcgccggcggcgacaucugggugaccagagagcccuacgugagcugcgaccccgacaagugcuaccaguucgcccugggccagggcaccacccugaacaacgugcacagcaacgacaccgugcacgacagaacccccuacagaacccugcugaugaacgagcugggcgugcccuuccaccugggcaccaagcaggugugcaucgccuggagcagcagcagcugccacgacggcaaggccuggcugcacgugugcgugaccggcgacgacaagaacgccaccgccagcuucaucuacaacggcagacugguggacagcaucgugagcuggagcaaggagauccugagaacccaggagagcgagugcgugugcaucaacggcaccugcaccguggugaugaccgacggcagcgccagcggcaaggccgacaccaagauccuguucaucgaggagggcaagaucgugcacaccagcacccugagcggcagcgcccagcacguggaggagugcagcugcuaccccagauaccccggcgugagaugcgugugcagagacaacuggaagggcagcaacagacccaucguggacaucaacaucaaggacuacagcaucgugagcagcuacgugugcagcggccuggugggcgacacccccagaaagaacgacagcagcagcagcagccacugccuggaccccaacaacgaggagggcggccacggcgugaagggcugggccuucgacgacggcaacgacguguggaugggcagaaccaucagcgagaagcugagaagcggcuacgagaccuucaaggugaucgagggcuggagcaaccccaacagcaagcugcagaccaacagacaggugaucguggacagaggcaacagaagcggcuacagcggcaucuucagcguggagggcaagagcugcaucaacagaugcuucuacguggagcugaucagaggcagaaaggaggagaccgaggugcuguggaccagcaacagcaucgugguguucugcggcaccagcggcaccuacggcaccggcagcuggcccgacggcgccaacaucaaccugaugcccaucuga

SEQ ID NO: 186140 - RNA, 1410 nt, Artificial Sequence
  derived and/or modified CDS sequence (opt4) from neuraminidase__InfluenzaA__BAF47953
augaaccccaaccagaagaucaucaccaucggcagcgugagccugaccaucagcaccaucugcuucuucaugcagaucgccauccugaucaccaccgugacccugcacuucaagcaguacgaguucaacagcccccccaacaaccaggugaugcugugcgagcccaccaucaucgagagaaacaucaccgagaucguguaccugaccaacaccaccaucgagaaggagaucugccccaagcuggccgaguacagaaacuggagcaagccccagugcgacaucaccggcuucgcccccuucagcaaggacaacagcaucagacugagcgccggcggcgacaucugggugaccagagagcccuacgugagcugcgaccccgacaagugcuaccaguucgcccugggccagggcaccacccugaacaacgugcacagcaacgacaccgugcacgacagaacccccuacagaacccugcugaugaacgagcugggcgugcccuuccaccugggcaccaagcaggugugcaucgccuggagcagcagcagcugccacgacggcaaggccuggcugcacgugugcgugaccggcgacgacgagaacgccaccgccagcuucaucuacaacggcagacugguggacagcaucgugagcuggagcaagaagauccugagaacccaggagagcgagugcgugugcaucaacggcaccugcaccguggugaugaccgacggcagcgccagcggcaaggccgacaccaagauccuguucaucgaggagggcaagaucgugcacaccagcacccugagcggcagcgcccagcacguggaggagugcagcugcuaccccagauaccccggcgugagaugcgugugcagagacaacuggaagggcagcaacagacccaucguggacaucaacaucaaggacuacagcaucgugagcagcuacgugugcagcggccuggugggcgacacccccagaaagaacgacagcagcagcagcagccacugccuggaccccaacaacgaggagggcggccacggcgugaagggcugggccuucgacgacggcaacgacguguggaugggcagaaccaucagcgagaagcugagaagcggcuacgagaccuucaaggugaucgagggcuggagcaaccccaacagcaagcugcagaucaacagacaggugaucguggacagaggcaacagaagcggcuacagcggcaucuucagcguggagggcaagagcugcaucaacagaugcuucuacguggagcugaucagaggcagaaaggaggagaccgaggugcuguggaccagcaacagcaucgugguguucugcggcaccagcggcaccuacggcaccggcagcuggcccgacggcgccgacaucaaccugaugcccaucuga

SEQ ID NO: 186141 - RNA, 1410 nt, Artificial Sequence; identical to SEQ ID NO: 186093
  derived and/or modified CDS sequence (opt4) from neuraminidase__InfluenzaA__BAF47954

SEQ ID NO: 186142 - RNA, 1410 nt, Artificial Sequence; identical to SEQ ID NO: 186093
  derived and/or modified CDS sequence (opt4) from neuraminidase__InfluenzaA__BAF47955

SEQ ID NO: 186143 - RNA, 1410 nt, Artificial Sequence
  derived and/or modified CDS sequence (opt4) from neuraminidase__InfluenzaA__BAF47956
augaaccccaaccagaagaucaucaccaucggcagcgugagccugaccaucagcaccaucugcuucuucaugcagaucgccauccugaucaccaccgugacccugcacuucaagcaguacgaguucaacagcccccccaacaaccaggugaugcugugcgagcccaccaucaucgagagaaacaucaccgagaucguguaccugaccaacaccaccaucgagaaggagaucugccccaagcuggccgaguacagaaaguggagcaagccccagugcaacaucaccggcuucgcccccuucagcaaggacaacagcaucagacugagcgccggcggcgacaucugggugaccagagagcccuacgugagcugcgaccccgacaagugcuaccaguucgcccugggccagggcaccacccugaacaacgugcacagcaacgacaccgugagagacagaacccccuacagaacccugcugaugaacgagcugggcgugcccuuccaccugggcaccaagcaggugugcaucgccuggagcagcagcagcugccacgacggcaaggccuggcugcacgugugcgugaccggcgacgacaagaacgccaccgccagcuucaucuacaacggcagacugguggacagcaucgugagcuggagcaaggagauccugagaacccaggagagcgagugcgugugcaucaacggcaccugcaccguggugaugaccgacggcagcgccagcggcaaggccgacaccaagauccuguucaucgaggagggcaagaucgugcacaccagcacccugagcggcagcgcccagcacguggaggagugcagcugcuaccccagauaccccggcgugagaugcgugugcagagacaacuggaagggcagcaacagacccaucguggacaucaacaucaaggacuacagcaucgugagcagcuacgugugcagcggccuggugggcgacacccccagaaagaacgacagcagcagcagcagccacugccuggaccccaacaacgaggagggcggccacggcgugaagggcugggccuucgacgacggcaacgacguguggaugggcagaaccaucagcgagaagcugagaagcggcuacgagaccuucaaggugaucgagggcuggagcaaccccaacagcaagcugcagaucaacagacaggugaucguggacagaggcaacagaagcggcuacagcggcaucuucagcguggagggcaagagcugcaucaacagaugcuucuacguggagcugaucagaggcagaaaggaggagaccgaggugcuguggaccagcaacagcaucgugguguucugcggcaccagcggcaccuacggcaccggcagcuggcccgacggcgccgacaucaacuucaugcccaucuga

SEQ ID NO: 186144 - RNA, 1410 nt, Artificial Sequence
  derived and/or modified CDS sequence (opt4) from neuraminidase__InfluenzaA__BAF47958
augaaccccaaccagaagaucaucaccaucggcagcgugagccugaccaucagcaccaucugcuucuucaugcagaucgccauccugaucaccaccgugacccugcacuucaagcaguacgaguucaacagcccccccaacaaccaggugaugcugugcgagcccaccaucaucgagagaaacaucaccgagaucguguaccugaccaacaccaccaucgagaaggagaucugccccaagcuggccgaguacagaaaguggagcaagccccagugcaacaucaccggcuucgcccccuucagcaaggacaacagcaucagacugagcgccggcggcgacaucugggugaccagagagcccuacgugagcugcgaccccgacaagugcuaccaguucgcccugggccagggcaccacccugaacaacgugcacagcaacgacaccgugagagacagaacccccuacagaacccugaugaugaacgagcugggcgugcccuuccaccugggcaccaagcaggugugcaucgccuggagcagcagcagcugccacgacggcaaggccuggcugcacgugugcgugaccggcgacgacaagaacgccaccgccagcuucaucuacaacggcagacugguggacagcaucgugagcuggagcaaggagauccugagaacccaggagagcgagugcgugugcaucaacggcaccugcaccguggugaugaccgacggcagcgccagcggcaaggccgacaccaagauccuguucaucgaggagggcaagaucgugcacaccagcacccugagcggcagcgcccagcacguggaggagugcagcugcuaccccagauaccccggcgugagaugcgugugcagagacaacuggaagggcagcaacagacccaucguggacaucaacaucaaggacuacagcaucgugagcagcuacgugugcagcggccuggugggcgacacccccagaaagaacgacagcagcagcagcagccacugccuggaccccaacaacgaggagggcggccacggcgugaagggcugggccuucgacgacggcaacgacguguggaugggcagaaccaucagcgagaagcugagaagcggcuacgagaccuucaaggugaucgagggcuggagcaaccccaacagcaagcugcagaucaacagacaggugaucguggacagaggcaacagaagcggcuacagcggcaucuucagcguggagggcaagagcugcaucaacagaugcuucuacguggagcugaucagaggcagaaaggaggagaccgaggugcuguggaccagcaacagcaucgugguguucugcggcaccagcggcaccuacggcaccggcagcuggaccgacggcgccgacaucaacuucaugcccaucuga

SEQ ID NO: 186145 - RNA, 1410 nt, Artificial Sequence
  derived and/or modified CDS sequence (opt4) from neuraminidase__InfluenzaA__BAF47959
augaaccccaaccagaagaucaucaccaucggcagcgugagccugaccaucagcaccaucugcuucuucaugcagaucgccauccugaucaccaccgugacccugcacuucaagcaguacgaguucaacagcccccccaacaaccaggugaugcugugcgagcccaccaucaucgagagaaacaucaccgagaucguguaccugaccaacaccaccaucgagaaggagaucugccccaagcuggccgaguacagaaacuggagcaagccccagugcaacaucaccggcuucgcccccuucagcaaggacaacagcaucagacugagcgccggcggcgacaucugggugaccagagagcccuacgugagcugcgaccccgacaagugcuaccaguucgcccugggccagggcaccacccugaacaacgugcacagcaacuacaccgugcacgacagaacccccuacagaacccugcugaugaacgagcugggcgugcccuuccaccugggcaccaagcaggugugcaucgccuggagcagcagcagcugccacgacggcaaggccuggcugcacgugugcgugaccggcgacgacaagaacgccaccgccagcuucaucuacaacggcagacugguggacagcaucgugagcuggagcaaggagauccugagaacccaggagagcgagugcgugugcaucaacggcaccugcaccguggugaugaccgacggcagcgccagcggcaaggccgacaccaagauccuguucaucgaggagggcaagaucgugcacaccagcacccugagcggcagcgcccagcacguggaggagugcagcugcuaccccagauaccccggcgugagaugcgugugcagagacaacuggaagggcagcaacagacccaucguggacaucaacaucaaggacuacagcaucgugagcagcuacgugugcagcggccuggugggcgacacccccagaaagaacgacagcagcagcagcggccacugccuggaccccaacaacgaggagggcggccacggcgugaagggcugggccuucgacgacggcaacgacguguggaugggcagaaccaucagcgagaagcugagaagcggcuacgagaccuucaaggugaucgagggcuggagcaaccccaacagcaagcugcagaucaacagacaggugaucguggacagaggcaacagaagcggcuacagcggcaucuucagcguggagggcaagagcugcaucaacagaugcuucuacguggagcugaucagaggcagaaaggaggagaccgaggugcuguggaccagcaacagcaucgugguguucugcggcaccagcggcaccuacggcaccggcagcuggcccgacggcgccgacaucaaccugaugcccaucuga

SEQ ID NO: 186146 - RNA, 1410 nt, Artificial Sequence
  derived and/or modified CDS sequence (opt4) from neuraminidase__InfluenzaA__BAF47960
augaaccccaaccagaagaucaucaccaucggcagcgugagccugaccaucagcaccaucugcuucuucaugcagaucgccauccugaucaccaccgugacccugcacuucaagcaguacgaguucaacagcccccccaacaaccaggugaugcugugcgagcccaccaucaucgagagaaacaucaccgagaucguguaccugaccaacaccaccaucgagaaggagaucugccccaagcuggccgaguacagaaacuggagcaagccccagugcaacaucaccggcuucgcccccuucagcaaggacaacagcaucagacugagcgccggcggcgacaucugggugaccagagagcccuacgugagcugcgaccccgacaagugcuaccaguucgcccugggccagggcaccacccugaacaacgugcacagcaacgacaccgugcacaacagaacccccuacagaacccugcugaugaacgagcugggcgugcccuuccaccugggcaccaagcaggugugcaucgccuggagcagcagcagcugccacgacggcaaggccuggcugcacgugugcgugaccggcgacgacaagaacgccaccgccagcuucaucuacaacggcagacugguggacagcaucgugagcuggagcaaggagauccugagaacccaggagagcgagugcgugugcaucaacggcaccugcaccguggugaugaccgacggcagcgccagcggcaaggccgacaccaagauccuguucaucgaggagggcaagaucgugcacaccagcacccugagcggcagcgcccagcacguggaggagugcagcugcuaccccagauaccccggcgugagaugcgugugcagagacaacuggaagggcagcaacagacccaucguggacaucaacaucaaggacuacagcaucgugagcagcuacgugugcagcggccuggugggcgacacccccagaaagaacgacagcagcagcagcggccacugccuggaccccaacaacgaggagggcggccacggcgugaagggcugggccuucgacgacggcaacgacguguggaugggcagaaccaucagcgagaagcugagaagcggcuacgagaccuucaaggugaucgagggcuggagcaaccccaacagcaagcugcagaucaacagacaggugaucguggacagaggcaacagaagcggcuacagcggcaucuucagcguggagggcaagagcugcaucaacagaugcuucuacguggagcugaucagaggcagaaaggaggagaccgaggugcuguggaccagcaacagcaucgugguguucugcggcaccagcggcaccuacggcaccggcagcuggcccgacggcgccgacaucaaccugaugcccaucuga

SEQ ID NO: 186147 - RNA, 1410 nt, Artificial Sequence
  derived and/or modified CDS sequence (opt4) from neuraminidase__InfluenzaA__BAF47975
augaaccccaaccagaagaucaucaccaucggcagcgugagccugaccaucagcaccaucugcuucuucaugcagaucgccauccugaucaccaccgugacccugcacuucaagcaguacgaguucaacagcccccccaacaaccaggugaugcugugcgagcccaccaucaucgagagaaacaucaccgagaucguguaccugaccaacaccaccaucgagaaggagaucugccccaagcuggccgaguacagaaaguggagcaagccccagugcaacaucaccggcuucgcccccuucagcaaggacaacagcaucagacugagcgccggcggcgacaucugggugaccagagagcccuacgugagcugcgaccccgacaagugcuaccaguucgcccugggccagggcaccacccugaacaacgugcacagcaacgacaccgugagagacagaacccccuacagaacccugcugaugaacgagcugggcgugcccuuccaccugggcaccaagcaggugugcaucgccuggagcagcagcagcugccacgacggcaaggccuggcugcacgugugcgugaccggcgacgacaagaacgccaccgccagcuucaucuacaacggcagacugguggacagcaucgugagcuggagcaaggagauccugagaacccaggagagcgagugcgugugcaucaacggcaccugcaccguggugaugaccgacggcagcgccagcggcaaggccgacaccaagauccuguucaucgaggagggcaagaucgugcacaccagcacccugagcggcagcgcccagcacguggaggagugcagcugcuaccccagauaccccggcgugagaugcgugugcagagacaacuggaagggcagcaacagacccaucguggacaucaacaucaaggacuacagcaucgugagcagcuacgugugcagcggccuggugggcgacacccccagaaagaacgacagcagcagcagcagccacugccuggaccccaacaacgaggagggcggccacggcgugaagggcugggccuucgacgacggcaacgacguguggaugggcagaaccaucagcgagaagcugagaagcggcuacgagaccuucaaggugaucgagggcuggagcaaccccaacagcaagcugcagaucaacagacaggugaucguggacagaggcaacagaagcggcuacagcggcaucuucagcguggagggcaagagcugcaucaacagaugcuucuacguggagcugaucagaggcagaaaggaggagaccgaggugcuguggaccagcaacagcaucgugguguucugcggcaccagcggcaccuacggcaccggcagcuggcccgacggcgccgacaucaaccacaugcccaucuga

SEQ ID NO: 186148 - RNA, 1410 nt, Artificial Sequence; identical to SEQ ID NO: 174772
  derived and/or modified CDS sequence (opt4) from neuraminidase__InfluenzaA__BAF47976

SEQ ID NO: 186149 - RNA, 1410 nt, Artificial Sequence
  derived and/or modified CDS sequence (opt4) from neuraminidase__InfluenzaA__BAF47977
augaaccccaaccagaagaucaucaccaucggcagcgugagccugaccaucagcaccaucugcuucuucaugcagaucgccauccugaucaccaccgugacccugcaguucaagcaguacgaguucaacagcccccccaacaaccaggugaugcugugcgagcccaccaucaucgagagaaacaucaccgagaucguguaccugaccaacaccaccaucgagaaggagaucugccccaagcuggccgaguacagaaacuggagcaagccccagugcaacaucaccggcuucgcccccuucagcaaggacaacagcaucagacugagcgccggcggcgacaucugggugaccagagagcccuacgugagcugcgaccccgacaagugcuaccaguucgcccugggccagggcaccacccugaacaacgugcacagcaacgacaccgugcacggcagaacccccuacagaacccugcugaugaacgagcugggcgugcccuuccaccugggcaccaagcaggugugcaucgccuggagcagcagcagcugccacgacggcaaggccuggcugcacgugugcgugaccggcgacgacaagaacgccaccgccagcuucaucuacaacggcagacugguggacagcaucgugagcuggagcaaggagauccugagaacccaggagagcgagugcgugugcaucaacggcaccugcaccguggugaugaccgacggcagcgccagcggcaaggccgacaccaagauccuguucaucgaggagggcaagaucgugcacaccagcacccugagcggcagcgcccagcacguggaggagugcagcugcuaccccagauaccccggcgugagaugcgugugcagagacaacuggaagggcagcaacagacccaucguggacaucaacaucaaggacuacagcaucgugagcagcuacgugugcagcggccuggugggcgacacccccagaaagaacgacagcagcagcagcagccacugccuggaccccaacaacgaggagggcggccacggcgugaagggcugggccuucgacgacggcaacgacguguggaugggcagaaccaucagcgagaagcugagaagcggcuacgagaccuucaaggugaucgagggcuggagcaaccccaacagcaagcugcagaccaacagacaggugaucguggacagaggcaacagaagcggcuacagcggcaucuucagcguggagggcaagagcugcaucaacagaugcuucuacguggagcugaucagaggcagaaaggaggagaccgaggugcuguggaccagcaacagcaucgugguguucugcggcaccagcggcaccuacggcaccggcagcuggcccgacggcgccgacaucaaccugaugcccaucuga

SEQ ID NO: 186150 - RNA, 1410 nt, Artificial Sequence
  derived and/or modified CDS sequence (opt4) from neuraminidase__InfluenzaA__BAF47978
augaaccccaaccagaagaucaucaccaucggcagcgugagccugaccaucagcaccaucugcuucuucaugcagaucgccauccuggugaccaccgugacccugcacuucaagcaguacgaguucaacagcccccccaacaaccaggugaugcugugcgagcccaccaucaucgagagaaacaucaccgagaucguguaccugaccaacaccaccaucgagaaggagaucugccccaagcuggccgaguacagaaacuggagcaagccccagugcaacaucaccggcuucgcccccuucagcaaggacaacagcaucagacugagcgccggcggcgacaucugggugaccagagagcccuacgugagcugcgaccccgacaagugcuaccaguucgcccugggccagggcaccacccugaacaacgugcacagcaacgacaccgugcacgacagaacccccuacagaacccugcugaugaacgagcugggcgugcccuuccaccugggcaccaagcaggugugcaucgccuggagcagcagcagcugccacgacggcaaggccuggcugcacgugugcgugaccggcgacgacaagaacgccaccgccagcuucaucuacaacggcagacugguggacagcaucgugagcuggagcaaggagauccugagaacccaggagagcgagugcgugugcaucaacggcaccugcaccguggugaugaccgacggcagcgccagcggcaaggccgacaccaagauccuguucaucgaggagggcaagaucgugcacaccagcacccugagcggcagcgcccagcacguggaggagugcagcugcuaccccagauaccccggcgugagaugcgugugcagagacaacuggaagggcagcaacagacccaucguggacaucaacaucaaggacuacagcaucgugagcagcuacgugugcagcggccuggugggcgacacccccagaaagaacgacagcagcagcagcagccacugccuggaccccaacaacgaggagggcggccacggcgugaagggcugggccuucgacgacggcaacgacgccuggaugggcagaaccaucagcgagaagcugagaagcggcuacgagaccuucaaggugaucgagggcuggagcaaccccaacagcaagcugcagaucaacagacaggugaucguggacagaggcaacagaagcggcuacagcggcaucuucagcguggagggcaagagcugcaucaacagaugcuucuacguggagcugaucagaggcagaaaggaggagaccgaggugcuguggaccagcaacagcaucgugguguucugcggcaccagcggcaccuacggcaccggcagcuggcccgacggcgccgacaucaaccugaugcccaucuga

SEQ ID NO: 186151 - RNA, 1410 nt, Artificial Sequence
  derived and/or modified CDS sequence (opt4) from neuraminidase__InfluenzaA__BAF47979
augaaccccaaccagaagaucaucaccaucggcagcgugagccugaccaucagcaccaucugcuucuucaugcagaucgccauccugaucaccaccgugacccugcacuucaagcaguacgaguucaacagcccccccaacaaccaggugaugcugugcgagcccaccaucaucgagagaaacaucaccgagaucguguaccugaccaacaccaccaucgagaaggagaucugccccaagcuggccgaguacagaaacuggagcaagccccagugcaacaucaccggcuucgcccccuucagcaaggacaacagcaucagacugagcgccggcggcgacaucugggugaccagagagcccuacgugagcugcgaccccgacaagugcuaccaguucgcccugggccagggcaccacccugaacaacgugcacagcaacgacaccgugcacaacagaacccccuacagaacccugcugaugaacgagcugggcgugcccuuccaccugggcaccaagcaggugugcaucgccuggagcagcagcagcugccacgacggcaaggccuggcugcacgugugcgugaccggcgacgacaagaacgccaccgccagcuucaucuacaacggcagacugguggacagcaucgugagcuggagcaaggagauccugagaacccaggagagcgagugcgugugcaucaacggcaccugcaccguggugaugaccgacggcagcgccagcggcaaggccgacaccaagauccuguucaucgaggagggcaagaucgugcacaccagcacccugagcggcagcgcccagcacguggaggagugcagcugcuaccccagauaccccggcgugagaugcgugugcagagacaacuggaagggcagcaacagacccaucguggacaucaacaucaaggacuacagcaucgugagcagcuacgugugcagcggccuggugggcgacacccccagaaagaacgacagcagcagcagcagccacugccuggaccccaacaacgaggagggcggccacggcgugaagggcugggccuucgacgacggcaacgacguguggaugggcagaaccaucagcgagaagcugagaagcggcuacgagaccuucaaggugaucgagggcuggagcaaccccaacagcaagcugcagaccaacagacaggugaucguggacagaggcaacagaagcggcuacagcggcaucuucagcguggagggcaagagcugcaucaacagaugcuucuacguggagcugaucagaggcagaaaggaggagaccgaggugcuguggaccagcaacagcaucgugguguucugcggcaccagcggcaccuacggcaccggcagcuggcccgacggcgccgacaucaaccugaugcccaucuga

SEQ ID NO: 186152 - RNA, 1410 nt, Artificial Sequence; identical to SEQ ID NO: 176624
  derived and/or modified CDS sequence (opt4) from neuraminidase__InfluenzaA__BAF47980

SEQ ID NO: 186153 - RNA, 1410 nt, Artificial Sequence
  derived and/or modified CDS sequence (opt4) from neuraminidase__InfluenzaA__BAF47981
augaaccccaaccagaagaucaucaccaucggcagcgugagccugaccaucagcaccaucugccuguucaugcagaucgccauccugaucaccaccgugacccugcacuucaagcaguacgaguucaacagcccccccaacaaccaggugaugcugugcgagcccaccaucaucgagagaaacaucaccgagaucguguaccugaccaacaccaccaucgagaaggagaucugccccaagcuggccgaguacagaaaguggagcaagccccagugcaacaucaccggcuucgcccccuucagcaaggacaacagcaucagacugagcgccggcggcgacaucugggugaccagagagcccuacgugagcugcgaccccgacaagugcuaccaguucgcccugggccagggcaccacccugaacaacgugcacagcaacgacaccgugagaaacagaacccccuacagaacccugcugaugaacgagcugggcgugcccuuccaccugggcaccaagcaggugugcaucgccuggagcagcagcagcugccacgacggcaaggccuggcugcacgugugcgugaccggcgacgacaagaacgccaccgccagcuucaucuacaacggcagacugguggacagcaucgugagcuggagcaaggagauccugagaacccaggagagcgagugcgugugcaucaacggcaccugcaccguggugaugaccgacggcagcgccagcggcaaggccgacaccaagauccuguucaucgaggagggcaagaucgugcacaccagcacccugagcggcagcgcccagcacguggaggagugcagcugcuaccccagauaccccggcgugagaugcgugugcagagacaacuggaagggcagcaacagacccaucguggacaucaacaucaaggacuacagcaucgugagcagcuacgugugcagcggccuggugggcgacacccccagaaagaacgacagcagcagcagcagccacugccuggaccccaacaacgaggagggcggccacggcgugaagggcugggccuucgacgacggcaacgacguguggaugggcagaaccaucagcgagaagcugagaagcggcuacgagaccuucaaggugaucgagggcuggagcaaccccaacagcaagcugcagaucaacagacaggugaucguggacagaggcaacagaagcggcuacagcggcaucuucagcguggagggcaagagcugcaucaacagaugcuucuacguggagcugaucagaggcagaaaggaggagaccgaggugcuguggaccagcaacagcaucgugguguucugcggcaccagcggcaccuacggcaccggcagcuggcccgacggcgccgacaucaaccugaugcccaucuga

SEQ ID NO: 186154 - RNA, 1410 nt, Artificial Sequence
  derived and/or modified CDS sequence (opt4) from neuraminidase__InfluenzaA__BAF47982
augaaccccaaccagaagaucaucaccaucggcagcgugagccugaccaucagcaccaucugcuucuucaugcagaucgccauccugaucaccaccgugacccugcacuucaagcaguacgaguucaacagcccccccaacaaccaggugaugcugugcgagcccaccaucaucgagagaaacaucaccgagaucguguaccugaccaacaccaccaucgagaaggagaucugccccaagcuggccgaguacagaaaguggagcaagccccagugcaacaucaccggcuucgcccccuucagcaaggacaacagcaucagacugagcgccggcggcgacaucugggugaccagagagcccuacgugagcugcgaccccgacaagugcuaccaguucgcccugggccagggcaccacccugaacaacgugcacagcaacgacaccgugagaaacagaacccccuacagaacccugcugaugaacgagcugggcgugcccuuccaccugggcaccaagcaggugugcaucgccuggagcagcagcagcugccacgacggcaaggccuggcugcacgugugcgugaccggcgacgacaagaacgccaccgccagcuucaucuacaacggcagacugguggacagcaucgugagcuggagcaaggagauccugagaacccaggagagcgagugcgugugcaucaacggcaccugcaccguggugaugaccgacggcagcgccagcggcaaggccgacaccaagauccuguucaucgaggagggcaagaucgugcacaccagcacccugagcggcagcgcccagcacguggaggagugcagcugcuaccccagauaccccggcgugagaugcgugugcagagacaacuggaagggcagcaacagacccaucguggacaucaacaucaaggacuacagcaucgugagcagcuacgugugcagcggccuggugggcgacacccccagaaagaacgacagcagcagcagcagccacugccuggaccccaacaacgaggagggcggccacggcgugaagggcugggccuucgacgacggcaacgacguguggaugggcagaaccaucagcgagaagcugagaagcggcuacgagaccuucaaggugaucgagggcuggagcaaccccaacagcaagcugcagaucaacagacaggugaucguggacagaggcaacagaagcggcuacagcggcaucuucagcguggagggcaagagcugcaucaacagaugcuucuacguggagcugaucagaggcagaaaggaggagaccgaggugcuguggaccagcaacagcaucgugguguucugcggcaccagcggcaccuacggcaccggcagcuggcccgacggcgccgacaucaaccugaugcccaucuga

SEQ ID NO: 186155 - RNA, 1410 nt, Artificial Sequence; identical to SEQ ID NO: 176624
  derived and/or modified CDS sequence (opt4) from neuraminidase__InfluenzaA__BAF47983

SEQ ID NO: 186156 - RNA, 1410 nt, Artificial Sequence
  derived and/or modified CDS sequence (opt4) from neuraminidase__InfluenzaA__BAF47984
augaaccccaaccagaagaucaucaccaucggcagcgugagccugaccaucagcaccaucugcuucuucaugcagaucgccauccugaucaccaccgugacccugcacuucaagcaguacgaguucaacagcccccccaacaaccaggugaugcugugcgagcccaccaucaucgagagaaacaucaccgagaucguguaccugaccaacaccaccaucgagaaggagaucugccccaagcuggccgaguacagaaacuggagcaagccccagugcaacaucaccggcuucgcccccuucagcaaggacaacagcaucagacugagcgccggcggcgacaucugggugaccagagagcccuacgugagcugcgaccccgacaagugcuaccaguucgcccugggccagggcaccacccugaacaacgugcacagcaacgacaccgugcacggcagaacccccuacagaacccugcugaugaacgagcugggcgugcccuuccaccugggcaccaagcaggugugcaucgccuggagcagcagcagcugccacgacggcaaggccuggcugcacgugugcgugaccggcgacgacaagaacgccaccgccagcuucaucuacaacggcagacugguggacagcaucgugagcuggagcaaggagauccugagaacccaggagagcgagugcgugugcaucaacggcaccugcaccguggugaugaccgacggcagcgccagcggcaaggccgacaccaagauccuguucaucgaggagggcaagaucgugcacaccagcacccugagcggcagcgcccagcacguggaggagugcagcugcuaccccagauaccccggcgugagaugcgugugcagagacaacuggaagggcagcaacagacccaucguggacaucaacaucaaggacuacagcaucgugagcagcuacgugugcagcggccuggugggcgacacccccagaaagaacgacagcagcagcagcagccacugccuggaccccaacaacgaggagggcgaccacggcgugaagggcugggccuucgacgacggcaacgacguguggaugggcagaaccaucagcgagaagcugagaagcggcuacgagaccuucaaggugaucgagggcuggagcaaccccaacagcaagcugcagaucaacagacaggugaucguggacagaggcaacagaagcggcuacagcggcaucuucagcguggagggcaagagcugcaucaacagaugcuucuacguggagcugaucagaggcagaaaggaggagaccgaggugcuguggaccagcaacagcaucgugguguucugcggcaccagcggcaccuacggcaccggcagcuggcccgacggcgccgacaucaaccugaugcccaucuga

SEQ ID NO: 186157 - RNA, 1410 nt, Artificial Sequence
  derived and/or modified CDS sequence (opt4) from neuraminidase__InfluenzaA__BAF47985
augaaccccaaccagaagaucaucaccaucggcagcgugagccugaccaucagcaccaucugcuucuucaugcagaucgccauccugaucaccaccgugacccugcacuucaagcaguacgaguucaacuucccccccaacaaccaggugaugcugugcgagcccaccaucaucgagagaaacaucaccgagaucguguaccugaccaacaccaccaucgagaaggagaucugccccaagcuggccgaguacagaaacuggagcaagccccagugcgacaucaccggcuucgcccccuucagcaaggacaacagcaucagacugagcgccggcggcgacaucugggugaccagagagcccuacgugagcugcgaccccgacaagugcuaccaguucgcccugggccagggcaccacccugaacaacgugcacagcaacgacaccgugcacgacagaacccccuacagaacccugcugaugaacgagcugggcgugcccuuccaccugggcaccaagcaggugugcaucgccuggagcagcagcagcugccacgacggcaaggccuggcugcacgugugcgugaccggcgacgacaagaacgccaccgccagcuucaucuacaacggcagacugguggacagcaucgugagcuggagcaagaagauccugagaacccaggagagcgagugcgugugcaucaacggcaccugcaccguggugaugaccgacggcagcgccagcggcaaggccgacaccaagauccuguucaucgaggagggcaagaucgugcacaccagcacccugagcggcagcgcccagcacguggaggagugcagcugcuaccccagauaccccggcgugagaugcgugugcagagacaacuggaagggcagcaacagacccaucguggacaucaacaucaaggacuacagcaucgugagcagcuacgugugcagcggccuggugggcgacacccccagaaagaacgacagcagcagcagcagccacugccuggaccccaacaacgaggagggcggccacggcgugaagggcugggccuucgacgacggcaacgacguguggaugggcagaaccaucagcgagaagcugagaagcggcuacgagaccuucaaggugaucgagggcuggagcaaccccaacagcaagcugcagaucaacagacaggugaucguggacagaggcaacagaagcggcuacagcggcaucuucagcguggagggcaagagcugcaucaacagaugcuucuacguggagcugaucagaggcagaaaggaggagaccgaggugcuguggaccagcaacagcaucgugguguucugcggcaccagcggcaccuacggcaccggcagcuggcccgacggcgccgacaucaaccugaugcccaucuga

SEQ ID NO: 186158 - RNA, 1410 nt, Artificial Sequence
  derived and/or modified CDS sequence (opt4) from neuraminidase__InfluenzaA__BAF47986
augaaccccaaccagaagaucaucaccaucggcagcgugagccugaccaucagcaccaucugcuucuucaugcagaucgccauccugaucaccaccgugacccugcacuucaagcaguacgaguucaacuucccccccaacaaccaggugaugcugugcgagcccaccaucaucgagagaaacaucaccgagaucguguaccugaccaacaccaccaucgagaaggagaucugccccaagcuggccgaguacagaaacuggagcaagccccagugcgacaucaccggcuucgcccccuucagcaaggacaacagcaucagacugagcgccggcggcgacaucugggugaccagagagcccuacgugagcugcgaccccgacaagugcuaccaguucgcccugggccagggcaccacccugaacaacgugcacagcaacgacaccgugcacgacagaacccccuacagaacccugcugaugaacgagcugggcgugcccuuccaccugggcaccaagcaggugugcaucgccuggagcagcagcagcugccacgacggcaaggccuggcugcacgugugcgugaccggcgacgacaagaacgccaccgccagcuucaucuacaacggcagacugguggacagcaucgugagcuggagcaagaagauccugagaacccaggagagcgagugcgugugcaucaacggcaccugcaccguggugaugaccgacggcagcgccagcggcaaggccgacaccaagauccuguucaucgaggagggcaagaucgugcacaccagcacccugagcggcagcgcccagcacguggaggagugcagcugcuaccccagauaccccggcgugagaugcgugugcagagacaacuggaagggcagcaacagacccaucguggacaucaacaucaaggacuacagcaucgugagcagcuacgugugcagcggccuggugggcgacacccccagaaagaacgacagcagcagcagcagccacugccuggaccccaacaacgaggagggcggccacggcgugaagggcugggccuucgacgacggcaacgacguguggaugggcagaaccaucagcgagaagcugagaagcggcuacgagaccuucaaggugaucgagggcuggagcaaccccaacagcaagcugcagaucaacagacaggugaucguggacagaggcaacagaagcggcuacagcggcaucuucagcguggagggcaagagcugcaucaacagaagauucuacguggagcugaucagaggcagaaaggaggagaccgaggugcuguggaccagcaacagcaucgugguguucugcggcaccagcggcaccuacggcaccggcagcuggcccgacggcgccgacaucaaccugaugcccaucuga

SEQ ID NO: 186159 - RNA, 1410 nt, Artificial Sequence
  derived and/or modified CDS sequence (opt4) from neuraminidase__InfluenzaA__BAF47987
augaaccccaaccagaagaucaucaccaucggcagcgugagccugaccaucagcaccaucugcuucuucaugcagaucgccauccugaucaccaccgugacccugcacuucaagcaguacgaguucaacuucccccccaacaaccaggugaugcugugcgagcccaccaucaucgagagaaacaucaccgagaucguguaccugaccaacaccaccaucgagaaggagaucugccccaagcuggccgaguacagaaacuggagcaagccccagugcgacaucaccggcuucgcccccuucagcaaggacaacagcaucagacugagcgccggcggcgacaucugggugaccagagagcccuacgugagcugcgaccccgacaagugcuaccaguucgcccugggccagggcaccacccugaacaacgugcacagcaacgacaaggugcacgacagaacccccuacagaacccugcugaugaacgagcugggcgugcccuuccaccugggcaccaagcaggugugcaucgccuggagcagcagcagcugccacgacggcaaggccuggcugcacgugugcgugaccggcgacgacaagaacgccaccgccagcuucaucuacaacggcagacugguggacagcaucgugagcuggagcaagaagauccugagaacccaggagagcgagugcgugugcaucaacggcaccugcaccguggugaugaccgacggcagcgccagcggcaaggccgacaccaagauccuguucaucgaggagggcaagaucgugcacaccagcacccugagcggcagcgcccagcacguggaggagugcagcugcuaccccagauaccccggcgugagaugcgugugcagagacaacuggaagggcagcaacagacccaucguggacaucaacaucaaggacuacagcaucgugagcagcuacgugugcagcggccuggugggcgacacccccagaaagaacgacagcagcagcagcagccacugccuggaccccaacaacgaggagggcggccacggcgugaagggcugggccuucgacgacggcaacgacguguggaugggcagaaccaucagcgagaagcugagaagcggcuacgagaccuucaaggugaucgagggcuggagcaaccccaacagcaagcugcagaucaacagacaggugaucguggacagaggcaacagaagcggcuacagcggcaucuucagcguggagggcaagagcugcaucaacagaugcuucuacguggagcugaucagaggcagaaaggaggagaccgaggugcuguggaccagcaacagcaucgugguguucugcggcaccagcggcaccuacggcaccggcagcuggcccgacggcgccgacaucaaccugaugcccaucuga

SEQ ID NO: 186160 - RNA, 1410 nt, Artificial Sequence; identical to SEQ ID NO: 174774
  derived and/or modified CDS sequence (opt4) from neuraminidase__InfluenzaA__BAF47988

SEQ ID NO: 186161 - RNA, 1410 nt, Artificial Sequence; identical to SEQ ID NO: 174774
  derived and/or modified CDS sequence (opt4) from neuraminidase__InfluenzaA__BAF47989

SEQ ID NO: 186162 - RNA, 1410 nt, Artificial Sequence
  derived and/or modified CDS sequence (opt4) from neuraminidase__InfluenzaA__BAF47990
augaaccccaaccagaagaucaucaccaucggcagcgugagccugaccaucagcaccaucugcuucuucaugcagaucgccauccugaucaccaccgugacccugcacuucaagcaguacgaguucaacagcccccccaacaaccaggugaugcugugcgagcccaccaucaucgagagaaacaucaccgagaucguguaccugaccaacaccaccaucgagaaggagaucugccccaagcuggccgaguacagaaacuggagcaagccccagugcaacaucaccggcuucgcccccuucagcaaggacaacagcaucagacugagcgccggcggcgacaucugggugaccagagagcccuacgugagcugcgaccccgacaagugcuaccaguucgcccugggccagggcaccacccugaacaacgugcacagcaacgacaccgugcacgacagaacccccuacagaacccugcugaugaacgagcugggcgugcccuuccaccugggcaccaagcaggugugcaucgccuggagcagcagcagcugccacgacggcaaggccuggcugcacgugugcgugaccggcgacgacaagaacgccaccgccagcuucaucuacaacggcagacugguggacagcaucgugagcuggagcaaggagauccugagaacccaggagagcgagugcgugugcaucaacggcaccugcaccgugaucaugaccgacggcagcgccagcggcaaggccgacaccaagauccuguucaucgaggagggcaagaucgugcacaccagcacccugagcggcagcgcccagcacguggaggagugcagcugcuaccccagauaccccggcgugagaugcgugugcagagacaacuggaagggcagcaacagacccaucguggacaucaacaucaaggacuacagcaucgugagcagcuacgugugcagcggccuggugggcgacacccccagaaagaacgacagcagcagcagcagccacugccuggaccccaacaacgaggagggcggccacggcgugaagggcugggccuucgacgacggcaacgacguguggaugggcagaaccgugagcgagaagcugagaagcggcuacgagaccuucaaggugaucgagggcuggagcaaccccaacagcaagcugcagaucaacagacaggugaucguggacagaggcaacagaagcggcuacagcggcaucuucagcguggagggcaagagcugcaucaacagaugcuucuacguggagcugaucagaggcagaaaggaggagaccgaggugcuguggaccagcaacagcaucgugguguucugcggcaccagcggcaccuacggcaccggcagcuggcccgacggcgccgacaucaaccugaugcccaucuga

SEQ ID NO: 186163 - RNA, 1410 nt, Artificial Sequence
  derived and/or modified CDS sequence (opt4) from neuraminidase__InfluenzaA__BAF47991
augaaccccaaccagaagaucaucaccaucggcagcgugagccugaccaucagcaccaucugcuucuucaugcagaucgccauccugaucaccaccgugacccugcacuucaagcaguacgaguucaacagcccccccaacaaccaggugaugcugugcgagcccaccaucaucgagagaaacaucaccgagaucguguaccugaccaacaccaccaucgagaaggagaucugccccaagcuggccgaguacagaaacuggagcaagccccagugcgacaucaccggcuucgcccccuucagcaaggacaacagcaucagacugagcgccggcggcgacaucugggugaccagagagcccuacgugagcugcgaccccgacaagugcuaccaguucgcccugggccagggcaccacccugaacaacgugcacagcaacgacaucgugcacgacagaacccccuacagaacccugcugaugaacgagcugggcgugcccuuccaccugggcaccaagcaggugugcaucgccuggagcagcagcagcugccacgacggcaaggccuggcugcacgugugcgugaccggcgacgacaagaacgccaccgccagcuucaucuacaacggcagacugguggacagcaucgugagcuggagcaagaagauccugagaacccaggagagcgagugcgugugcaucaacggcaccugcaccguggugaugaccgacggcagcgccagcggcaaggccgacaccaagauccuguucaucgaggagggcaagaucgugcacaccagcacccugagcggcagcgcccagcacguggaggagugcagcugcuaccccagauaccccggcaucagaugcgugugcagagacaacuggaagggcagcaacagacccaucguggacaucaacaucaaggacuacagcaucgugagcagcuacgugugcagcggccuggugggcgacacccccagaaagaacgacagcagcagcagcagccacugccuggaccccaacaacgaggagggcggccacggcgugaagggcugggccuucgacgacggcaacgacguguggaugggcagaaccaucagcgagaagcugagaagcggcuacgagaccuucaaggugaucgagggcuggagcaaccccaacagcaagcugcagaucaacagacaggugaucguggacagaggcaacagaagcggcuacagcggcaucuucagcguggagggcaagagcugcaucaacagaugcuucuacguggagcugaucagaggcagaaaggaggagaccgaggugcuguggaccagcaacagcaucgugguguucugcggcaccagcggcaccuacggcaccggcagcuggcccgacggcgccgacaucaaccugaugcccaucuga

SEQ ID NO: 186164 - RNA, 1410 nt, Artificial Sequence
  derived and/or modified CDS sequence (opt4) from neuraminidase__InfluenzaA__BAF47992
augaaccccaaccagaagaucaucaccaucggcagcgugagccugaccaucagcaccaucugcuucuucaugcagaucgccauccugaucaccaccgugacccugcacuucaagcaguacgaguucaacagcccccccaacaaccaggugaugcugugcgagcccaccaucaucgagagaaacaucaccgagaucguguaccugaccaacaccaccaucgagaaggagaucugccccaagcuggccgaguacagaaacuggagcaagccccagugcaacaucaccggcuucgcccccuucagcaaggacaacagcaucagacugagcgccggcggcgacaucugggugaccagagagcccuacgugagcugcgagcccgacaagugcuaccccuucgcccuggugcagggcaccacccugaacaacgugcacagcaacgacaccgugcacgacagaacccccuacagaacccugcugaugaacgagcugggcgugcccuuccaccugggcaccaagcaggugugcaucgccuggagcagcagcagcugccacgacggcaaggccuggcugcacgugugcgugaccggcgacgacaagaacgccaccgccagcuucaucuacaacggcagacugguggacagcaucgugagcuggagcaaggagauccugagaacccaggagagcgagugcgugugcaucaacggcaccugcaccguggugaugaccgacggcagcgccagcggcaaggccgacaccaagauccuguucaucgaggagggcaagaucgugcacaccagcacccugagcggcagcgcccagcacguggaggagugcagcugcuaccccagauaccccggcgugagaugcgugugcagagacaacuggaagggcagcaacagacccaucguggacaucaacaucaaggacuacagcaucgugagcagcuacgugugcagcggccuggugggcgacacccccagaaagaacgacagcagcagcagcggccacugccuggaccccaacaacgaggagggcggccacggcgugaagggcugggccuucgacgacggcaacgacguguggaugggcagaaccaucagcgagaagcugagaagcggcuacgagaccuucaaggugaucgagggcuggagcaaccccaacagcaagcugcagaucaacagacaggugaucguggacagaggcaacagaagcggcuacagcggcaucuucagcguggagggcaagagcugcaucaacagaugcuucuacguggagcugaucagaggcagaaaggaggagaccgaggugcuguggaccagcaacagcuucgugguguucugcggcaccagcggcaccuacggcaccggcagcuggcccgacggcgccgacaucaaccugaugcccaucuga

SEQ ID NO: 186165 - RNA, 1410 nt, Artificial Sequence; identical to SEQ ID NO: 186121
  derived and/or modified CDS sequence (opt4) from neuraminidase__InfluenzaA__BAF47993

SEQ ID NO: 186166 - RNA, 1410 nt, Artificial Sequence; identical to SEQ ID NO: 174772
  derived and/or modified CDS sequence (opt4) from neuraminidase__InfluenzaA__BAF47994

SEQ ID NO: 186167 - RNA, 1410 nt, Artificial Sequence
  derived and/or modified CDS sequence (opt4) from neuraminidase__InfluenzaA__BAF47995
augaaccccaaccagaagaucaucaccaucggcagcgugagccugaccaucagcaccaucugcuucuucaugcagaucgccauccugaucaccaccgugacccugcacuucaagcaguacgaguucaacagcccccccaacaaccaggugaugcugugcgagcccaccaucaucgagagaaacaucaccgagaucguguaccugaccaacaccaccaucgagaaggagaucugccccaagcuggccgaguacagaaacuggagcaagccccagugcaacaucaccggcuucgcccccuucagcaaggacaacagcaucagacugagcgccggcggcgacaucugggugaccagagagcccuacgugagcugcgaccccgacaagugcuaccaguucgcccugggccagggcaccacccugaacaacgugcacagcaacgacaccgugcacggcagaacccccuacagaacccugcugaugaacgagcugggcgugcccuuccaccugggcaccaagcaggugugcaucgccuggagcagcagcagcugccacgacggcaaggccuggcugcacgugugcgugaccggcgacgacaagaacgccaccgccagcuucaucuacaacggcagacugguggacagcaucgugagcuggagcaaggagauccugagaacccaggagagcgagugcgugugcaucaacggcaccugcaccguggugaugaccgacggcagcgccagcggcaaggccgacaccaagauccuguucaucgaggagggcaagaucgugcacaccagcacccugagcggcagcgcccagcacguggaggagugcagcugcuaccccagauaccccggcgugagaugcgugugcagagacaacuggaagggcagcaacagacccaucguggacaucaacaucaaggacuacagcaucgugagcagcuacgugugcagcggccuggugggcgacacccccagaaagaacgacagcagcagcagcagccacugccuggaccccaacaacgaggagggcggccacggcgugaagggcugggccuucgacgacggcaacgacguguggaugggcagaaccaucagcgagaagcugagaagcggcuacgagaccuucaaggugaucgagggcuggagcaaccccaacagcaagcugcagaucaacagacaggugaucguggacagaggcaacagaagcggcuacagcggcaucuucagcguggagggcaagagcugcaucaacagaugcuucuacguggagcugaucagaggcagaaaggaggagaccgaggugcuguggaccagcaacagcaucgugguguucugcggcaccagcggcaccuacggcaccggcagcuggcccgacggcgccgacaucaaccugaugcccaucuga

SEQ ID NO: 186168 - RNA, 1410 nt, Artificial Sequence; identical to SEQ ID NO: 186167
  derived and/or modified CDS sequence (opt4) from neuraminidase__InfluenzaA__BAF47996

SEQ ID NO: 186169 - RNA, 1410 nt, Artificial Sequence; identical to SEQ ID NO: 174774
  derived and/or modified CDS sequence (opt4) from neuraminidase__InfluenzaA__BAF47997

SEQ ID NO: 186170 - RNA, 1410 nt, Artificial Sequence
  derived and/or modified CDS sequence (opt4) from neuraminidase__InfluenzaA__BAF57504
augaaccccaaccagaagaucaucaccaucggcagcgugagccugaccaucagcaccaucugcuucuucaugcagaucgccauccugaucaccaccgugacccugcacuucaagcaguacgaguucaaccccccccccaacaaccaggugaugcugugcgagcccaccaucaucgagagaaacaucaccgagaucguguaccugaccaacaccaccaucgagaaggagaucugccccaagcuggccgaguacagaaacuggagcaagccccagugcaacaucaccggcuucgcccccuucagcaaggacaacagcaucagacugagcgccggcggcgacaucugggugaccagagagcccuacgugagcagcgaccccgacaagugcuaccaguucgcccugggccagggcaccacccugaacaacgugcacagcaacgacaccgugcacgacagaacccccuacagaacccugcugaugaaggagcugggcgugcccuuccaccugggcaccaagcaggugugcaucgccuggagcagcagcagcugccacgacggcaaggccuggcugcacgugugcgugaccggcgacgacgagaacgccaccgccagcuucaucuacaacggcagacugguggacagcguggugagcuggagcaagaagauccugagaacccaggagagcgagugcgugugcaucaacggcaccugcaccguggugaugaccgacggcagcgccagcggcaaggccgacaccaagauccuguucaucgaggagggcaagaucgugcacaccagcagccugagcggcagcgcccagcacguggaggagugcagcugcuaccccagauaccccggcgugagaugcgugugcagagacaacuggaagggcagcaacagacccaucguggacaucaacaucaaggacuacagcaucgugagcagcuacgugugcagcggccuggugggcgacacccccagaaagaacgacagcagcagcagcagccacugccuggaccccaacaacgaggagggcggccacggcgugaagggcugggccuucgacgacggcaacgacguguggaugggcagaaccaucagcgagaagcugagaagcggcuacgagaccuucaaggugaucgagggcuggagcaaccccaacagcaagcugcagaucaacagacaggugaucguggacagaggcaacagaagcggcuacagcggcaucuucagcguggagggcaagagcugcaucaacagaugcuucuacguggagcugaucagaggcagaaagcaggagaccgaggugcuguggaccagcaacagcaucgugguguucugcggcaccagcggcaccuacggcaccggcagcuggcccgacggcgccgacaucaaccugaugcccaucuga

SEQ ID NO: 186171 - RNA, 1410 nt, Artificial Sequence
  derived and/or modified CDS sequence (opt4) from neuraminidase__InfluenzaA__BAF57508
augaaccccaaccagaagaucaucaccaucggcagcgugagccugaccaucagcaccaucugcuucuucaugcagaucgccauccugaucaccacccugacccugcacuucaagcaguacgaguucaacagcccccccaacaaccaggugaugcugugcgagcccaccaucaucgagagaaacaucaccgagaucguguaccugaccaacaccaccaucgagaaggagaucugccccaagcuggccgaguacagaaacuggagcaagccccagugcaacaucaccggcuucgcccccuucagcaaggacaacagcaucagacugagcgccggcggcgacaucugggugaccagagagcccuacgugagcugcgaccccgacaagugcuaccaguucgcccugggccagggcaccacccugaacaacgugcacagcaacgacaccgugcacgacagaacccccuacagaacccugcugaugaacgagcugggcgugcccuuccaccugggcaccaagcaggugugcaucgccuggagcagcagcagcugccacgacggcaaggccuggcugcacgugugcgugaccggcgacgacgagaacgccaccgccagcuucaucuacaacggcagacugguggacagcaucgugagcuggagcaagaagauccugagaacccaggagagcgagugcgugugcaucaacggcaccugcaccguggugaugaccgacggcagcgccagcggcaaggccgacaccaagauccuguucaucgaggagggcaagaucgugcacaccagcacccugagcggcagcgcccagcacguggaggagugcagcugcuaccccagauaccccggcgugagaugcgugugcagagacaacuggaagggcagcaacagacccaucguggacaucaacaucaaggacuacagcaucgugagcagcuacgugugcagcggccuggugggcgacacccccagaaagaacgacagcagcagcagcagccacugccuggaccccaacaacgaggagggcggccacggcgugaagggcugggccuucgacgacggcaacgacguguggaugggcagaaccaucagcgagaagcugagaagcggcuacgagaccuucaaggugaucgagggcuggagcaaccccaacagcaagcugcagaucaacagacaggugaucguggacagaggcaacagaagcggcuacagcggcaucuucagcguggagggcaagagcugcaucaacagaugcuucuacguggagcugaucagaggcagaaagcaggagaccgaggugcuguggaccagcaacagcaucgugguguucugcggcaccagcggcaccuacggcaccggcagcuggcccgacggcgccgacaucaaccugaugcccaucuga

SEQ ID NO: 186172 - RNA, 1410 nt, Artificial Sequence; identical to SEQ ID NO: 175989
  derived and/or modified CDS sequence (opt4) from neuraminidase__InfluenzaA__BAF57511

SEQ ID NO: 186173 - RNA, 1410 nt, Artificial Sequence
  derived and/or modified CDS sequence (opt4) from neuraminidase__InfluenzaA__BAF57515
augaaccccaaccagagaaucaucaccaucggcagcgugagccugaccaucagcaccaucugcuucuucaugcagaucgccauccugaucaccaccgugacccugcacuucaagcaguacgaguucaacagcccccccaacaaccaggugaugcugugcgagcccaccaucaucgagagaaacaucaccgagaucguguaccugaccaacaccaccaucgagaaggagaucugccccaagcuggccgaguacagaaacuggagcaagccccagugcaacaucaccggcuucgcccccuucagcaaggacaacagcaucagacugagcgccggcggcgacaucugggugaccagagagcccuacgugagcugcgaccccgacaagugcuaccaguucgcccugggccagggcaccacccugaacaacgugcacagcaacgacaaggugcacgacagaacccccuacagaacccugcugaugaacgagcugggcgugcccuuccaccugggcaccaagcaggugugcaucgccuggagcagcagcagcugccacgacggcaaggccuggcugcacgugugcgugaccggcgacgacgagaacgccaccgccagcuucaucuacaacggcagacugguggacagcaucgugagcuggagcaagaagauccugagaacccaggagagcgagugcgugugcaucaacggcaccugcaccguggugaugaccgacggcagcgccagcggcaaggccgacaccaagauccuguucaucgaggagggcaagaucgugcacaccagcacccugagcggcagcgcccagcacguggaggagugcagcugcuaccccagauaccccggcgugagaugcgugugcagagacaacuggaagggcagcaacagacccaucguggacaucaacaucaaggacuacagcaucgugagcagcuaccugugcagcggccuggugggcgacacccccagaaagaacgacagcagcagcagcagccacugccuggaccccaacaacgaggagggcggccacggcgugaagggcugggccuucgacgacggcaacgacguguggaugggcagaaccaucagcgagaagcugagaagcggcuacgagaccuucaaggugaucgagggcuggagccaccccaacagccagcugcagaucaacagacaggugaucguggacagaggcaacagaagcggcuacagcggcaucuucagcguggagggcaagagcugcaucaacagaugcuucuacguggagcugaucagaggcagaaagcaggagaccgaggugcuguggaccagcaacagcaucgugguguucugcggcaccagcggcaccuacggcaccggcagcuggcccgacggcgccgacaucaaccugaugcccaucuga
